United States Patent Application Publication US 2014/0325702 A1 - sequence listing, part 45

SEQ ID NO: 111437 - DNA, 488 bp, Heterodera glycines
actgcttttgttagccttttgtcgctttctcgccctttttcctttctctctctcttcttctctctctcgctctcttctctctgttttccctctctctctttctccgtctctcactccttcgcttttctctttcttctttttacaacttttttctattctcttttttatttttcgtatatttctttaacatacaaattcaagtgcattaaaagaagaaaaaaagataacatcacaacccaaccacaatcacagcactaacacacgaagaaagtgagtgaattggtggtgcaaatttttcaaccgtttccttcaaattattaattcaatgaagtcattaccctaaaaagtaaattggaggaaaccacctttgagcgtgttccttcagctgacccaaacaatttataaataaagatgcgttttcttgtatttaatttttccatttattttgtccatccttaccatagcatataaaccgttaaaaccaaatg

SEQ ID NO: 111438 - DNA, 600 bp, Heterodera glycines
tgttggctgccgctgccttttctgctcatttggtccatttcgtgacgctaacgcccaacccatccaatgaaccaaacgattgcaagtgcggcatcagcgacggcggacgattgcaggttggcacttttaacggtctcgagcactcattcccgaagtgtgctggtcaataaagtgtccacttaccatgattaaattggacttgcaaaaacagggttccaagaaaaaaaataatactaccaatctgcaaaatttcataaaatttcatacatccaggtttttttaaatccgtctgtttttaaaactagaaaaaacaattcacgacaatcatgaatttttcaagttttgaaaatacaaaaatttccgaaaaaattcttgaatccatgaaattttatgaaatttttgcagacaagtagcccttttgccaaaatattttcctgcaaaattccaaatcattccgaccataatgaacaatggttaacaacaaatcacctttttcaaactccgtgaggttcttcgtcactaaattgccagtcctaaataatcatagctttttcttactgtattttctgtccatcttacagtattcccctttttaagatg

SEQ ID NO: 111439 - DNA, 197 bp, Heterodera glycines
aatggacatgggtgaaagttggcattcattgaaataaaataaattcaaattttagattaaagatgcactattttttgaatttgtcaaaggattagcgacaaattttgagaaattttttaagatggctaacgaatattcaaattatttacgtcagaaagggaattttgatttttggtgatattgataatataatcatg

SEQ ID NO: 111440 - DNA, 698 bp, Heterodera glycines
  unsure (1)..(698): unsure at all n locations
ccggacccgaattcgaacaaaaagtcgaaaattttctcatctctcacttntggttccaaaattgaccaaaaaatctaaatttggtcataaaccattggaatatcaaagaatgatcattctatacagctacgaacataaaagtgaatttcctgggaatgcaaagaaaatggtcaataaatgaattgtttcattctttcaggatttctctaatatggggtgggcgataacaatttacattttaaaaagtaaatttttaaattttgctttgaattggcatgtcgattcttttttttgcttctcttcccactctcatagctatggtcatgaccatggtcatttttgtcaaaatctttataaaagaaattttcgatccgtcatttgttgattctatcttttcacacacaatatttcatttttatatttacaaaccgatttttttttttgccttttttttcgtttgcctcagtgaaacaataaatttttgtttcgaaattccaagttcatacataaaaatataccaaattttatcgaccctcgacccttataaattatggccaacgtgcgcaagacgggaatcatttgcaccataagtattgaagaaaatgaatattcactaaggctggccaagaactgttttcccttttcagggccgcccgtttgtcgttctgtggaaatgcttgtccaaatgatcgaaaatg

SEQ ID NO: 111441 - DNA, 720 bp, Heterodera glycines
ttattttttattttagtatcaaaatattcaatttcccatttgtttaaaattgtccaacataaaattccgtcgtttagtgaatcattggaataatttttaaacatcacaaaacatttgcaattttccatttatccgattttgtaaaaataaaatgcctttctccatatattttttgctgctcatttattatattatctccaatgaaaaagtttttgctgaaaatggagaaaagaagtttctttgcaaaattaatcacatttaaattattattattttaagaaaattgtttttggatttaaatggcactgatcggaccattcggctgaaaaactgcggcaattgcaaagggttttaaggcttaaaaagccaataaataagtaattgaggtgttaattaagtctgccatgtgctacaaaagtgtgttgtccggcgaagagaatttcccgtggaaagtgtcgcgtcggtttcgcttcttttcctatttgttggataaaagcggaaaatgtggcaaaaaagttcgtattgcaatgaatggcacgcaattttcaatgggaagagcatgcttcaatatttgactttcaatttttaaaataaatatttttaaattctaaaattatgaaattggctattttttgattttgaaattcaatttccaatttcaaaattggccctacaattaaagaattcattttaaatcgctctccctcatattttcagatg

SEQ ID NO: 111442 - DNA, 1003 bp, Heterodera glycines
atttaaataaagatgaaaaagagcgggggaagcaaatccataaaaccattgaatgaatgaatgtgtgtattttaatatatggatgaatgaatgcatatgaaatagagaactctgactgaaagaaaaaagccacaaaaatttgcgacgtggaataaatgggaaagggggagggaagataatgtcgcagtaattgaatgtttaggggctggaaagcaattagttattttattaatgatggctggcgattgctgggtgtgtgactgattttctctttatctctcttctctctctacatatttgtgcagcaccgcacgacaagcagcaaaaattaaaaaaacaacgactaattaagccccagtcagtcagtaattagctaattagtgatcaattagaagcaataagtgatcaaagaaggcaaacgggaaaccttcactctttaatgcttgtaacaccctcttctgctgttgtgtgtacacagcaacaaataaaacaccaaagttccaacacagcagtgcgacgacagcagacaattcaaaattgtcgttagcaaaatgtttcttggcgaaatgcttttgaatttaaaattcttgaagttttcaaattgaaaatttcttttcctctagatttcattctcaattaaagttttcttatgtcaaattgttaaaacactaaaaacttttttgtattcagttcaaattaaaagttcctttttttatgtataaattttgaaaaataagccactttccataaaaagggaattaaatggttttacatacctagattagagtgttcgaacccgtacgttcaaacacgaaaattaaaccaacgagacattttcagccctgcctgatagattaaaaattattcttcactccatttgtaaaagtgctaaaaaagaaattaccacacaatttatacattttcaagcaccactgttttttaaagataaatttcaaatttaagtgttgtccccgaacaaatgttgaatcccattccgtcaatg

SEQ ID NO: 111443 - DNA, 1003 bp, Heterodera glycines
tttgcattgatatatgtcagtcacagtgccgccatgagaaaattggcgccattaaccacagtgaacggtgtcggtgtgaaaataaatcacagactgatcaggccagctgatcagctttagcaaagccgttcactaattttaaaatgttaattttttgaaggaatttgatgcgcggccccgctgtgtgtgtcggctaggctttttccgagcgcccggcttgtccacctgtgtgccaaccgaagcgttccctcattttgacgcctccaacgcttttcggcttgcggatgcgctccggcgtggtgaacaaccaacaacaaattcgagctgttcacgccttttcaccgatttggcacggctttacccggcactgtttctgttcaacggtcgcgaggatgccaaaaacagcagcggtggcaccataaaacaacgggacgaactgatggaaacggatcgccaactgaccatccgagtggtatcacccgcccgtggggcgaggtaagcgagagcagttgaaaattatcgaatttcgtgaaccatggatcagaatgccgggattggcagactttcccccccccccccccaaaatgtttttgtaaaaaatttaggccggcgtttattgcactaaatttaccgattagcgattgaacccttcatttatctagtaaaaatcggttttcaatttttttaaaatgcctttccttgtttcatgctttcacttaaaaatttaaaattatatttctattcagtttatagcccatttttaagctttcaaattttttaatttgttcattttttaagaatatctggctaatatcttcggcttacataaaaaatcctttcccgattagcagcacgagggcacggtcaccgcccgacgctcgggcggcaaactcgatttggatcggcacaaaaagggtggtgccgataacggagccggacgaatgtgacgcggaagaacggacaagcggatcgcggaggggacggaagaatacgtgccgcgatg

SEQ ID NO: 111444 - DNA, 194 bp, Heterodera glycines
ttttcggggcagtccccccgaaccgatgcgcccagacttttggggagaccgaatccttcgggaatagcttccctatagcctgtactttaattctgcgttggatttttgctccccataaatgtttgagtaccccaaacggacacttgaaaaaatcgatttttttgtttcataaatatttttttcagaaagtcatg

SEQ ID NO: 111445 - DNA, 363 bp, Heterodera glycines
gggtggggggggggggagagggggtaccaactaaacctagcaattaagaaatctcttattttggtgatagatttctagacaaataaaaatcaaatgaacaaatgttgttgttgttaacaaaagcatctgcggtacagtacgatcctaacaaattgtcgtgtcctcgtgtcggaaaagcctatttttaaaaaaacaaaacgccaaaaaatttattttaattctttcgtcatcttcccatcaattttaattaagaaaatgaaaacaaaagtacaatgaaaagctgaatttatcctttttcattaaagaatagcaaattttatgaattccttttaaagatctgttgatactatttcaatttttatg

SEQ ID NO: 111446 - DNA, 88 bp, Heterodera glycines
cacgcgtttttatcggatacttcaaaggtgggcaccacaatttttctctgagtccattttcctctttcaagcattcgataaacacatg

SEQ ID NO: 111447 - DNA, 94 bp, Heterodera glycines
tcgtttttccctttcccctgcaaaagagaatttttctaatcgcttttttaaaaatcttgtgtaatctgttggtcggctttttttccatcaaatg

SEQ ID NO: 111448 - DNA, 516 bp, Heterodera glycines
ttcgggtccgggattcgcaatggtcaaaatgaacgtacagattcgtactcaccgaccctgaaaactcttagaaacatattttcagtgacttttaaaaagttaaatgtttatttcaaaaaagaggtcctaccatccgtagtataccttttgattttccaaagcctaaaacatttttactttttgataaaattcaaaattgaccacttttcatatagcgcaggaaattgttataaatttcgccatttttaattctgtaaaatcttaagaaaatgaaaaattttgggtgaaatatcggattcggaattcggagaaatcaggccgggataggattacagggattgaaatcacggttttatagggatactgaattatatttttaagccgtcattcatcctaaaattttcaatctcgaatagctttactaagaactttttcatttgcggaattcattaaaaaattttcagaaaaagtattaattgacaacaattgcaattgccaaccaactttctcaaaatg

SEQ ID NO: 111449 - DNA, 543 bp, Heterodera glycines
aaaaaaaataaaaaagcaaaaaacaaaggaatcttcctaccaaataacgacagggacaagcgcccaaagtacgatttcgagaacagagaaacgagaaagccacaaaagtagaatttctagaattgagagaccagcagaaccgtgctccgttttctttgcttcaatttcaatttggtttgtagaatgagaagatacattctgagaatcgtttgagcagaagcagtgttggaaaaaaacaatagcaccacaattacaccggcaatattgaacagcggcgaaaaggtttggcgattcggtgacccacgaggaaaatctgaattttggattgaagtaaaaagcgcatctcaaaaaggcgggttctagtcggttttacgcgtcccatggcattttacgcgtcccatgacattttacgcgtcccatgacattttacgcgtcccatcacattttacgagtcccaacaacactttacgcgtcccatcacattttacgcgtcccaacaacactttacgcgtcccatgacattttgtgtccatggcggggatg

SEQ ID NO: 111450 - DNA, 1003 bp, Heterodera glycines
aagcaaatacttaaattcatcttcgtttttgagtatggatcatttgaaagcattgaattttaatggtttttgacattaaatctcaaaaattgccttatttcagacaaaatctagtttgcaaacaggtcggcatccgctaatttgttaaagtttaaagttgaaaaaatttggactgaaaactttggcttgtcagaggattttttccaccaataattttgtgtcaattacttagtgtttttcactttaaattttgttacctatatgtatgaactttcggaaaaagggcctttgggtttggggtcgtccaacgctaaaagtgctcatatgtactgtatataatgcgatgatttgattgatggttagcattttgtacaaaactcgcacaacgtcggtgattccgttcccaaacgacctttttgtttgtttttttgctttccgcatgacttttattcggcgcgcttttttcaaaatttttttgacaacacaggctgagagatccagcgctgtgcataactccctaattacagaaatccgtgatcctaatcagtagagacaaacaaatcagcaatatatatattatatatcttttttctgctaacttcctacatatgtacgaataaaaatgcaataactacgaaaaagcacccttaagaatcgacctaaattaaaaaaaacaccccttaaattggaaatttcacaaatcgaaaaaaccagtaaccccattcgtaattacccgggcctaaaaaggccgtaaaccttgatatagatacacattcattcggattagtacttttccttccatcgcaatataccggggtttttctactaaatcataccgggccgaaccggctaaaattgaaaaagcatgatattgtgttgcagagattttttttgttccacgcttttaattttggtgtcacattaatcactgcatttcttttttttagcgctcaaatactttcttttgtcgtagcacttttaaccgttgaaatatcgacaaatg

SEQ ID NO: 111451 - DNA, 217 bp, Heterodera glycines
ttatattggcaaaatgatcttaagtatatttgaaaaaaaaaaatttttttttggctacgtttttatccaaaaatctcaaacaaacaaaaaaactcaaaaaatcctcattttctatcaaaaaaaccataaaatcgggatataaatcctcacatatctgaactctctattattttatttaattgaaatggtatagattaccaaataatttaattaaatg

SEQ ID NO: 111452 - DNA, 274 bp, Heterodera glycines
tttttcaattctgaactaaaggagaaggaaggcaaaactgcaactaataaatcgaaacaataaagaattgacacaatttgaaatcagaatcactaacattagaagaacatttaaaaaaagtttttttaaaagaaagtaattagcaaatgacaatgaaaaagaatcacttatccttatcatcatacatatgtcaattaaagttcagtaattaaagcttgttgttagagtctatccacactttcatcccttcaaatcaaaagcagaaattggaatg

SEQ ID NO: 111453 - DNA, 101 bp, Heterodera glycines
tgatcatatacggccccgtctgcttctaatctctgatcacttttattctgatccttttttgtcttttgattacatgcgctttcccatatgcagatgacatg

SEQ ID NO: 111454 - DNA, 388 bp, Heterodera glycines
tgacgatgcgactgaaaaaaggaaagcgtaattaattaaggtgtcagaagaatgatgatgaaaaaagcaactcactattctctgatgagcattgttgctgaagtgcagtcaaaaggggaacaaagtgaagaaggagacagacgcttattatgtcagtaaaggacaaatgaagaatgattgtttctgcgcttaaatcgtcccttttatacaaacattttcctacccgtcaattccgtgtaaaaattctctataaaaagggatgaaatttgcgagatccactcattcttcgcatttgcgacttttactctctgctgaacaatttcttctctcgacgacactttgcgcattcaatccgagcacacttcttcacccatttgctagtcccatg

SEQ ID NO: 111455 - DNA, 192 bp, Heterodera glycines
gaaaaattttgggcatcggatttcggatttcgggaatttttgggaccttcggattccatttacaatttatgggaaaatttgtggcatcggttttcgattttcggaaatttcggggcctcgggattccaatgatcaaattatggaaaatttttggctcaggatacggaaatttgggggcctcggattccaatg

SEQ ID NO: 111456 - DNA, 254 bp, Heterodera glycines
acaccatcgacggagagttccgctgatacgttcgaccttatccgaaaaggcacaaccgcgatacgaatttctttcaacacaccagtgcctgcacgaggaatagtgctaatagcaatggcagaaatcgattcacttcttatgctggacaagaatcgttcggtcgctacagatgttcaagtataaaaagacacttctttgcttagattgttcattttacattcgctttattgaaaaactttttgcttaataaaatg

SEQ ID NO: 111457 - DNA, 53 bp, Heterodera glycines
gtgttggcactggttctgaaaatgccaatttttagttcaatccgaagaaaatg

SEQ ID NO: 111458 - DNA, 190 bp, Heterodera glycines
aatcaaaaattttggtcaagaaaaaaataaatttagtagaaaatttttaaaaatctttccattcttagtcgggatgtgatttttgatttttagcatttttgtgatgaagttctcgaaaaatgcgaaaaatatttatgtaaataaaaaatcgaaatatatttttttaactttcagatagtaaagcgacatg

SEQ ID NO: 111459 - DNA, 83 bp, Heterodera glycines
tttcttcagatggtgttcattctccacagaactgtgccctttaccagccgaatgaggggggaggaaggaccgaatttgcaatg

SEQ ID NO: 111460 - DNA, 188 bp, Heterodera glycines
  unsure (1)..(188): unsure at all n locations
taaaatacattaattttttaaaaacgactnggatacgaattnaatagacttatttgaatgctttttttattagctacttgccaaaaagggggtcatttttatgaaacgacttagtaaatgatactaattttgaaaaatataaattgttaaattattacctaatttaaattgttatttttactcagatg

SEQ ID NO: 111461 - DNA, 309 bp, Heterodera glycines
aagaaaatggaatacacccaaatgaccaacaagagagaaatgattcaaaaatttgaagcaattaaagaaaagttgagagaaaaaggaaaattcaaaacaaatacagaacaaaattgaattcaaaattggcagagttttaggtgcaagtcgccataaaatatacaaatggaaaaaagaattaaatttatataaatttaaaataaacaaaagaaaaagagtttttatgagcagaaaaagcgggaattcattgaacgaattgatgaatttaaaagtttatatggccacggaaaacagaaagaatttgtaatg

SEQ ID NO: 111462 - DNA, 92 bp, Heterodera glycines
aaaaatacggcactcaaaattggtggaccttagaaaatggaaatttacttttggcaaatttttaaatttttttttcgttttcagtggaaatg

SEQ ID NO: 111463 - DNA, 70 bp, Heterodera glycines
agtaagatatacatatcacacatttaaatggtctttaccttttgcattttttcagggggacattgtgatg

SEQ ID NO: 111464 - DNA, 94 bp, Heterodera glycines
ttgtcagattatcaaccaaaagtcctgttgggctgttcaatttcgtgcgctttacgagcggagtttgttggaacggcaaaatcggcgcagaatg

SEQ ID NO: 111465 - DNA, 640 bp, Heterodera glycines
gtcccagttgatgctggcaaatattttttataattttaatacctatttaacgggtaaaagagttatttgacattcaaaaatttgcccatttttcttgtttcaagggcgttgataaaacggcgaaaaattgggataaattagtggatggctttttgaaaaaattgaattttaggaaaataaaagcctcctagaagaggggtcagagtaaaaaaagattgggaatttcgggaaaattttttgaaaattttaagcaaaaatttcgaattttccccttttaagaggggaagagtaaaggggtgaaagaccttcgacaagaattttttgttaaaaaaacagagagttaatcaatgccaaaaacttgccgggaaattccctcaaattcggggtgttgcccaacaattttgtgcaacaacaccaaaaatgcaaaatttgagcatttttttgatgctggcaactattttttataattttaatacctattgtaacggtaaaagaattatttgacattcaaaaatttgcccatttttcgggtttcaagggcgttgatagttaattaattagtgaataattaatgggatttcttaaaaaataaaaactgtgcctgcaaattgacgagcccgtcaatgtcctgaggcagatg

SEQ ID NO: 111466 - DNA, 92 bp, Heterodera glycines
tttttaaccctgaaaaaaatcaaatcagaatctgatcaaatttgtggatgatgtcagagaatttgtgtctgaaaatgtttttgttcgagatg

SEQ ID NO: 111467 - DNA, 71 bp, Heterodera glycines
tcaaactttcatccgcaacattaaaatgagcatcaacgcttcatgaaatttttaatgccaatgcactgatg

SEQ ID NO: 111468 - DNA, 654 bp, Heterodera glycines
attaatcagcagaataattattgtattactttcccattttcccagtccatcggagcaaattaaaaatgcataaattatgtaaaaaacaatttgtggaatttgctatggcttttcgattagagtcattcattagtcactaccctttcgctaattcgcccgtccccacccataatttctatacattttgtggacattattcattccattagtgtgggcattggctgatcaaaaatgtacttttattaaatttatcttcaaaatcatataattatttctgggaagatggtgggcgatatctcctattctttcagatccccaattataatacgtagtgattgctcgagaccaataaatttgaaaccaaaatcaaaaactctagacatttctcgagacccgagactcttgtgcatccctgtaatttaaccctttttaaaaaacccaaaaacccgaagaatttctcaactcaaaagtcaaggccaaggatctttttcttaaatttttgttatttaaaaagaaattctttcaaaaaattaatttaaaaatatttctgtttttatttatttttgctttgttggtaaaaatgattttatttttaattattccaattaagagattaaagattttgcatcctaaaattacaattttctaaaaatg

SEQ ID NO: 111469 - DNA, 261 bp, Heterodera glycines
cgaatgcgtttttcaccccaaaattggaaatatatctcatatgcaatttcaaccaataaatttgaataaatttagagaaattatacccccaaattggaaaaatttatatgcatatttttcagtttttatgtgcatattttgccatttttgatgcatattttatgcgcatattttgcgattttatgtgcatatttttgccaaccctagtgatttctatgcccggattgaccggctcacacaaacaatgaaaaagcatcaatg

SEQ ID NO: 111470 - DNA, 801 bp, Heterodera glycines
taaaaataaatacatatatgtataaaataattgttttgaaaaataaaattgcgcatgaaaatcgcagcaccacggccaacaacaaaaaattagaaatattaatttaaatatttgttttcaaaataaaattgctaaaatacgcaaaaatctcacccgcccccccccagccggaaaaaatgcgtctcttcaacaacaaaaatgaaaatattaattttaaataaaatatttgttttaaatatcgtaaaaaaatagctctccaattgttgttaaaataaaatttggcataaaaatcttagccccccccctcgcaaaacagcgttccccattccttattcttcaacaacaaaattaaaaatataatcataaatacctaataataaaattcccccccccccccgcttctcccacggaaaaaagcgttcttcattcttcaacaacaacaatttaaaatatttaaaaaaataaaataaaattgcgcataaaaaagggaaaaaaaatttgtgtactcgaaaatgggaaataataataaattaaacactcctcatcatcatcatcactaacattcattcatattcattcacaaatatgcatcaaatatttatttttaggggtccgactgagtttaaatttagccggtcggtcggcggatgatgagagaataaacaaacagtccaacagagcagcagagagggggaagaagcggggggaaaagcgccaaacaattggggaaaatctacaaaattttacttttaaacatcacaattcttggccgaaaaatttttggttaagaaaaaaaatatg

SEQ ID NO: 111471 - DNA, 368 bp, Heterodera glycines
cgatttgttaacagattttgttcgaccaataaatttaagaattttgactatatttttagcagatttcattgaaaaaaattcttaattttgtgattttcggaaaagaattgattattttctagtttttatgaagaatttaacaaaaaaccacaaaaaacctcaaaatttctcaaaaaaccacaaaaaacctcaaagcctcatttgaaaaaaaacctcattgacctatcaaaaaaccacaaaatgagactaaagcctcacatctgggagccctgactgtaaatccgcttactattcatgatcggagttctcaatgaaaattttcaaaaatcaccagttggccgacgcaaaacgaagatacaattgaaatg

SEQ ID NO: 111472 - DNA, 1003 bp, Heterodera glycines
cttcgcgcccgttttttagcttgttaggcgcttcgcgcccgtttttcaatttttgttggccttggacgggcgcttcgcgcccgttttttaaatctgttgaacttatacgggcgcttagcgcccgttttttagcttgttaggcgcttcgcgcccgtttttcaatttttgttggccttggacgggcgcttcgcgcccgtttttcaaattttgttggccttggacgggcgcttcgcgcccgtttttaaactttgttgggctttgacggccgcttcgcggccgttattaaattttagaacagatacaaaagtgattagaagaggtacaacattggtcagaagaggtacaacagtgattaaaagaggtacaaaagtgattaaaagaggtacaacagtgattaaaagatgtacaaaagtgattaaaagacgtacaaaagtgaattaaaagaggtacaatagtgatcagaagaggttcaacagtgattaaaagatgtacaaaagtgattaaaagacgtacaaaagtgaattaaaagaggtacaatagtgatcagaagaggttcaacagtgattaaaattgtatgaattataaatttattaaattaaaaataaatcctccatttattaattgaaaataacgttgaaaattaataattgaatatttaataaatttaagatgaaatttacaaattcaaaaaataaataattaaattctttaatgtaaaaaatttttttttaaataatctacaacaaatcttaagattagttaaaaacattgaaaatgacgtaaaaaggcatataaaataatttacaccggccggattcgaacctgccgccccccccccccccccagaagatgactcagaatccccaatcacacagggattctgaggtcttgacgatgtcaaaagtaaaatctgatcacgtattcgtgatcagcggcccaaataacccttatttggtagagcaaaaaattgcggatttttgttgtatattatttttacaaaatg

SEQ ID NO: 111473 - DNA, 189 bp, Heterodera glycines
atttaacagtttcacttgtcgatttggcacacaaatttttgttaaaataaccattaataaaggtttgaaaataaactccgttcgaattaggttaagcaaacattaaatggtataaaaaactcaaaattagatataaaaatcattttctttcatttaatcaaaaaataaaataattttatctttgaaatg

SEQ ID NO: 111474 - DNA, 650 bp, Heterodera glycines
  unsure (1)..(650): unsure at all n locations
aatggggagacnccttcgcaagtgggaggagggtcaattgtatgctcgagactctcggggaaaagtttcttattttttatgtcggtcttgggcttttggtcacggtgttcgatactgttcgagacttatttacacaatctcagactaagtggaaaatgctttttggtacaatctgttttcactcaaaaatcctatttttcggagtcgctgatccatctttttctaatttttgagaaattgggccaaacaaagcgccccaaatggtaaaattttgctatttttgatgaaatcaagtgcttccaagtaggcggattcttcagatttgtgctgtatttgagatttgaaaaaccatgaatttgttcatttttttctcaaaaatttttcaaaaatatttccaggagccgcatctcggcaccgcctaatttttccttaaaaattaagcccgcgcggcgaaaaaatgtgaatttaagcctattatttttgtctgcatttagaaattgcatgctgaacactgcgttgtcaaagtatatagtagaaaaccaataaatcttcaattgcgaaagacgcagcagcagcagcagcggccttcaggacctgaactcctccgggagtcgggcctcccgttggagcagcagcagcatcacctgatg

SEQ ID NO: 111475 - DNA, 78 bp, Heterodera glycines
agtctgaattatttctgtactaaaacaattttggtttcaattttcaattttaattatatatttttttaattttagatg

SEQ ID NO: 111476 - DNA, 58 bp, Heterodera glycines
tattttttttcatcagcattaaaaatctaaaaaattcaggtaagcataactttggatg

SEQ ID NO: 111477 - DNA, 689 bp, Heterodera glycines
aaatgatttcttcttaagcacttcttttggcaacaattcctccatcacacgtcggcctgacttggtccgatacgagctgctcttcatcgatttgctgctaagactcctcacaaattcttttttttcacttttactcgctgattgtttttttgcacttttacttagttttttttcactttttccacggcgccaacgccgacggtgttgatgaggttcaatttctgggtttggcgacaatggagatgatgacgacgacgacagaatgccaactaataattttaaatagattaatgagcattttagtgcccaaaaagggaattcaaaaatttgtacattttagccgggccaggccgatttcgtacgaacacatgttttctgaatacaacttcttacgttatatgccaaatcatacactgttgttgtctttaatgacttattacatgatatacaaaataagcaaatttcacatcttggtctgcatttcaatcacaggtgaaaaacatgaaaatacctatgttttcatttatcgatttcagctctatttcaaggtcgacaacgttttggctgacaaatattggaataaatactaacaacttttggtccgaaaaaactttaactgcggcagcaataacaacagttgcttaatcagtcgaagcattctcaaaatttgcaaattgttctttcagatg

SEQ ID NO: 111478 - DNA, 265 bp, Heterodera glycines
atttatctgctcgctgtgcgctttgtatgcagcgtgcaatccgctatttgactgacagttacggactgagcaacattgacgagctctacgcttaccttaaggaggagataaaaaatagtccaacaggagacggccagtcattgtttccgaatccgttgcgtgcagtcgactgtgtgcatattgcaaacactgagcacagaaaccaaccagtgtacgtggaagggtcacttgatcttgtcgagggactcgagctttacacaacatg

SEQ ID NO: 111479 - DNA, 123 bp, Heterodera glycines
aaatggggatgagagggaagaggaagagaatggcagcggaaaaaaggagcgggtgatagtggaagagagggaagagaagaaaagaggagagatgagaaagaaggaggaacaacaacaataatg

SEQ ID NO: 111480 - DNA, 1003 bp, Heterodera glycines
ctctctcttgataattagagataatacggtaaacgtttttaattaatcgcgcaaattgtggttgggtgtcataaaattgattggagactaaaattgtagcagaactgcaaataaatcctaacaaatgaaaaaaggttttttaaaatgggagtaaaaattttaaaaaaatttaaaactattaaaaaaatcattaaaattacttttataatattttcgatcaattggaaatcattacaataattgaaaaaacaaaccgataataaaaaaatcggcagcaaacccaacgaactaatcaataaatgaattacttcagagattttaacatttaagtctgattttttgttaaaatgatactaaatcgacaaaagcctttgattgatcgcgaaaattatgattggtcatgtaaaagttgattgaaaataaaacaccaggagaaacgcaaccgcagcctaatataaaatcaattaatgaaaaaaggttttttaaatacataggggattatacatatttcaaaaaatcattttagtgtacacaaataatttttaaaaaattattgtacacattcaagaccattaaaaatttgctattaaaatgattttgttcaaggaacggaatgaaacgtttgatttgacttctttatttttaacattcggaatattggaataataattcaataataagaaaagagaaatcgaatttaagtgtgttgatttcgtaaatgttattgacttttgttgtttcactcataacaataataattctcttttccctctttcattctctctttgtttttgcaaatgctttcgcttcgaaaaataatccattcaaagtgtgacatacatagtcacacatcaaattagtatggttaattaggtagcaattacggctctaatgcagtttacgcgtccaatcgacttttacgcgtccaatcaatgaccatcctcagtttcttaagccataacttttttcttacttttgtcaatctaattaagagtattaaatg

SEQ ID NO: 111481 - DNA, 740 bp, Heterodera glycines
  unsure (1)..(740): unsure at all n locations
tttttggagtaaaatgggaaattttttggggatttagattttgtgaattttccttgacattcattcgacttttataatgatagcacacgcacgccaaagcgcatagcagcatatgccaacaatgcaatacgtatgcttaagccagatttcatcttgcgccagaattccagcaaagaaataaaaatctgcaaaagagaattaaccgatttcaaaaatttttctggtttagaaaataaaataaatataaaaattattgaaaaggcatttatatttttccaactgctgaaacgcagtatttgaaagaattttggcaaggaaataacagaatttttgaataaaaataatttcttttcgaaagagcagtttgggttcttaaaaaacagatccacngacaaccctaactattaattacagacattaaatgatttttacgaagctatacaaaatcaaaaagaggttgatgtcatttatattgatttttccaaagcattcgattctgtttctattgatttgttacttgcaaaaattaaaaatgctggaatagttgggaaaattttgatgtttttacgtaatttcttgttacaaagaagttttagggtaaaaattgaagaccgattactctgaaagctataatacttttacgggggtaccacgagggagcgttttgggtccgattattattcctaatatttatcaacgatttaccggtaaatatacctaaaaatgtaaaaattaaaatg

SEQ ID NO: 111482 - DNA, 482 bp, Heterodera glycines
attagtgggagtaattagaggggggggggggacattgagtgaccataagcaaatgcgtttgttctgccgtttttcattgtgtgctttcctttggcaaaatgccacaagactttcacccagattagatttacccttttgcattaaaaatcaatttgtttttaatttttcgtgctgacccgggcctaatgcccttttatcccccctccctctggccatgctcttggcactatcccactccgttccgctttgacttatccgtttaaatggcattcaacatgttttgcttctgtgcgatggattgtcgagactgactctcgaacatccctttccctccccctctcattgctaacttttggctgtcgatccgtaggactttggtcgccccttttcatcatcccgcgccattggcttcgtcttctgtcataccttcctctgtatcaccggtgcatttcccgcgcagcgacgccgccggctgcgcaatg

SEQ ID NO: 111483 - DNA, 102 bp, Heterodera glycines
ttttcccccaaaaggttgtcttcctttccttggcgagttcatggtaaaacaataatacgacgggatacggtaattaacatacggtactctttcaagaaaatg

SEQ ID NO: 111484 - DNA, 536 bp, Heterodera glycines
aagattaactcatttttccttgatttattttgttacattgcttacacatgcaaatgattgattattctatggcatttttccactttccttaggtaccacgacccggaaaatgagccgtgcgggacgaaagcgattggatttgatgcggaagcaatcgaacgattggaggcggaacagctgaaggaggcgctaatggccgaagcggaacaatttgggaacaaagacaacaaacaaaacgccaatcagatggaaatttgaatggaaattgaataaaatattttagcaacagaaatatttggtaaaaaggaagaaataggctttggcttctttgaaaaatcagaagaaatggatattaaaattaactttgataacaaacaacccgaattattaatattagcatttataaataacttttatgggttaaataattcctatttatttttatcctaatttcttctttgagcaattagtgaaattaatctcattaaacaataatatttaaaaaggaatagccgatcagaaaccaagtcaaaatg

SEQ ID NO: 111485 - DNA, 1003 bp, Heterodera glycines
aaaacggtcgacttccttcttttcatttgtcaagaattgataattttattttagtgtgcatttctagtaacaaatgttataataacataaagtgtgaagcaataagccgtgtctcaccttttttttgtcgtaacttttttcaaatgcaaccaaaaatgatcaaaatatatattcaaaatgtgcacaacagataagggaatattaatagatttatcctatctttataaagtcggaggataaagaataaaatgtgccaaaaaaaattgcagatggctgcaactcccggatcaatagtttggcaattttccggagaaaagcttaatgaaaataaacaaattttaatgagaattaacaaagaccacttttcactaaaaaggattatataagataattattgggtagtgtttaatgggattaaaaggttaaaagacagtttaatattaattccataattttaataacaaaataaccaccgatggacgatgaatcaatgtaatccaaaacaagaccaatatttttatctcttgttgtaatgctccgtagattagttttaaaatggaaaaacgtgcaaaattgaggcggttgggtaaacaatcgttatacaaaaccttataaacatataaaaatgctttattattttattttattccaatccgaaaatttttaccgaatttaaaatttctcgaggattttgtgtaaacaaacaaattaaacaatccgtttttaattaccaatacataaagcgcatttaaatctaacaaaatatttgctcataagacgtggaatttttttatttagaaaattattataaaacacttttctattttcataaatttttatgtgagtttttcaattatatttaaatataattttttttgtaatgataatttatttatttaatacattaaataaagaataattgataaaggttctttataaatttttttttaatttctaatttttattataaatgtttttaatttttatttttaggttaataatg

SEQ ID NO: 111486 - DNA, 1003 bp, Heterodera glycines
ttaaaattttgtaattattaattaattaatcataattacttttgtcctccttcccttcccttcccttctcttttctgtgtttatcctttgcgtcatttccgtttgggtttctttcttttctcagttcctttggttttcatttttccttctcctcctcctacacaataattcagtttctcgacaagtcttcagtttatttcaagaattttcaagtcaattttaagtgcgggaaaacttatttaaaaaagaatttgtgcagaaataaattctcaaaccgatgatttggaaattataacaaattgaagaaatgagtttttaataatttaattttaaataggtatacatataaataattttaatgtgaaataattaaataaattcccttttattttatttaatgataatcaactcatttttaatcatcataaatcaaatccaatccattaacattaaaccaggccaagtcatgtcatagtgacaatgtccgtcccatttcctttcctcaattcataatcataacgttcaatttgatttgttttttgcttttgtatttttacattgacgtgtcattttgtccttcttatttttgaaacgactttctgcttctttctttctcttgcctttggcattgtttaattgtctttgccaattgattggcagaccctcgaaaatgtgattttttggttttccctgaaacttccatttggcctccttaattgccggtgcctatctcacaatcaacatgagttaattaatcgtaattcgttgataatgataagcgctgtgcaattcgttatgatgcatataattcctaaattggccacagacaaattccgacgttttttttacgtcattttcatttttcttttgtacatcctttggaaatttgatagaaatattgaaccaaatgtcatattcctttttgttttcctcgccttttatttaattttccctttccttccatgttcttcaggttgttcatactcgcacaaacagcgagatg

SEQ ID NO: 111487 - DNA, 208 bp, Heterodera glycines
gcaattatgttttattatcagtaagcgttagttcttaaattttaaattttttttttctgcgcctttacttccatcagaaatgcacgcgaaaccttaacaaatatattttaagagggtatttaaacctataaataatgacaacttataatttatgcttatagaaaacaaattttcaattttatttgctgaaatatcttttgtttagatg

SEQ ID NO: 111488 - DNA, 274 bp, Heterodera glycines
attacgccataatgacatccaaaattcagcggatattctccaagtaaattttttaaataaaaattgtttaattaataaaataaaaatcgtaatttttaaattaattggcaaaagcattttcagtcgctttgtgctttttggggggttcgtgagctgtcgagtcgcgcgcatttccatcaaattttgggcgctgcccaaaatgtggtggaaaatgtaaaattatttaaattaaacattaatttaaatattaattattatgcaattttaacagatg

SEQ ID NO: 111489 - DNA, 563 bp, Heterodera glycines
aattattgttgggaatgttcatttgctcatattttaaatttcccgcgcttttaatgctgaacatcactattattgatttcagccattttccctttttgacccgtccttaaaatatcagtccttcctctcagttgtcgcctcctccacacatcattatattttgctccttgactccgccattttcattctgactttcattttcatatttatttcttgtttgtcttttattttatttcttcaataaatttgtatttaaaagtaaaagacacaacaattggcgacgcctgatcgctttccagcattgctgtgaactcacccaagtgtgatctcaaggccaccttcccctaacccataacacaaactgtgaacctcccttaaactcgccaagagatttctcagtttcaagactgattaaaaccgagtgggggttcagttttgttggttaagtgagaaggagtttctcagtattttggctgagtaaagcctcgttgtgcccaatttttctcatttaaattttcatttcattatttcatttgtctcaatcattcatcattctctaaatg

SEQ ID NO: 111490 - DNA, 279 bp, Heterodera glycines
tttttaattggataaataaaaaaattgtttaaaatgaaaataaaaatgataatcactaaaaaaattttccccaaaaccacctttccggttatatttatcatgaaaaatacgcattttaagaatgtgtttttatttggaataaattatcacaaaaccttcatttcctgttattttagcttgaaaaatacgcattttaagaatgtgtttttatttggaataaattatcacaaaagcacatttgcggttatatttatcatgaaaaatacacatttcagaatg

SEQ ID NO: 111491 - DNA, 1003 bp, Heterodera glycines
ttgtgactgttcatttgttgccgacaaagttgaagatgacgaagatggaaaaaggcgcaagaaatccataattaattttaattttaactgtggaacagaaaaaagtatttaaatttattcgggattcggcaaaaaaacttgggcttcttaggagaggaatgtatcttttttgttattttgcatttttattaataaattttggacataacgccaaataggcaaaaataggtttttcaaaatgtgtttaaggccttgggagctcagaaaaaataggcaaaaacctaaatgctgaaatctgttaataaactatgggctcgaatttccaaaaatcataaagatatacctagacatgtaaaaattataaataaaaatctgcaaaaattctgattcaatgccctaaacttggctcagacgcaactgcccctaccgtccctgcgggattcccgaaataatggaattttaaggcaaatcggaaaaaaggaatatcgtactgtttttttttgttttccccttccacgaagcaattttttaaccggcatagttaacattatcccaccttggactccttcccaacctttgttcttttagtaccctttttaattttgactaactgacattttgctgctgtaaaggctgctatttgaaatgtaaatgttcatccggttaggcaatgaatcatttatacaccaaaattttgcctttttttctcggtttttagtcattgcattaaataatatttaaacgattttacacacaataattcaatttaaaaaaatattagttaaagctaaaattttgtttaaagcttttgagtatcataacaggttttatgccgttagcttaatatatttgtataacgtcaatcccggcctgtttgttatcgtcatccccaacggccatcaaagcgaaaaaatttctcaaaatgtacaagacattagcataattatatttaactaatctttatcatttaactcagttgcacacgccgcctccagtcagcatg

SEQ ID NO: 111492 - DNA, 99 bp, Heterodera glycines; identical to SEQ ID NO: 101586

SEQ ID NO: 111493 - DNA, 398 bp, Heterodera glycines
  unsure (1)..(398): unsure at all n locations
tgaattgtgtcatttttcatagcaaatntagttaagattgggcaaagttttaacaaancaactcaaaaattatgcatttggtttttttttggtgaaaaattgctataacatgaactatttttttgcccatttgggccaatggtcttgaaaaagtagaccatattcttcaaattacaaatacaaatttgaaagcgcttaattgtgtcctattagatgtggatatgaaaattttgagaatttggatgaaattgttagaggattttgctccgtaaactaaaatttcaaacttcctcggaaggagggtgcattacgtttctccccacccccctccccgaaatttttttcaatttttaaacttgaaaattttagggaaaaaaatcagatataaattcaagatg

SEQ ID NO: 111494 - DNA, 144 bp, Heterodera glycines
attaaataaacgattgtcaatacgctaaataatgtgtgtcgtgtcgtccgttccaattccgtaaattcggacaattttacttttcatttccttttttttctttccaatttcaaaattcaaattccgccatttattcattaaatg

SEQ ID NO: 111495 - DNA, 997 bp, Heterodera glycines
ttttccaaatttctccagccagtccgacaatatcgtcgagaatttccttcccaatcccgaactttctcttcccgagaatcggggatcaaccctctttcaccctctgttgacggcttattttattctgcgaataaataaaataaaatgagacaatttggaaaatgcttaaatattcaaaatgtaaaatgtattttaattgaattttattaatcacctatttatttgtttgtctgataattctgacaaacttacagatttaaaataagaaatttgataatgcaaattataccaaattttgtgaattattttctaaattaattaaattcactttgagtcttccccctttaattcgaaaactgattttctttattttttcattcattttcagtgaaatagatgaaattttgaaaatgaatgaataagttttacaacgcctcctcactaactatatgcatattcattaatattaaattattttgcagtttttttccgtttcttttttcgtttatccaattttttggctttgaattaattaatttttttttattactattgctattaagcaacaatgccatcattgctgtcataattgacgtggttaagtggtgaataatcgatggtggctttcattcattcattcgtttaatgctaatgaaagttaaattacacatgattaaataattatgaatttgctggcatttgctatggctaataatacgtgcgtaaatgtaatgctcacaatcaggcaaatttaacataaaaattattatacaagggctggcattagggttgggggaggggaggggaggcaattaaaaagccatcgcccctcctcaataatattttaaaaaagcagctaattataagcattaaatgatatttcaaatttttcaaaatacaaaattaattcctctttttaaattttacatttattttccttcttaaaaattccctttcccaaatccctcagctttttcagaccaattaattgactatg

SEQ ID NO: 111496 - DNA, 234 bp, Heterodera glycines
aagcaaagaaaaagtgaaaccatggtaagaattgcaataggacactatgacgaacaaaataaaaaaagaattattaaaataaatgtagaaattacggagttatgaattttttaattttaaaataattaaggccgacagaacttatgttacaccctaagtatatgaaaaaaatttttacatggtgccaagaagaaaacaaacaaataaaattgatcaattaaaaattacaaaatg

SEQ ID NO: 111497 - DNA, 168 bp, Heterodera glycines
cggcatcagtcggtaatcagtcaagccctgctggcaatttcaatcaaagcttcttcctctccgcttgcttcttcattcatactcatcaggtgggtgatcacctgatcactcactgatcagttcctttttcgtttagctgtttctcttctctctctgctcttaaaaatg

SEQ ID NO: 111498 - DNA, 373 bp, Heterodera glycines
agaagttcggatggaagtctatttgcttgttgctatgcaattgtttccattgtataatatgtaatgtggttaacgggtattcattcatttaacacatacattggcatatgtcaaccatactatttgtttcaataaaatatatcgcaatattggatgacatcattttgtaaaaatgttaatttacatgctttactttgtttgccttaatatttacaaaaattgcggttttggcgggctaaaaattattcttttattttcaaaaatatcctaaaaataaatgagttttagaaattgcccgaatattttttttaattaaaaattttaaatactatttgtgttcgcttgtatgccaaattctgcttcaacaccaatg

SEQ ID NO: 111499 - DNA, 583 bp, Heterodera glycines
tcgctattatgcatccaaaaagtcttttcgacctctatatatctaccaaaataaaagtgagagatttgaaaacggatgaacggatggggggagattaaaatgatttgttggccaaaataatggccataacgcattaatttatgcgtatataaagagagagtaatggggaagggtgttttgctgattttgttcaatacatacataatttacacggcttccttatttttgtaaatgcatatattttttcctggattctccgtatcctaattcaaaattgattgagctgataccgtccgtatatctctaattatccccccggatgattattgttcaacctccttagatagggagggggggggggggggggggctaattagagataataggtaaagtgaattagagtgaaaaaacaatatttttacaaatctccgtctgttttattctgtttcaaaattgttttttgttctttttgctttatcatttttcctaattgtctctgttttaagttaacaacagatttttgccttttgtgacaaaaaacaatcgaaaaagggaaaagtgtgctaattgagccaccaaaatg

SEQ ID NO: 111500 - DNA, 101 bp, Heterodera glycines
ttcaaggggtctattttaatttattttattttattaatatttttttcatgtgtttctcaggtgcccatgttaaccatgtccaagtgctgatcagcggaatg

SEQ ID NO: 111501 - DNA, 777 bp, Heterodera glycines
ctatctctttttctgctcaacagtaataggaattccaaccgcattctcagaacaattacgccgatactaattgttctggaatttgtttctcggcgcgtttgtttgggagaaatttggaaaattggctatctctttttctgctcaacagtaataggaattccaaccgcattctcagaataattacgccgatactaattgttctggaatttgtttctcggcgcgtttttttgggaaaaatttggaaaattggctatctctttttctgctcaacagtaataggaattccaaccgcattctcagaataattacgccgttctggaatttgtttctcggcgcgtttgtttgggaaaaatttggaaaattggctatctctttttctgctcaacagtaattgttagagaaggaagtaattattgattaggtgtatgaccccacgccacttcgccatcttccccctcccattcccctcattcagttgttattgtgcccaccaatttgacctctccaatttatttctgcatttttatttatttatttcttcggcaaataaacttatttaattttttatcttcggacataacaaattttggcgcagtcagcaattaactgcacatcaccggcaaagcaacaaatccgagctttatctcgtgttgatattgctcgagagggaaaattagaaagctcgtgttgatttctaattttcgcagatcatcaaaaacttttctctccgtgtgagattaaagtctgccgtgtgcagtttttcttcaattggccatg

SEQ ID NO: 111502 - DNA, 87 bp, Heterodera glycines
  unsure (1)..(87): unsure at all n locations
aataaaaaaatgtttttatantcgggtattcacttttttacttctgtaaccctaactaaatacatcaaatatatttggtcaaaaatg

SEQ ID NO: 111503 - DNA, 435 bp, Heterodera glycines
gcaaaaaggagcgcaaccagcgaattctcgcacagcgctgtggaccgattgttggtttggctccggtatacaaacttttttatatttaattcaaattatgtccatctttataggtcaaagaaaagaatttagtgaatgagtgtgctaaaaaaatgccgttgaaatgtgaaaaaaagaaaaatcaatggatgaccgtgaaaatggaaaagtaatattaattaattctctgttaacttacaatttttacgaattttagccggttcctgctaaggcattgtaaattgtggcgcaaaagctttccacaccaattggatattctccagtaaaacatatttcttaattttctaattttatataaaatattagatcaaaactgttttcaagccagttttgcgatctgcgcaaccacaattatcggagtctatcaaaaaaatg

SEQ ID NO: 111504 - DNA, 838 bp, Heterodera glycines
agaatggcgcatttaatatcccataaaaagaatcattgactgaacccattaatgactcattgacacttttaccccatttttacgcctccatttcttaaatcgaattttaatttatattttcaaaaggcaatttatattatatattattattattattcatttcattttcttttatatttcatctcaattcttttcctcattttaacacattccatcacaaaattctttatttttcatttttatcaaagtaaaaattggacggaatgaatcatttctttgccaatatttagttaaacttaaatgggacgggacggagtgatcggaaactaagtaaatgatcggacaatgagagatgatgactcatcggcggatttaatgaatcattgggagcaaaaacaaagtttgatcagtcgatcgatcacctttaattttgtttacaaatgaattcacttcgtttggctttgacttttcaaatgaaaatattcgataaaagggaaaaaagcaataaatcgcaagagaaaaatgcgaacaaaaaaaaagtgagggggcaaacggcgggggggggggagccccaggggaccaacaaatggccaagcttatgctgctgatgagagagagagagagaagtgatgggatgagccgtcagcagcagccgttcactctgccgctgtttataaatacccaattagacaaacacttcaattgccccccaagggcattaattaatgaatgtttccctttcccaatttactcagctgttaatttggcattaattcgccttttaatcttccccaattattctttcattttatttagattgctcagtctccaaaatatg

SEQ ID NO: 111505 - DNA, 72 bp, Heterodera glycines
aaaagatacgattgtcgtccaccgccgccgtcgtttgcccctctcccccttgcccaaatttattgctaaatg

SEQ ID NO: 111506 - DNA, 97 bp, Heterodera glycines
attataataataatcagtttgtgtcaaataaaagtatgtgtcaaataaaagtacttttgttcaataattttttagagacaaaacagcaatatcaatg

SEQ ID NO: 111507 - DNA, 124 bp, Heterodera glycines
ccatttataccgagggttaggtaaaaaattattggattatgaagaattattgacttatcttatccaaatagaaaggatagtcaatgaaaggccaattacatacattgagaatgatgaaattatg

SEQ ID NO: 111508 - DNA, 226 bp, Heterodera glycines
aatgggctttacatttcttgaaatgtccatcgttattattattattattgttttattattattgtcatttaattgcttgcaattttgttatttttgatcaatattgcattgtcactgaaaatagttccttcgtttatttcatgcatttgtttgtttctgtcaatatttatttttgcattaattgccccattaagaaacgttgttttatttagaattttagaaaatg

SEQ ID NO: 111509 - DNA, 411 bp, Heterodera glycines
tttggccaaagcccgcccggaaataaaaagattggcgacaaactggtgccgttagcaggggctttctgcaaacgtcggcaaagcatcagtcgagagttttggtcgccgaggaccaacagcacaacgaagagaagctaacggcaaactggtgccgttagcaggggcatctgcaacgacaaatcgatcggtcaggcaaagaccagagacttcaaattcgagaagctaacggcaaactggtgccgttagcagggggcaactgcagccaccaacaatcggtctacgagcgaccaatcggtctacgagcgaccaacgagcacgaattcgagaagctaacggcaaactggtgccgttagcagggggctccagcgaaacatctcggtcgacgaacggaacaggcggaaacgaaaaatg

SEQ ID NO: 111510 - DNA, 1003 bp, Heterodera glycines
atggagggacggacgcgcgtacagttattgcggaccggcaacgccaagtggggacccattgttggggagaagtgcgacgccatcgccgctggaaaaaaagtcagacgaacggacgacgacaaattaataaccctttcaaatttagcacacttttcgaacatcaaacaatgaaaaacgaaaatggcttcgaattcccattgaaacaaacgaaagaaaggcggcaaagataatatgaaaaagtcgtttaattaattatttattatttgtttttattttgcttattttttatttttatacgattttgtccaaatacagaaaatccttcgcaataaatggacggtaaacttcattcgtatttgcaacaggaggggatgctaccaggattaagcttttcagcggaatcaaaaattattaaaaatgctttaaaattgaagtaaaaatacttagcaatttgcacttaaatcttataaaagtggttttgtgagttgttggctccgggccgtcaagtacatatctacacacatattagtacataatatacagattaatacataatatagacaatttcggacaagtaaatgagtttcttctgacatctttgccctaatttgacgtttcctctcgcccattcttcagctctgttggggcccatccgattcgttatccctgcgcatcgcggtatttccacgcatctgtcggcgccccggacccatctctgacaaagtggcgcggtctccacgctggacggtcccgtcgttcgcgctccgtctcctcctcccgctggcgttgttggaagtgctgtttaactaagcgggggaaaatcttaattactccatccatgcaatttgacccttttttcaaaacgcactttgagtcgccagctgtgtgttgttagtgtacagtgcggcagtgagatgacgccacagttttcggctcttattgtcctcctgctgcatcaccggaacacactcctgccaaaaaaataataaattcagctggaatg

SEQ ID NO: 111511 - DNA, 560 bp, Heterodera glycines
aaaaggcagttacaagccattacggcgctaataaccttatcgttcccatttttaaaaatatgcattatttatttatttaatttcgttgtaaaattgataaaattaattttgaatattgaaatgctgtttaaaggaggtcatgtgaaaagggtacagattattcagaagttttatgcgccgcaaaaaaattgttaaaaatctgatttgttcatcctaaatggcactcacaaaaaattggaaagggtaaaaaaaaattttttttcccgaatattgtcccaaatttgctgtaacaaaactataagttcaaaaattgaagacaggtaactttttttatagagcacgaaaaatgtgaaaaaaattcagctcaatgtgactttttgtgctgatcaaaaaagtcaattgtaccacaatgatcagatcactccttcagggtggtctgaaaccctaaaatggcttgaaaccgtgaaaattttgtaaaaaaaatcctagtgggttggataaaatttttcgtataagatgaatataacagacagaaagagcgcaaattttgctacaaaatg

SEQ ID NO: 111512 - DNA, 823 bp, Heterodera glycines
gggcccgcccacattttcgccggccattttggcgccaaacgttataacattttgattttgtgatcaaaattaaagaagcgtggtatgaagtgaccgtcccctcacccttgaaaaagaaaataattatattgtaattaagagaaaccgacttttgttcgtgaaaattttaattttcggggggagtttgcacgtgccccactcccctccctggataaatggcctgcagcgttgctttccgtgtcagcgacaaatttggtcaagcttgtcgtacatcggttccgccgctaaacaaattgttttgaagctttctagcgttatttgaaattttatggtattttttcaaaattttttttgtcaagaattgctttttaatgtggaggggtggttcgacaggggaaatgaagtgcacccccagcaaaccaactacggctagtgatttctgccaaccacagagagacggcaagttgggattacatcatatgaacaatttaaaattgtatcaagttgcttccgcccctttagaaggggatcgagccatttccctgtggccgtttccctatggccatttccctgtggccgtttccctataggccatttccctatggccgtttccctatcaaaaaatttacgaaaatttcaggcaaaaattgcaatatacacaggggaatttaagcggttggatgcttatcatgattacaagtaaatctagataagaagacaaaatttaagaaaaaattcataattttttctggcaattttataaaacaaaatttttaaaatgaaaattgaattttataaaaaaactgtagtctgtgcaaaaatg

SEQ ID NO: 111513 - DNA, 168 bp, Heterodera glycines
  unsure (1)..(168): unsure at all n locations
atttggatttttttntggcttaccaaaacttcatcgaacctgtgttctttctattctctttcaaatcgccccaaatttttttcacagcttaactaggccctattaagcttatttccagaaaatctcgcatgaattctcatttttaaattttttatagatttttaaatg

SEQ ID NO: 111514 - DNA, 71 bp, Heterodera glycines
tttccaacggaattggaattcttcgatgttgcgcaacgcaaaacggcgtgagaagaaggaggaggacaatg

SEQ ID NO: 111515 - DNA, 667 bp, Heterodera glycines
  unsure (1)..(667): unsure at all n locations
agtggaaaatacctgagtatagaatttattttcagaaagtgtcaacagactttntggaaaaatatatttgcaatttatcaacaattttgagaagtgagttagaaatgataaacttcacgattcaaaccagttttcggtgctctaattaaccgcgataaaaacatccgaatcaattaaaaagcttctgagataataaggtttatcataaaatttcatttaaaaataaaccctcaattattggtatgaacgatactttccaaacatgcacgcgttttgcgctcgagctatttatcatcgggcttgtcaatccaaagcgaaataacaaagattgtgttttgaacgaataaagggcataggttattttgaagaagtgtcaaagaacatgcagcaataagcctgcaaaatctaataagtggaaaatacatgagtatagaatttattttcagaaagtgtcaacagacttttggaatatatatttgcaatttatcaacaattttgagaagtgagttagaaacttcacgattcaaaccaattttcgttgctctaattaaccgcgataaaaacatccgaatcaattaaatagcttctgagataataaggtttatcataaaatttcatttaaaaataaaccctcaattattggtatgaacgatactttccaaacatg

SEQ ID NO: 111516 - DNA, 846 bp, Heterodera glycines
ttgatcagggccattttctacatatccgttgggtttcagtcggtttctgacaacaaatttccctctcctataatcacaaaacatggattttgtttcccctaatgcagcacgggctccctcccctattttgatctaataaatttgctatttttatgtattacataccaattcaacattgtattatttaaatattttttatcatgatattaaaaaatggcgctgctgattaatgagaattgataatataaacacacgaatttatgttgtatatttaaatatctattcaattttttttactaaatttaattttgtagagttcttacccaataaaaatgaatgatgaatacataaattggattttcaatatttcattcattcatttctattcttgaaactcttacaccacagagaaaatctttttttgattttaatttaaaatcctttttttgagtgtcatggaggaggaagcaacttttgttccgtctccgcccacccaattgtcagccggaccaaccttcttcagtcgggctaaggtcctccctccattttgggaaaacaaaaagcaatggcctaaacacgctttcgatttagtttatttcccaaattcggagttaaatcggccattttcgaattcccgaacccaaaactccttaaaaaagaaagttcattaaaattcgtaaacatcattatttgaaatttcccatgtgtagttttgttaatttctcgaatttgcgtaattttgtctcgtattcctacaattttttgtgtttggaatgagggaggggttctaaatgcaacaattagaaatatcaaaaaattgcttacttttctttcccatccctcatg

SEQ ID NO: 111517 - DNA, 295 bp, Heterodera glycines
tagtctggccggtttagtctggccggtttagtctgaggggacgttttagtctggcagtcgtaatatttgccgcctatcctttgccatgacacctaacaattctcattcgtaatcccaaattccctgtttattttggcctctttccataacttatccccataatgtcttctctgatatccaatttcctcaaaaattgctgccccctatgagtccgattcacccaattttatgagttagtcctaacaataaccgtttttaaagattaataaacgtattatttttctgtctcaacatg

SEQ ID NO: 111518 - DNA, 73 bp, Heterodera glycines
atttttcaaattaacaaattttcagcgaacaaacgaccaacgtccaatttctgaaacgaccattccccaaatg

SEQ ID NO: 111519 - DNA, 195 bp, Heterodera glycines
tcggagcgaaagtcgagaacgcgatgacgggtttcgaattttattgtttttaaataaacggagtgaggggacacaatcttggcaagacttggtgtatcagtccaataagtggcatgaatttttgccaaaagaagggctggcaaccggccgaattttacaagattgcccaaacttttgtaatagtcctcaaatatg

SEQ ID NO: 111520 - DNA, 83 bp, Heterodera glycines
  unsure (1)..(83): unsure at all n locations
cgatgccgttcaactacgttgtgtgagagtcttgttcnaatctaatatcgggattcactttcatatgtttccatttcagcatg

SEQ ID NO: 111521 - DNA, 61 bp, Heterodera glycines
ttagtcccccccgaaaaaataattccattcgcttttttgccggtcattccgttggccaatg

SEQ ID NO: 111522 - DNA, 298 bp, Heterodera glycines
aaattattgcgcgtaattgtcagggtttccgcgcgaatcccgaaaaactgaatctcgagtcgcaaaagccgacatttttctcgccctgaatcccacccgaccatttttctcgattcgcggcacaaccaatgcccaataatgccaaagaaaatttaaaaatgcattctgtttgtttgtgtgaggataaatagtgccgaaaaggcgatggtggcgattagctaatttatttttgatttttattatatcttacggatgtctctatttttatttatcatttatttaattttccagcaggatg

SEQ ID NO: 111523 - DNA, 485 bp, Heterodera glycines
  unsure (1)..(485): unsure at all n locations
ggaaatgtgcaagtgacacattttgggagggtaaaatgccattaaagtgtggggggnggggggggataaattgggtgggggggggcgacaagcacaggttaaggctaacaattaagcgacattctgatgagtgggggaaatccgttatcacatggattccatttttggcattcttttttcttggaagattggtttggatatcctttttggactaatgcctttctttgccaattctatgcaaacatttttaggatttctgaaatttttttttcagaaaattcaattaaaaaccgaaaatgctcaacaaagaatttaacttaaaaagcatttcctgaatgtgatttcgattgaaccaaaataaaattttatttttattgcctattttggtttttttattattttttaatcgtcgtttttttgatttaatgcccaataaaaacaaaaaaccaaataaatattttttttatttttcatagcaaattatg

SEQ ID NO: 111524 - DNA, 86 bp, Heterodera glycines
ggtaaagccaaacaacaaaaaagcataagccgtgtcccccgttcatttgtgtctttccatttcatacgggtgttctgctggtgatg

SEQ ID NO: 111525 - DNA, 190 bp, Heterodera glycines
ttttttatcaacagagatatttggggctttttttaaaaaaatcatttaattaataaatttgttttactgaactaataaaaataacttatattttacatttgcattataaaaacttctacttataagaagacattggatcgcccacactgagtttttttttggatcgcccacaattgttagctcaatcatg

SEQ ID NO: 111526 - DNA, 166 bp, Heterodera glycines
  unsure (1)..(166): unsure at all n locations
gccgtgtcggctctgcacaaacggccggtcgccagcgaacacagagcgcacagcactgtgccggacccggaactgccctcaatccgccgtccatttggcctccattggacggtcacattgttctcgtcgaagaaattatggccggcgacggacaccaancgttatg

SEQ ID NO: 111527 - DNA, 69 bp, Heterodera glycines
agatggggaagacaaggtcagcccggagaagacgggttggacgtacaactccaaccggaggccgacatg

SEQ ID NO: 111528 - DNA, 200 bp, Heterodera glycines
aaatattaaattaggtaatgacataaggccataaaaatttcatgaataattttacaaattctggggttcgaatccgcttggctgcggattattttttatgaatctaagttcatatttttttcgggaccacaattctacataattgcctttttatcctttttatgttatttgaataacttccttttaaaacacttataatg

SEQ ID NO: 111529 - DNA, 304 bp, Heterodera glycines
attaaggcaaaattgaataacaaaatccccaaataagcatatttacataaaaaacattttcaggtgctcgtggtcacttcagtggcggaagaaggttattaattagcaatcgtttttgagcgattttattttgaataattttacctttgttaggtgtgaacatccccgcttgtaatttgatcatccggtgagttttaaatgctcatacattaaatgggggggagggctggtcaacacccctgacttcgttcgtatgaggggccgaaaaagggggggggggacttcaattggttgggataaaatg

SEQ ID NO: 111530 - DNA, 668 bp, Heterodera glycines
agaaatggggagaaccagcgcgaaaaacgacaatacgacccataccaaaaatggaccgaatccccgatcaaaatcgcattcaacaaaacagctcgtaataatcttgccacatcatacagtatttgaacaaatgttttaagtgcctgaaaattatgacctctggggcaatgccatcagagctggagcaaaattaattatgtatgaaatgatgggttgaattttttgtatttgagaatgatctttttaagtttggttgatttcggagcgtttgtcggggtttcagcagagttttttatacaaaaaatggggggggggaatggaaagccgggagttatgaggaccagtgatgccgcgggttgagaaaaatttcaggttcgggtttcgggtcgggcactcgaaaaatttcgagttcgggtttcgggttgagaaaaacttcgggtctcgggtttcgggttcgggttggcatcactgatgaggacgcaaacccgaaagctcaattaagcaaaagcgacaaaaagtgccagaataaagtggacagacagtgaatgctgcgaatttttaaaattttcattttccaaaaaagcaaaaaatgcatatttttaaaattcatttctctttctataaacagggaagtcacctgtgttcggtttgaaattgttgatgaaatg

SEQ ID NO: 111531 - DNA, 156 bp, Heterodera glycines
attttttggacaaatcggaacaaaaaagccatagttttgttggtacaaaagttaacaattaaaattggcatttttccggatgttggcacttttctcccccactcactttgtctccgtcaatggcacgcagtgggcccacctccgtgttgttgaatg

SEQ ID NO: 111532 - DNA, 1003 bp, Heterodera glycines
ggatgcgcgagtgggtcaacagtgggcttcactgccgaaaaccttaagaaatttttgatttacaattacaaaaacaaccgataaaatttatggggaataaaattttttaattgatttgcatatttggtgcatattttgcgatttttgcgcatatttggtgcgtatttcacgactttatttgcatatttatgcgcatattttggacattttttgtgaatatttttgacagccctggttataatataaaatccgccgccacctttggcgtttcgtctaaaattcgccaccacgtaaaattactttcctgcaaaacattgttgaatttattgttgctacttaacaatattggtttcttgattgtgtgcttttattgttaaataacttaccagggctgccaagtgtccttatttgtaagatttgtccttatttggaggggccagctcttagaaattaaaaatgtccttttttctaagatttgtccttattttggcacgacctccttgaatttgccctttgtgtcgtctgcaacgatgatattaatctcctttccattgggaaagctgccatttctcatcatcaaaaaactgaaaaaatcagaaaacggcaaaagcagcaaaccgatcgattccgttgcaggaatttttgccaaatacttcggccccatcaactgaagatcgaaaaattcttgccgcggagggtaaggcattcaaaatcaacaaaaaaaaaaaattcctctctcacaatgagcctgggcttatcacaccgcgcagcactcccattctttcaattccgttgattgtgtgtcttcttctggactgttccgaacaatttttccggattcggcaattgcgaaaaaattcagttgtgctcgtataaaaacagcaaaaattttgacaggtagaagaattaaaatagatttctttcaggttaaacaaccaaattagattttattttattaatttcagcaggaaaaaacattttaccggaacttttgtcagaaatg

SEQ ID NO: 111533 - DNA, 244 bp, Heterodera glycines
atatttaaaaagcaattaaaaatttttagatttttattcttctccctttttgatagtgaaagcatctgagtgcctaaaataacttgtaaataaaatttggtgcgtttcagagcagtttgtgaaaaaatatttatgaattaattttgcaaaataataaataattaatgaaaaagtcagaatttcgaaaaattttaaaaacaacaagcgttggcattttttcaggttaagttagtcctttacaatg

SEQ ID NO: 111534 - DNA, 982 bp, Heterodera glycines
ttgttgaatttttctttttttaaaattaatttatgacataaatttatttttctactttgattcggtttcccctctgctgctcttttgaagaatcaattttgctgctggtagcaaattgtcgcgcagcagtgccaaaaatgggccgcactaattgcaatgctccgctgataagctcatcaaatggggcttaatttggcaatttaataattcgtaatgattaaatttaattgataataataataattattattgtataccttgtcttttttgcggttttccttcatcattagccgttgtgcaaggaattgtaaaataaattgtaaaaaaaaattttaataattttaacttcatccggaaaacctgaaaagggaatttcatacaatttatatatgggtttttcccttgttttttgagagattgtaaaagcaccaaaatttcttaggatctgccaggtaaattttgaaatttagttattttaacagatcttcataaatggccaactttttgggccgaaaatttgcttttattggtggggtgaatggcggtgcgataggcgtttccgtgtaaaatttttggaatttttaaggaattggttaagataattagcaaatgaaaaagtaaattgtatttgaatgtgcaagatcttaattagaaaatggtgtattcgaaaaatgtaatgactcaaatcacgcgggatcccatgggattggcaaaatggtagggaaggataggcgactcgggatctcattgaatttaaaagggttcgggatggatcccgagggcgggatcccgatacaatcccgcgggataccgatcccgtccggcagaattggttctttcctgacgcaaattaaaattatcaaaatttgaatggttccaagaaaatcaattaatggaaaattcgtcaatggacaatcaatcaaaataattattttctttagtttgatttttgcgaaaaaagtatttgacgaattgtccaatg

SEQ ID NO: 111535 - DNA, 557 bp, Heterodera glycines
  unsure (1)..(557): unsure at all n locations
actgtttnttgcttggcgtgntgctaatgcaaatttgttcattgatccacaaatacaacaaaaatgcatcnncaattcataagaatntaaaggtgaaagtttcttttatttctatggattatacggtaaaaacgaactcgtactgttattcgacaaaaaaatcgtcaattttctcatgtttcaaaaaaaagatgacaaaaattgttaaaaaaaatttcgtctttatcttttttgaaacaagatcaaatttttttgaaaaagcaatgaaagattaacattaatggctatcgaaagatgcaaaaaaaaatgtttgaaatttttcatgaaaaattgtttttaacccaaatttttgaatatttaaatacataattattttttaagcttctacttgtcaacaccatcattctttacattattaattcactggtttggattgtcttctttttacgatatcgggtaatcccaaagcttttttaaaaatttaaatgaatgcaaattaaaaatgcagggattttaaaaataattttaatttttaaatgcttattcagattcaaatg

SEQ ID NO: 111536 - DNA, 539 bp, Heterodera glycines
tgtttaaattctaattttgtaggtttattgaagccaataacaggggaaaataggcaaataacgctcataggacttccacttaacgtgattacgaaaccaaaaacgctgatgaaatgaatcgccggacgaaacgggtcagttgcgtctggccagttgcgtctggccaattgcgtctggccagttgcgtctggggccagttgcgtcttggccagttgcgtctggccaatttcgtctggccaattgcgtctggccggttgcgtcttagtacttatggggccggttgcgtctcaaacatttggtttggaaaaataattttttttgatttatccgaaggcgcaaatattaataattttttttcttaaaactcatacgtatgaaaaagttacaagcattttttgagaaataaaaaaaaatacggggttaactaattcggagtgaaattgtgcggggtggaaacatagtgcacccatatcagaaaattgtttttgcatttttatacatttcatttgttttaaatcttttaatatagcccgaaaatg

SEQ ID NO: 111537 - DNA, 624 bp, Heterodera glycines
aacttctaatatatatatatatatatatatttatatacataatcatatgagttggcggttttaagaaacgcccaaagtggcggttttaagaaacgcccaatgtggcggttttaagaaacgcccaaagtggcggttttaagaaacgtcccagcaccatatttaatataattttattctattttattttcagaataataaatcataaaatagctctaatttaatctatttaatttatcttggtattgagcgatagcccaagttatactctgccatttatgaaattttaaaaaatttacgaaacatttacaaaaacctataatcaaaaaatttagataaaataatttgtcactaccttttttcaaacttcaaaaaaaaaattttgaaatttaattgaataatagaaaaatcttttctccgtttaattatataaagaaacttaaatttggttgcacaaggtatgatttattattaagtaaattaaatttaaatattaattaatttaatattattatcattgatacgtttttaagttcgacctagcacccttaaaaactaaaaattttggaggaattttaattttacttaataaaagtgtaaattggatagtttcagaatcacgatatg

SEQ ID NO: 111538 - DNA, 401 bp, Heterodera glycines
aaagacataacgaatcgtcataaatatcgccaccgtattttaacactgaatttgtgttctagatttccatttaattttcttagaaaatgtttgtgttcttttatcaatttcctgagttttcataagaaatacacagtacgctctctcctaagtattttgcgttgttttgtttacattcaaaagacatatcttcattttttgattcttttttattatggtgttactcggagtcgttatgaatgttctttgttttctcgtttggcttttcctttttttggagttttctttggcgcttgaggcgcctttgtgggttattcaggtcgttgttctcttactttttgcaaaatttccgacaattttagcggaagcgggatttgtatgagcgcaattccgtatgcatg

SEQ ID NO: 111539 - DNA, 568 bp, Heterodera glycines
acagacttgaaaaattagaaaataaatcggataatttttgttactgtacagggagttctcctcgtggattcgtacgtttgttccccattttcctttccatcgcttcgttttcagctcttctctcgcggattctcccctccgacactttcaaaatttacaaaaaagggcatcgccttcgctttgacttttcgcttgtcgattttaacaacaatggcccattgccaaaatggtatgtcggaaaaatgattacttttaccacttttttatatattttttgtttgttttctaagggaacgtggcgatgtgtctttgcttttggacattttgtcaaccgatggacgaaaggcggtgctaatggacaatcggaagagggtcagcagttggatagtgattttcagcataaccaaatgggactttgaatgattacaggtttaccaagtgttgcgggaaaagaaccaaaatctgagcgatgaattggacttgctgatgacgtcggacatcaccaagttggccatggccaaacgacgccctaaaatattggctaattttgtatttcagcactcacatg

SEQ ID NO: 111540 - DNA, 598 bp, Heterodera glycines
  unsure (1)..(598): unsure at all n locations
acttggttaagaattaaaaaatntagcctattaaaatatttagaaatttttttattatattgtatattttttgaaaaatttccgatttctcagccccttttaatgcatcccgccagcccctaaaaatttatttttcagcattttttgatttttggaaattttttgaatttaattgaaattttttcgaattttccaaaatcccgcaatcccgcacgggatcccgcaaattttaaatgcgggatttgcgggattaatcccgcgggatcccgtcccgcaaagaattttgagttccagtcccgcagcgggatccgcaaatttgaaatttccggtctctagtttatatggttgccaagtgaggaaaataattgtgtaaattagtagtaatctgtgaattttgttaaaaattgcattttcgatttattgttcgggtccgtggtcagaatgattgtgtcataattggattatccaatcgcgaacagcccaaaagtcaacttcaactcgaaaataattttaattttttttctaaaaacagggaccgaccaccaccttaactattacccagatttttaattatatttttagaaacaggaggccaatg

SEQ ID NO: 111541 - DNA, 563 bp, Heterodera glycines
tttttacattatcaactctaactccttaaatacttttctaatgggatttatcccttgcccgataaatagcaaactcattctcaataataatgtcagatatttcggatcatgattgtggttttttaaatttatattcataaaaaaattctttaaaaaaagttgtgcagaaacttatgttacaccctaagtaatagaggtaatggcgtagccaaacttttggctttaatgggaggggaaggaggaaactcaactcaaaaggacgagccaaaataagaaaacccaccgggaaaaataaataaaaaaagaattgaaaaaattaacaaactcccggaaaggaaaaaaaatttgtaaaacaattgacagaagtcaattaacgcattgactaacccgaaaaggggacaaacaaatcatatgtactccatttttaaaaattatctgtattgtcgaaatcacctggcatggcgtcttctgttttttacgcctttattgctcaaatgaatttttcatgctgaatttattctgaattacttattgttaaccatatatttttttcaggaaaaatg

SEQ ID NO: 111542 - DNA, 222 bp, Heterodera glycines
ttcttttgattctagaggctcctttgtgctttttactaccaccgattttaagcatacctatgcttttaacttgcattttatcttcttttcttaaaaaaaatttttgtcacaaaaatgcttctttttttgtttttaatttgtgtgttttcccctttttattttcgaaaatttcttggttaattaactaaatctcgaaattttatattaactgtctctaatatg

SEQ ID NO: 111543 - DNA, 550 bp, Heterodera glycines
cctaaaaaattggcagtgatgagaaaaatcggcttttatatggtttgtcgcccataattttttcgaaaaaattacaattttgaagaattggatagaatacctttttttaggtttttgggtgtcgctaatcacgaatccagcctacatttcagagattcaattcgaattcggggctcgaacttcccaggactcaaactgactttatatttttaaaatattttatggttttgacggtttttaaaaaaattttcgcctaaaatttattgatttcttcgttgaaaattcttttcgcccttttttgttttattttatgttcatatttttcatttaagcattccaaaaaccgtcattttatctgcgtatttatatacttattgattgtggttttgtttctcatacaaattttacttctcatacatacgagtatcaatcatttccaagcgataaatgatgaatagggttgtaaattatatggattaaaaaacgctaaatatggacataaaatatggactaaaaaagcccgaaatatggactaaaaagctcgaaaatg

SEQ ID NO: 111544 - DNA, 568 bp, Heterodera glycines
  unsure (1)..(568): unsure at all n locations
ttagaatttgcgaatttantggtttttcatggtgttagctcccaccaaagatagtacgccaaaacgagagaaaaagaaatgcatcttgtatgttttattttgttacttttgaactaacagatagaatcaaaaaataacagatgaatcgatgcagaatttttttctctatcgatatgcaaaatttggggtggatttaacgtgtagaaaaaaagttaaacgtagcgaagtgaatgttgttttttacataattaaaaagaagagatagtacgccaaagtgagagaaattacaaagaaaaagagaaacgacgagatagtactaggcttttctctgcacagtggggcgtacccatagtgtataaaagttatcgtagaagtttcaaaccaagtcaagccccaataatcgtaaagtttggtttaattgcaattatggttattatacgaaattcctaaattaaattgtataattcgaaagcactatttgacccccaccgcattttccaattaaaacaacgactactttaatagtgtataatttttagcaaacattcaaatacttttatgaattatg

SEQ ID NO: 111545 - DNA, 97 bp, Heterodera glycines
tcagcgcctctgcagtcctcactcccgaaaggacagagaagggcacggggcaccgactacgagcagcagcacaaacaacagcgaaaggaccacaatg

SEQ ID NO: 111546 - DNA, 274 bp, Heterodera glycines
  unsure (1)..(274): unsure at all n locations
attttgcacgaatatttgtgcagaganatacgttgggattcacacaaagaagccaaaatttgtgcttaaaaataaaattgaaattgaaggaccaataatttatgcgctgagttgtttggccaatattttatatttttttcacagaggagaaattaatgcatataaattaaataatttgttctatttttctcataatttaatattgttgaatgatgagaaattgaattatgaagtgaaattggtaaatgaatcaaaattgccaattaatgaaatg

SEQ ID NO: 111547 - DNA, 169 bp, Heterodera glycines
  unsure (1)..(169): unsure at all n locations
aggggcaggaaactcgaancaacagacgcgtgtnngatgacnagaggacaatcccaccgtagccacccttctgttggaaaaagggaacttcgaacaattagcactgctaattaatcaaaggacaatcctcttttacaaacagttagctgggatacaaggccagaaaatg

SEQ ID NO: 111548 - DNA, 225 bp, Heterodera glycines
tgtgagtttgtccctgtcggcaatattagatcaatttgccttcattttgccattttaccgtgccaatttcccctctaagtgttaatctgtgtcattctgctggtgccggtgatcgccaatcgcttcttttggttcgacacccatccctcctattctgatcgccttcgggtccgtcatcgcttttgcatggaaccatcggacaaagcgccgacggcggaagcgatg

SEQ ID NO: 111549 - DNA, 305 bp, Heterodera glycines
cttggaaaagtagagaaaaatagacatagtcgaaatagtggagtagtttgtgcgaccagtgcagaaggcggagatgctagggcagcgaaaaaagacgatctctgagggaggggggggggggagtgatcagagaaaggaaggacaaaatcagcctctgatcacattgagaagagtgaatcactcactaatgagccaaagatattttggtggataagcgaatattaattagtcaattaattattaattttgctttggataattgacccatagattggtgattttgtgacctgagctgaggccaaatg

SEQ ID NO: 111550 - DNA, 623 bp, Heterodera glycines
tccccaaatgtcgggatccccaaatgtcggaatgcctaagtgtcggatccccaaaagtcgggattgtcgggtccccaaatgtcgggatccccaaaagtcgggtccccaaatgtcgcgtccccaagctacaaatccccaaaagacgcaccacgcttccataaaggaataggaaaaagtgcaatgcgatttcttaaatgagagcactcaccattatttaccaattctatactacccttattcaatgaaatttacaataaatcacctaaattcaatgcctcgatacgatcccgtatccaggcatctgcgcgccctcccatgttttctccattttgatcaatgatcggctcttcttcttcaacaattcgtcggggccaatccaagtgtttacaaaatatatgacgagttctttaaagtttttcatataggacgcattaatttaatcccaaattcccagctttttcatattgatttaccttgcaattcagcagttggttccaaagttgacatcaatgcacaaaaataattgtacacatagtgatctggcacaaatggccttgatttaaaaaaaaaataaaaattatagtctcattaaaacggaaaagggccttttttccacaaaaatg

SEQ ID NO: 111551 - DNA, 123 bp, Heterodera glycines
aagggctatcgtagataccaagattgtgcaatttggttgcgtctgagaaaagttatgagttgatttagtcaaaaatttagcaaattttgcactttttgtccatcggccaaccacgaaaaaatg

SEQ ID NO: 111552 - DNA, 179 bp, Heterodera glycines
tctcgtcgagcagttcaagtcgtttctaagcacttattatatttatgtgtttttcgtttttgaaataaaaattcatttaaattgatttgcaaatcaatgaaatccttacaaaaatttctaaaattttattgaagttttaaaagcactaattactgattaatttacagtttttgccaatg

SEQ ID NO: 111553 - DNA, 51 bp, Heterodera glycines
cgcgtccgttcctcttgcgtgatcagtcaccgacgccgcgacgcgtcaatg

SEQ ID NO: 111554 - DNA, 115 bp, Heterodera glycines
attcaaaatccaaagaattgttaagtgataaatgattacttttctgatacattgaccattccgtcatcgaatttcttcgttcaacaagcaaatttttgacaaaggcatcaatatg

SEQ ID NO: 111555 - DNA, 336 bp, Heterodera glycines
gttaacaaaaatgcaataacttcctaaaatacacccctaagaatcgaccgaaaatttttaaaatcacaccactaagaattggaaattttcttaaaatatttgaatatttatgtgcatattttggtcatttttcgtgcatatttttgcagccctgcctatgacaaatacttcgcacagtttagcagttacaaattttcctaattttatccaacgattcttttgaaaattaatgaaaatataaacatgagttttggtgacaaactctaattttggtattaaaaaagtttgttgattaaaagtgaaaataaaaacaattgggtttattgcttaattatg

SEQ ID NO: 111556 - DNA, 170 bp, Heterodera glycines
ctgtttttctcgacagttaaaaattggggcaaaagcacaataatgacaaatttcttgccattttggtgccgcgtgcaatactttttttttggcactgagtgaaattttttgtgatttttgacagctaaatacagtgcatgtaatagtgattaaaaaacaaaataaatatg

SEQ ID NO: 111557 - DNA, 1003 bp, Heterodera glycines
accaaaacctattggaccactttgaagctgccgcctgccaaatccgatttcccaaattgttgcgggtgtttttttcccgcgccgcgcagcgccgcgggaaggtcatcaatcatccacctgtcaccaaaagtgacaggtgaaggaaattcttttgccaattaattcctttttgatcccaaaccttttggggtattttctcaaatcctgagattttttatatgattttttatcctgaaattaaaactcattttgaaaatttgccaatgtgcgtttttttttttttttgcatttcctcaacgccctccctccccgcgcacgatgccgccgccgcgcaaattaatcaataatggaattgtagaagtgtaaatttaattaataattgcagcaaaataattcagataaataaattaatgaattgggcaataaaattaactatttaaatataaattgaaaatgaataataaaataggatgggaaaaaaactttcaaaagtaggtcatctgccaataaatttgattgatggtttttccattatttagcaatctgaactgactttttttttttgtttttttttcatccaaatatttcgcaatatgagaccaatatttttgaaaacctgtcaccaaaaaatgattgatggttttcttatttaaatttaaccattatttttagttttttggtcaaagtatttcgcaatagggcccctaattttgcacttgtcaccaaaaaatgattgattggtctcttatttcacaatttccccgttcatttcgccatatgcacgtgacttttttgtttttttttgttcccaatatttcgcaatctggaccaaaattaggtaacctgtcaatcaaaatattgacaggtccaattttgcacatcactcgtctcgtataaaagccgccccaaattcacccccaatcagttcaaccaaaaagttggatttttgctaaaataaaattgtgcgtaaatatttagaaattattaaatattattaaaaatg

SEQ ID NO: 111558 - DNA, 772 bp, Heterodera glycines
tcaaggcgatacactcattgtaccatcaggtgtgattatacacccaaattaaattccattaaataacataaaataatctaaatttataaaaattaatgttttaattgctttttaaatgatgtagaaattccttcatttttattaaatgtaataaataacggatttattccacagcaaaaatctatttccattaaatatctaaatgaataaaaaaaaaaaaattaaaatttataaaattaaaccattttaaattatttttttgaataatattcaattttcccgatttttagaaaaattatctataacactaattattttacaccaaaattaatttcatttaaataacctaaaaaataatcaaaatttacagtaattttttcacacctaaatttatttcgattaaataacaaaaattaaatatacaaaatttataaattttattgcatttgcattttacttttacataaacgaataatcaaatttcaaattcataaaaatatagccattttaattatttttgattaatgctgaatttacttgattttataaaagctcacagataaagggaattatcccaaaattgattttgcttttaataatatttgttaaacgtttaataatgaattgcatatatcatcagcacgtttaattattaataattacaattaaatgacttaataaaattaatttttaattttttacaaaatttaggcctaatattttttgtaaaaatgtaaaaaaaaaaaaaatttttttttgtgaattcaggatg

SEQ ID NO: 111559 - DNA, 1003 bp, Heterodera glycines
aagcaaattttatttataaaaataaaatgtagagtactaatgcattcttacaatggcgtagaaagacaattaaataaagacaaataaaagtcaaaatcacaaaaaaggaaagcttgcggcagcatattttgtggcccaacacaaatcagacatttaccgctcagttaattagacccataaaatggttaatggcattttcatacttctatcaaaacatcaattagtctttccatccaaaaaacattgaacattttaccgatttaagcacatcaaatgagccatgtgagagcatttacagcttcattagttaatttatgtacacatatatgaagaggaatgaggttttttaggtacttttttcgtgaattttttatacctatttaaataccaattttagcgttttttcttacctccttacttatgaacattttttattttctgatcgatatttaatttcccatttgaaattaatttttaaaattataattttttaatttcataaattatgttttattacagaattggagagaaatgataaaaattaacaaattgcaaattccttatttttatcagtttcttttcattcttttaatttctccttttgaacattcattccaaaaaaactattaaatattttacgaagtaataaaatggtaaaataatttttaatttataaaatatatttttaaatttccttaagaattccgctggctttgttctactgctgtggaacattgtcaatttgcttattgtttgtgaaggaaatgtgctaaaagaggtaataaattaaaaagtaacaaaaattcatcaattagcattagttacactaattaacgaatcggtgaataattcagaaagttgacaagtcttttgcaagtgccgatcttttggttgcgcatgtgaatggacagcagagttcgtggaaggtgtgcttattttgtgtattgaaagacattttaattgtttgctaaaggccaaattaaatgccaaatttgccaaaatg

SEQ ID NO: 111560 - DNA, 111 bp, Heterodera glycines
aaatagtaagttaatctaattattatgtacattgatattttttcacttcgtcctagcactttttgttctttttcttcaaattctaaaaacatgcttcacactcatcagatg

SEQ ID NO: 111561 - DNA, 280 bp, Heterodera glycines
tttaaatatctaaaaaagtcaaaagttgaataagcgtcagttcattttttctttccattccatttttgttattttcccataatttagaaaccggtttttaaattacattttgtattcactggtgtttgtacgtcgtcgtttgctcccaaaaaacatttttgataatgaaaagctttcgcaattggaggaatattttgtatttggtttaaatccattaacattgaatttactttaatttatacttacttatttgtttttttttgttcccatcttttccatg

SEQ ID NO: 111562 - DNA, 114 bp, Heterodera glycines; identical to SEQ ID NO: 103745

SEQ ID NO: 111563 - DNA, 203 bp, Heterodera glycines
  unsure (1)..(203): unsure at all n locations
attctcatttttaaattttttatagatttttaaatatttcggatttttttntggcttaccaaaacttcatcgaacctggttctttctattctctttcaaatcgccccaaattttttttacagcttaactaggccctattaagcttatttccagaaaatctcgcatgaattctcatttttaaattttttatagatttttaaatg

SEQ ID NO: 111564 - DNA, 236 bp, Heterodera glycines
gggaagcatgaaaataaaaaaatattaaacattttttttatacaaagttggacagtattcatgccaaatgagtgttagtcatgaatttaaaaaatctcaaaattttcttcagcctttacaacacatgcttattgagggtctgcgccggtcaggcactaaaaagcaagttttttattgttttaaaaaatatttggaaatgaatttaatttaaaaaacaactacaaaaatttagaatg

SEQ ID NO: 111565 - DNA, 694 bp, Heterodera glycines
taggatgtttgacgtcatccgaaaaatagtcccgtttaaaaatgtctatctttcacgtacacatatatatttttcccagattggaaaccaatgattccgttcgggtttatgtctcagcaacgcgctcataggatgtttgacgacgtccgaaaaatactcccgtttaaaatgtctatctttcacgtacacatatatatttttcccagattggaaaccaatgattccgttcgggtttatgtctcagcaacgcgctcataggatgtttgacgtcatccgaaaaatagtcccgtttaaaaatgtctatctttcacgtacacatatatatttttcccagattggaaaccaatgattccgttcgggtttatgtctcagcaacgcgctcataggatatttgacgacgtccgaaaaatactcccgtttaaaatgtctatctttcacgtacacatatatatttttcctggatttgtacctgtacctgtattccaaaaattgcctgtacctgtattttctgtacaaaagtacaggaaaatacaggttgccgaaaaatggcctgtatctgtacctggatccaggaaaaatacaggcctggatccaggtacaggccgatctctactttaaagtgtttgtttcaacatttttaattctttttaatttgctattatttatttttatttatttttaagttttcgacatg

SEQ ID NO: 111566 - DNA, 706 bp, Heterodera glycines
taattattattattttaaataataataataattaaatttaattatttacggttggaaaataattaattttaaatatttcggcattttttaaccatttttgaatttaaatttggctgcctgtttcagcgatgtcagccgcaacatcccgtgctggttggtggccaacattttgcgcgaggtgtacacgggccgcatgagttgggcgatggccgcccaccattggggccgtgagcttacggtagttgttttcgtcccgcaattacgggttacggttgatcggtatacgtatactgtatatatttgcctgtttactgtacaaaaacaagtcttattatcattttcaattaaagatttattaagtttttgagtcctgctcattttttccccataaatttttaggattttacgatttttaatttttgtagttggcgggggagtggtttaaattacgattaccgtaaccgccggtggaattttttcactcaaattttgatacaaaattctcccattttttcacagagttttgagtaccgcccaaattcggaccaaattgaccctgagcagttgcccttttcgcaagagctgtacatggaaaagcggaagctgcgcgcccaaatgctggaggcacattaattatttaatttatttaaatgtaaatttaattattttttccatttttaagaaattggaacacttttcggacatg

SEQ ID NO: 111567 - DNA, 632 bp, Heterodera glycines
  unsure (1)..(632): unsure at all n locations
cccaatcaaaaaagggaaaaaaatttgcagtcaaaaaattatcgaantttctccaatttgttttccatattccgnnaaagtatcggggtatcataatgccaaacnnaaaacgaaatcgttntaaaatattcctttctggactgacttnggtttctgnatatcgaagctgttttctacgctatttctaaaacggttataccaaacccccagatttttgaatccggttttcagaaaaaatgccttgtggtgaaaacaatatttcacatttcactccataactttgtgagttcggcacggatcgagaccgggataagaccattggaaagagcagctcgagctctacaagaacgtatggaaagaaaaaatagttatttctgggactttttcagaaatcagaattaattctccaatgtggcccaaattttaggcccccagccacagccccttgcttctcccagttttaagtcttggatttgtcaaataaattcaagacttcaaattaataatcaaaaattctcttaaaatttttttgaacccaattcaaaaaaggaaaaaaatttgcagtcaaaaaattattcgaatttctccaattttgtttccataatttccgaaagttattcggtatcataatg

SEQ ID NO: 111568 - DNA, 95 bp, Heterodera glycines
aggtcaaatcgggcgagcgcaatttgcgtcgtgcggtcgcttcaaacagtgccaagtacccagtggccgccgctgcagttggcggtgcggtgatg

SEQ ID NO: 111569 - DNA, 69 bp, Heterodera glycines
atcatttttcagaaaattcgagggcgctggcaagaagacgtgtcagccagcaccaccagcgggggaatg

SEQ ID NO: 111570 - DNA, 1003 bp, Heterodera glycines
caaatgtcgagtagccgttaataatcatcagggctgtaaaaatatgcacaaaaatggccaaaataataaaactaccgtacaccagtaagaaataacggaacgcattcacaaaaacgcacagtgctgtaggggcaaattggccataaactaccgaaaaaatttgcacaaatgcattcagaaatgcataaatggactgggcgataagtagggctgggatttttagttttttaactattttttctgcggcaagttggccactaaaataattttttgccactattttggcgtttcgtcattatttttgccactatttcgcgatttttcaaattttgtaaaggaaaattcactaattttcttcaaatataccaaataataccatatttttaaaggaaatatcgaaccaaaatgcccgcccaattcaatctaaatctgcatttattcgtgactggatcaaaaaaattgacggcgaagaaatttattccattaatggaaaaataatcttttgtcaagtttgcgaacagcaactaaagacaacgacgacttgaaagaaacaacagcagcaacatgataattttccacagattccatgctctttttgccactattttggcatttttggaaaacttcccaaaattgcaataaaacgaaaaatacacccctaagaatcgacctaaaaaatttttttctaaaagctcttccaagaagcatctcgtaaataactctaattgttaaggaacaaaatgacggacgggaaaatcgccaaaatccgtaatccgtaattacggggtccaataattccgtaatccttaattgcttgaagccctgcttattaccgtattattccaaaattatgttttttttattctctcctacataatataattcaaaatttggttaaatcgaataataaatgccggtatatttcaattttttcgtttttttaaatttcctatttatttggctatttccatctgaaatttcttaatcattcgtaccaaggatg

SEQ ID NO: 111571 - DNA, 1003 bp, Heterodera glycines
gcattttatttacataatgccataatataatcaaaatatcgttgaaaattacaaagatttctcaaatttctttgaatttttttaaaacttttctaaatgttcattttcaaggacgtccttggcatccaaggacattttttattttcaagaaagagggcccaatttcaaggacgtccttgccattcaaggacggatgggaaccctgttctaatttattaacggactgtacaaatctccaattctcactcgagcatttaagtttaagctttttgtttcttttcttatttctactgcttttgcatgcgttcgtttttccctgttttttagagtgcctatatttttttcttttgaaatttccattaaatgtaatgcattgctcgccgattgggtacattaaacaccaacagcaagaacaacaacaacagcgtcttgctctttgtgttggcattacaagcaatgaatgccatttgctatttgttgatgatttgtccgccttgacaattcgtccccgttttgccaattgtcgttccggtcgatggtttcgcgttttgccatcgtcaaatcatcacagcatcaacaagcattcatcaaaccaattttctttgctcgacaatgaaaatgaatggccatttccgacccgttttgtggacaattccttcgcaaaatatgtccaggtttttgctaccgaaacgaatacaaagcattggcttagggggacagaaattttttggcactatttacaaagagcactattttgaaaattttttcaacttttttttggtcaaatttttttttgtttaaaaagtcctgaaaccaagtacccgggtgttttaaaggtcgctgatcacgaatatgacaattatttgggcctattaagcaaacttggcgctagttataaagtgatagattttgaattttatcaaaaaccataggggggacccttttgttttgtaaattttttttggataaaaatcgtgaatatacattttattcaccataaatg

SEQ ID NO: 111572 - DNA, 254 bp, Heterodera glycines
ggtgatcaaggaaaagaattactgcgtataggccagtcaaactttgttggatgtattcttaatttatgtttaccggaacaaaatagtcttctccaacggattaacaaccgagccgatcatcatgatcaccaccaaaatctctaggtgtgccacggcaatggtttaccattctgcaagcaaatgatcagaacccggagggcttaacagtaaaacagggaatttaaatttaaaaaaattgattttaagtggcgatg

SEQ ID NO: 111573 - DNA, 126 bp, Heterodera glycines
cctacggtaaaaggggtcatttaacatatgaaaagccttcccatgttaagtcaatcgactaacagacttcaaaaacgccaattttgttattgttgcccaatttgttggagaaagaagcggacgatg

SEQ ID NO: 111574 - DNA, 464 bp, Heterodera glycines
actcctttttaagttggccacgctggacgaccgcgacaatgggcacgcaaaatggggcaagaaaaagaggcaccggcagcctttgttggacgcgtcccctccgcctggcgaaagtgcggcggacgaattacgtcgccagcggcgctaccggagtgttcggcgtggacagaacgaatgtgacgcggaggggcaatatccgccgccaccgccgcgcgggcgaccgccgccgcgtccacgccatcacatcgagtgggcggtggaaagcggcggcgccatgggggcggatgatgtagcggcattccggcacgacgtgccctttccgcctcctccgccaccgcgagtgccgccaccgccaccaccgctgccggcacgatgcgagttcaggggaatagccaaagacaaaccaacaattgtatttcagatgagcgacgccgctcgcgcgcgtccgccgcgtctgaccaatg

SEQ ID NO: 111575 - DNA, 258 bp, Heterodera glycines
ttttctacgtcccgacccgaatcccgacacatcattcctttaccgaatttttttttggaagtctcgactaaacttttttttgtaattttctcgacccgtggcaaccttgttatttgctcaattcattttttacccttctctaccagcccaatggaatttagggaatattttctattatacattccgtaaaaccaaacttttcagattatatttttaatattgaacgtccaatttaatttttttttattttaaagaatg

SEQ ID NO: 111576 - DNA, 1003 bp, Heterodera glycines
atcccccaacgcacccacaaaactgatgaatcaccactgtgacttcaaagcgatcaaaaacggaaggaatggggggggggaatgaatggaagttggaacagcaccaccaccaccaccaagtcatttttgtaaatttgcatgtttttatgcaaaacagaaaaccgacccgtccacttgttggcattctttagttcgccgggctttaaatgaaaaaaaaatcgatcgagcaaaaaatttgagtttttcgtattcgaattgtcctagccattttgggttcagtctaattgatagagacaaaacagttcagtgctgtcgaatgataccaaggagcatatattagaggtaagcagcagaagagagtaaagatggggcccaattggtcctggggcccaccgcacctgtgactgcaaagcgatcaaaaacggaaggaatgggaggggagggggggggaatgaatggaagttggaacagcaccaccaccaccaccacaaaatcaacacagcaaccaaccaacttgtttgtttgctgattgatgatgataaaaatgcatttaaggcatactaaatatgtataattatggctcggttggtgaatgatgctgatttgctgatgatgataatggttggtggtatgtataatgatgatgattcattctcagcaaatttgtacggaaatgaaaaaatggggatcggattatttataaagataatgcgatttttaataccataacttcgattgcttgaaaattttttttactaatttctaatgacttacattttaccatgaatacctcttattgttaggcatgaattttcacaaattttcaaaaattttgcggttacaatttcaaaaggatttaaatgtttgccttttggcattttgtttgaaatggccggaggcacaaaaaatttgttcttttaaattgttttacacatcagaatttttttaaaacttaaaaattatttcctttttcaatttttttagatgttaagcaccaaagatg

SEQ ID NO: 111577 - DNA, 77 bp, Heterodera glycines
  unsure (1)..(77): unsure at all n locations
aattattcttgnccttntaggaacgctttggctctgacgcgggcggcctaattttggactatcattgtgccgaaatg

SEQ ID NO: 111578 - DNA, 68 bp, Heterodera glycines; identical to SEQ ID NO: 109495

SEQ ID NO: 111579 - DNA, 968 bp, Heterodera glycines
  unsure (1)..(968): unsure at all n locations
ggtaattttattaatgaaaaaatntaatttaaaagtcaaaatttaaaaatattttaaatatttaaaattagatgaaataaaagtttctttttttatcaacagccaatgaagtgaaatattgtgtggaaaacattgaaagggacgaaaatgttttaatggagcgaattcgcgacgcaaaagattgggcactgactaatgggctgacttttccggtgccaagaagtaaactgaaatgtgacgcatgtggcaaaatcaatgaagtataatgtttaaaattaaaattaaacaaaatttaagtaaaactattgaccaacatttcgagaaaagaatgagaaaaagatatttgaaaatacagacagatccctaaaaacttggcaaatgccataggctttaattgtaatgtcatcgtggggctcgaattattttaaaaattaaatgcaattttgaatttaaataaagccaaaaggctcaattcctttacttaggccaatggtttggaaaatattgccaaaatatgacattttaaagcatacaaagttgaacaaaatcaagtaaaactgtttgtatattcttctatttttcagctgtttttagcttttgagcaattaggcacaacaattttactggggtaggccccgggtccagactcaatacagcggcctttgcaagacgactttttgaaaatgcaatccaggtgccctacccggctagaaggatccaactggatcctaaaatacactgtaagaattgggggaagaattttttaatcaacgttgagggaaacaaaaaaaattcttagaaaaagttaatgaaaatagtttcaaaattgctttaaatccgttctaactttataaatttatgaatttattaattttttaatatttattcagaacttaaaaaaattttgcctaaatttttcaaaaagaagccttcggcacagaccccccaaaagacttggcaaaaaaatg

SEQ ID NO: 111580 - DNA, 283 bp, Heterodera glycines
  unsure (1)..(283): unsure at all n locations
gaaatgttattaataatcaatttcctacgcccgnttgtcctctttatgttcgtgtggtctcaaattggcatcgaatgtggtctaattcagtcattgtcagcacattcaaagggaaagagagaatattcatttgccactgaaataaagcgtaaatttattaaataattaaaaggttattaattatgcatttaatggcaatttaatttcaagagagcgaaattagtgataaaatactcaaaaaattgaaaaagcaatgcgcaaaggtgaaaaagatgaataaatg

SEQ ID NO: 111581 - DNA, 1003 bp, Heterodera glycines
aaattcatttgagagagatcattttgtgttgcaaaagcataattaatgtccattcatttacttatataacaattttaatgcgaataaaatattcggcattcaataaattcaattctaaaaaaaacagcaaatcaggcataaatttttcagaacctcattaaggtaaaaaatcgaacaaaatttctcaatttttttttctcgttagcacatgagggaggcactgtcggaaaaatgatcaaattttacagggtcataggccaaatttgtcaaagaattttactaaaaattcaacaacccttaaaaattattgacattttgcacaaaatttcctcttcgcccgacaaaaattggggtcgtccggcgaggcatttgagaggaaaagataattaatttaattggacgatgatttgtacattattggttggtcttcactctccaaaaatggtggtcctccccgtccgtcttcgtcccctcccccattttcacatttctccgattgtgtcaattcttcatccccccgtccttcgccgtggtggtggtggtggtggtggtgcacctttccatccatctcacggcggacggaccaacaaaaatttttcgatcgattgtccttcagtattaaaattaaaattactaagaaaatatatttatttcattttaattttaaataacagatgagggcactttgaatatcaatacatagtatgagaattgtccttggatgtacttaaaatattctttaattaaattaatttttcatttttataccgaaaatttttggtttccatagcccctggatgacgcaatggatatgttgtccttgaaaaaactattcaaaaaatttaatgcataatgtatccctgtcgaattattggaaaaaaaaatttaatttaccaaattttgccccaaaatttttaatcaatttcggccaatttaatgccaatgatgtcatgttttgtctttgtttaaatgtttaatttcaaaaatttcatggattaacatg

SEQ ID NO: 111582 - DNA, 166 bp, Heterodera glycines
aaaattaacttttttgggggagtagcaaaatcggtgctgttagttttcgacagcggtgattcgacagtaaacttttgcttttaaaaaacttgtcctatatggtacgtctagtaaaattttgaaaattaaaattaattcatttgaacagtaaattcgtagaaaaatg

SEQ ID NO: 111583 - DNA, 470 bp, Heterodera glycines
taaacaattatgtttcgttgttaatttagtaaaaattatcgttttatttaacaaaaaatgaattaaacaattaagaaatatccctttattcaaaatttgttttatatttatattatttatttaatgcttttccaaaataaataaaattatttgactttattaaataaataaccaaagaatctcatgattaattaaaaaaagaatacgttaatttttaaaaatttttcccaatttctttaattttttttaaatgttaattacccctattttacctttttgtgttagcaagcagtccacccattccaaaacataaaaatgtaattgaatacctgtaataattatgatgtcatcccaaaatcatttttccattaaacgaaattttagattcaaaaacgcaaaaaaaaatttttttaatttttttgttggatgttttattaattcaacaccacacacacacccagcaaataatg

SEQ ID NO: 111584 - DNA, 381 bp, Heterodera glycines
tgagaatattgtttgatctagggaattaaggaaagcattccccccccccccccgcaagaagcgaacaatgaaacattttaagtaaaattggaagcctttttaaaaaaaagttatttaaaaattaaatttaattttacaaattttctgatagcatttatcgccgtaattggttgcctaaattcacttgaatttttaaaaattgacaaaaatacttttgttctaaattttcaaaagtttgatcataaaattgctttcattttacctggcatcgtatcaccaatcaaacttttataaaatgaatttataaatttaagtgctaaaaagacacgaaattcaatcaataaaaacaccacaaattcagatataattggcacttcgatg

SEQ ID NO: 111585 - DNA, 294 bp, Heterodera glycines
  unsure (1)..(294): unsure at all n locations
cgttttcgccaacttttcgcctcttctccaattaattntggtcatcaacacggacaatgaccgcactttggagtcaattttgtgcaacatttggctaatgatcgcgaaaaacatttgtgccatgcaattgcccgatcccgaatatgcttccagccatttgcgacaatttgtcccgtcaattctcaatgattgtccatcgcttcgtgttatcaattcccattctgatggtttcatcgccgaatttccatactatgagagtgccaaggcttcgaatggacaagcgttggccaaatg

SEQ ID NO: 111586 - DNA, 94 bp, Heterodera glycines
acaacagcaacaacagcaacaactgatcagtgctggcggcactgatcagcaggttgccgccgccgctgccgctgcggccgctaccacactgatg

SEQ ID NO: 111587 - DNA, 64 bp, Heterodera glycines
tttgagcccgggcaatttaggctaatttttgaaaattcataactcgcttcagggttggacaatg

SEQ ID NO: 111588 - DNA, 1003 bp, Heterodera glycines
cagtcccccgaaccgatgcgcccagatttatggggagaccgaatccttcgggaatagcttccctatagtctgtactttaattctgcgttggatttttgctccccataattgtttgagtaccccaaacggacacttgaaaaaatcgatttttttgttttcggggcagtccccccgaaccgatgcgcccagatttatggggagaccgaatccttcggcagtagcttccctatagcctgtactttaattctgcgttggatttttgctccccataattgtttgagtaccccaaacggacacttgaaaaaatcgatttttttgttttcggggcagtccccccgaaccgatgcgcccagatttatggggagaccgaatccttcgggagtagcttccctatagtctgtactttaattctgcgttggatttttgctccccataaatgtttgagtaccccaaacggacacttgaaaaaatcgattttttttgttttcggggcagtccccccgaaccgatgcgcccagatttatggggagaccgaatccttccggaatagcttccctatagcctgtactttaattctgcgttggatttttgctccccataattgtttgagtaccccaaacggacacttgaaaaaatcgatttttttgttttcggggcagtccccccgaaccgatgcgcccagatttatggggagaccgaatccttccggaatagcttccctatagcctgtactttaattctgcgttggatttttgctccccataaatgtttgagtaccccaaacggacacttgaaaaaatcgattttttttgttttcggggcagtccccccgaaccgatgcgcccagatttatggggagaccgatccttcgggaatagcttccctatagcctgtactttattctgcgtggatttttgctccccataaatgtttgagtaccccaaacggacacttgaaaaaatcgatttttttgtttcataaatatttttttcagaaagtcatg

SEQ ID NO: 111589 - DNA, 252 bp, Heterodera glycines
ttttaaactgatgcatttaccggccatgcaatgaaatatatttacaaccaaaaaaaggcccgaggctgaacatatcttcgatttttaaattctgatattcttcatttctttacttaactatctagcgctttataaaaccgaaatcacagctccgctaatttgggaatttttccaaaattaattgaatagcctttttcaaaaatttgggtttttaattttacttttgttgaaatttgcagagagctggcaatg

SEQ ID NO: 111590 - DNA, 106 bp, Heterodera glycines
ttaatttatgcagaagaccgacggtaccaatcgcatgggaaatccgcggaacaaacgcaaaaaataatttggcacccccggcaaaaaatgtaaaggaagcggaatg

SEQ ID NO: 111591 - DNA, 166 bp, Heterodera glycines
acttttgtttcaactttttcttttctgatccaatttgatcaattaaattgatcaaaagtaaaaataataaaatacataatttcatttttccaattggcaatagatattaataattatacaaatgaaattaggaaaaattttttagcaataaattatttatgaaatg

SEQ ID NO: 111592 - DNA, 98 bp, Heterodera glycines
  unsure (1)..(98): unsure at all n locations
cattggaattcttttataaaataanaataatataataaataaaataaattaattttatttgtttacagtttagaacaacaacaatcgtgttcattatg

SEQ ID NO: 111593 - DNA, 175 bp, Heterodera glycines
ggtaaaaggcctgtaaagtatgcgttggcatttccattccacgcttagttttgccgaattggctgccaatgttttcgtgctgaacggactgtccgcctttctcttttccgccgtcgtccccacccctgtcgtttcgtttgccgtcgtttctttgggttgtgctgcgggcatcatg

SEQ ID NO: 111594 - DNA, 745 bp, Heterodera glycines
aaaaatgaaaatgttacacaaataaacaagaatattcatttctaaatataattttatttaaaattttgctcaattttcactcaatgccgcttaaataatattttccaactaatttgttatcaaaaatatcaaaaagatatgaccacaatttaggtggaaacctgttcattgaacagacaattctttgagccaacatagttgttttttgcttaaatgaatgcgactgtgttgtgcacatttgcagccaaaaataaaaaaagcaaaacccattaacagatgattaatgggatatgcaataacattgactataaaaatgagctgaatcctaggattttttgtttttaacagaattcactggaaaaattttcaaaaaatgtgctttccttgaaaatgttttttatataattatataaatataaaattaacctcataatgctgttcgtagttataaaatccatcaaatagtaaaagacattaaaattaatttaattcccagtaaaaaacaagaaattaaaaaatgttttaaatccaattttctctgtttgagaacgagctgaccatcttaatacaaagtacactttccgacatttaaaatttattgttagcaaagattaatcaggtaaatgaatattctctgctcgcgattttaccactctgcaatgtttcattttttttagaactaaagaaaaattatgcaattatcaaatttttatcgacttccagtattttcattatctttctaatg

SEQ ID NO: 111595 - DNA, 101 bp, Heterodera glycines
tttgtttcctttgcagtgaatctccgctcgtcgttcacttcgattactccgaagacaaaggccgcgtgttcggcgcttctcacgtccctttgccgacaatg

SEQ ID NO: 111596 - DNA, 166 bp, Heterodera glycines
tcgaactcgtattcggcaagtagtttataaaaaaataaatatttattacgcatgcagtaatttattttaatttttagtctttatgtaatgctttaccaggcgaattgtaggcgcatttgacattgcatcaatttcaattttgtttttcaattttagcaaatcaatg

SEQ ID NO: 111597 - DNA, 170 bp, Heterodera glycines
gaaggaaaagtgggagggacgggggtataaaagggaaaggaaaggggggaaggagggcatttgtgagacggaaaagcgacggatacggcacaatgggcgaaccaaattcaaaaactaatatttttcacatttcaagcaattaataataaattagtgcaattaaagaaatg

SEQ ID NO: 111598 - DNA, 182 bp, Heterodera glycines
cgaaaattgccaattttcaaaaaagttcccataaatattgtagtttcgttttgggggacgaattggaagaaaatttttaaaaaattttcatttcgggggggggggaatcttgagtcccaaaattctggatttttataacattaattaaaaaattttgcaaaaatggccctcacgcgaaaatg

SEQ ID NO: 111599 - DNA, 145 bp, Heterodera glycines
aaatgaatttaataaatgatattattttctaataaattacctcctttaatattacaacagataaatttatggaaaaaaaattttttttttatataaattgaaatgaacacccaattttttataggtgctgactaagccgggaatg

SEQ ID NO: 111600 - DNA, 836 bp, Heterodera glycines
agtttatcgggggcaaagtgccaaattaaaatatgctaattgtttggcataatcccaaagtgccaaattaaaatatgctaattgtttggcataattccaaagtgccaaattaaaatatgctaattgtttggcataattccaaagtgcctaattaaaatatgctaattgtttggcataattccaaagtgccaaattaaaatatgctaattgtttggcataatcccaaagtgcctaattaaaatatgctaattgtttggcataattccaaagtgcctaattaaaatatgctaattgtttgtcataatccgaaagtgccaaattaaaatatgctaattgtttggcataattccaaagtgccaaattaaaatatgctaattgtttgtcataatccgaaagtgcttaattgaaatatgctaattgtttggcataattccaaagtgccaaattaaaatatgctaattgtttggcataatcccaaagtgcctaattaaaatatgctaattgtttggcataattccaaagtgcctaattaaaatatgctaattgtttggcataatccgaaagtgccaaattaaaatatgctaattgtttggcataatccgaaagtgcttaattcaaatatgctaattgtttggcataattccagaatgcctaattaaaatatgctaattgtttggcataatccgaaagtgcttaattcaaatatgctaattgttggcataattctaaagtgcctaattaaaatatgctaattgttggcataatccctttaaaggcatcccatcgccgccgcttttctgtgggtctccacttcgctgacatttcccgcaataatg

SEQ ID NO: 111601 - DNA, 65 bp, Heterodera glycines
tttggtaaaaaagtaaaatttgaatgtaagtttttttaaaaaaatcattaagccttacttccatg

SEQ ID NO: 111602 - DNA, 336 bp, Heterodera glycines
tggtaagttttattttccgttttaagcggtgacattcgtgatgccaatttggctttggtgaagagtattcgcaaccgtgcctcatatttcgctgagcttctccacaattcgatgaaggcacttattaattttcaattgttactttatttttcattgttagggcattggcacccgcgacaccgatttggtaaggaaatggacgaacggataagcgaatgctccaaatttatacaaattatataaaatgctggctttttgcacctttcacagattcgtctcgtcgtcacccgctccgaagtcgacttggccgacattcgccaggcatatcaaaatatg

SEQ ID NO: 111603 - DNA, 592 bp, Heterodera glycines
tttttgtattatttttaaatttaaatatccttttttctattgaagtgatttttaaaattttttttacaatttaattaaaaaattgcatcccttaaatgtgatttaaaacattgattgattttatggttgtcaaaaacgagcaaacagaaaattttcccacggtaacatttttttatttttttaaaacctttccacttcatgcaaaaaaaaaattctttttcggaatttctatgatacattaggatgaataagttcgacccaatattcacgaaaaacacacttaatttttctggttggtcataacaaaagtaaaaatgaaaaaaaataattaaaaatttgagtttttgtgatcagttggatgggaatttattaatcgtgaaaatattttttttaatattattaaataataatattactaattgcgaccaatcagtagagagaaatctgtcaatatttcactttaaaatgtgtaggttttagaagagaaaaatataagaattcgtttttgagaaataataatatcattcattatttattgcttttcatttctgtctattaaataaaatacaaattgaaatttttagaaaatatg

SEQ ID NO: 111604 - DNA, 943 bp, Heterodera glycines
tgtttggcaatgcgagacattccctgtttttctctcacctccaataaatcggtgcactttgttccgccacagactctccaaaaaattaacgctatttcgttccactgctcacccatccctggaattggtgcgtctcattgcattttcgcattttcttccaccgctgactcattcatctctcgcactttctgtcgttgtcaatgtttaacggtcccttgcccactttcaaaatgggcttctttgtgcgttgctcgtgtctatccccggaattcgtgcgttatccactatttatttctgcctttttctctttcactacaaatttcctttttctctttttcccctgtctcttttcctagcacaaaatgcattgaaaatcggtccctcgatttaagcatcgccccacccatcggtccatccctcggaattggtgcgtttctcatattcgcccttcatgcgtaacaaatgctgagcgttttttccatcgcgagacgggccctccactttcttccccttattttcccactgtctctcttttcctttctctctctctctatctctctttctctctatttggaggtgggaaagcaaagaaagagaaaactcttcggccgcctctgcccctcattttatttccccccccgcccccactcttccttctgctctcccccatcgttcactttcctcaaactgaatgaaaaggaacgaaaaaacatgtagcacgttgtgacaaatctcgcgcaactttaggcccactttctcacgaccctcgtcaagactcagggctatttcccaataaaaattcccattgctcgctgtgtgcttaaatatataaattagattgttacgtttgcatttaaaggagtcaatcagatttgaactttcaggagaattgaaattttatcttttgaaaatcgtctagacctatttaatttttcgaaaaatg

SEQ ID NO: 111605 - DNA, 78 bp, Heterodera glycines
tatgtcattcaggaatacatatgggcgcacattccatctttgcctgataaagatgacgacacccccattgcaaaaatg

SEQ ID NO: 111606 - DNA, 343 bp, Heterodera glycines
ttttactttacttattttcctttatataataattatgcataaattcttcctaaatatttttatgatgatgattcaatgtgaaagtggataaaattgtccgttttgtccacataaaatgaaaaaaaggcattcgtcatcgcttctctcccaaacactgcactgatttgtgaatatggaatggacaaaattccgatcagcagaaagataaagccaataaacgatgagtcaccgtttctattggcttttttggctttttaagcgattgcaaagccaataaacccactaatttactaatcattttacccattttcagcaaatttattcctttcccaaaatcaaaatg

SEQ ID NO: 111607 - DNA, 1003 bp, Heterodera glycines
ttgttttggcgatctgtgcaacgaaacagactatccgggccaaaactgctccaatctgatcgcagctgggccattgtgctttttcatcattttaagtgaggaaaaccaattaaagaagtggagcattaactcaaagatttttttaatcagtaaatatttttatcatttaatagaatattttatttaaatgtttttaaaataatcattaatagacaaatttacaattaattctaaacataccataattagtgaatttaaaattgaatttattctttttagtgctccttttcttctccataattttggcgattattagcagctcataaacaacaaaaatcatcacagcaattcacggaaaaggcgctgtgttactgatttttttaatatgttttttggttgcgcgggaccggaatattctcggaatccccggtcttcagagaacaaacttttcggaatgtgttttatttttataaaattaatgaaaatggcaaaaaaaggtttatgtatttcctaacttttaagcaggaaaatattattttaaaaattgggaaaacaattaattaaaatttttgcaattttcccaaaagtctgtcccgtgtaactctgttgaaatcaaatgagttggattacttttgctgaataatttactaatgtctttgttgacatataataatatgtaatttttttcttacactatgtaaatataataaatattttactttaaaaattgtttgacaattcttttgtgtgtcacttttaaatttacgctaattatccttaatttcatggcgccagccaaacaaagtgaatgaatggccgccaacactttcatttaattgttgttttattgttacttaatttcttcgatatttaatgtgtcttaaaagataataaaattataaaataattaaattttttaaattaacaatatatcaacgggaaagttgctaagcataacgtttaacataatcttaaggaaattttaaatttgtatgtgacaatg

SEQ ID NO: 111608 - DNA, 73 bp, Heterodera glycines
gactgtccatctgtgccgaaaattggaacagaaactgtgcggcgaatcaggcgaaaaaaaagtgcaggaaatg

SEQ ID NO: 111609 - DNA, 176 bp, Heterodera glycines
agaagtgagttagaaatgataaacttcacgattcaaaccaattttcgttgctctaattaaccgcgataaaaacattcgaatcaattaaatagcttctgagataataaggtttatcataaaatttcatttaaaaataaaccctcaattattggtatgaacgatactttccaaacatg

SEQ ID NO: 111610 - DNA, 67 bp, Heterodera glycines
tgtaatataatgcaattatatatttagttttatcttcagattatgtaaaattacagaaaaaggcatg

SEQ ID NO: 111611 - DNA, 430 bp, Heterodera glycines
acactgtagcaaacactaattaactaaagattcattaattgttggtattgattgaccaattagaccagtgaactattattattctgaggcctatgaccctcagctactgatcggacaagatcgatttaaatgggagcagttcgttccagccaacgatttttttttaagttttcaaacttggaatgttaaaaattataagaattaaaaaaaataattttgttgattcagcaatttttgaaaagattttttagaaaagacttagtatttcatcacaaatcttgaaataattcctaaaaaaaattataaatattttctatgattaaatttagttagaaaattttaaaaagaattctttggggggggggggggggatataagcacccgattaaataggcacctattttactaatcaccttaaatttgtcagatg

SEQ ID NO: 111612 - DNA, 129 bp, Heterodera glycines
cgaattaaaatataaccatagttgaaattaaatttagttaaatttgtatttgactacaatgagagcttgaccataatcattttaaaaataaaaaaaataaaatgttaagggttcgaacctacgagtatg

SEQ ID NO: 111613 - DNA, 1003 bp, Heterodera glycines
tcaaatatttttttaggttatacatcccattttttcatgagacaactatgaaaatttgaaaatctcacaactcgtttctgggatgtcaaattgcttaacttttgcttagaaaaagcttctcctcatcaagggctttcgaatgataccaagattatccaatttggttggcaaaaaccttcaaaaataattcccaaatatcgtgattttttaatattttggacaaaaataaataaaaatattcatgttgcacaacggactcgaaccaccaccctttgtccctttactatcttacaaaaaccactgagccacacatgcaaatcttttctggtacaggagctcatttctgggatggtgtgttaagaaaagaaatatgtctttttgaaacagtgaagtttatgaaattcacattgaaaattgaagaagaatcagaaaaacagagtaaatcatgcataaaagaaaaatgagtgaatgaaagggaggaaaagagggcgcaatttttatagttcgacgaaacagcgaagggcaaaaaattaggtaaaattgaagattaccgccaattttgattttgtatacaaatgatatatcattcgattccttatgctgagagaagtcgaatggtatgtatcatttttagagcgcggcgagaactctgagccgagctacagacccgggactgaagtgtccatttaccactgggactgaatcgtctaatgtctaaaatacgggtccactgcgtttcggcgccatcatgtttttccactataactttctgtaacttttttctttggcatccaaatcaaacattgttgatatcattcgaaagcttaatgtgtttagaagctttttctaagctattgcttcgcgatttgacattaccaaaaaatttatacatgaaaatttcaaaaagtcgaaaattccaagttttttttaataaaattttttctaggcttgaaaatcttttcgttttggcaaggctaacagagcatgctacgagcattcgatg

SEQ ID NO: 111614 - DNA, 101 bp, Heterodera glycines
aataaaaatagatttaaaactcttccatgatataattttggaaaagatccatattcagcataatgattccttttcaaaaacatattcagaactgaaaaatg

SEQ ID NO: 111615 - DNA, 923 bp, Heterodera glycines
aattttgtggtaatattaagaaaatttttttgtccaaaagtgtaaattttgctgcctttttcctttttgtgcctttttttgtcgtttttgtacatttttatgccttttttcacctttttcgtgcctattttcggtaactatttgaaaaatgttcgtgcctaaaaatccggtctcatgttataaattcgagcccaaaacttgtgggttttcgggagcattgaacacgaatcagacacccatttcgaccaaatccagaacccggaattgtaacaatttctttttgttttgcgcaaaatagcgtcaacgcaccttattttatggctttctcgcagcttgagagtttgaagtccatcgggaattacaattgtttgggttcgattcccgaatttttattctgtctcattctttccttccttttcaaattttttcaagattttgataaaattttaatcattagatttttatttgttttgtcgctaattttgtttgatactgtattttaactccgacataagtattcgatagtttatttattaattatttgatattctgtcaccggtcccttctcacctcgggggacaaaataacattttcttcaataatgagaaaataaaaaataatatccaaatatttcttctaattttcgagaatagaaatattaaaataatattcactattatttatattgataattttatgcttgctaaattgaagactttcttcagaaatagcttaacagaatccaacaattgtccatgcccatgtgtttgattttcttggcatttgcccttttcttcattttttttttgattcccatttgatcaagagtttcactcgttggctttttttagctttttattcatttttataatataacttcattttctatttttactgtaaagtaacaaattttagaagcaatg

SEQ ID NO: 111616 - DNA, 514 bp, Heterodera glycines
tgaaaaaactggtcaaaatcctagttaattttttaaaaaatctcatttttatcaattcgctagcttaaatgcaagcaaaatcatttcaatgctttttggtttaaactttttttagctctctaagattgacttatttttctgaaatagttcgcgaaaattcaaatgttttgccttatgaaaaaagtcaagaaaaggtcaaaaaaaatacaaataaattaattttgagcatttggccaagaatttgagtgccaaataagattttgtcaaaaaattccaatattttccaaaaaatctccaaaatatgtgctaaagactaccaaaaccccaaaatatgttttgagcttctcatgcgatagcacatgcgcaaaaaatatctaaaaacatataaatccgttccctgtttatgaggaaccgattattccaaaataaagacgcataattatgcacagacatggcagtgatgtgtaaagcagccaaaatttttgagaaagaaaataatgagcgcgaaaatatg

SEQ ID NO: 111617 - DNA, 384 bp, Heterodera glycines
atttcttcatttgaataacccatttttgtgagttgtggaaatgtttagtcctcaaatccaaaagatttctcttgccattcctcggatgttcgctctccttaaattgttggcattttcgaccctaaaacacattctccttccgttttacgtatttctctcttccttcgtctattccgtcccccccccccccctctccggctgaaaaatatcggaaaattgatttaagcataagctgcccctgtccacttcttctgcatatgttcgtctgtgtctgttcctttcttttgactttcactctcattttcttgcgctgttctccatttttaatatacactcaaatacccaatttagtttttcgtttatcactttaattgacttccaatg

SEQ ID NO: 111618 - DNA, 1003 bp, Heterodera glycines
gtggaaaatttcaattttatcggttgacgaccccttacttttgttttttctttttctttttgaattccgaagcccagaaattttttaaatttttaataaatccaaatcggctatatgcataaagatgccaaaggtatttttggaataatatctaaaatagaataaataaataaaataataaaattgaaaatgacatgaaaaaaatattgtttttgcacacgctcaaagcgaccaatgggtgattgagagttaacgaataaaatggaatggcaataatattgtatattacacatttggcaatttggatgaatgataaattcacaaaattgcccccattcgtttccaaaatcagttatcggatgccaaaataaaaaaaattcaataatcttggtgtcattcgatagctctaagtgtcctctattagcctccaaaattttgaaaaatttcgttaaggttcaaaaagttatgggcagaagaatgaaaaaaaaaccagattttccaacctttttgggcataaatcaatgaggtgtaccggctcaggaactaacagtcccaatgccagtcaaaataaaaacatttgaaaatttaagcattcattcgatcagccaaaaaacaccaaaatgaaatgcttaagcatttcaaatacgggagccatgaataaaaatatataaaataataaattttccagaaaaaaaagctttactaaatctcttttttagtttttctaaaaaaaaccacactttttttttgcttattgattcttgcgccgtgtcattattttatttgcatattttttgcccgttctgttggggtcatccatttatgaggtcattcatattaattggtcctcattagtgcaactaaactaatgaatgaataattttattggatttgaattggctgaattcctttaattgtattttatttattaataattaaatttattattcaatttaaaaaaagttgacaattaattggacattaaaatattttggcaaaaatg

SEQ ID NO: 111619 - DNA, 251 bp, Heterodera glycines
gcaggtccaaaattaggacatatttgtgtggaatttatccgcttattcctctcctttatgttgttattttttttcatttcatcatttttccatttggtgacgatcttcaaaaaaatattttggattttctcgtcattttggtgatttttttgcaaaaattacttagttggttttctttttaccagtttatctcggattaatttccgttatatgtatatattgtatgtcaatcttatagaaagcaacaaatg

SEQ ID NO: 111620 - DNA, 955 bp, Heterodera glycines
atagaataattccaatcgtataatgaaattcgatccgtaaatgaataaatatttttgaaacaaaacatagagatattaacaaaaacaatggattaaactcaaaattttattaagaaattcaatgtggagataaaagattttatacatatttttataaaaaataaaagttttatatgtctattttgagggtaacatttttacttatacggtatgaacactttttgatacattttgtcggaataggacaaaacgtcgccggaaagttttttggtcaataactcattttttctttctcaattaaattcaatgttttggtatttatccaaagtctgaaccttttatcgccattttggcaatttttaatatttttagctactaagtattatcgaacaataccaagatgcttaattggtttacaatgaaaaaagttatgatttaaaaaaatcgtccggcaatgtttcggatgttttgaggtgcacagaaatgttattattattaaaaaaacgtggctttacgtcgctgcttatttctttaaatgtcatttgtcttctgtttgtgtcccctccccggcggaaagcggggagggggtgaaaatattttttgttttattcaaaatggcattaaataaatgccaaacattcactcagacacattgaaactccaaagtactcagaatttgccacattggttctgtttgtgttagctcaacattgccatttaaaattcatttctttaatttaatgtcgacaatttttcttcccttttctcagcccccgaggggacgatgaataataataattagtgacaaattaattggggcagcacaatttgttggcaaaatcaccggccaaatgtgcgtataaaagtggtgatcaaatggctgtcaaatcaccaaaacattcattcattttattattttattggcccttttcctaaaattcaatttacaaaaatg

SEQ ID NO: 111621 - DNA, 149 bp, Heterodera glycines
tggatttttgtccaggaaatccaggtccaggtcaaatccgctcaaaaaatccaggtccaggcaaaacaggcttttttcaaaataccgatctctagaatttattgttttttttcaaaaatttttagagaaaaattgctgaaagtaaaatg

SEQ ID NO: 111622 - DNA, 63 bp, Heterodera glycines
tcttaaattaggtgttctatggcgtcgctttggaaagtgacgccaattaaccgatgagaaatg

SEQ ID NO: 111623 - DNA, 243 bp, Heterodera glycines
ttgcggcattacagactcggcaccgtcaccacagctcatcgagtatcaccaaattggcttttaaataccgcgccggtctgtggacaaacttttgcccggttcatcggagaaggccatcacaaaaacgtaaataaacaaaaacatttttaattatggacttaacatttaaacacttaattatggacttaacatttaataattgattttatttataaattgtgacgataagctagcacaaagatg

SEQ ID NO: 111624 - DNA, 635 bp, Heterodera glycines
tttgtggaaaagtataaatgcgtcgcttttgcccaaaaatcgaccttttgtttttcattttccaaatgttttttagcttatgtcaccgtttttgaacactcattgactaattcgttgctaattgtcgccttcggcgcattgggtaaaacgattttaatattttgctgaacataaatttctcccatttgaaaggcttttcggtgctcgtcgcttttctgtctgactttcttcgcgtgcttaccgtgcacattttctgcttccacatttacacgcacaggtcaaatttttctgtgagcacattccgccgggaaattcttggccaatgttttggcctacaattagtggacataaaactggaaattttgtcgccaaattttttcttggcatcgattgggttcgtttttccaccccaaatggcagggctcagccaaacaacagcttaactttttgttttatgccactgtcacaatttaggacccacccccctttttccaatccatgttcatccttttaatctggtatccccattttccattccaattatctcttcccaattttttctcaattgtcaggttggccaaagtctcctgcaccgcctttgtgggcctcggccgcgcctttcgcagcaaaaaatg

SEQ ID NO: 111625 - DNA, 309 bp, Heterodera glycines
ggttcttttttttttgttgcagatttgtcgtttatttggccgcccatttcactttcagtttggcctacacacttaccgtactgtgcaacattcagtacagtaactttgagagagctcaccgctattttggcacggcactgaaacattttgaagggataaaggcattgatgagaaagagcaattggccaatggtcggggccaatgggtggggggggggagacggaatccaacccaattgtaccaattaaggcgggccttcgtctcggagagtttgtcgctcggatggaattggttcttcacgaagcgatg

SEQ ID NO: 111626 - DNA, 130 bp, Heterodera glycines
aaaagtaaacacagcgaaggacaaacggggaaaaaataaataaattagcaaataattatttaatttttaggaattgcttctttatttaattgacgaaggaacggacggcggcacttcggccgggaaaatg

SEQ ID NO: 111627 - DNA, 208 bp, Heterodera glycines
attgggccgccctcaataatacccattctcaccattattataaaaacatatatttaaattttaaaatattgcttataatagtttgcaacgcgcacacacacacacacacacacatgaatatatctgacagatgatgtcgttttgtgtgtaaattttataattcgttttgaaagtaatattctgcgtccttctgatctaaatcatcatg

SEQ ID NO: 111628 - DNA, 112 bp, Heterodera glycines
ggtgattttttaaaagctccatatatattttgggtctttaagtttaattgtcatttttcttttttagcaccagttcttttgcgatcaaaccgacattctcttgcgggaaatg

SEQ ID NO: 111629 - DNA, 166 bp, Heterodera glycines
  unsure (1)..(166): unsure at all n locations
aaaatgggaaagaaaaagagaaagaaaatttggaagaaaaaagaganataattcaaaaatattataaaataaaagaaaanataaagggaaaaggaagaaaatattcacaaaaagaatggagtaaaatacntcaaaaatagcgaaaaaattggggacaaatcgaatg

SEQ ID NO: 111630 - DNA, 161 bp, Heterodera glycines
tttcttatcttcgatttcagttggcttttttatgtgcgcattggcaaagggtggcgatgcattccaacgaaaatcaggtaaaattttgtgtttgcaaacaatttcaaccccattttcataaatcaaacaaagtcccatccctttaacatttctcacagatg

SEQ ID NO: 111631 - DNA, 766 bp, Heterodera glycines
agcctggactcacctgaccacacaataaaaagtgcttaaaggtcatttaaataattttttatgtttttttactgctttttgttaggacatatgtaaaatcatagtcatatttgtaatatgcttttaggtaaaagttaaattttaatataataacgttttttattttattattttagcgtttttcgtagaatttttgggctttccaattgaaacatttaaccatcgcaaaaaggagcatgcgaaaacggagcaagtaacccttggctccggggggggggggggcggctgaagtcaaaaattcgatttttaggggtgtatttcatttttttaaaatttattttaaattgcctttgttttcaatgctttacaaaccattacaaaatgcaaattgttcaaaaatgttaaggcaacgtcaaactcataaattcaagcaaatgccgttacgccttcaatttgtatgccgaaaaaaggaaccccggcagcggcaatttgagctgttatgacggtgtaaaaaaccaatattatcaatgcccatgtaaagttggtaatgaaaaatgccgcactgaagaaaaatgggcacacgaagaatttctttgcccaataataaaggtaattaattaatcaattaatgtcaaaaggcaccgccacaaaaaaatatttgagttaaatttttaggcactaaaaaaatttgaatttgaaaaacaaaaaaaaataaggccgaaataagtgcaaattttagaaataaggacaaattagaagataaatg

SEQ ID NO: 111632 - DNA, 64 bp, Heterodera glycines
ggttggcaaatatacaaaaaacatttttgaaaattattaaatgttttagaaattgttgagaatg

SEQ ID NO: 111633 - DNA, 663 bp, Heterodera glycines
tgggaaacaagttgaatacctatttcttaatatatagccaccatgggtttcatttttcaaccccccccccccctcagaaactcagaagggggaggctttaattcaggggggggctgtattagaggaaatacggtaattagtttcccattaaaatattaagacgcaaataattaaatttttttttttgtaattttttgggctcatttttggtggaatccagttggtttggttggtgctgggacgttagtcaaaaaccatcaaaatgggcgttagtcaaaaaaccatcaaatgaaaaatttttgtcagaaatttatttataacttagcctaatatgtacgaaattttaaactcttgatatttttcgatagctctaagtgttttctattatcatgcaaaattttagaaaaattaattaagtttgaaaaaagttatgacttgagaagctcagaaaaccaagtttttttcaacatttttggccataacttttttgagacttaatgaatttttttgaaattttgtaggctaatagaaatacttagggctatcgaatgatatcaagattttaaaatttggttgcatctgagcaaagttatatcaaaaaatcttttcatttgatggttttttgactaacgcccattttgatggtttttgactaacgtcatg

SEQ ID NO: 111634 - DNA, 536 bp, Heterodera glycines
tttttttgagataatcagaaaagggcatacataaaaatataaatatatattcctaccttagatagattatggcaataaaaatattttggataacttcaatactgtaactttattatatgtattttaaatatcaactcaaagaatcaaaattatttttaaaatttaaagttggtgtcggattttccagagtcggattttccaagagccgcgttagccaagttcccatcaaaagatggtgtggcagatattttgactaatttcgaatcccggacccgaactaaaacaaaagagaggggggggggggaagagaggcttcctctcccactctttctccctcttctcctctccaatagcgtcgttttgtgttacgttgatcattggtcactaattgacctaattatgcagtttgtccctcccccatcatcaccaattgccttaacacgcatacacttattctttttcatttcttctaatttatccaatcaattttttcatttaacaattaaaaaagaaagctgtgtgctaattccctaatg

SEQ ID NO: 111635 - DNA, 689 bp, Heterodera glycines
  unsure (1)..(689): unsure at all n locations
aaaaatttgataaatcatcccaaaaaattgtaaaaatgaggtattttttaactanaattgaaaaaagcaaaaaaattgcccgtttttgngaattgagttttaagaaattggaaaacttcgataattaaattcctttttttttggtgtattaatagcaaactaacaatgaaatttgaaaattgatcaaaaatcggacagtcccccgccttttccccccttaccaacctcaacattcataatcaaattgccgtccatttcgaccaacaaatttggtgcgcccgcattcgccacacacgcagcctttcgctggacagtgaaggagggcaaaatgagacggagcctgtgccagggaaaaaatatacgaaaaattcaaaaataaataaaaatctcaatttcataaagttagccttgcctttttcaattttgtttttctcacaaaaaatgatatcaatttgaaaagcaccaatcccattcaagataaaatttgaaacaaattgcaacaaaaattgaaacagttagggagtgtgggacatcctaaaagaatgtactattttttcaagtattttaaattttttacaatttttttagcaaaaaaatatttttctatgtaaaacagtaaaaaaaggctggtaagaattttccgttttctatgtattttttccttaaatcttttggtctgctcacaaatg

SEQ ID NO: 111636 - DNA, 79 bp, Heterodera glycines
  unsure (1)..(79): unsure at all n locations
agtcctttgttgaatttttagaaatctatccgtcatatcggcttttggaatntaatgagtaaatcagtaaccgtaaatg

SEQ ID NO: 111637 - DNA, 277 bp, Heterodera glycines
taattaaaatttagaaataaaaaaattttttgaatttattcctattcataaatttttaaaaatagaaaattttttatttgcaattaaaaagtttgaaatttttgttacaaatgtcgaaaaaaaaactcttcctcaagtattttggtgaaatttttgaacaatttaacaaaaattaatcagacggtccatttttgaaaaattgaggaaaatttgaaaattcaaaaaatttttttgtattatttgcaatggaaaaaatttgaaatttttagataaaatg

SEQ ID NO: 111638 - DNA, 1003 bp, Heterodera glycines
ttggcgtttcgtcactattttttaactatttcgggatttttcgtctctaaaagttctgccctattaataatagctttagtatttttcttcaaaatgatttttcaaactattttagctatttcatgatatttagcttaaattcgacgaatttgaataattttggagaattttcccctcaatttgggaaaatttatatgcatattttttactttttatgtgcatattttgcaatttttggtgcagaatattttgcaatttttggtgcagaatcattttgagtattgagcaatggagtcaaaatacaccccatggacggtaaaaaagaaaaaaaagcgacataaatctttttatggataattacagaaaaaaattggcgttctgtcacaattaatttttatctttacttatctcaattttatgtactatctcttcattcttaataatgtaaaaaacatttacttcatcctgtttaactttttttctgtttgttaaatccacaccaaattttgcatatcgatagagaaaaggaaaatgagcaaactttcagtgttttgagtaaaaattttggcctagaacattactaaaaatgggatgaaaaaaatttgcatttctttttctctccttttggcgtactattttcatgtctctaacacattaaaaaacaccaaattcgaaaattctaataattttggttataagggtacaaaatcactttgaacatttagaatcaatagaaaaaagaataaatttagcattttggttagaaagagctgcctaggacttgagttataacgtgatgaacatttgaaactcgcacaacttttcaaaaaaataacctttttttgcctttttttatgggaccaatgatgttaatgattaccaaattatttcactattcgtctctattttggaatttttactcactattttagttaactatttcaagattttccgtcactaaaaatcgctattttttattacatttttcaaataacgaaaaatg

SEQ ID NO: 111639 - DNA, 501 bp, Heterodera glycines
ggatgttttgaggtgcacagaaatgttattattattaaaaaaacgtggctttacgtcgctgcttatttctttaaatgtcatttgtcttctgtttgtgtcccctccccggcggaaagcggggaggggggggggggtgaaaatattttttgttttattcaaaatggcattaaataaatgccaaacattcactcagacacattgaaactccaaagtactcagaatttgccacattggttctgtttgtgttagctcaacattgccatttaaaattcatttctttaatttaatgtcgacaatttttcttcccttttctcagcccccgaggggacgatgaataataataattagtgacaaattaattggggcagcacaatttgttggcaaaatcaccggccaaatgtgcgtacaaaagtggtgatcaaatggctgtcaaatcaccaaaacattcattcattttattattttattggcccttttcctaaaattcaatttacaaaaatg

SEQ ID NO: 111640 - DNA, 150 bp, Heterodera glycines
ttggcgcttgggccgattgaaaatcggttcggaaaaaaggaaagtgcttggggaggagtcggagaagttggagcagttttgggatgatgatgatgataataataatgatgaagacgatgagggggaaggggaggaggaggcgggagaatg

SEQ ID NO: 111641 - DNA, 115 bp, Heterodera glycines
ggtgagtcgtcactctctaaaatgcccatttaaacgcgtttctttggcatttgtgtctccttttggcattccccccatttagacacgtctcttctctttgcacactttgccaatg

SEQ ID NO: 111642 - DNA, 62 bp, Heterodera glycines
ataaactcttttatactataaatcgtgatcgctgatctgagcagataaaccaataaatcatg

SEQ ID NO: 111643 - DNA, 730 bp, Heterodera glycines
tctcactcactttttcgtgtcaattctctcctctctctctctctccccctcccccccctgtttccttctctcttcttaactcccctctctttctctcactcactttctcgtttctatctctctcccccctctttctctctctctcacttactttgatcattatttacgtgatcaaatatcccacatgaacaatttgtgccagatttgtctttttattttttgaagcaagagtcaaatgccaaatctcaccaatcacactgatccggagaccgacctattttttgccataactcctccttccaactaactctgagaacacatgtgacaaaaattaaaggcattataaattacggaaaaagcaataaaagttttattgaatttctaattggcttaaggtaaaacaaaattttagcaattaaattaattttttttttactttattgcgttgaattacacaataagaagcagtttttttgttataatataattttgttctctattctttcataatatttatttgttccataaaaaaattatttttcaatgctaaataatttctcgttacttaaagtgaaattaattttaacaaagttaaatttccttttagtttatcgaacaaaaataatttttcctttacattttattcatcccttgcggcatgcaaattttaaactaatttttaaattatttaaaataattttttaagcaaccgttttaaataaattaaatg

SEQ ID NO: 111644 - DNA, 724 bp, Heterodera glycines
gtgtaataataatttgggcagacaatttttaatgactaacaataacaagttatccaaattaataattaattaagaattaagaaaaaaagccaaaataataattaaatgctcggtcaataagcagtcaaaaagatagatcagaacgaaaataaaaaaaaattgttaaccaaaaagtttttaacaaatctttttaattttgatgcaaatgtttgtaggtttgtctaaaataagctcgttttttaagcgtttttaaaatatactaaatatgaattatatatcccttcagtgaagacaggaccgcctgggaaatttttgggattttggtctgatttttttttaaaaaacccatagaaaataaaaaaaatatgaaaattttgttaataataaaaaaacgactaaaagtgcttaaaaatttgcagtatgccatctatgaagcctttgttaataataacaataataatgttgtgatgaattaattttcctttaaaatttttttatagcaaaaataagttttatttatttttaaaaattaaaaaataaataattattacttactctgaatttgcgcagatttgaggatgtctttttcacctagtgcccaatctgcccaagcgcctcatttccgaaggactccaaaatttaaatttctgtttttaaaagaaagaaattccatcccatttagcgctatcgaagtgaccccgctttcgcagaaactgctcgtatg

SEQ ID NO: 111645 - DNA, 563 bp, Heterodera glycines
cacttaatgcgctaaattagcgattgttaaatcaataataaattatattataggtaaattatttattattgtacaataattacataaatttttattaattttttaaaattttttagtcaaaacgacgcactgaatatattttacgaaactaattttttttttttcattttaacatgaatttattgttataacataaatttggtagtggtccaattttaataaatattttttaaattcaaattatttttctcttaaggttttaaattatttttaaatttacattttatttatgtattagtcatcaacactttaaactgatattggttaatttatgcagaataatttggtgaaaatgtttttggaaaagaagaacattcattccatttgtacacaattattattagtgtttaacattaaatcattattttttcattactaaactgatttttttttgaaataataatgataaaataaaaagtcaaaaccaaagaaaaacttaaattaaattaagataaaaataaaattttaaattccatttaaaaaactgtttttcaatcatcatg

SEQ ID NO: 111646 - DNA, 1003 bp, Heterodera glycines
tgccaaaacattgtttaatggccacccgagtttgggagtgtgcagcattataattttcttctttttctgtgcgtgggtttcttaatgagtaaagagcccacctctttggctcaagtgcagtttatgagggtgctatgacgttagtcaaaaaccatcaaatgaaaatattttttgatataactttgctcaaaagcaactaaatttttaattcttgatatcattagataggcctaagtgttttctattagcctacaaaatttcaaaaagtttcgttaagtttcaagaaagttatgactgaaaatgttcaaaaaaatttttctttgagcttctcaggtcacaactttttttaaacttaaagaattttttaaaattttgcaggatagtagaaaacaattagggcatcgaaaaatatcaagattataaaatttgatcaatcttaaacggaattatgaataattttctgtcaaaaattttccatttgatgctttttgactaacgtcccagcaccattattataaaccggacccatttatggcaactttttttggaatatttttttttgagaggatacccaaatttcaacgagaaaattccaattttacgaagttttcatgcaacagaagatggtaacataaaattttatgtcctgaaaaatattttttatatacaatttgtcgatttggatattgcatttcaatgtggcctcgttagctcagttggtagagcgtgagacttttaatctcaaggtcaggggatcgagacccctacggggctttcaattttttttcatttttaagtttaattactaaataatactttaattgtccaattttaattcaaacgtggaattttttatattttttcgtattcttttttttggcgcattttttattaaacaaaacaaaaattttttttactattttcaaaaccaaaaaaaaaattcccccgcagagcaatggttccggcggtggtccgtacagtgtgggcggcggcggcacaaatg

SEQ ID NO: 111647 - DNA, 126 bp, Heterodera glycines
aaagctatttgcagagccgaaaggaggacgaaaaaaatatcagtttttgatatcataagtctgtatccttttgtgaattatacgtgcgaatatccggttggcataccgaccatcatacggccaatg

SEQ ID NO: 111648 - DNA, 729 bp, Heterodera glycines
gacattaatgttttatcagtgtaccgacttttgcgccgcgacatttgcgccgccctacaaaatccatttgcaccgttctaagcaatgcaaaaaaaatttttaaactaaaacttgtaaatataaatgtggcttaatatctgatgtacgcattaacaaaaacaaaaaataggtgtctaacgttggagtcggggtcgttttggcgcccacgttttggcgccgacgttttggcgcccacgttttggcgccagggtcgttttggcgccgacgttttggcgcccacgttttggcgcctgtaggaagaaggacatttgatttaaatattggcgttccattttgatgttcattccccatttattattgatttacaactttgactttttcacaatatttcccgcacttttcccacgttcagtcattatggttttatcattctgatttcgttccccatatttctccatccctctccaatccgtctcttctctaaatatattattttccttctccaaataagtaaatatatatattctccatccatcgccaattgacttagtgatccaaatccgaaccccggcattctctcccctcttcctttaatcgtacttggcgctcctggccgacattcgaactgcaccgccttttggaagacatcgaattgctcgccgattgccgacaagccagcaaagcacgtgaaaaagcagcgccgtccgcccactcaattcgccgaaaatg

SEQ ID NO: 111649 - DNA, 128 bp, Heterodera glycines
  unsure (1)..(128): unsure at all n locations
cgatcatatcttttttaaaattaacattttttacntattttttaatttttgataattcttaaagtttctggattattaaaagtgaaattntgctaaaaaaataaaataaaatnttctgcaggcaaatg

SEQ ID NO: 111650 - DNA, 392 bp, Heterodera glycines
tttcttgcaggtgttctgtgtgttgatgagttttagctaaatgatgtgctgttgccatttaggtaatctataaatgcttttcaaaatgttacgacatggttaatttgaatgagacaacacttactagcgtggtaaccaccagatttgtccttatttctaagacttgtcctggtttgaaggggaaattcacaaatccttttttcaaagattcgtccttttttggcctttcatcattatttttatttaatatttgactttgatatgtacagtaaaattacaaaaaatatttattttagtaaattcctctcataaatttgcatgtttttcatgcgatatgttcttattatcacttgttttagaataccacttcaaaactctgacttttcataatg

SEQ ID NO: 111651 - DNA, 1003 bp, Heterodera glycines
  unsure (1)..(1003): unsure at all n locations
tctgatcaaatcactttttttctcctccataaggctctcccgttcctcctatttgtgctgtcctttttgtgcttcttcgccttctcaccacgttcggcggcaatttcctttcatctgttgcccgattctttcaactttggcggcggatcagtgtcagcatcggaacataatggtgataatattaaaaaaatattaaattaatttatctctccctattaattataaactagatttcgtttttacaaatgattatgtgcggccttaactattatttttttgaatatttgagttttttagtccttcctcatagcacgtattgaatttttgaattttcattatagctttggcattttattgtagcttttaacgatttagttgttaattattttttaatgttttaaacatttataaggttacgtgctttaattaacagatgccttaacatgctccaaaaaatgatacattttcttcacagtgaatgcaaaaatntaatntaatgaactcataaaagaaatctcaaattttttatgaatttatgtgcggcactaacgacgaattttttttttcaatatttgagctttttattcctacctcatacgtactgaattttgaatttttattcaaattttggcattttactgcagctttttacattttttgttaattattttttaaatattttatgggttacatcattaatttaatagatggtttaatatgctccaaaaaatgaaacaattcttcactagaacaccaatttttaggctctaaaaccgccaaaatagctaggctttaggctttaaaaaacccatttaggagtgtaaaatgacaaattttattcaaaaaagtaaaaaattaagccaaatcagattgagataaataattttttaaaagcaaaaattcttgtcaggaaaaaaacaaatgaatttaattttttttaattaaatattatttaaacttattcctgacaggtccttgcatttttgcgcgttccatcaatatg

SEQ ID NO: 111652 - DNA, 465 bp, Heterodera glycines
tccctgatttagtggaccattgtttttttccctatgttttgtgcattgtgtcattttgctaaaccattcaattcacccacccactcaccaacgaacacatcaaaatgctttgagttgacatttgatattttagcaattaaatttgatttcttttttttttctgatctcggcacaccacatcatcacatcacaaaaaaaattgttgttgcacaataaatttttctgccggagcacaaattttttttttcttggccacccaaaaatttaaccccccccccccaaaaaaacggcacaaaaacaacacaccacacgcataataaacacacacacacacaaattggtggttaaatacctacgtgtttggtgacaacaaaactgcaacagcaacaacgaatgacaaaaagtaacagcaccagcagcaatgatgactgttttttcaccaacggcaccacccaccaaacaatg

SEQ ID NO: 111653 - DNA, 223 bp, Heterodera glycines
ttcgttctcattgacttgaaattttttcacgtgaagcaaaaaagaggagggttggccgacagatagattctcctttatcacaaaatgtttaacttttacttaacaatggaccctactttttgttaattgcagcgcatgaacttttttgaaattcatttttgaccattgcttttcattttccttttttcaggtagtgtaataaattcttattgtagtaaaaatg

SEQ ID NO: 111654 - DNA, 315 bp, Heterodera glycines
ttggctccggcgccaaaaatgatcagaaaaaatattgccccccgttccgaaaaataaaaaaattgaaaaataatgatagcgtggatatttgaacactcacagttgggtatgttcccgtgttagaggctcatttatcccaacattttatagcgtcctttttccgaacgtttggatttattaactttacctcaacttttttctcacaataatttttaattttgtttttaattgtttataattgctttttcctgactggtttttacgtataaaatttctgagtttaacacacttacaggttgcacacattctgcaatg

SEQ ID NO: 111655 - DNA, 374 bp, Heterodera glycines
aaaacatttgttattgcaaagtaacagatgaaaaaacacatgtttttgggcaaaacatttgttactgcaaaataacaaatgaaaaaacacatgtttggggccaaaacatttgttactgtaaagaaacaaatggttttgcatgtgttttttcattgcttttgtaaagaagtaaatagtttcgcttgtgaaaatgtgttttttcatttgtttatttgcgtaagaaatgaagaataacaaatatatacactaaaccattttttatatacaagcaattgaataaaacacaacgaatttctaaacatgttttcgaaagtaactaatgaataatatgtgagaaataatttgcttatattggcaaactaagagaagaaatg

SEQ ID NO: 111656 - DNA, 853 bp, Heterodera glycines
tcccagttttaagtcttggatttgtcaaataaattcaagacttcaaattaataatcaaaaattctcttaaaatttttttgaacccaattcaaaaaaggaaaaaaatttgcagtcaaaaaattattcgaatttctccaattttgtttccataatttccgaaagttattcggtatcataatgccaaaacaaaacgaaatcgttttaaaatattcctttctggacttgacttggtttcttgatatcgaagctgttttctacgctatttctaaaacggttataccaaaccccagatttttgaatccggttttcagaaaaaatgccttgtggtgaaaacaatatttcacatttcactccataactttgtgagttcggcacggatcgagaccgggataagaccattggaaagagcagctcgagctctacaagaaggtatggaaagaaaaaatagttatttctgggactttttcagaaatcagaattaattctccaatgtggcccaaattttaggcccccagccacagccccttgcttctcccagttttaagtcttggatttgtcaaataaattcaagacttcaaattaataatcaaaaattctcttaaaatttttttgaacccaattcaaaaaaggaaaaaaatttgcagtcaaaaaattattcgaatttctccaattttgtttccataatttccgaaagttattcggtatcataatgccaaaacaaaacgaaatcgttttaaaatattgctttctggacttgacttggtttagagatatagcaactgtgagtatacagtagttctaacacgtttattgcaatccctcggattttcagaactggttttcagaaaaaatg

SEQ ID NO: 111657 - DNA, 217 bp, Heterodera glycines
  unsure (1)..(217): unsure at all n locations
cgtttcgatccatcgcttttggtcctttcgttcagcccatccaagccaaggaccgtccatcaaatccgtttggcatgctcgcgaatgtttggccaattttggcactgaccaattccgcttttttgtccatgacgttgttttgggcggcgaattccgacggcacttngagagggaaaatgcgcaaaaattggagcaaattttacgcattgccgaaatg

SEQ ID NO: 111658 - DNA, 457 bp, Heterodera glycines
tctgaattaataataataatttattaaatagatttttaatttaaattgcttaattagggtatataactgttcttgccaatgcaaattaatctcgactaacccctctccaattgggattgaaaatagtgaattaaatttgtgtcagcaaatcaaaggtcgattcttcgggagattccctgacgtttccgtgcttttgtaccccaattcaaatcaattagaataattttgttttaaaaacttgtgcatattttccccaattcagcccatttctgttgctcgggttcagtgctgtcaggtcgcaattcatggtattaattgcgcattttaattgcctaccgtttatccctaccgtatttatgttgtacagtatgattgcctcccacccggccgttacttcgcttctgcacctgcgggtccgcctcccttgccgcctccgcccccaccgcccgccataatg

SEQ ID NO: 111659 - DNA, 93 bp, Heterodera glycines
aaattcgcattcttctaaaagtttattagatctcaaataaaaataattaaaatttaggttgaaggcggcgtaaaagttgaaaatggccaaatg

SEQ ID NO: 111660 - DNA, 972 bp, Heterodera glycines
  unsure (1)..(972): unsure at all n locations
gctgaaaaataattttatttattataatcattcagagtcagntatattcatatataattttttagataactttaaaaaattttataataggaaatataatttttaattaaaatccgttcttttaactaatttaataaattgatctttaaaaaaatcaagaaatgtatagagtcaactgaaccatcctgtcaggaagtagcgcacaagaataaaaatattcttggggtaaattaattcatcgatgtctaatattatttcaaatttaaaaataataaaaaatttcaactcaccaaatataaagttttttcacgggctatcaaacgcaacacattaattttatttttaaaattaaaactatttctaaaaaagtttttactaaacttccctgatcaatttattttaaataggttttctaactagttctttttacaaaaaattttattattaattttggataatatatattgaaaattttgtaattgtaatttcatttatagtaaattatcaaaaaattatttataaaaaaaaactttatttttaatttttcaatcattttgatacataagatactcaaaaaaaaaatcatacaaaaatatttttttataaacctacaggatatttatatttattgcatatttatgtttaatgtaattttttgattttaatggaaaaatatttaaaaagctcatttggcaaaaatggctaaaattttacaatagaaccttggggtgatctacacccacacaccaagcttcatttggaaattccacggtcacttgccgacccttcctttgtcagaattgaacttttaaaaaaatttcaaagattacatttattttaatatcttttttttatcaatatcttcttataattaattttaattaatataatttttgtttaaaaaagctcattttatttttaaaaaggagagaatcgaattttgtactttgaattcaaaaatntaatgaaatg

SEQ ID NO: 111661 - DNA, 1003 bp, Heterodera glycines
  unsure (1)..(1003): unsure at all n locations
taggctattaaaaatgaaaaaaataataattttaaattaaaatattttttattaattaattcaattaaaataatgttaaagaaaatataaaaaaatgttctgttccatcagggaattgatccgaagagacaaataatgaaagtaaaaaggtttagccacttgaccacttatacatatgcacacttgctataaatgaaaataaataatttaatttatttttatcaaaaatttctgatccctcaccaattcccttctcttttctcacccagacccccattcttaccagtgcttatttagtcctgccgggaccgggactggcaaaaccgggaccgggatttctgtttttccaaaaaccgggatcgggaccgggacctgaaaaacccgggatttcccgccccggtcccggtcccgctcaaccttacattaaagtgattcttgagtatttaagagaggttaggggattttttgtgtttttagcacggtgttttttttaaataaggcgcaaaaaattacccaaatggcgttatgaatcattttatgagttgtattttctcgggatcatggtcaggataggattacgaggattcaagtcacaattttttacagggtcctagtcccaggtgtcatttatgataatgtgatctgtcacccacaaatgaagttgggaaaattttaaaacttgttgattgagatttcctgcttctaaaactgacataaaatcataattattccagaaaccagtttatttgaaaactccgagattgaagtccatattttgtggaattccgaccctgaccgtttttcaaaaaaaaaaaagaatgggaccgggatccagtgaaaatcccgacgggacctcgatcccatccttgctctattacattttaatatttgctaatattttatctataattttaaactgccttaaatgtttttaatttttaatgactntaaagagcctttctattaacattgaagtggtagaaaacgaaaatcgtcataaatg

SEQ ID NO: 111662 - DNA, 387 bp, Heterodera glycines
ttcaagatgaccaaaaatagtaaacttagagtccgagagcgagaattgacccatgaaacaggaaatttttagacttgagaatggagaataaatattttataaaaaaattttcactcattaagtcttcctaaaaagaatgctttgtatttttttaaaagttcaggacgacatcatttatttatttctttgagctcgattgttaataactttttcaacaaaaaatgtagttagacccgggaaaacctatatatattggaaaatataagtaaaaaaaaatatttttcatataatctcgaattttattttatttatttgttagcaataatccattcagtttaagatttttactaacacttggacaacatcttcgatttggaagatgaaatg

SEQ ID NO: 111663 - DNA, 176 bp, Heterodera glycines
agggcgcgcgccgccccgacacactgttggcccgctgcattgagcatctgctgcagcgtgtgctttccggccgtgcgccgccgctgcgcatcgggttgtcatgccaaccaccgcagttcgcgaccccctaccacattccgcatcgcgcgccggagcagaacacagcggccgcaatg

SEQ ID NO: 111664 - DNA, 330 bp, Heterodera glycines
attctgatgaggaatttagattatgtagcaaaatttttccttatgagactctggaaatttatttaccttaatcgaaaacgctacagctgaccaaattttggcaatcgttgaaatttgtgcaaatatattgagttttagttttaaactaacgaacaaacaaaaaagaaggttggcacaatacgccgatttttatagagaaattgccaaatctcgttcagagaaaacggcaagaaaaaggatacaacaggggagtggtatagccctgggagctgtcttggtcccggtactgagtgttttagctcaacatttattagaaaaaataacatcatg

SEQ ID NO: 111665 - DNA, 282 bp, Heterodera glycines
gtcctcgtaaaaaaaatttgggggcgatttgaatgagaatagctttagccaggttcgatgaagttttggtaagccaaaaaaaaatccaaacatttaaaaatctataaaaaatttaaaaatgagaattcatgcgagattttctggaaataagcttaatagggcctagttaagctgtaaaaaaaatttggggcgatttgaatgagaatagaaagagccaggttcgatgaagttttggtaagccaaaaaaaaatccaaacattttttataaaaaatttaaaaatg

SEQ ID NO: 111666 - DNA, 510 bp, Heterodera glycines
  unsure (1)..(510): unsure at all n locations
atgtcatctttntggattatgtccatatttttgtgcatattttggcatttttgcgaaaatcctctattagaacggaccccattagctaattgacctttttgacaactaaatacccgaaaaaaatttttcttatgattttgactaaattttaaaattccataaagttgctcaattgtgtcaaaaataaggaaaaggcaaaaatttcgcttttcaagatttagcaaatttgaggaatttttaaattatacaactcaatttttaaaaatttatgtttccatatttttgccatttttgcccataatccgcgatttttgtatccatattttatggccatatttcgcgtatttttatatccataattttttatatgtcttagaaataataccaaaaattgtgttgctgctgctgttataattaataataggggtgtattttccctgattttattgcatttttaatggaattttttgtaaaaaaaaacgccaaaagaggcaccaaaagggcaaaatg

SEQ ID NO: 111667 - DNA, 767 bp, Heterodera glycines
ctgctgcacagcagcacgcgtctgttcactgtatgcccctcccacccgccgctgcccgcgtagaaagacagtcagacagtgcactatttcccacctttccctccctctactttttttcaaattcatttttaacgcaaaactcaaacaaaacgccacacaaattcaaacactggacacacacatacacacactcaactttattatataagactagcggggtcagcgccttcggcgcatcccccgctaggcagtacgattgtgttatagaattatgaatgataaaatcgactggctcggccgcttcgcgccctcgcatcattttcttggcttttctccaatctctgggactcaacccaccagcaattcaatctctgggactcaattctccggcattccaaacattgggacttaacccaccaactttcaattacattccaatcgctgggactcgacccatcagcattccaatctctgggactcaaatctgcggcattctaaacattgggactcaacccaccaactttcaatgacattccaatcgctgggactcaacccaccagcatttcaatctctgggactcaaatctccggcattacaaacactgggactcaacccaccaactttcaatgacattccaatcactgaaactcaacccaccaactttcaatgacattccaatcgctgggactcaacccaccagcatttcaatctctgggactcaaatctccggcattccaaacacggactcaacccactaactttcaatg

SEQ ID NO: 111668 - DNA, 80 bp, Heterodera glycines
ctggcaacaaaccaagccctgctggcggtccgatggcctttattcttaacggagaattccatcgccgcataagcagcatg

SEQ ID NO: 111669 - DNA, 571 bp, Heterodera glycines
tttggcttttgcctataccacaaaaataacttctccactttttggccgggcgatactcaatcctagggttaagccagggccccttgggcaagaaaattctcgtggatcaagcagctcaaaattgtccgggatcggcgaacgaaaaattgtcggggatcggtgacaccctttcggagaatttggagataataaacttaatttcatagatgaaattttgattatagttatgtgattttcaatttctcacaaatctcattaatttttgttaaagaatatattttttccgattaattccccaaagtaaatccgtttaacaaaagtgcgcgaaattttaaccgcactttgctgttctgtcgagaatttcgctatcaaacaggcgcccaaaaccagggcatttttgccaatcccgactaggcctggctaagtttctactaatgagatgtggttaactaattactagtaaacaattttcattaaactttgttcggcttacatatattcttcctaatttattttaagcattgccacatcgaaatatttttgatttaaaaaatcaacaaaaaaaacaatg

SEQ ID NO: 111670 - DNA, 348 bp, Heterodera glycines
ggactcaacccaacagcattccaatcactcgggactcaacccaccagcatttcaatcactggggactcaacccaccagcattccaatcactgggactcaacccaccagcatttcaatcactgggactcaacccaccagcatttcaatcactgggactcaacccatcagcatttcaatcactgggactcaacccaccagcatttcaatcactgggactcaacccaacacagcatttcaatcactgggactcaacccaccagcatttcaatcactgggactcaaaccaccagcatttcaatcactgggactaaacccaacagcattccaatcactgggactcaacccatg

SEQ ID NO: 111671 - DNA, 517 bp, Heterodera glycines
ttttgtgcactatttcgtttcaacattgtatcaattttttgttgtcttttgaaataaattgtgaaaaaatatacgaaaaattattttcgcttttaattatgatgtacaatgcttttaagccccgccgtgaggcggcttctttttgtgcactatttttcgtttttaaaatgggatccggattttttggcttttttaaataaattgtgaaaaattcaaaacaataatcttttttattgcgctacaaatgcttttaagccccgccgtgaggcgggacagttccaaaattggcaccacattttactgtggaaagtccaagtaccttaattggacaactacgtgtcaatgagcacagtcgccgttggccagttgtgaaacagaaaaatgggaatatcagatggggtgcgttcttttctaaaaattcctgagggcgtgggacggaccgcaaaacttcgccaaatttcctttcattgagattaaatttcctctgcctttcgacaactttttcttcctaacaatg

SEQ ID NO: 111672 - DNA, 313 bp, Heterodera glycines
tgtttaaccaagtgatcaacgaaatgaccctttcatcactgatcaaaatccggttttttctgatcattgctactttccgagactttaatccagatagatgatcaatgacttttggatcaatgtttttgcttgagattgaaattatgttccaaggtttctgatcactgatttaaaatcctctattgtaattccttctcgagtgatcaaactgtttaaattgaccaatgaacttaatcgagactgaatttttttgtcggatttgagacaaaaataatttgatttttcactcataaaattttcgttcaggaagatg

SEQ ID NO: 111673 - DNA, 299 bp, Heterodera glycines
tgaacagtgtttcgacgagtttgaagcacagacgagagccggggtggaacagaaaacgaatgccgggctgacaaaatgagggaaaattaagtgacggaaagattgggtaggctatggcctggctattttttctttggttttaattaactaggccctattttttcaaattttgtcatgctctttttggaacttaaaacaaacagacgaacggtcattcatttacacatacaaatgcgcacctgacagttcaaacagttccttgtcgcccggatcgtctccagcaaacagctgacacaatg

SEQ ID NO: 111674 - DNA, 433 bp, Heterodera glycines
ggtataaatttattgtattcaccaattagagaataacaggaggattttttgagtgacaaattctagcgaattgatctaggtcaaatgcaagagaaattttagaaatttatttaggttaaagaaaaaatattccggttacaatccgggatcaggaacttgatgcaggcagcattttcggtggatctgtaccaaaaaaatttcctcaatccagacccagccccttaacatttatattgatggggatatttacgatttaatacgaaataaattttgcaaattttaagatggcccgaaacagtttatttataaaacggataaaaatggctcaattaattggaactttcgaaaggattttgttgaaaacaaacggataaataaggtgcacaaaaatattgaatcgcatgaaaaaataaccattttgttggagaatatg

SEQ ID NO: 111675 - DNA, 161 bp, Heterodera glycines
gggtccacaaatgccacatcgtgtattcccagtcccgcaccaccatgtccaacaccctcttctgcacgtccgaccacttcctatgccccgtcaggtcgaaatcgaaatcgttttttgctttgccacaaattgtcaaatttgggctttagggtccaccaatg

SEQ ID NO: 111676 - DNA, 739 bp, Heterodera glycines
ataacagtgttcagcaacctcgaaaacccctaagaatgtgttttcctttaatttatgaatttcaaatttttgttcgaattgggttcaggatttgtatttgcaaaataaaggtcatattcgtgatcagcgccacaaattacaccatgaaaaattatttcaaatgtcttttgagtgctttttatagtgcggtcacttaagtcccagctgaatttggcactccaattccggcactttttcaacctgaaaaagggcaagcgcacctttaattctatttttcctaccctttctagcctttttacatcgattctgaccgttttaagcatttttgagtttggggactcatgagaatcccatattcctcacccttatttactagaaatgttccaaagattctaataaattttaatggaagcaataaatttaaattattaagacgaattattttacgtattgagccattttatttacaatatttataaaatattacttgttaaattttaaacggtacgcaaatgtctggtagccataaattgtttctatgtttttaaaatctgatgaagaataagcgattccataaatttagaaaaataatcaaaacataaataaattttaggatgtgacaattaaaaaaaggccgaaggtaaaatatttgtttttatgctggtgttatttttttttgtctaagttggttgtcgatctagcaagttcatcgtcatgtaaagagcatcacaaaaaaatg

SEQ ID NO: 111677 - DNA, 97 bp, Heterodera glycines
tttggtactcattttccttttagaagcaattcaattttccttttttaaatacctcaaaatttcgtctgcaataatccgaaggcttttttcgtcgatg

SEQ ID NO: 111678 - DNA, 293 bp, Heterodera glycines
tctacaagaaggtatggaaagaaaaaatagttatttctgggactttttcagaaatcagaattaattctccaatgtggcccaaattttaggcccccagccacagccccttgcttctcccagttttaagtcttggatttgtcaaataaattcaagacttcaaattaataatcaaaaattctcttaaaatttttttgaacccaattcaaaaaaggaaaaaaattgcagtcaaaaaattattcgaatttctccaattttgtttccataatttccgaaagttattcggtatcataatg

SEQ ID NO: 111679 - DNA, 508 bp, Heterodera glycines
atcagtgccaatgtgccatggcttaggtcggtgaccctgaaacggcgaaagttgacattgtgttacaattgttcgttaggcatgtatacccacgaaaattaaaaaaaacctttcttaatccgtgaaacgatatggggaagttgatttggcgggagggggaagaaaacagtgggggtcaactgggcgactttatttatttttttccaaggattatgaataagaaagccttctttagatgtggcaaatgaaatgattttattccttgttttacctctaaaccgtctgccaatttatcaacgaatatttaccatgattatatttttgtatattttttctgtaactctcagcagtcggccctaatctgtgatcctttccatcagggaatgagaatgaaaaagggagaaattgttggtccctatcccagccgagccccttcttttcccaggtggtgttgcccaagttcaaattggaggccacgcacggattgaacaaaccgttgaccaacatg

SEQ ID NO: 111680 - DNA, 53 bp, Heterodera glycines
attaaaaggcgatgaattcaaattattggcactttttttgctctatactaatg

SEQ ID NO: 111681 - DNA, 234 bp, Heterodera glycines
gcggggtgagaaatttctcgcccccgtggacgggggcgggggcggggctcaaccctatgagagaaaaatatctaataaaaattagtaaagttatttagagaaaatatttatattacgagaattaaaaaaaaattttattaagcaattaataattcgttgtcatctgtttatgaaagaagtcagtaccgactgatcagaacaagtgccgaaagtttggagaaagacctcaaaatg

SEQ ID NO: 111682 - DNA, 148 bp, Heterodera glycines
aatccctttcttcatctcgccgaattcgctggatttgttgaaattgtaaaacgtggaaaacgaatcttgaaagcggaggaaaagctgacaactaagtcaaaagcattgaattgaaaacgggaaaacaaattctcatttgctaatgatg

SEQ ID NO: 111683 - DNA, 392 bp, Heterodera glycines
gggctgtcattataatcctcaaggagtggtccaaacggcacggcttgttgcagataaatccatttaggcacgatagaatccgaccgttggatggacgaattatgcctgggtttcagcactgatcaccgagcggcacctttcccttgtacaaagccccactattttttctcattcaaattttctcactaaagattaagccgtaatgctcggaggattgtaaaaatgttaattgaacattagcagtggagcaaatgggacaaatttctcgagtatttaaagggggagacacaattcataaattcattttccaacttttcgtactccattttaactatgtctcaacagccccaatactctgttccccctcccgctccatactcatatgcataatg

SEQ ID NO: 111684 - DNA, 81 bp, Heterodera glycines
cgtaaacaaatttaaaaattaacttttttggcattttgtcattattgaaaaaatgtttaggacatccttttcaaggagatg

SEQ ID NO: 111685 - DNA, 618 bp, Heterodera glycines
gtgtgggaaaaattccacacacaaacgcatggagagaagtgttgatacaatctgataattattgagagagaaacggacaaatcccgtggacatttgaagaataaagatcaattaaaataactttaattttaaataatttattttttgtaaatttttcaagatttcaatatcttactctaatcttctccgttttattattttgcttaaaattttatttagttaacagtttgttttttatgcaatgcttaattcatacacacaaatttattttatttgagaaggccaaataaatgtaaatgcaaattaattctttataaaatacacgtatttgtattcatatttttcctgtttaatttaacgtttataaattgatttatatgctataataccaaatgattttcatttttacattttttatgaataaattttagtttcattaatatagttttaaattttttataatataatttttcgaatgattcaacaaataaattatggcaaaggacagcgaattttattaattctttttttatacttttatttaaaaataattttcgctgaatttagaggtataaataaattgttccattcataaattttgtttatttttagagaatg

SEQ ID NO: 111686 - DNA, 851 bp, Heterodera glycines
gtcagttattttttcgtctaatggaccaaaaaaaaattatttactttatgatttttaattaaattgtatacgaattattttgattatgtattttttcatttatgtattttgtgaataatctcgggtaataatttcacataaattacaaattcatttatttgaaaattcgaaaactttttgtctaatcaatataataacaattagctaatcacaaaaaatgcaatattatctcagagattggcaataatttttcttggtaatttttcataaaagcattcaaaatttcttcattcatcatcagcttggtgttaaaattatcagctttaatatttctaattaattaaaaaatttaaacaatttttccatcagcgtcataaatctgccgctggcaaatagaaaaattaattaattttttggttcataaaaatttggaagtttacctacagctgtttcacacataggaatcgtttttaattaacatttcttattaatttctttccaattgttaagagtttttcattataattttctggcgtggaaattttaggacaaattcaaaaatttatatacgttcattcattttctcacgaaaattttttcaaaatgtgtgaaaatgtgtaacgcaaatgtctcaaacttagcgattttttatatcacaataataatttcatattaatgtgagatttggcaaagtcaattaatttattaaaattatacaaaattaacggatcgttaattttaaatttttggagttctcgattatatatataatcaaaataaagaaaaaatctaattcacaatatttaagttttagaatcatttattcattgcttactatatcaattaaaatg

SEQ ID NO: 111687 - DNA, 96 bp, Heterodera glycines
tcagcaaatgtagaatgaaaaaatgaaatagtaatgaatgacccgtgttaaataaaaaaaaacctttaattatttaggtaattagtttcatttatg

SEQ ID NO: 111688 - DNA, 1003 bp, Heterodera glycines
attcggtggcttcgaaatgaatcgatttgttcgctttggcaccccacggaaaaatggaaaaaaacgaagtgcccccgggcaagggccaataaaaattagccaacaaagagagggacggaagaaaggacaaatcctcaaatgaaagccaataataatgacgcacatatgagaaatgtgaagttgatatttgaggataatattcaatgatttgactttttccataattattaaatgtttgaattttgcctctgattccctcgcccattccctttttggcatttccccttccattggtgccatttgacaaattctgtcggaaaaggggggtccattgagaaggggaataatattccccccccccccgcattctccatttcctttcattaagcgaagaaaatccattccgagttccaagggccatgcattctccccttcccccccccttctgtgccaattctcgactctcgtccctcgtcgagattcatttcactgtcccaatttgaaaggaaatgagatgaaatgcaagaaaatggggtggggaaggcaatgacaaataggcgggggtataattcctataaaaggcaaattcctttgtccgttagttcaactaaatttaaaatttttttttaaattttccaacaaacaaatttttatttcattttcttatcgtataataaactaaaaaataattgaatatatcaattaaaaatattcagtgcatttaattgaatttatttgcttaaaatcatttaccttttctttcagaaaatatttgccttttattaattaaaaatatgtaaaaaatgtcaacaaattccaacaaaaataagaaaattaaaaaaacaaattcaaatgggcattttgcggatggaaatggaaaagcggcaaagaattttgatattcatgcgggcagaaacgcattcaggtcaaatggaggaaaagaagcaataaaagcaaattaacacaaacaaaatgaaaatcccttaattaatttaggcaaatg

SEQ ID NO: 111689 - DNA, 384 bp, Heterodera glycines
acattgacatcattagcagcaaccgtcaattatcatcccaattatcatcatccaaaccgctaattgcttcaccctccaccccattaatccccattatcatcatcatccttttcattattgacccaatcaccgccgtcaattagctgccacacatcttccgcttcatcttctaaaccctattttcctctgtttgattatccaccaccatcatctttatcatcatcatccgttttagcatcttccaccactaaatccgtgcttcatcatccctccccctcctcatcatcggcatcgtttgccaagtgcgctgttttttccgtcgcccctctgctccattgcttctgctgctggtcttccgttgtgccacttctgctcttggccatg

SEQ ID NO: 111690 - DNA, 313 bp, Heterodera glycines
tactgtaacaccggcggtattccgcgtccgtcttgtgttttaagagccgcgactccacaccaccaccaacaaaaatagttgagtgaaaaattcactatttttacctgcctaaaatctcgtatttatatgtatttgtacggtttactgaaccacgttaattagcatgtaatttaaatttaattaaccctaaaaatccaatttaaaaccaattttaaatttggataattttattggaaggcttaataatttgtttgtacttccgttcttcattgggacaacacgtttaggctaagaattctgcttcaaaaatatg

SEQ ID NO: 111691 - DNA, 293 bp, Heterodera glycines
ggtgaattaacaggaaaagaggggaatatttgaaaagttttatccaaattaaattcgaaagtgttgccgcgtgataacgggtaattaacaattgaattcaatttccttggtaccctccacgagttccctcatccaaatttcgtcgtccggaggcggtactccatccaatccgagttcctgggacagtcccagacaatgagttataccggtcccggtttttcagtggtgtcactcaactttttaacgcagtggcggaacgtcaaacgctgttggagcaaaaagtcagccaaatg

SEQ ID NO: 111692 - DNA, 55 bp, Heterodera glycines
ggtcggtccttttcattaatcttatcaataaacgtaaaaaattccagcaaatatg

SEQ ID NO: 111693 - DNA, 268 bp, Heterodera glycines
tgtttaatttaatcgaattaattggccattttccccactcccccttggtttctaacgaattgccaattggcatttcctcataattcaatttgattttgcccctccctgtggtgccaattcccgcccccccccctataaatttgcctttgcattttgcgattggtttcccaaaacggcactttttcggtttattgcaaatgcttcttttagatacctcctcctcccattcgttcattcttctccaattcgtcctttcccttctcaaatg

SEQ ID NO: 111694 - DNA, 353 bp, Heterodera glycines
gaaatatgtgctcgataaaattatatatttcaatttaaaaaattatttttctggcaagtcaacttagttaaatttgaaaaatatttaactatattgaaaacatcgatcgaatggagaagtgaacaaaagtaaaagcgccgaaagaaggtgttttgtagcgtgaggaggtgatgagattaagcaaactcaaccatcaatcaatcaatggccaaccaaaaactaatgggataaaacgagagaaacagcaataaaataattagtcgttaattagtaaaaaataaataaaaattaattagcaaagacattaaataaatgaacaatttgtaattgcagtaaaaattattctaaaaatg

SEQ ID NO: 111695 - DNA, 294 bp, Heterodera glycines
tttcaggttttcaaaaaataaaaatcctcccttaaatgtgatttctttaaggggggggcattccatgggggcaaaaattgttttatcccctgggctgttggaccggatggtttagccatggaaaggaattacaaaaggccagagaatcggatggaagcattgagagaaatgtttaaaaacttctcggggggaggaagtttggggtttgccaatttccaacagttattgattattgattgaacaaattttaggaatgtggaggtgaaagcggaatgaaagcggaacagagcgatg

SEQ ID NO: 111696 - DNA, 340 bp, Heterodera glycines
ccaatgtgattaattccatttatagacacaataaaaacgtattattattttatcatttatttattttatttttgacaattttattgctgccttttcactcctcttttttgtgcttcatgtgatgatgatatttgtattagttaatgtgtttatttggcccaacaaaattaacattctcatctatttatttcaacgctcgcaaaatattatattcaataaaataaaaacaatttttgttatttttattttgtcctcaatttcccaaaaattttgatttaattatttattttgattaagttaaacggaaactttaaattatttatttttagatttaaaaatg

SEQ ID NO: 111697 - DNA, 66 bp, Heterodera glycines
ggagagggggagggggagtcggaagatctgaaagaaagttgtctgacggaagagtctgaaaccatg

SEQ ID NO: 111698 - DNA, 581 bp, Heterodera glycines
ggtaatttgccttgccgtatgcatttatgccaaaaactggatacacggcaaggatattgccgtatataaggcgccccaaaaatctattcacacatcactccatccaagacaatcccaccctttccggtgcccctgctgaacattcgcatggcctacccctctctctctctttcccgtcataagccattaatttgtcctcatttaaatgttgaaataattatttcaaattttgattcattattaaaaaaataaattaaatttaaaatgtaggactcccctaacataaaatttttcaaatttccaccctaaactcaaacccccccccgtccaaccttcctctgttgcttctctctttctctctctatcctctctctctctcctctctctcccgtcgtaggcctattaccagacagcacaaaaaaggcattttttacttacagtaaaaaactttttttttttgaacgaaagccctaaccttccacttcaaaatgattattaatttcgtttctaggatattttttaaaatttgtaggcttattattagggcttgtaattatatggacataaaatcgcaaaatatg

SEQ ID NO: 111699 - DNA, 98 bp, Heterodera glycines
acttctacgtggatgaacacttcgagacacgcaaatggaaattgaacaaacaatttcttattcaatgggacattcaagaaaatgggacgaagaaaatg

SEQ ID NO: 111700 - DNA, 173 bp, Heterodera glycines
acgagaatgataagagatgccgagggaggaggggttaagatgatcagagaagcttgaggggggattgattgatgaaaggccgggggaggaggggatgagaatgataagagatgccgagggaggaggggttaagatgatcagagaagccggaggggggattgattgatcaaatg

SEQ ID NO: 111701 - DNA, 806 bp, Heterodera glycines
tttaaaattaattaattttcgcctgcaaatatttaagaaaaatttttaattttaaagggctttttaaatgaaattaggtaagcacaaattttgaatagaacagagacaaaagtgtcatataattagcgcagcagaagcagcggcggtagcagttctactacaccgcggcggcgcttttcggttacaaaacttctgcatttgcgcccagaatttttaatcggcatagtacgcgccatattgactatggcaggagcaggagtaaaacttattaaaaaattaaattaataaattaatttttctgattaaataaggtttttatttattattttttaaatgaaaaaatgttttgatcgtgcgtatttagttaatcttgcgaactttttttgtcgtagtacatgttctgtgttttggttccttgtagatgtggaggaggaaacaaatatttaagtttccattgtgagttttattttttttattgggcatttaataactttaaattaaggttatgtggattcaccttatgatgtgaattggctgttgagggttgggcgacagctgttaagatattggcagggtttttctgaacaggaaaatttgttttgattttttgtatttaaatttaattttttgtttatttcttttgtccattatactgctatcttttcaataatatttataagtgatttggtatttttgaatctgtgctatggatattgcaatttttatttgatcgattctaacgtattgacgtaattgcatttaaaattatttttagttggtaaattaagtatatttgcgacattatg

SEQ ID NO: 111702 - DNA, 487 bp, Heterodera glycines
acagctttcagcagcagcaaattccgccgcagcacgtgagcggaacagtggccaacattatcgtccaacagcccgtccaccaccaaacgcggttgtccgccagtccgacgattagcgtggagcagcaacaacagcaacaggtgggacgaaccaaagacaaaatgggattaattagtgaacgcatttttatgatgttcagccggtgattcttcacccgtcccctccgcccacgcagcagcaaattcacattgtccagcagcaacggcttagccctgtcccgcgaatccaaccccggccccttctcgaccttatcgtatttgctttttttgggggggggggatttttccaaatttggctgtaaaactctgccattaatttaattaggatgaaattcctttgtttcttattgtatttttaattgtccctttttaaggttgaaaatccacaaaaagcagtgattgagcatcaacagcaacagcagcaaatg

SEQ ID NO: 111703 - DNA, 184 bp, Heterodera glycines
aatgaatagaaatgaagaccttttatttcttttcgggtattcgttttgtttatcgttgctcttttttacggtgctcaataaatttatacatttaaatcgctgacaattttttaaaaattagtttcgaaattcgtttattccgttcgttttgttttcatttttgtcttttacacttaggaaaatg

SEQ ID NO: 111704 - DNA, 342 bp, Heterodera glycines
aaaataagtcaaaacataaaattactaattaaaaaaaataaaaataaaaaataaatgccctttaagagaaaaaattaatttccaatgaagaaaggttaaaaataattaatacttttgacaaaattgagtcaaaattggtcctccgctggactatttgccgagatgttaaagaattaattgccaaaaaattgggaattgaactcagaacaattaatcattggagattaaaattcggcttaaagagtaaggcaaaagcaattgaatttaaaaaaattaattaattaagaaaaaataaaaacaaaaaaagaaaaaatcgaaattttggaacgttttaataagatg

SEQ ID NO: 111705 - DNA, 422 bp, Heterodera glycines
atggttttttatataacgcccatattgatggtttttatataatgactcagcaacctcaccgatatcagtttaaattcaatcattcggggccaatgttcttcaaagggggggggggggataattggagactgcggtattaatagagactgggccataattagagcatatacggtacataattggacgcataaaaatgattgagcggataaattgaaaaaaataatattttttacaaatactccgtctgttttttgccaaaaaatgtgatgaatttatttctgtttcaaaattgtttttgcgttctttttgctctctcatttttcccaactctctctttttaagttacataacaacagagttttgccttgccttttttgacacaccaatcaattggaaaaagggaaaattgagccacaaaaatg

SEQ ID NO: 111706 - DNA, 109 bp, Heterodera glycines
atttttaccccacagatttccctgaagatcagattttccttaaaaatatttttggttcccgcccccctttttttaaatttgggcaaaggcagagaacattacattaatg

SEQ ID NO: 111707 - DNA, 1003 bp, Heterodera glycines
ggtccaattagtgaatgtgctaatgtgtcagcccattaatggtcaaaaggaaagagggaaaagaaagagtcaaaggcccggagggttcaggtttttgattcactgatcagatcagcaccttcgaaaagccaccggaaactgattttgagctcaaaataaaaaaaaaatttaattaggaaaagcaattctttaccattcccatcagcagatggatttgatcagcagatgtgtaacgcattcatttggtcattggtcatgtttcccattcattcgttttaagtgcattttttggtctgttattccccctcgcccctctccattcccttccttcttccctccctcatttttcttttcgacttttcccttttcttcttcttcccctctctcctcttccctaccccatttttcttttctcttttttcgtctcctcctcccccctctctttttagtctctccaccaccctccctctcccctctccctctcccattttttctttttagacttcccacccctatttcccctctctcggatgtttttaaaaaccttttgcttttttttgaaaaataatagatatgtgtcctttattctgtccatttggtcctctgctgcttttcccgtccacaccattggccggctttgtgcctttttgctgtctttcattggcaccgtttttattatcgtgccgtctgccactctcttcccttcgctttgtgtgtctctttactctcttccctccgtatgtcttcagttctcttctgtttctttctctcgcttggaagttaatccattggcaaagaaaggcacccaaacagaaaatgcctgcctttggcttgccgttgtttcattttgtttcgtctctttcgtttcgtttgacctctcttttttgccttttctctctctcaaatgccaatttctttttctttttcctcatttgctcttttgtcttaaatttgcttttttttaattagctccttttgctgttcttttttgcgtccacagatg

SEQ ID NO: 111708 - DNA, 703 bp, Heterodera glycines
tatgccagacattagtgtggtttatgtcagtcaaccacattagtgtgttctgtgactttgtgtgacacaataatgcgtgtcaatttttttgataaaacaatagtgtcacacagaagtgaaattagtcaaagttttttaaaatgtattgttatgtgatgacactattgtgcctttcatccataagacacaaaagtgaaatttgtcaaagctttttaaattgtattgctttgagatgacactattgtgcatctcatgttttagagataacgcatgagttgaatatgtcaaaagaatcgtttgtattgtattgttatgagatgacactattgtgcctctccgcgaagcggccgagccctccccaacggttcaacatccaaaggcacacaaaaagaaaaatactgaataaatttgctgaagttgaatcccagtgattggaatgccgtaaggttgagtcttgagtcccggtcattggaatgtcatataattgagtcccagtgattgggatgcctggggttgagtccaggtgatggaaatgcagaagaattggttagataagtccaagtaaatggaatgccggagaattgagttacggcgataataccagagaattgggtctgtaatggtaatgaattaagtgtccctgtgatgcagaattgttgaaataagtcccagtgattggaatgccgagcgtgtttaacaaatg

SEQ ID NO: 111709 - DNA, 90 bp, Heterodera glycines
agagggcttcatgggggtttttcaaagcaatgaattaaaattaggttagtaaatgtatgtaattgtaataatttttattttcaagctatg

SEQ ID NO: 111710 - DNA, 551 bp, Heterodera glycines
tagtcataaaatatggcccaaaaaatcgcaaatctagaaacatggacataaaattgcaaagtatggacataaatttccaaataaaatggtaaaattttcagaaatttcttcaaaatctctaaatgtaaagtaaaactttcaaaaatggcgctagatatggttaaaatcattttattcgaaaaattttttagcgaaaaatcaacccaaaaagcgaaatttcgcttttttgcttatttttgtaaatttgtatatttttaagaaaattttattcaacattctcaaataaattacgaaaaaaattttttttttttttggaaatttcccggtctttagggggtcaaaaaggccaatttagctgagtgtggtgccgtactaatagaggtttttttttggaaaaatgtaaaactatagaaaaacattaaaaatggacataatgacaaaatatgaaacaaatcgcgaaatatagaactatgaatatagtggcttttttgttttgccccttttttgtttatttaatttaaaattaatttttttttaatttttagacaatg

SEQ ID NO: 111711 - DNA, 1003 bp, Heterodera glycines
caaaatatctatttaagcaaaaatcagaatgaaagaatctctggttttcaaaattggtattaaaaagcaaaaattttcgctgctatcggattagtccctaaatgagacctttgccagaaaaatgattaaaaaaattttagtttggatcaggcccttagccagcagaggaggaagtaacgaagaatcccccccccccccccgccccccgccctcccggaaatgaaaaattaaaaattttcatgaaaaagatgggcaaattttaaaaattcttactaattctaacaataaaaaattttctatatcccattataccatttttttttgaaaatttgaccccaaaaatcgccaaaatttttgcgccgaaatgcataaaaaaaatcttcggcttccccgccccctccttatttttttttctggcacaggcgttagtggaaattgcagttatattactgttattcaatctgtcgtataattaattttataaattcgatatattttatggccagactcttcattgggcccacaacacaacagcgggtgccggcaacattgccgacggcaattggcacgcggcaaaagtgcgtcgccgggggcgaactgtcagcctttccattgacggcaattggagtcactgtagggctgcttaattacgtaattaggaaggcttttaccctgtttatgatatttcgcggattttatcaatttgtcaattgaaatttttcaacaacgtacaattttctgtttaaaattgaaaaaaaaagttcataattttggctgacaagaaatttaagtttttaaagagaggcagatttttctaaaaaaaatttttgaggtaacaaaatgctttgaaattttattcgctgattgataatctttattccaatgtattttcctggaaaatttcaaatcattctgacaacaatagaaaaattttactaaacaaattgtttaaactctgtaaaatatttatgcccaaaaatccaggccctatttaattattatg

SEQ ID NO: 111712 - DNA, 427 bp, Heterodera glycines
ttttctgaagggaaggaaaatgttcacactgaaagattaacggaatccaaatccccctccttcgtctccgcttgagcctgcaaatcacagacgcaaaagtccgttccgtgaatttgtcgtccgtgaaaaaaagacacacaaatgcgtaaaaagaatgagctgtttcgcacctgcacattgcattatataggtagttgttcccttctcgttggtaattagttagaaatttttaagaaaaattcgttctttgaacacttgaaaagtttataaaaagggtcgaattttggatccatcatcactttgcctaactattccctattactgtcctatggaaataatcaaatcgctagcagaacgcactctacaggtgtaaaaattttttttcctttgtaaatttttttaaacaaactttttttgttcaggcatg

SEQ ID NO: 111713 - DNA, 841 bp, Heterodera glycines
tggtgccaacgcgacgccaaactctcaccaattgatcgccaacattcaattctctctcgcttccagcggaaatgcatgactttcctcctcatccctcagtttttttatattttagatgaatttttcatgttaaaaatcttaaattatttcttaataaacagccaaaaatagggtaggaaaattaaatttaatttagaaaaacctgtttatttaaaacaaggctaaatctctaaattttgtaaaacgcatccgagcattaaaaaattcataatgaaatggttttttcggtattttactcattttttatgaaaattaaggagttggaaaaaattggaatttttccttatctttaacagattttcacaaaaatggccaatttttggatagaattttgactataggaattttgaaattgaattatctataactaaagttacaaagaaaattgaaatcgagattatgccgaagcattaaaatcattcaaaaaaaaattaaattttgtaattttttttgaaaaacccacaaaaactcaaactcatttctcttcgaccaattaaaaaagatcacagaatgagtttaaaaactcaaattggcagacagatttaaaattaaaacagcataacatcataatttcaaaaaaaagcgaacaaaagatttatttcttttaattatttttcaaatttttgtcggattttcaatttctatgcaaccactactgcctgaaaattgttctacgacattatatgaaagcttaaaaatggcaaaaattcttggcgaaatgcaaaacgccaaaatttttgtgcgcccatcggaccccaaaattttactttcagttttaatg

SEQ ID NO: 111714 - DNA, 74 bp, Heterodera glycines
ggtgaaaaaaaaactaattaattcaattaaagtaaatttgcctaaagggccgcatactttacgggccaagcatg

SEQ ID NO: 111715 - DNA, 344 bp, Heterodera glycines
  unsure (1)..(344): unsure at all n locations
gcaaaaataaaaaaattttgtaatccaaagggggggggtatctacntanncctgtaagttcattcggaagtcaccgtcacttgtgtactctccctttgttaggggtgtatttaataaggagaatctaactgctngggtttcccactagattttttttgctagtatatatgtattttctatctttgaacataggttattagcttttacttttataccattatgagtaagagtttaaaactccaaaattcatatatatttaattctcacattttccacatgccgcatcaggcaaaaaaacgtcatggatatcgaaatcctacaaattgttccctttgataagaatg

SEQ ID NO: 111716 - DNA, 538 bp, Heterodera glycines
tttgttcatggagtttttttaatgttttaatttcgatagcttttgacaagttctatagctttgtgattttttataaattcttcaaaaccggaattggtagaggtcgaatactcaaatcgaaataacaaaaaaataaaaataaaagtcttattcattttctaaattataattttattaaacatataaaaatttattgtattaattttacattttcagtggtagcccaaaattatatgtattgatggttattgatttcaacgtggatgttaccaatacaataattaaatttattattttaaatttattattttattttatcaatcactgagctttttgtggaacgcccacactgagcattttttgtggaacgcccacactgagctttttgtggaacgcccacactgagctttttttgtggaacgcccacactgagctttttgtggaacgcccacactgagcttttttgtggatcgacctagcacccttttatcccaaatttaaataatataattttttatgtttttaaataattgaaatg

SEQ ID NO: 111717 - DNA, 403 bp, Heterodera glycines
ttttttacaatttaatgaattggagttttttgctaatttacttaaagcttcggatatgatatatgcaataggcttgggtttattgattatttgtgtacagtccttacaataggttttgccttttttttttttgggggggggggggattattttttaacctcctcatagactggggataattggagactgggggataattagagcaaatactgtattttctctctctcgaccccatccaataggtttgggtttgtggaaggggatgtcagagaaaaaaagtagacacactcaaattatcgatcgaaaatcaatcgataatttgattgggaatattatctactgatgtgaaattaaataaattttttaaatccaagatttaattataatttttttgaagtgaatg

SEQ ID NO: 111718 - DNA, 309 bp, Heterodera glycines
tttattgtttattgaggcgatgaatctttttcatgtcttttaattggtctttttccacaaaaaaacataaaataagtatggcgaagttgaaaaaatatctatccattcttgaaaaatgctataataattgtcattctcctcaaaataattattctccaatcaattttaatttgcataattatggaattagtcaaaatcattcgatgccaaaataaaaattctaaaaaaatcaaataaactttagcgaaattcattaaaatccccgtgacacacggagagtggctaaaatttccttctcaaagtgtgatg

SEQ ID NO: 111719 - DNA, 116 bp, Heterodera glycines; identical to SEQ ID NO: 105272

SEQ ID NO: 111720 - DNA, 123 bp, Heterodera glycines
tttcaagtttgttttgtttggtttttgaatttcttctagaaaaatttcagaaaaggaaaatggactttcccaatcgccacatgtcttctgacaggaaagtcgcgactggtctacgaaaaaatg

SEQ ID NO: 111721 - DNA, 97 bp, Heterodera glycines
gggcaaagatttctattgtatgattctcgtgcaaccgaacccgacgaggttgtttattaccaggcggttattgataatttatgtagaacaaacaatg

SEQ ID NO: 111722 - DNA, 99 bp, Heterodera glycines
tgttccgccggctcagagaactgcttgcctggcttcaaacggtttgctgagataaatttggacaattcaatgtttgccaaaaggtactccgacccaatg

SEQ ID NO: 111723 - DNA, 249 bp, Heterodera glycines
gatcgacaggtatgagtgccttcgggcttccaagagcgaggatgagaacttcctctcttttgtcaaccggcacaagcgcctcctaagggattttgagttcaagaaactcaacgaagagcaattctattgcttaagttaacagctttaaaatctccaaaggatggcgaacttcgaaagagaattttgggcaaattggcggcagatggcgatagggcaaaatacgataaggtcgcggaggacctgcaaatg

SEQ ID NO: 111724 - DNA, 484 bp, Heterodera glycines
ttgggtgcgcgtggacgagcggctgctgcgcgcgcacccgggcagcggcgcaatgctcgcctaccgggacagggaggcgagcactgtgtcagtgggggatttgaaattcggaaatttatttgaattttccaataaatttttcatttttcaatgccctcggggctctctgaggtttttgcagttaacaataaattaaagtataagtatttaactctctctctctctcccccccaatttgatcacatttttaatgcgccgaaaatggacgtgtttttcttaattcgcttcacaaaatatttatatatcccgagcagaattgaaccttggccccaaaaacacagggtttaattaaccaacatcggcggggccaagtaatttttacagaaaatttaaccaattttttctcagaaaaagccaatttaatgaattttgctgaaaaaactgagaataaaaatttttaggctgttgattatagtcaaaaatg

SEQ ID NO: 111725 - DNA, 765 bp, Heterodera glycines
gacaaaataaaaatttgggcgacaaaatttggcaatttttgcaggtggaaaaataaaaaataaacaaaatttaataaaaaaaatttggaaataaattttatgattggtctccccaaatctgtggaagatgtttggcaagattttgttcatgaacgaattaaatggcttggtcatcgcattgattcgggtgaatgtattcagccagaaactgtaatacttatttttaaaaatattactaaaataaaattatattaaaaatatgttcgatttaattaaaaatgtcatgtttttagcggcaaacgtaaatgcctactttcttgaaagttttttcgatttttgagcttgtattctttaaaaaaaataagtagacaaattcttcaaccggaaagtttttttttataaatttttactttttaaaaatttattcctgtattaaaaacattaaatatgatttgaaattagatttaatttaagcgcggcatgtttgcgcagtaaccataaaaggcctattttctcgaaaacttataatttttaaccataaaagaatctggacttttttctcgaaaatttatagttttttgaactaaaattcttttacaaattaagctgacataattttttaaccaaagagtatttttttcataaattttttttttgccctgttaaaggagagaattttaaatataaactcctatatatccaaaacaaaaacaaaaaatcataatcaaatttttagtttttaggcgggcccacctcaggcacatg

SEQ ID NO: 111726 - DNA, 492 bp, Heterodera glycines
gcgcaaagcaagcgccaattttgaatgttggccaagagctctaattaaatgtttggaattatgaaaaaaacaattaaattttttaaatttcaattttggtcgatcagactgaaaaattaagaaaaatttaatattttaacataaatgaagcattattatacataggaatatgtcctctgctgggaaaattttaaaattccgccacattgggtttgggtattttttttaaatttggaatcattcgattgcccaaaatgttttctttattagcttgcaaaatttcaaaaatttcgtataacaaactagctaaggccttgttctcctctttttgtcaggaatttgtccaaaaatgacaaatttggtgggttttacccgccgaaaaaacaaaaaatcaattttccgattggcaatttttgaaaaataaattcgaatttgacttgagacatagcaatctctttttacataattttgcttcgttcaggccaaggaatg

SEQ ID NO: 111727 - DNA, 638 bp, Heterodera glycines
tttggaatgagattaattgccaaaaataggggcccttctaattaataatcttcgaccctttccataatcactgttcgtttttgataattactttcttaataaattattttgctgatatttctcttcatatcactttaattgaagtttctcctatttatttcttttcttttaattttatttttgcttattattctctaagcaattccccaaaatttccaatttcattttccaattttccgtttatttatttatttattggttgtgttatttgcccattaaaaacggctgaaattttacaatctcagcataattttcccgcatttattccttccgtcgtttttctttcacattttgtttatttatttataattttaaaattttcttttcttttttattaattaccttttttacagaaatgtatcgttttctttcaactttttccaaatatttcattttgctgttttttcttttgatctgctcatttttgacgaccaatggcaagtcaaatctcttcccctttaattaccctttttaatatttttaagtgtttgaccaattagcgattgattagcgatcatcgcccgcaaagactgattaaattgttaattttgttctgcttcattttcagctctcaaatg

SEQ ID NO: 111728 - DNA, 219 bp, Heterodera glycines
  unsure (1)..(219): unsure at all n locations
gattttgacgccatttttcgtacaatatgtttcccgatgtttggtgttgttactggtataaatccatttctcaatccctagctctaaccctatcaattcncaacttatacccaaattcgagaaaggttcaaaccccacnggttttcgagtcgattatgtattttcacatcattcaaacacttttttaggtcgaattgcgttctttgattcctcggaatg

SEQ ID NO: 111729 - DNA, 496 bp, Heterodera glycines
tgcgcgagctgaaaatgatgcaaattttgcagccgatgaaaccgatcatggaacaggacgaaggagaccaacgaggtacacaaaatccgaagttttttttaaagttacagaaaagtttttctttcctgaattacctcctaatattggtataactattgttttggtaatggaatttgttcccgtggccccgtgaactcttttgaatgaatggaccaaaaaattcattttcctacttcgttcccctttcccaaaattaaaaaaattcaaacttatttagaaatttttcaaaaaaattttcaacgattttctggaaacatttttgaaaaaacttgatgcagcggcgcctatcggcaccgccggacccctttgaaccattatttttgaaatgtgaccgcaaatggctgaaattagtgttttttgacgccgcaacctctttcattaaatttgttgctaattgccaacgccattcccccgacagaccccgcagcaagcgatg

SEQ ID NO: 111730 - DNA, 190 bp, Heterodera glycines
  unsure (1)..(190): unsure at all n locations
ttatgtaattgtaaataatatgnaaatgtattattattattattattaatagtttattccttttttattagccgtatgcaattcaataaatgacttaattatntataattaattaatgaattaattggttcgcgtaagaattaaaatatttttttttgtatacaattcttaaccaaagtttataataatg

SEQ ID NO: 111731 - DNA, 54 bp, Heterodera glycines
ttcaagcgcaagctagccgagttggaagcgacaaacgtcgcagcgcatcgaatg

SEQ ID NO: 111732 - DNA, 202 bp, Heterodera glycines
tttttttccccatttttatagctttattatttgaaaaagtaaaattttattttttggattacagatttacaaagtacaaattccgctctctttgcgtaggggaccctctgatattttcaaattttattttggattatttcaatttatttttacattttatacccatcccccccccccccatttgtgtacaaaggtggtcatg

SEQ ID NO: 111733 - DNA, 139 bp, Heterodera glycines
ttgtgaatgcgaaaaaagtccacttaccgaaatatttgctaggcaagagaaccttttacccattaaaacacagggaagttacgtatacttcgattcccaaattaaagctaaaatacagcaaacaacttctcttcaaatg

SEQ ID NO: 111734 - DNA, 115 bp, Heterodera glycines
agtttacgtggaggtgccaggcgaaaaattggaaatttttaaaaattttcattaattttttctaagcccaaaaattttcaaaaattttttattaagccgaaactgatcgacaatg

SEQ ID NO: 111735 - DNA, 695 bp, Heterodera glycines
tccccaatccgatccaatgaatttggctgttatcgctattagcgatcagtttttacccccctaccctttagctaattgttgattcgaatttctttttgctcggctttcatggggggggggggggggggggttggacaatttacgcgacgtgtcacagcgccacccaccgcccgcccatcccgcccatggggtgtgttggggacgggggacgaggggaaattttgccgggtccgcccatcagccgcgctgcttctgccgcagggaccgcccatttgggcactgtcggccaccgcatttaagcgctgtccaatcagtgaaaaatcagtcatttccaaaatttcattctgctcctaaccaaaaagcattcaactgacaaataagctggtggaaggaaataggaaaagccaaacaaaaacatttttgaaaatcagtcaacgattaaaaaattttaaataatttttttcgaaaaccgtttcaattttttgtatttcacttaaatttagaaatcaaaaaaatttttggtttaaaagccaatattttgatttcattgttttttaggaagtgattttttcctctatttctgatcccaaatcccattcttcaaagcaacccgtcccactctcgaccgtctaacatgaacaagtggtctgcacttgtgtaagttaattggagggaggggtggggcttgaaccatg

SEQ ID NO: 111736 - DNA, 913 bp, Heterodera glycines
attttaatttaatatgcaataatttttcatttccgtattcagttatttaaaaaaagcattaaaattatttaatttttattatatatttaatcaataaattgattgcttaatgtttataaaaattttctatatatttccgaagaaaataatttttataattacaatttttattagtttttattttattataacaaattagtgatgatgacaacaaaacaatttctgttaatttatatattaatttttgtgttaacaaaacccggttttatgaaaatcatttatggtaaggctaagggggtcgggggcgttttcttacgaacacaattttttagtataactttttttctttgccaaccaaatccaacattcttggtatcattcaatagcaccaagtgtcctctataagcctgcaaaatttcgaaaaatttcgttcaggttcaataaagttacggcaaaaatttttcaaaaacctggttttgtgaattttcgggccataactttttttgaaacttacctaaatttttagaaattttgcaggctaatagaagacacttatggctttcgaatgataacaagattgttggttttggttggcaaagaaaataagttatatctaaaaacttgtgcttgtacgaaaacagcctgctcctaaggggaatgctaaacaattaattggtgaatttttcaattttttttttcaaatttttttgtctaaaaaaatagaaattttataatgattttttaaaaaagaattgcattataaattttagcaaattataccaaaacagatgcagtcatatttagatgtaagccttttgacgaaaagtttcagtcctataaaagatttattaattaattatgtgctaattaatcattagtgaatgtccccttaggcatcgacactttgcaaatg

SEQ ID NO: 111737 - DNA, 89 bp, Heterodera glycines
atcgccacaccatcaaacgaaaaagtgaaaaactgccgacagcaaaattttgtttggtttttgctaaacctgaaacaggtgcaaaaatg

SEQ ID NO: 111738 - DNA, 852 bp, Heterodera glycines
atcaagtcttttttatcaggcacaaaatcatagactcgattaatggtttaatataaaaatattaaatgattttgatcatttgtagcttcttcactgtctacctcagttgctgcgcattcagaatttggcaccaaccctgatgttgtttctctatgcgcacttcgttttttcgatactctccacgccgtaccaaatttacagagtgatccaatggcgaacacccggcaccttcacgcagaacaacttttcaccatatgtaaaagcaaagaaaaaaaaataattaagtaggaaagggagggattatattgtctatatcaaaagcccaaaaattcagaagtttaatacctatttcgaaaattaggatagttaattttacatccgtttgcgccaaagtgacgtcacagtggaaaatttctggattataatattttgaaaagcgtaaaattttcagaatgtggaaaaactcggacgaatttcaatgaaaatgaaattgtgctaaatttccaaaatatggcatttcatttttgtttaaattcagtgcaaaaaaatctaaccttattaccgatgacattattttaattaatcctccttctatgacccaagtagagaaacgaaaaaaaatgttaacaaaataattttcttttttgctgaattgatttaaatttattatatatatggaattaatgcaaaattattattttttcattttgaaacaaaaaatcaaaatgatatacctataaaatttcatcccaagactctctattggttatcgatgcctgaactagtctattacggtacgatcccgtccaccgtttttctactcgccattgagcgttgtatttgcgcgaaatg

SEQ ID NO: 111739 - DNA, 51 bp, Heterodera glycines
cagaaaaatgtgattggcattttgtgtaatagcgactttgaatcaaaaatg

SEQ ID NO: 111740 - DNA, 284 bp, Heterodera glycines
acagtcaaagagccgacactttcggacgaaattggggagaaaggacagcaaaaaggggccgaagaagcggaagaaaaacggataattgaggaagaagtggaggaggcggaagactttgaaatgccggaacgcagcgaagcgtattgggcgcattggacggtggaaattggcatgtccagcggagggggggggggggagtaccccaattaaacgccctttttgcccaagggaggggcgtcggctttttgcgagacaatttgcgcgtggaatgggcgttggaaatg

SEQ ID NO: 111741 - DNA, 201 bp, Heterodera glycines
gatttaccaaaactgggtaaagaaattttttttaatgtgtattaccgttaatttagtaaaaaataaattatattcaatatattcttgggtatactcaaaacaaatttaaacaaattatcgaatgagaccaaaataatgcttaagtttaattgggttgttaaatatttttaattttgaagcatcctgggcattgcgcaaatg

SEQ ID NO: 111742 - DNA, 124 bp, Heterodera glycines
tgctgatgtcggacactttcttctgcgtgcactcgaagcacaactcgtaaatgcacctattctgtcatgaaatttatgaaatttttcaattttagcgttcagtatttcccaggcatccataatg

SEQ ID NO: 111743 - DNA, 751 bp, Heterodera glycines
taaaattttggtgctatgccgaagtgacaaaattatgagtgtaggggtatagccctgaggtggggtgaaatcatttccaaaaaatagaatgttttgtcttaatcagagactcatccccgaggctcgagaagtagggtattctcgcttcgtctctactcagcacttgacccattttggttctcttctctcagattaattgccattgattaatctgtccatttgattttccttgggttaatttgagtggcttaatgcccttctctgccagtgaataggaacggacggcattttctttgctcgcacaacggcactttgggaaaagcaacctaatcctcaaccaaaaagtgaaaagcgaaaaatgaatggatcagatttatgcttttctgaggctgaaagtaatcatttaaaagtgaatttttgtaaaaattaagcatatgtctaaataaaaaaaccggagaaactaattagcaactccttaaaataagaatcaactaaagcttataaaatcttttgagaaattattttttcatattataaaattggtaattttacgatacaataaagaaggttgacgcaaattccgagtgaaaaatgcaaaaaaaaaaattgctcgaattcgggtccgggtttcgaaataggtcgatatggatgtcgatattcgtgttcatcgccccctaaacccccaagagcacctcaaaatcgctcaaaatctcttttttacctcttttttatgggaccagtaaaaccgatg

SEQ ID NO: 111744 - DNA, 206 bp, Heterodera glycines
cagtttcgtaaatcgtacgggggtcattgcccattcctcacaaatcagttctcattaatgtcctcgccctgcattttccacccacccaccaaaatgattgcatttttccgttttaattttctccgcttttcccaatcgctgttcatttccctctcccttttcagtgccctatttgtcagcacctcactcccactcagtccgtcatg

SEQ ID NO: 111745 - DNA, 968 bp, Heterodera glycines
attcataaaaatacgaatttttaaattacaaattttgtttagacaatgcatacatctatttagagatatgctgtgttattaattttaaaaatttctgaatttctgttcatcactttttttcaaattgccgtcacatttcggtcacactgatgaaattattgtagttgattaaattattcattttattaaataacaaatacattaattcatttttaaaaatttacaaaattttgtctgtatttccagaattcagtggctcataaaaattacagccccgaaaaatacgaatttccgaaatccgggaccacctccggatttaggttcaaaaatttcgatttgtactgcttatgtgtccatattgctgctgtctgtggtccaactcggtttgtgttatatgggctaaaaatctatcaaaagttaaaaaaaaaatatatatatatatataaaccgggcctcacctaaatgagttattatgaacaaaaaatttttttttaatgagataggaaagctaattactgaattactgagaaaatttaattaagccttgccaaatcaaattttagtaatcactcatttgcagccataaaatattcatttggaactaaaatttcgaattttaatctaagaaaaataatttaaatttcattaatatcaaaaaaaattttcaataacaaaattccctcaaaggtggaagggaaattctcttcgacccacatcaaaatccacagaatcttgccttgggatttcgtctatattctttttgtctaatggttattttttgtctgttttggcattttttgagctttatatatttttttgtattaaattaataattttcatttaaattttcagcaattctaataaattaatgtatttcctctacaattgaaacagagcaaaacgcctttttatttatttttgcagctttatgttcataagattatttgcctaattccagcaattgcatg

SEQ ID NO: 111746 - DNA, 91 bp, Heterodera glycines
tttcaaaaaaattgaaataaataaattattttatttaaatttttaattgttaggtctgctcaaaacgccagtgcgtgccgcgaaagcaatg

SEQ ID NO: 111747 - DNA, 117 bp, Heterodera glycines
actgagaaaataaaattcgaattaatattttttttaatatattatcttttaaataattatcattattttattccaaaattttattcaccagcatatgcaacaaattggacagccatg

SEQ ID NO: 111748 - DNA, 443 bp, Heterodera glycines
tttttaaaataatttgtatttattctaaaatactatttaatcactgtaaataaattcttgtgtcttctccaaaaagatgtaaaaatgaaaggatgtaatggtcaaaaggaaacgaacgatgaaaatcaattataaattataaaactactccttctccctctccattcctccccgttctgttccgccccaactaatcgcgcctattgcgtgtctatctttgagctatgtggagcaatggggcatattttgtgcgtcctgtttgtgcacatattgttaagccgcattaattttagaaagatcattttgccaaaaaaaaaaaaaaattcaaattgaataattcaaatttttttattgctctttttaatttatctaactgtcaatttatgctttacatatttcttgattttactttttagatttaccatattcctcagttgattatg

SEQ ID NO: 111749 - DNA, 125 bp, Heterodera glycines
ttttgaccctaacttttttgaaactcaataaaattttttgaaatttatcagaataatagagaaatcttttggctatctaactatataaacaaaattaaaattggttgtttcagaaaaaagttatg

SEQ ID NO: 111750 - DNA, 122 bp, Heterodera glycines
ggtggaaaaacagaaaattatgatttcaaattgcaatctaaatgaatttttaagggccaaaattgcacggatgacgtggacgaatgttcggatgagatgacgcgttgtttcaatggcaaatg

SEQ ID NO: 111751 - DNA, 284 bp, Heterodera glycines
tttccaatatttgttcaacagttatttagaattttaatttaggtattttgcaccagaatgtgtgttgaatcgaagggagaaattgtccttttgcactgacatttggtccttcgggattttgcttgttgaactttttacgggatggcaatttgccaaaatttggagtcggaagcaagttgtgtctgtgcttcggtcaatcattttcaaaagttattttatcttaatttaattacttttccacgcttcgttttctttgaacatttttgctaattttagccaaaatg

SEQ ID NO: 111752 - DNA, 1003 bp, Heterodera glycines
aataaaaagtaagctaaaaccaaaaaaatattcattgaaaattatatgtaatattaagaactttgtgtttttaagttaaaccatgtcaaagagcaacaaagtaattttttatttatttaattgtcaaataattttaattattttttataaacagttaaattctgatgtaaattttcaaattttagtattttgtagcttaacttgtaaaaatattttgatacaaaataatattttataaagtgaaaatcccttccctaacattcaaaagtatagtcaaatttataaatgctaagtgcaaccgaattcatattataatttttttattcaaaatgtttcattgttattattattattattttcaataaaatttgggccatttaatgcttaaaaaaagaaggtattttagaaaaaatattttttgtcattgaaaaatgaatataattttttgtttattgaaaaatgtatttgctaatggaacaaatcatcgatatgtcgatttttttttgttgttgaatacttgaagaataataaaattgtaattttattatagcttttctatgtgataagatattgttgaaaggataattcataaaatttcttattaaatgaaatttaaattgtttatattttattgaaaaatttttgataattaaagtatttattacataaattatttcattagtaataaatttttgcttcctttagatgccttttatactaattttattttacattttttgtttaaattgtcttcaaattttcgctgtggacgaaggattaaatgatttatttgaaaaaattgttgtaaattctaatgaatcaacttcacataaaagtgatgaacaaaatgctggaaatgttgtaaaacgtgaacaaattgaatatgatgaacaaaaaatggcaggaaaattggcacacaaatttttaaaaataaaaaaagaaccaaagtttgaggaggaagaggacaaaacaggcgaagataagaaaaatttatcaaaagatg

SEQ ID NO: 111753 - DNA, 583 bp, Heterodera glycines
cccccccccccaaattaaaactccctccccttcccttttgaggggggttgataaacaaaacccccggggctctattttaggaaatacggttaatgtcgaaaaaagcaattgcaacacaattaaaagaatcattttgcgggaacggagcatggagaagaaacaaacagagattgacgtaattaatacacttcgatcactgatcagcaaatgtttcatttgaatggaccgaccgataacaaaaagaaaaaaaaattgttttttcataaaattgttaaagtttacattaatcaacagattgatgttcaaattcggcgaatgatccaaagcacaaacaacgaacaatcaatcactaatttcaacgtttgtgtcaattgataacttacttaatctgtcatttttgcattaatggatgaccaaaatggaggagggcaaatttattgtaatgcgcgtgatcgaaccgaccaaattggagggggcggtgaccttaaagcgaaggcatttcatcctcagaacagaaataggcatttgatgaacacttttcaatttcaattttaatcgagtgttaattttgagtttagaaatg

SEQ ID NO: 111754 - DNA, 268 bp, Heterodera glycines
aatataggactaaaaaagcccgaaatatgaactaaaaagatcttaaataggccaaatatcggaccaaaatatagttgatcagatcatttccttaagggtgcaatgaagtgactaaaatttgagcactctaagtggacttgaaacaatataaattttttcgattttcattacattaactgcttaactccgaaaaatcacataaaaaactactttggagcatcaaattctcgaaaaaattattttcagacagttcattatagaaataatg

SEQ ID NO: 111755 - DNA, 557 bp, Heterodera glycines
gaagcaaatctgctccttttctgggcaaaataccgacaaaaactttgaaaagggaagtcgcaaacgaagcaaaaacggttcggtcttttggggaacaaattgaaatatcaaaggaaattaacacattgaaagaataattcaacaaatgatgacgagaggaaggaggaggagcaattcgcatctctgaaaaaccgttgccatacaatcgcatcgacaagcgcaccttttgcttcgacaaaagtgcaacagaacggcgtggacagcaatcattctctgtctgcaaaacaggcattgtttggaattaacacaaaaatacatttttaacatttttactttttaatggtaattagcaaaattattttttgtgtatagaaatgcatttaatttaccattatgaaattcagtcttcgtcctcttctcccgttgcatccacaaaaacttttcgacggcggactgcctttgaaacttcggaagcaatgcgtgaaattttcggtgcatattctcctttctcatcacagaaaaaagagaattccggagaatttaatcggaaaaaaatg

SEQ ID NO: 111756 - DNA, 59 bp, Heterodera glycines
ggtaaaaatacttaaaatcattaattatttatttatttaattaatttttagtcattatg

SEQ ID NO: 111757 - DNA, 1003 bp, Heterodera glycines
agcaagaccaaagccctacgttgggcgcccaaggctgtagccttggctaattttttttacccaaaagtgtacacttcagtaccaggcgaataacgcgcaagggtttgacctgagcgcagggtggctagcagacttattgtagagctaaatgagctcgattttttcaaattttaaaatttcgaaaattttcaaaatttttcaagttaggcctaaaaaacgattttttcgtttttgaattttaagattttttaacgatttttcccagaaaaacgaagaccacttccaacacatagttttttgagctctatcgactggtaattttttcggaaaaatttcgatttttttccggaaatagaaaaattttttggcctcagcgggacatttgagtcccgggcccataactcgtcaggggtcggttttagacaaaaattgccttagagccaaattgtagagctttttaaactctatcgaatgttgtacaatctgttcggaaattttcaaaaattttcgagctaggccccctagaaattttcagaaattttttttgggtttaaaaagagggtgaaaaatatttttctggggtaaattagggtcctgagcacaaatatgatgtttattttaagtttcagattttttggaattttttaaaaattcaaaaatatttttcaatttttcggccctcgggattttgggcgaatatttgaaaattcatagctcacttcactgtgggactattttaatgaaataaagctttaaaaatggagaaaaatatggagaattttatgggatttatttgaaatttatatctcaaaaaagaaaaaagttattccagaatttctggaaaaattcgaattttcagaaaaaaatttatacctcggttctgaaaagtcactctagaaaaataaaatactacaaaaatccgcaattttttgctctattatataaattttatttggcctttttatcacttttttaagaattgttataaaattcgctgggaatg

SEQ ID NO: 111758 - DNA, 221 bp, Heterodera glycines
aggttcgcatctggacattcaaacccggtatttgatttagttagtaggactttcccacgcgattcaagaatctaggaaatttgttaggtttttgagtgcacataaatgtttgtatagaaaacgtgaaagcgatatatcttttgataaattatcatttaattcattattacttaaattataagttttgtttatacaaattatattaaacattaattcatatg

SEQ ID NO: 111759 - DNA, 855 bp, Heterodera glycines
ttttctattgatgagacttccagagactgtttcaggtgctgctgcttccggaggcgtcgtagaaaagttccccagcagaatgtgaaatgacctttgacttttaattgaattctttgttctttataacccctatcaaataattcatttgatgattatcacacatattttatatatatttctctcctattccgtattccaatgggtgtctgtacgtgttgattggttggcattaaaatttaaaactgaaccattgctcaaatttaataacggagttcataaagctcattaggaaaaatatttttgacaagaaaatcaaatcttattactaggtcgttgcataaaaaagggcgcttttttagaaaaaaaattataaataaaatatcaaaaataacaatcataactagggttgtaaattatatggactaaaaaacgcgaaatatggactaaaaaagcccgaaatatggactaaaaaggccaaaaatggccaaatatggaccaaaatatggataaaaataggcaaaatatcttaaaaatgtcatatttttaatcaaattctagcttcacaattgcaaacgaaatacatacatttctcaaggttttttgaaatttctcattctgttgtcagcgaaaatttttcggaagcaaacaaaatacttaaaaatttgccaaaatttcgaaaaaaatctcttcttttaaggtggtgtttttttaaaatttccaaaaacccgatcctttgtgtgtacttttcgcttttttttttcattaaatttactgataataaaaccctatttcatgtgtttagtcgcaatccatggcgacataaaaccgaataattttatgtatgtcaaaaaaatg

SEQ ID NO: 111760 - DNA, 358 bp, Heterodera glycines
taagggtagaggctgaccacgtcaatgcacaaaatctcctccccttcggcacacacgtgatggagcttgaacggctccgtacgaccacccctcaacgcgtcgctgcgtgggtcaagcggacggggcacaaacacatgctcataccgccccctcagcgccgggtccctacgcagccgctccttccactcacaggcccacaccgtgtgcagctcacagccgtgttggtgctccagctcccacaaacgccgcaccgtccgctcgtacagatcctccgccgtccgaccggcggccaaccgttgttgccggttggggaagcactcaacacatcctagcaataaatttggatacaaaaaaaatg

SEQ ID NO: 111761 - DNA, 179 bp, Heterodera glycines
  unsure (1)..(179): unsure at all n locations
ttgcatnngcctgcannggtctgaattantttgatttgggccaaagcccaattttgaagtaactttaatttaaattatgtgagtgtacaattaaatattgaatttgtaatacacaaaagaagggaaaataaaacgattaaaaagtccaaataaaattggaaattgattgaataataatg

SEQ ID NO: 111762 - DNA, 84 bp, Heterodera glycines
tctgcgtaatggacattgattattgatgagaaataatttgtgattaattactttttaaatccggagtcagaatccggagttatg

SEQ ID NO: 111763 - DNA, 533 bp, Heterodera glycines
agtggaaaattgatcagatcggaatgaaaggaaaacgcaatgaatttgaacaattatcatcattttattaatatttctgcactaattatcactggataattttttatcatgggacttgaatgaatggataactattgttcctctaatgctagaaacagttcagatcagtaggcaatgggtatgaatacatctgatctgcgatcacatctctgattagcgaactgatcaaggaaatgaaaataaattaaattaaaattaaaaataaataaataaaattaaaaaataaatttaaattaaattaaataaattaaaattaaataaatattaatacaaaagttaataaaaataaattattattaataataaaaataatacagattaaataaaattaaaattaaattaaataaattaaaattaaattaaataaataattaaaattaataaattaaaaatataattaaataaattataactaaattcaatttattcgagtataaatagcaaaattttctcttattattcatttaaaaatg

SEQ ID NO: 111764 - DNA, 128 bp, Heterodera glycines
  unsure (1)..(128): unsure at all n locations
ttaggtttaattatcccgggacaanttattaaaaattacattttatgcctttgaccaaaaagtgccatgaattccgagcaatcgtttgnccaatacaccaaagcaaattacaatggancgaggtaatg

SEQ ID NO: 111765 - DNA, 106 bp, Heterodera glycines
ttccgcttcctttacattttttgccgggggtgccaaattattttttgcgtttgttccgcggatttcccatgcgattggtaccgtcggtcttctgcataaattaatg

SEQ ID NO: 111766 - DNA, 333 bp, Heterodera glycines
aagcaaatttggatttatgatgctttttttaattatttttaaatcattttcactattttattttattttttcttaaataaattcattgagaacatccctccgaattattgcttgccttttaacaatacatagcggtagcggtaataattaattagcgtctctttgcttttgaaagtgtcacaactgattcgcggtggagggggtgggttgggtggttgcggaaattaattaataaccggcggcatgcgcacaacaaagccaagcattcattccttttctgcttaaaattacattgaccttacatttttataattaaatttagaaataaaaatg

SEQ ID NO: 111767 - DNA, 548 bp, Heterodera glycines
agcgaaatgtgcgaaaacgaaaaggcattttattctggtcactttttactttgactgccccgactaaaaagcacaggggaaacctttcgtttttttttgttgactattttacgttttaaggatcactgaagatgggcatttatttatctcgaccaacatttttgcaaaaaaggaattcccttgtgtttttttcctcgggacaatcaaaataaaaaagtgccgtattttgtaaaaaggtgggagaggaaaaagaaaggacaaattgaatttaacaaagtcgagaaatgataatgcgagttgagttgagtcgcctttatactaaagaaaaaacaaacgtgcacaaacaaattttcaaaaagtgttcggtgaaatttgaacttccttcgattttgacatttcgatttttctctctgtataaatatgcaaccattttcatttgtcgactatcattttgcacttcattaaagtagcaatattttttaattaacaatttcagcgaacaaacttccaacgtcctaatttctgaaacgaccaccattccccaaatg

SEQ ID NO: 111768 - DNA, 358 bp, Heterodera glycines
ttgggcggctgatgcaatttgcaaatgaaagaaaggcaaatcgattgttctatgattttttgctggaaaacggtttttgccagcaagagattgaattccgtcttcttttataaatttgttggctcacaatcaggcctgtaaaccagaaaaaaactggagggcgacatttgaggatttttaattttttcccagtgtaatttccaagaaataattttcaaaattataatgtttgttaatagttgttggtcaattgggctaatgaaaaataacgcgtaatattacattacaaaattttcaaaaatacccacttttcaaaaaaatctttcgaggggagggcgtccatttctgttagggcatg

SEQ ID NO: 111769 - DNA, 471 bp, Heterodera glycines
aaaaagataaggaaggcacaatgaacgaatgagtgaattaatggcacacattgcggtaaaaagtgccgcgccaccattcactccccgagggcacagcggcaaaatgcaatcaatatcaattttatctgctgtcattaggcatatatttgtgtttgtttgaaaatgccgccagcgccgctcatccgaaacaaaaaagtgcggtgccgccgacgatttgtgcactgcgcgccctcccctccccccgcctcagggcatttatgcccggagggacgggcagataattagcaaattgcgcgaaatattgtgccatcgccgtcgtcatctcgcgggagacattgtgccaaattgggtatcaaagcagcgtgcttggaaaatttggataaataatggaagaaaatttccgaaatttaaattttttgatatttaaaatttagtagaaattcaaatccaaaaaaaattgtgccaaaaatg

SEQ ID NO: 111770 - DNA, 802 bp, Heterodera glycines
aatgggaaggtatctgtaggatatcaaaaatgggaaaggaatacggtagaaaatggaaaagtgaatacggtcgttatgaaaaagggaaaggaagacagtaatttaataatattaaaatctttacagtcaacaaccagcagaaatactgtagcacctttgtccactattagtagaacaattagcacgagcacaacgccaatgccaacagcaatttcaaccacaacagttccactgactcaaactgtaattagagaaaaggtgttgattaattttaaaattgcataaaatcttaatttttgatttaaacatttttatggtataattcgcagcaaaatttgaatgagtttgacctcgattctgcgccccctttctgcattgatagacaaccgctggaacttcgttgcgcttctcaactcaaaattagacaccaaattgacaccggacaacctaagcctaccgtaatcccatggcaagttgttttgtttgaaattgactcgaaacaaccgaatttaggcctacggtagttgacaatgacccgcacattcaaatcagtgcagtaaatatgaacatttcggcaaaagcatataaattcagaggtgttgttagctgcttatttgaattaagcttttctaataattttttgaaaaaataatttttaaatttaaaattatttcccttttaatttgtttttttccacaaggcgatgagacggaaatcgtttggcgagctgttgattttcacggtgaattgaaacagtgtgtgacaaagcttgtcttcgaaggtggtacctcttctgacgatg

SEQ ID NO: 111771 - DNA, 64 bp, Heterodera glycines
tgtataatatattcaggtttatcatgacaaaaaggcgagctgtttcattaaaaagatcaaaatg

SEQ ID NO: 111772 - DNA, 134 bp, Heterodera glycines
ctgctgatgaggaagacaattttgaggagcgcactcgtcaattcttcgccttcgtcaaccagggaaacattggacaattgcgtgcgctggtcgactcgctggacgcggatgagctgagcattttgctggagatg

SEQ ID NO: 111773 - DNA, 1003 bp, Heterodera glycines
  unsure (1)..(1003): unsure at all n locations
aaaaattttaaaaaataaaatcgcgtgaaataaaacattttccacatttttatgtttattttcgtcaaattttatcaatttttcgaaatttaaatttttatttaatgtttttgtgaaatttttccttaaatgaagaaaattttccatctttagacgttaaaagagccaaacgggccgttctaatagaggggttttttaaatccagtaagtaaagcttcgaccgtcccaccaaacaccaaaggagcggcgcacgagttcaaaaaagcggcaaaaatttcaaaaatggcaaaaaacgcagcgaaacttagccacttaaaaaattgtaaatttgcgtaaaaaatcaaaaagctagagatcggagcggggccatatcccgcgcgggatttgcgggaatttccagtccgaatcccgcaccttttttggaaanagcgggatttcgagaatgcgagatttgcgggattactcgagggatttcgtcccgaaaaaattttgaatcncaatgccgcggggcagcgagaccagcaagtttgaacttttcgggctctatatcaccccatttttcacatattttataaaattattataaattttttataaaataatatatgaaataatttaatctaaaatttgttactaaattagtcattaatggaaaaacaaataatagtcaggcgatgtcgataggccgctgggaaaattttgaaattaatcgtaattttttgatagatttttgtccaaaaatggcaaattccagttttaagattcgtttttttcaaaaatgatccggcagcgcgtctttggggggaaatttgtaatcttttaatgaaatttttaagaaattagccagaatttgagtgaaaacccccaaaaaaaagagacaaaaaagcacaaaagcagcaaaaaatgcggcacggacccctaaaaggctgtaaatgtcgcgcattccgcaccaaaatataaatcctgccgagaatatttcatcatcgcataaaataatacaatg

SEQ ID NO: 111774 - DNA, 220 bp, Heterodera glycines
actgatagtgctgcgtgctctattgttaaatgatttttttgccataatttttaaaattaatttaattttcattatttattttgcgcaaaaaaccccaaacccccggaaaagccaaagctatttttgtgatgaatttgtgcaaaaacaaaaataatggtgtcataaaattaagtagcggttttaaagtggccacagggcggcagcactctctcagaaaatg

SEQ ID NO: 111775 - DNA, 679 bp, Heterodera glycines
ttttcttgccgaaacttttgcgccaattttgccctcttttccatccacccacggcacttttctccgtcgccgattgagaagaaatttgaaggccgagaacggcacggaccaattgacggacatttggatgcactcagtttcacgaattcaggcaattaaatgtgaaatcaaaaagtgtccggaaaaagttttgaattgtgtttcggcaaagtattggaattgtaaacccagtcggaaaataaacaaacaattgccgcgttctggcattttgccgcatcggttgcttttgtgtttgaggtgaggcgtggtctttcagatggatgaactgctcgagaagtgtctccaaatgcacagcttttgtacggacagtgaggggcccgagagaggcgaaccgggcccagcgggtgccacgggcgacgtcggaaaaacaggcccagagggaccgcggggacagacgggcgaagtgggcactcattactcgcctggcattgatcatgtaaagtgccaatattttagccaggccaaccggggccccaggggccaactgggccacaaggggtaagccaagggaaaagcctaatgccaaaaaacgaaactgcgcacttagccagctggccaagacgcgatttgtccaacttgtccgctgcagaaacacttggaattcgaagggtcggaaatg

SEQ ID NO: 111776 - DNA, 355 bp, Heterodera glycines
ccaagtgacggtgggacttccgaatgaaacttacagtgtaggtagattacccccctttgtattataaaatttttttatttttgctaaatgaagcttctggccgagatatgaagcttttcctttttgccttattaatgtcattcccaaagaaagaaaagccaatgtgagcgtctctggcccagtgtgtatgccttccattccttttttcttcttttagagttcaattcccccaccctgcaaataattattttttgttttttacatgtccagatagtttttaagccttttaacattaataattttcatcataagaaaaatatcgatttttgggcgttagcaaaaaaccatcaaaatg

SEQ ID NO: 111777 - DNA, 202 bp, Heterodera glycines
ttgcgaccgctacactcagcgcatttgtgcatcatcccatcaccaaaggtcgtttattgattttccatccattcatttctctgtgcctgaccaccactgcagcattgccggccgaaaccaagcaaaaccatttctctctcttatcaccattcaaattcatcactcactctgctccaattgaattcaatttctgactaaaatg

SEQ ID NO: 111778 - DNA, 92 bp, Heterodera glycines
tcaaaactagttaaaaaaccagtttaaaggacttgccatatgaatttttaagattttcctttcattttaagttgggttgggcccccgaaatg

SEQ ID NO: 111779 - DNA, 170 bp, Heterodera glycines
aaatcaacgagtcatcaaaatatgagacaccgagaatatgtggacatgttccggcaatgtcaaagtgccgaaaggcatttgctaaaagattagtcaaaataattcaagagttgtgccacatagttggttttgattggcaaaaaattgggcaatgttttggccaaagaatg

SEQ ID NO: 111780 - DNA, 1003 bp, Heterodera glycines
ccaacgatatcggggaaacggcggaggggggggacgaactgtttcccaattatattgcatatttaaattttttttttgcaattaataaaaaagcacccaaaaatcacagaaaaaggaatgaaatatgcaaacaacaaaattacacaattattctccttccatcccccgagggtgggtaaatgtttcaataaaaataggtatgtgaaatttgcctcaaggggaaatcactaaatggcaaaacaaaaaaatagtgatgtcttatttgttttgccctcgaattaacaattaatgaatggattaaaaaaaagtgacgaacgaactcatttattagttaattaggtttctttttgagtttccaattacagtagcatttgccttggattttgcagagtgatactgttgaagagaaacccttttgaaattgcctattttggtccaaaaaacctaggaattgattccgagtccgttaccagcttcagttcgttcgttatttacgtatatatatttataccgtaaaataaaattccatgggacgctaaaaattttatgggacgcaaattctgcagtagaaactatttgtttttggaaaatttatatttttatgtgagttttagatgcagaaatttcaattccttcacaaatttcatcatttttaaaattcccagtcttcccaacaccgtatgttatgggtgactgatctcctaaccatagtagttttaataaaaatctttaaaaaatttggcttaattaatttccccgcagcagaccctaaaaatactttaattttcttaaaaaaattatgacacccgggatcgggatccggcaaaaccgggatttgaatcccggtaacccaatcctggcctggtgccaatcacgaatcccgactttttcaaaatccgggctcgactgattatttaataattaaaaatcattattagaatcataatttctctttttattaatttgcattttaaaattgactctttttcggcttatcgtcatg

SEQ ID NO: 111781 - DNA, 415 bp, Heterodera glycines
gaaaggaggacgaatgatcggagaatttaatcggaagaactttttttgtcgtttcgatttacaaaattttcgaaaatatgttttgttatttggaaaaatgtaaaacatattcctattatccttaaattacataaaagataaatgaattttgaacaaaattcggcaagcacatataaaggatctaattttttaaaatatgtatgtaaatgctgtaacttttaagttaattgtaagcattaaaaaatttaaccaaacgccgctcaagcataaaaactagagttgagcgggaccgggaccggggcgggaaatcccggttttttcaggtcccggtcccggtttttggaaaaacagaaatcccggtctcggttttgcctgtcccggtcccggcgggactaaataagcactggtaagaatg

SEQ ID NO: 111782 - DNA, 1003 bp, Heterodera glycines
  unsure (1)..(1003): unsure at all n locations
gtagagcacacacccagacacgagggaattaattnatatgctcacataanttgngatatggcttttgagtgtctacaccagtgatgcccgcggntgagaaaaattcggggtcgggttcggggtgagaaaacttcggggttcgggtcgggttgcctcccttgtctacactttaactgaacctaataaactaaaattaacaacttttataaaaaaaggcaaaatgaaacttttaatttttaataaaaaggaaacttttaccaaaaatttaaatttttaattttaaaaaaaaaattttttaaaaaaagggggggaaattttgggtgggaagggggaaaattgggcggaaaaaaaaaaagggaaaaaatttttttaaaaaaatttttttttttttttgcccaaaattttttttttttcccttttaaaaaatttaaaaaaaatttttcttttttaaaaaaaaaatggccttaaattaaaaaaaaaataaaaaaaaaaaaaagggccttttttttttttttaaaaaaaaaaaaaaaaaaaaaaaaaaaaaaaaaatttttttttttttcccaaaaagagggggttgtttttttttatttttttttttttttttatataaaaaaaaaaaaaaaaaaaagaaataaaaaaaaaaaaaaaaaaaaaacaaagcctttttttttttttttttttttttttttttaaaaattttcttttggggggggggggggttttttttttttttttaggaggagggaaaccacgagggggaaaaagcccccctgtgcccacacaaaaaataaaaaaaaaaaggaaaattttttttttttttattttttggtttgaggggggaaaattttggaaatttttcccccccctttgaaccccttttttttttccccccttttcaaagcgatccggatcttttaaaaaattttgcttgttggatactcgttcttttcggatcgtatcccccccctggccagcacgcttatcaaagcacaaaaaaatg

SEQ ID NO: 111783 - DNA, 119 bp, Heterodera glycines
gctttattctgttggccggcggtgaaattgattacggcaacggcaacgtggcacgcctggtggactaatggacgctcgaccttaccaacttcacgtggcaccaagtggccgcccaaatg

SEQ ID NO: 111784 - DNA, 589 bp, Heterodera glycines
  unsure (1)..(589): unsure at all n locations
ggttcagttatgacgaccagcggagcattcggattaaggttttctattagcaaagccaagcaattagttcccaatntaaattgtgattaaatntaattaagatggaatggctccggcagaagggattgggcggcacttacatttgggcgattgattacgacgactttaacgaagtgtgcccaaacagcaaaaatgatggtttatcatttttgaaatatgctttcattatcttctctaattgttgcttaattaattaggcccctaccccctaattggcacaattgcgcgagaacttggcggagtgaacagacttgggctgccagtggcaaaactaatgaaaaaagtcaatttcaaaatataattagaaaactcattattttaatttataatttagaaaaacgattgtctgtccgcttcttccgctgattttgacactcacttttgcctctccaaatttttgtttacgttttttgccggcatttttcttcttttggcattttctgcttccctttcgtcagcaatttctaacaatttcaattcatttttctctcttttaaggtgctttttcatctttttcctgttcaaaatg

SEQ ID NO: 111785 - DNA, 92 bp, Heterodera glycines
cgtgatatttcgatttgagactgactattcaacgattacacaaaaatatttagttggtccaaaatgaccagttgatggactccattaaaatg

SEQ ID NO: 111786 - DNA, 577 bp, Heterodera glycines
  unsure (1)..(577): unsure at all n locations
agaaaataaccaccngttgcagtgcataatctcgattaataataaattcgttttgtgtgtatttgagtgaaatttcgttgggatttgactgggattcagttttcaaaatgcacgagtatatagcattttcacaaatgcaagatttttttgttttccaaaattctaaatcatttcattcaaaatgataatccaattaatgacagtcttttgtacttttggggaaggaattggtttaaattgaaacaaacaacagcaggtgtttgtgattcgtgaaataaaggaaaaaaattaattcgatgaaagcaaaatctcgtaccaagcaaaaattaatgccattctttcgtattttaataaatcaaatgggtaattaatttccttaactgccttgagttcagaaaatactaaattttacatatttgaaattgctttactttctcagtctctttacccctttcgttatgtttccgtttcaattttttgcctaattatttgccgacttcattaaaacatcgacattttaatgaaataagcgtaaattaaattagttattattagagctcgtattttgaggcatatg

SEQ ID NO: 111787 - DNA, 785 bp, Heterodera glycines
ttattagtttattaccgtttagctaataccgttttttaatcctttttttgtttagaacattgtccctgcggacgttgtgaaaattgcgccatttactcttttcccgtcgcccttcccacgcgaactttttgtccaagcgcagaaagtgcacaaagtgaggaagtgaataaagacaacaaaataaaaagatttagttattttatttataaaataaaaggcaattaattaattatttttcattaattaggccactcaattaattcatttttcattaatgaggccatccaattaatgtattttctcattaattaggccatcctttaatgatttttcattaattaggccactcaattaattcatttttcattaatgaggccattcaattaatgtattttctcattaattaggccatcctttaatgatttttcattaattaggccatccaattaattcatttttctattaattaggccatccaattaattcatttttctattaattaggccatccaattaatgtattttcgcgccgcgtcgaactttgaatttttgaaagatgtgcacaagggactgctgaaaacagaccaaaatttcatagaaacttttaaaagcattgaaagcagacacttggaaggcattaagcaaccgctgactttgttctgcaacagagcagtgagttgctgaaaattttgaagggataattaaattaattaatttatttttaatgttttagaaaaatattttaaaattgcaatattttagttacaatatttttaggattatatg

SEQ ID NO: 111788 - DNA, 449 bp, Heterodera glycines
  unsure (1)..(449): unsure at all n locations
ttatgaattaatntttgcaaaataataaataagtaatgattaagtcagaatttcgaaaaattttaaaaacaacaagcgttggcattttttcaggttaagttagtcctttacaatggagaaggcctgcaaaatttggagagattatatcgattttagtgcgctaggttcgatgaaactttttaaaatataagcctaaactttttggcctgtttaaaaaggaattaaaaatttttaaaatatttattcatctcccttttgatagaaaaagcatcagagagccttatttaacttttaattaacatttggtgcgtttcagagcactttctgaaaaaatacttatgaattaattttgcaaaaaataaataagtaatgaaaaagtcagaatttcgaaaaattttaaaaacaacaagcgttggcattttttcaggttaagttagtcctttacaatg

SEQ ID NO: 111789 - DNA, 390 bp, Heterodera glycines
ctgattgtgtgtgaatccaattgacaacaaatgtttctaccctggatgtggtcattgttttaagaaaactaatgagcaaatttttaaaattattgataatgtaatttacaagaaaataaaaaataaataatcaaaaattcatttatttaatatttaaatattttaaattgaaagaaatattcataaataaaaactaaaaattaatttattttttattttaaaaatacacctaaatgattttttaaaggttccaaaaatttaacaaatttaagatttaaaatcgaagatttattttcgtattgttttttcccattccaaaattttttattttttttattttgcaaaaaatttttaatttttttaaattaaataattcattattttcagatg

SEQ ID NO: 111790 - DNA, 93 bp, Heterodera glycines
agtgggtaaaaataagaaactgctgggaacatccaacatcagtaatagaaaccattggaactaaatcaatctttaattgttccgtttaagatg

SEQ ID NO: 111791 - DNA, 66 bp, Heterodera glycines
gtaataattgtgaaaaaaagttaattaatttaaaacaattaaatttcaaacttttaattagctatg

SEQ ID NO: 111792 - DNA, 88 bp, Heterodera glycines
ataataaaattatttttttcaggaattaatgagtaaaaaaaaaattaaaacaaaagtctgacgtgaagaaacccgtgcagaaaagatg

SEQ ID NO: 111793 - DNA, 131 bp, Heterodera glycines
ttgtccgttgtagtgaccgagacttgggcaacaacacacgtgcatcatcactaagagtctctcggtgctctgcaattgaagatgatcaccgataggaatgcagaagggcgacaaggataggtacaaaaatg

SEQ ID NO: 111794 - DNA, 73 bp, Heterodera glycines
tttcctcccgatttcaaggccaagttcacggtcttcggactgcagatcttcccttgggacggggtggatcatg

SEQ ID NO: 111795 - DNA, 514 bp, Heterodera glycines
cacctttattgtccaaaaacgattcaaatgcatcgcgtctttcctggatgaaccccctaatttctattcatttaagtctacttgaatcgtttttggacaataaaggtggattttagtgaaaaattaattttcggctttggttcgaatttgggtccggagttcgaaactagtcgaaatgaatgtcattttcgtgatcagcggcccgaatacccctggaaacacgttttaataattaaaaaaaacaatttttttatgtggcgtaaactgcataagtaccgagaattccctccctcccaaatcataatattttcagagcttaattgggcacaaaaatttttgattcaaccaatttatatctcaacgctttctttagcaactttggacgaggaggaagcgaacctcagctcgggagacgactgcgacaacgaactccgccaattgcaggaggacggggaactttcgctggaagaattgcaacggaaatattacgggggaggagaggagcgggaagatg

SEQ ID NO: 111796 - DNA, 401 bp, Heterodera glycines
ttatttttttaaaatttttcaaaaagtattctttaaaattgtattttttgctttttttctcatttttcctggggaaaatttgccaaaaaatggcccaaaaaattaggcttaacaaggcaaaaaatggcgaaaatatggatttattcccgaaaacccccaaaatatggatttatatggaccaaaaaccttcaccaaaccaaaaaatttaatgcagaaatgctatttttgagcccttttcttcatagcatatgcgtaaaaaatatgatatccatacaatttcgagccctaattatattgcaattgttgaacactctaactgattttattaaaatttaaaggctattcaattgcaagagaatggggcgaaggaggaaaattcggagtccgatttcgaaaaaatg

SEQ ID NO: 111797 - DNA, 282 bp, Heterodera glycines
ttgtttttcttcgatattttgtcacaaatatttttacagtatattaaatttttatgatttagtcaaatgctcgagactctctgtctcgacttgagaaaactcttctctcggggcttttttccgctcattacgcctcaaaacaataaaatgatgattgagcataattagtcaaaaataggaaaacatatcgtactattattttctccttaaaaaaaattacatttcgacaaatttggttttgcttgtattccgttgagagaacccgctttagttgctgaaatg

SEQ ID NO: 111798 - DNA, 494 bp, Heterodera glycines
tatttgagtattgaatgatttcaattgatttatctatcaattaaaaaaaaagataaaatttaatttgccaaattataaaaaaaaaaaataataataatttttggtttcggaggattggaaattggaaaaagcgcaaaatgactaacgaaatgaaagaaattttgatgaaaatgaatcagatgaaaatggaacaaaattgaaaagaaaagtgaatgagtagtgggtccatcagttcaatcatttttatagacaaaacagtaaatcagttttggcattttcgaaaataggcattttgaaatgggacggcaaatgcgccatggaatttttcaagcattgcccgccttcgccacagcaacaagctgctttatgccaaaggcatcataaatggcattggcattgctgaaggaagatgttcccaccaaccgctactgcccgtccctccccctccccccgggcattttcattaggatgccggatttggaatgggcaaaatg

SEQ ID NO: 111799 - DNA, 1003 bp, Heterodera glycines
agtgacgaaaagtgacgtccaaagaaaaaatttaatgtagaaatgcgtttttgagctcctttcttcaaaacaattgagcgaaaaaaagttttttcactagaaatcccgaccctactaatgtgcgaagggggagggaccggagggcctttcagtgcagcacccctcacatttgctcatcccggccgttcccccatctcatttatgcaacatttctccagcgaagcgacgccactattttttcagcgctcattccccatcccatttaatttgcatttatgcgtttttacgatttaaaaatatttttaaatatttatgtaatattttaaatatttatgtaccaaaattttattaattgaaactgatcagaaaagcgcctgattaaacatttattgcgttttcccctttaatcttttgcttcaaatatggtgattttccaaatatatttattctccaaaaataataataataattgggttatggcccagacaaaacggcattatttttccccactcaaatttaccgatcactataccgtatccttttttgggttttcaaatgataattttggatcatttttactcaatcaatttccaattttatttggacttatttttaattcgttttccctttacgtgtattacaattcaataaacaattgcttattttcgttaaatttaatttccatttgtttttttccattgtttattgccgtttttattttcaatgcgctgttcctggtttgatcagccgatttggcatttacctccaaacatttttcacttttggccgacacttatttatgtatttttatttttttttatttccccattggacgtttgtttgaattttgtcattgccaatgcattttttggcatgctttgttgaccaccttttccctacatttctttttgcatttcttttatgccgattccataaaggcatatattaattgcttattacaaatgctgataaagtaaagtagttaacccctttatcgtgcatg

SEQ ID NO: 111800 - DNA, 539 bp, Heterodera glycines
cggcccgtccgagtacatctcagcaacggcgctcaaatgctaattaaaacagtggagacgggtgtgcaggtacggcctggtccggacgaaccgaaggacaagtccgtgatggttacggacgaagatgaagatgaagaaattgaagtgccaaagtttttaacctcatcaagccagacgcagggaagcagccgatcacccaggaccaataagaaagcagcaaatcagcaaaaattgatcgagaagaaggaccacctgttggccatcattatgtctgatccgcagagattcggcgcaactgaccgtgggaaaatcattaacccaaagacgggccgagagtttatcgactcggacctggcctggtcaattgaacgcctggtggaccctcgcccggagaatgccccttcgccacgcggaaccaaagagttgaagaggaaactcgcacagaatccgctcgccagtagcctactcgatcgactgtttgttaggtctgggttcgtcggacaagtcaaacaaacgagaggatttgttccctcaaaatg

SEQ ID NO: 111801 - DNA, 1003 bp, Heterodera glycines
aaaattttcaatcaattcaagcaccaaattttgagaaaattttgctttttaaaccgcatatgcaaaatggtacaaatgataaggaaaattaacaaaatgatgataaacgataaaaccaataagggacacaaaattggtcaattaaacactaattgtctctgtccattgagtgatcgattgatcaccgtgaccagccaacggcaagcaatggggtgatttgatcacctgctgctcgcaagaattgattggatttccttttaaactgagaatgatcagccaaaagcatttaatcaaactcaacgtttaaaataagcaccaatcaaatgggaagcgtacaaaaaaaaaatacgcagaaaattttgcggtttattgaattttttaatcaagtcgacttcagcatggctctgatctcaaaaatttgaatatcgatttatttatataaaagcaaaaaaaatttttgaggatatattaattttaaaaagaaaaaaaagtgatgatggaaaataaagcatacgaaggttatgttaaaacatctacatctttttgaagtcgcaaatagataaagaagaatttaaatgatgatatttttgatatttaattattgaaatatctaaaataaaacagatacaagatcttattaaagaaatttctatattatttcatccagataaaggtttatatgattttgttgattctttaattctcatttaaattgcataaattcaatgaaaaaattcgtttaataaatttttgtcgttaaataaacattaaataattggccacaagaatatcaaataacaaacagttcacttgttggaccttaagtgggagtggcgggggaggcgaaatcccagaaaaatatgttgcaataaattctgtattgttttaatgcggaaatcgcttttcattttgtaaaaattaaaaataaaaaatttgcaataaaaattggaagcggaaaatggcgaaactctcgccggtgtgtgcagtggggcgagactgaatg

SEQ ID NO: 111802 - DNA, 158 bp, Heterodera glycines
atttttcgggaccaatgttctttactattaacccccccgcgggtggtgtgacattttattatacttacaattagtattgtataatttaggacgattcagacgagaaggacaacacagcggatgaaggtgatgatgtagaggaaagttcggagaagatg

SEQ ID NO: 111803 - DNA, 1003 bp, Heterodera glycines
ggcccggtgcggggcgggatcccgcgctagattaggcgcaatcccgcatttttttgggggaattgcgggattaatccagcgggatgaagtcccacaaaaacttgagttccaatccacagcaggatccgcaaatttgtttttttttgtgcgggatcccgcaggaatcggcattgcattttttgaaaattcattaacagaataccaattttctgaataaatttaaaataaattcaattaaatttaaaacagttttccatcgtatttcatccaaaatttatgaaaattttcccggcggtgcctgttggctcgccggactaacctttaagctgattattaattctttaaatattctcaaaaagctacatttggccatttttggacaaaatctattaacaaagccaaaaaatttcaaaaaattttccaggcgacacctaattccaaaaagtttctaacaatttgaaaatgggttttttgaaaggccatggccaaaaatatacgaaaaaacaatgtaataagttttcttaaaatttgattattaacagaagatggtttgattttggttatttatatacgctatttccgacaaattgttgttacctatttttttctaaatttgacttcccctgtgtttagtgtatataaatggcgcttttccacctttttctccattattctattctttttcttccgccctatattttgacccctcggcgtcggcaccaccctaagtaattaatattctaattgttttcttttttccaattttaattttgttttcccccctcattaagcaaatggccggtgactccgaacgcgacacgggcaggcatcatcaccacaggcatcatcgacatcgtcattcagcgcgcaccgttttgagaaatttgggctaccaatcaccgcacaaactgggcagtggacaatacagcaaagtctacaaaggtggttcacaattccatgtgcttttccagcaccatttcccttcccttttcagtgtttgatg

SEQ ID NO: 111804 - DNA, 343 bp, Heterodera glycines
atttttgttcttaatgagcttttttttacattttcccacgaacttaaattgatccgtttttcgtttatttgtttcattatgattaccgatgtgatttttgcaaccctttcatatcatattattactttaagtattaccaaaattctcactttgttcttattataatttattttatttttaaacaacttaattgtccaaattctctctacggcattatatttttttcatccaaaaatgcataaattataatattttttaaatttaacaattgttgctcttcaaacaatttattggaaaatcttttgaaaataatttttttggttataattttaagattgttatg

SEQ ID NO: 111805 - DNA, 190 bp, Heterodera glycines
acattaaattttataacaaagattttttagaaaaaaataataaacaaattgaaaatcatacgaaaaattatgacgaaaattttgaagaaaaagctaaaggtatattttttaattttcttaaaaataaaattcgagagctcgacattttgaaaaaagcatcgatttatacctggttttttcatttgacatg

SEQ ID NO: 111806 - DNA, 405 bp, Heterodera glycines
ctttccaaaaatttgtttcttttgtcaatctgccgtcttttcattgtcagaatggccaaagatgttatcttcctttgtttggctcggggagtgatcaacaaagattaatgctaggaatattggacacaaaagaataagtgactttaggcgtcccactgaaatgatttggcgacgcttcaataataaaatttgggctttgatcaaatatgcatagtcaattttggtgaaataataaaatgagggattttcttaacaaatcatgttaaatatattttctctctctctctctctctctattactttatattgtttaaaaacatgaaaagaaaaataaatagcatttttacgtaatttttttaatgaaaattttgcgttagtgtgtgcatcggcaccctgagcaggatg

SEQ ID NO: 111807 - DNA, 232 bp, Heterodera glycines
tttggcaacgccataaaagtgccaacggcggattccaaagcactcgcaagccgaatcagaaattatttatcggtctttcttcatcttttcccctttttttctctcattcctctttttttctttctctctctctctcgctctcttctctccttatcacttcctcccccctcttcagaaccccgccgtttcttggcagccttccaccgatcaacggcgcttaatcggtcacatg

SEQ ID NO: 111808 - DNA, 848 bp, Heterodera glycines
attttgaggatttttttttgggaaaatcacagatctcttcggaaaattgatcttttactgttaaatatttttggcatataaaataaagtttaggtaagattagcgataatggacggggcggtggtttggggtagggaacattaaaaaactcatgtgcaaatattccaccaaaatggtggatttatgggtaggatgctatttaattactttttggctgcattttgtcaccattgagctgtaaacgcatttttcctggagacgttttgggcgccgacacaacagacccccttcgacaatcctattcccacctaattacgtgtcgcctttttgtcatcatttttcaccctcttttaagctcagcccgccatttcagactttcgtaataacatccccggttatgtatataaagttataaaaataagtagtctattctctgattaattttgtttttgatccaatattactttgttatatgatcatttaattttttgtaaattcaagatacgatggaaaacaaagcctttttaaaaatcccaaaagaaaaaaggcaagtgaggaataaaaaaaattattttgcaaaacgtaaggatatcccagaatcaaatttttacaccgaaatatccaacacaataagagaaaataaaaaattcggtctgagagaaaacacgactaggttcatattcaaaaatactgaagaaaactcaaaaaaaaatttcaaaaaaataattcaatacctaaccaaaaaagctatagaaaaaaatgaaaaaaattttaaaattgaaaaaatatcgtatgacctttattgtgaagctttgaatgacccattaataataccacccagagatatg

SEQ ID NO: 111809 - DNA, 1003 bp, Heterodera glycines
aataaacaattctcaattaatgaaaaaaaaattggctgtcttttcctaattaaaaatgccatggtattggcgtgatgaattgccaaatagcatcagcagaaggcagtggagggcacaacaggtgaaaaaagcacaaatttaattttttaaaaaatttctcgatcgaattaataattttgaaattattttcgtttcttttcatagttttgttttattcttgaataatcatttttggactcatttcagcgtctacatcgtcctatccagcgtgcgcaaggtgttttaaattattatcccccccccccccataaagagaattaatgaaaaaattataagtctaactaagaaaagttaatgaggcccgggatttttttaaaatttatttaatttcaagtcccatggccatttgtacaccagcagtatttggggacagtacaatttcctccacctccgcctcatcttgttgatcctcgccatggacattttctcccaagacggtggttttattcatttattttttttaatttaaaaattttaaattgtttaaaaatttttaaatttaaattctaagacaattaatatttttctgacatatcttataaaaaaatatgattgaataagaaaaaaaatataataataaataaattttttatttttttggcggcggggaaggcaaacacagcgaaatcaagtcaatgcaaacgcaccagtacagcggcctccagtaaaactgtttaaaatactgtactgccctttgaaccccccttttttaaaaattcaacagtactaatgctttggttttcaaaatttttagtaaaaaaactaattacaatcgtaatattgtttaaccctttttttcgcaccaaaaatacagggtttggggcagtacaaaaaaatcggattataacttttgggatattaaaaaaaaaagcagcagcaggtaccattgttcattcgcaatattggtgctcagctgcaaccagtttcggttcagcaggctatg

SEQ ID NO: 111810 - DNA, 1003 bp, Heterodera glycines
agcgcgccgcaaaaaaagcagaaaaaaaggagtcgcaaattaggaaaatgatcagtgaaaactagagtggtacgggaccgggaattttgggaaaaaccgtgaccggtaattctcgcccagacccggtcccgacccaccgtagtgaaaacaaaaaaattggaaaaaattcattccggtgaaaaatacaagccatttgaataaattttaaccatttttcattgcataaaataaaaattttaaatgtccttggatttcatgaattttccccactatgtccttgcaaatcggatgcccgtccttggaagccgacattgggcgatcccatccctgccataacgttttgaacctaaaaaaaatttttgccaatgcaccaaaatttaaaagttcggagggattatccataattgacattggtctcatttatggtaatttgttttgacagtgattatttttataatttattttcattttattgcttgttttctttattcacttgctctgtttcgctataattttgacagttacagagtaagtggtccccgcccttctgtgacttatttttcttgcttaataataaattaaatttaatttaaaaaaaaaattaatcaaatcttttttggtaattgcctgaacgctgcgattttatatattttagcttcgttagaatttgtgctttcgaatgataccaaaaaggtagggtttatcgaacatgaacaaagttattgtataaaaacccgggattgacaattgattggactcataaaggtcgattggactcataaactgcactagagcaaaatccgttccctaatcatgacacataaacaaaaagatacaaaaacattcatcaatcccttttcatgtctataaaaatgtttgttttttcactttgtctcgcatttgaaaaaaaaataaaaatttctaacgcaattaattattctgctctttgttgtgtgatatcattcggaactcggccaaaattgtgctaattgccacaaaaatg

SEQ ID NO: 111811 - DNA, 227 bp, Heterodera glycines
agaagtgcgccaaacacatcaccaacaaatacccaaatggcctcaaggacgacaactactcctgcccacacttcaaccctaacgaccgggccttcgtttctacttgcacccatcttgagctaaacgccgcgttggatgccggctatacagtgcgcaaactttttcacgtcttgcaatacgaccagtggagtgacaacgtattcaaatcctacgtgagtgaaatgatg

SEQ ID NO: 111812 - DNA, 109 bp, Heterodera glycines
tttattttaaattaaattaaattataatttttattaaaaaattgtcagcaatggaattttgtttattattcttttcaatttgtatttttaattgctcaaaattgaaatg

SEQ ID NO: 111813 - DNA, 426 bp, Heterodera glycines
cagcatgcgcgttttgtgagggcgcgcattggaacgacaattgcgaaaagtacagaacttcgtcagcgagatacgcagtcgccagagagcgaaaattatgcgtcaaatgtttaagaagggcgcacgtggcgatgaagtgcccacgcccttcgaagtgctacttatgctacggcgaacacccaacagcactttgtcgacaagggaggcgacaagataggcctacgagggccatcaatcccgtcactcaatccaaaatgagaaacgagatggcggagaaggatcaattcaaagaaattggttcggcaccgacacaatgcaatgcattgaccaaggacaagtcaaaagtgcttctgcgaacaacggaagtcacaatcttcaatccatctgatccaaagaagagcacgattgcgaccgttttcatcgatg

SEQ ID NO: 111814 - DNA, 393 bp, Heterodera glycines
  unsure (1)..(393): unsure at all n locations
tttngaanatttttanatngattgtgagtgctttgtggaattttgagttttgattttatganngatattttnntaattganttttaatttgatnaaaattgattaatttgtatttaaaagatnnnttaattaattaatttntttgattttanatttaaatttgtttaattattttganttntnttnnnanagtntntttnataaaatntgttnttnaattggnnatgttngtnntnnaattngtnnaatatttntttantgnngnnnatnagttttaanagnngngttttngnnnngggaaaatttagcattgtgagaaatatttccgaagaagttcctttaattgagatttttaatggattgaatgggcaaaaaaaattaaatgtcaaaatg

SEQ ID NO: 111815 - DNA, 156 bp, Heterodera glycines
gaaatttctcaatgccaccacttccgttagctacaaaattcaatttattattgatccattgtcaacgcaaattgtgccatttgaattagctaacgaacggaccatggagaagctgacactgatcaaaaaaagcggacatcgtcatgaggaaagatg

SEQ ID NO: 111816 - DNA, 181 bp, Heterodera glycines
aaaaaaaagcaacaaaaaaattgttcgaattcgggttcggggttcgaaattggtcgaaatgaatattatattcgtgatcagcgccctcgagaaccctaaaggactttgaagaattgcataaaaccccctttgcctcttttttttgggacctgtaaaccatactattaccgccaaaaatatg

SEQ ID NO: 111817 - DNA, 1003 bp, Heterodera glycines
cgaaatacagctacagcatgaactggactcgaacctgggaccctccctttggtgaccttctcacagaccacttcgccacacatgcaaatcttttctggtacagcagctcatttcccggacgctgtgataaatagcattgacaagtctgtgtttcattctcgttctcagtttgaattttgataactcaattaatttcgtaatacattcaatgtccatacatatacctatttagtacatcaaaacagctgcaaaataaattaattaatgagtatagatgaatgttggttgacacgatgaggcgttgaaagtcgaataaaactaagggatggtccacacacagcaaaagtttagtttttatttttacttttgtcgctttttatcgcgacctattcaccatctttggcttgttacaaaagcattcttcatttattgagtggtaaaagtcattgagccttaaaattgttcattcgcatgtggatttagctgatgcttactgactttaaactttaaagtttaaacccaatgaatccgtcggcgtttcttcggtcattgctttgcttccctaacgttctctcgcagttctctcttttgtctttttcactgataaaaatgtcccgccactgataaggtgcggtgaccgacaaattaatttattattaagagccagccctttcttcattttccatttatcggtacttttttttacaaccgaattccccccccccccttttttcacttaaaacgcgtctttccattgtccgatgattctgcaatttccattcggggattttaatgttttgttgctgcttacaatcagcactgttcttttggccagatgtttaggcacaattgtacagtttgaagatgaattagaattgatggaaaacaccggtgggtcttggtaaaacttaatgcttttttcaaagtctatttttgtgaatttcaaatatgcattcggattgtgcaaattaaatgttggattgtttgtcagggacggcggatg

SEQ ID NO: 111818 - DNA, 383 bp, Heterodera glycines
aaataataaaaatgagtgaaagaattttttgttgaaaaatattttcaatttgtacaaatttatcttagtgtgtttaaataattatgtagtggagtgccattgggccgagccgggaattccagtcctccaaggggatcccggaaaatgcgtcaatagaaaatgcgtcggtgattagaatttaaaaaaaaaattctatggcattaagtattgtcgtataaaggtcaaaatattataatctcattccgaatctcggacaccaactcgaacaaaaataaaagttcaaattttgcatttttcatctaaatggttagatgatctttttatagcagaattaaaggctttcagtttacttaagtgtataaactgattctgaaccaaaaatg

SEQ ID NO: 111819 - DNA, 86 bp, Heterodera glycines
ataatttgtcactttcttcacaatttctcatctgctgctgtctctttttatgttcatcactgacaaatgctgaagaagaaaacatg

SEQ ID NO: 111820 - DNA, 1003 bp, Heterodera glycines
  unsure (1)..(1003): unsure at all n locations
agaaaacaacggttatattttttcattgtgcgttttgtataaaatttttctttgttcaaattttgtattctttattaatgttgtttgttgcttaattattcatttttattaatccttgtaaaaatgcatttaattttttggactaactttcctcgctttattaaaaattttgttttcatttattataattattaataatttaataggataattattagtttaaaattttttttaactcaaaaaatataataaaaatattttatagtagtaacccctgccattccgtcgccgcttgacgctaattagaagtgacaggtggcgggggaggggtgtcaattagtcactaattggggggtgcgctaattggtcagcggtcaacgggcactaattggtcagccgtaggggatgggtggtgtcaattaattagggaaacctagacctatgagaagggtgtgtaaaattttcatgtacttttttttgacataaaatttgattgatttaaaaagtgacagccgaggggagggggaatttgattggtcataaagtgacagccgaggggaggnggaatttgattggtcataaagtgacagatgagggaaaattcaaatctctgataaaaagtgacagatgagggcgggaaattttttgattaattgtaaaaatgacagatgaggggaaattcaaatttctgatgggggggggaggatcggaattttgattgatcaacatatgacagtttttgatattattaaattattcaaatgaagtgaaataatttgttttgcatttggactttatcaaacttgttatgaaggtgtaaatttgcaatttgttgacgatttcgcgcaatgtttcgaccgaaattaaattgtttgtcacttataaaataggtcaatttgtgaatatttaaggtttccaaaatggaattcattgtaattgctacatttgttccatacttttcttccaaaaattttccaacccattctattgtttacccaaaatg

SEQ ID NO: 111821 - DNA, 581 bp, Heterodera glycines
cagtttcactttcgccctctctttctttctcacctttttctctctttctctcactctttttccctcactcactcctctctctttctccccctttatttcacttttctttctccgggcctcactatctctatctctcttctcctcgaaacaaaacttgcgaaaactttttcggcccttttgaaaataattaattaattttaataaataaataaatacatacataatttattcgattttcctacagaatctcagtttggaatgggcccataacagcttgcaattgtcaatatctttaaatgcactcggcattttgtattggtttagaacgggtggagctgactatttcaatgatttttgtacaattttatcaaagacaattggacaaaatgtaaaaattaatttttattattttattttaaagttcttaaaattttatgggaatttttgtcattaaattaatcattttaattagacatcgatctttttgaaaaagcctggacctggacctggattccatattggacctggatttcctggacaaaaatccaaggtccaagaaaaacccagtttgccgaaaaatg

SEQ ID NO: 111822 - DNA, 943 bp, Heterodera glycines
tgattttattatttatgcgatgcgatgggaagtcgcaatttatacgcgaattttaggagttttttttgatcgcaattactctcacccccgggggctcttcgctcattttttcatgcgctaaaagaccagttgcttttgcacacagaccgaggttttttgtcagaaaaagccccggccgtcgtccatccatctcgttttatgaacacataagtttttctccataataagctgaaccagtcacactttactttttgcttatcattaactttcccatttatttttgtttcggtcaattattttttttagaattaatgaagttgaaaaaatttttatgacggaattttcaagataaagagatgtcaaatcttttgaattttaatctgtttatttacatttatttctgatctttaaaatgtcacgaaaaatattaattgaccagcataacaaattctaaacataatttcaaaagttattgccgcaattgtagcgttttgtccatttgtttacacagcatataatcatggttataacaacattcgtaagtcaaaatgcttccagtccaatggattattggaaatttaaaaaaaaaattccttatatcagttagaaattttttgaaatttaagcaaataacagaatggttttgtgtaatttaattatttttttttgtgtccatatctttttgcattcttaatatttataagttttcaatagatttaaagaatgaaaaacgagaaaagatataatttttgcaaaattttattattacttttttacaattaattggacatttattgacttcatttttagctaatatgtaataaaattaacaaataataaaaaaattcacattaattaaaaattcttcatattgagcaatccattcaaaaaaattctcaaataaattatttttctttacaaatattttcgaatagcaaaaatg

SEQ ID NO: 111823 - DNA, 57 bp, Heterodera glycines
tttttcgtgtttgtttttcggtccgaagtttttttcgagcttaaatatagccaaatg

SEQ ID NO: 111824 - DNA, 332 bp, Heterodera glycines
  unsure (1)..(332): unsure at all n locations
cccccccccccccccgatcagaanttttgaaaaaaaaatttatttttttaaaaatattatattaatttttttgtaaaaataacaaacgagtttatgaaatgaaaaaaacagatcatttacaattgaacgcgtctaatgcaatcaattcaatttaaaaaaaacataaattatttttaaaatttaaggttggggtcgtttcttccaatgtcggatttactgcttgtgtcgtattttccggtgtcggattttcctagagccgacgttacgacccgcagcgaacaacaccacgcccgctcaaggtggtcatgccaacaaccacacaccaacacatg

SEQ ID NO: 111825 - DNA, 142 bp, Heterodera glycines
aatattatgtgtccgatttgacgattcgtgaatttgctaatcccgaaccctttagaactcgatacgaataaccactaggggcgactgagcgaaccacctaaaagtttaaatttaaactcgagaaaaagcaattagcaaaatg

SEQ ID NO: 111826 - DNA, 189 bp, Heterodera glycines
ggtcggcacagtcctccaaagacatccaaattagcgtttatgagtagctaaacaaatcaaaaaagcgacgatttggcactttccctatttgcacttttatctccttcaactttttttctccattttcggctgaccattctttcatcagcgactcaatggttggcattggcattccgtagaccagggatg

SEQ ID NO: 111827 - DNA, 192 bp, Heterodera glycines
ttattactaaaaaaatcatttagtaaaaaaaaaattaaaaaaacgtctcggtcttgagtttttggcagtctcgagccttgggtcaagtgaaattttcagtcccgagtgacacgaataaaatgccaatttaaatatgcctgaatttgaatctggcccaacccaaaattgtaattcagagttattttctcaatg

SEQ ID NO: 111828 - DNA, 76 bp, Heterodera glycines
tgctgtcttggtctgacaacaattggtatttaatgaacctttccttccacagtttgttcttggcgaccatggcatg

SEQ ID NO: 111829 - DNA, 1003 bp, Heterodera glycines
ctaaaaaattacggattttttaagagttccagtaaaaaaaagggcgggacttgtcctggtcatgatgacttactctaatttacaaaatttaatatatttttcttaatttattccggcggcaaatactgcagtcaattagtagtgactttgttagttttggttttaattaggcatttttaaccaattttgtaaatttaattcaaatatttcacaaaattcttgtgaattagtccttaaacattttaattttcctatttttcccatttttttaaattatttttcaatttttatttttcgaatttttccatttgatttgtttacatatttttgcattttcataaaggtacacaatatgtatgacatttgtttgcccattatttcccattcggaaatggtcgcgctgacctttctcgtcggcttggctttatttgcccttttaatacttagtaaaagggaccattttggcatttcatcaaaacactgaattattcattttcggcctcttgggagttaattaaaattttgatttaaataaagcatttaaaccaaaagattttccataaatttttccatcaaaatttttaataaattttaaattatcttaaatgtttagtcaacaaaattttgcttgaaattaggtgtacttctcgtcattttaaattaatttaatgattcaaattttctttttaaataaaatgcacctttttcttgtcaaagctggtaaaaaaaataaaaaataaattagtaaatttattaatatatttgcctaattattccgaatttaaaaagaacgttatttaaacttaaggaagttttttttcgatttaataaatctttttttttatcaaattttgagcattagtctcaaatttttttttttttaatttaattatttttaaatttttattagatttgcaagaaatggccagtgcattttgccgaggcaccagtgccatcaaattttttggaatgtcttcgtcgtgtgaaccccagcgaagaaatg

SEQ ID NO: 111830 - DNA, 510 bp, Heterodera glycines
ataaaattgaactctgctgatccgctgatctttttatgattattacgtcacttatctacaaattttgctctcttccgttcaatgagggtttctcaattatttttgttgttttccaatgctttcggaagaaagtcgtaaacacaaaacacttccatttcgtctcccccccccccccccttcactccccacttttttctctgtttgctttgccctttcatttcgtttttatttttgtttaattttccattggttttatttgtggcttttctttaataaaaatattttcaattttgcactttttttaaattttgttaaagattttcttgctaaatttgtgtcgaataaacgcattttgggaatattttaccggattaaataaaaaaaagatggccgagacaattaaggcaagcggaaaagtgattcattaaaacaaaattgatttaattaaaccattgggtttattcaaatgattgagtttgactttgttttcaggatgccacccatcgcatg

SEQ ID NO: 111831 - DNA, 70 bp, Heterodera glycines
attatgaaaaaagaggaaaaattggcattttggcgaaaattttaagccgcggccgacgcgagggaaaatg

SEQ ID NO: 111832 - DNA, 550 bp, Heterodera glycines
tcctgcaaatccggcattttaaatttgcaggatcccgcgcaggattgcggattcttagaaattttgaaaaaatttcaaagaaatttccaaaaaaaaatacctgacaagaaattttagggcctggcgggatgcattaaaagggcgactaagatttttcgaatgggtcagacggtaaaaagagatcggaaatcaaatctgttaatggtcaataaatttgactatttttttcttttcaaaaatgctttttttctgtgcaattttttcaaaaactaggaacaaaggggtccgtctatgcagataggcgccgtctgaaatttttttttttgaaaatttttatcaattaattaactgattttgaccaaaaaatgaccaaatgtcacactttttgactcaattctacaggattaatgtcgatccaatggtgtcgataggcgccgccgggaaagtccaattcggccaattccaagaacccctgacccaaattttataaaagttattttattggatgtttcatttttccttcatttacacattttagccaataaaaatg

SEQ ID NO: 111833 - DNA, 99 bp, Heterodera glycines
ttatacttattgtaattaaggtgttctaaatgcggctgtgtggtggaaattgaaaatgatgagcacaaaatttcgtgccccaactgcaattatgcaatg

SEQ ID NO: 111834 - DNA, 284 bp, Heterodera glycines
atgagaaaaaaacggaaaagagctgccgaagcagttaaaagggggggggggggacattttaatatgagtgggctgccggcgggggagcccttcggaatcgacgacgacctatggccctttttccgcgacctttgcaccattcattctttacacgttgatgggggcggggatgttttcttgtttgaaaatttcgctttttgtactcctcgtgtaccgtccgtcccgccgctccaccaagccaatcgtcgttgtttttccgcagcagatggctgtttctactgatg

SEQ ID NO: 111835 - DNA, 424 bp, Heterodera glycines
aggacttcattcaaatttggaaattatttaaattttaacgaccagggacggtcttttggagggccggaggtgtaaggccgggaccggaaatggcctttacccttctcccccccccccccattttatctctccgatagggctcctcccatcccgaggggcgcttaaaaggcaacggataaccagccaaaggggacagtcggagttcagtcgggagtcattcagtggaatggctaatcgatccccgcctgggaggtacccccaggcatccatcaacatcccttcccttccaagccctgcggggcctaattacggacgcgtaagagggctcctctggactatttccctcataagcactgggtatgggacatcacggctttactcaaattaaaaaacccaaattaatttacatttttagctcgcaatg

SEQ ID NO: 111836 - DNA, 69 bp, Heterodera glycines
gtgattcagaaataatttattattgattacagaaatgattgttcaggttccaatgtgacagcgacaatg

SEQ ID NO: 111837 - DNA, 570 bp, Heterodera glycines
cttggctatcgaatgataccaagaatgtaaaatttggttgcctttaagcaaagttatgccatgttttgtcgaaaaattcgctaaaatggcggatttacgaaacgacccagcacgccgaaaatgtttcttaaaaagggagttttttgaaaataagaaatgtttttttgtaagatattcttttgaaaatcttaagaaaaatgagttcttcgtcgccgaaaaaaaagtcaaattcttttttgtattgtggcgcggttgagccaagatttctccaaatggttctgctcctttatgtttaacaaatgcggatcaaatgaatttgtcggtgatttccgtgtgttttatccgttctatagattcataaaacaaatcgcattttgttgatttttaaaaaatacaaatttggcgggcgccacaaaacagaaaaatgccaaaattaatattttcggaggggaggggggcaggacgagctgctcccgtctacaaaatccacaacacaacgcaccagccaaatcctccattcggatgcgctcttgcaagtccgacaacgacttcaccgactgcatggacatg

SEQ ID NO: 111838 - DNA, 202 bp, Heterodera glycines
atttcgcaggaattgtttttcaattttcgcaggaattgtttttcaattgaaagtcgtaaaaaataaacattgtttttgctccaatgaatccttcgttccttttgttttcgtatttctgttttatttttgtgaattgcttccgatttatattttatttttcagtttcgtttatagttcatatttatttggtaatcgcatcatg

SEQ ID NO: 111839 - DNA, 1003 bp, Heterodera glycines
attggaaaacaatattacggggagtgtcataaaattggaatttgaaaatttatcagttaaattttgataatgaattattgtcataaaatttgattaaccatatgacaattaattaataaatatttacgaaaaataaaatcaaaatttattaaattcacaacaaagaaattagaaagttaaacagatgttggctgctacacaagtaaaagtaaacaaaaatattttgagatgaattgttaaaaaaatttttgaagtggatgagaaatgattgaatatattcattacttttattgatcagaaaataaaaaaagcattggaatggaaaataaaataaaaatatcgaaaatgaatttttactataaaaaaattcttttattcaaaattaattaattttgataaaaaaatatattaattgcttcggaattcctttaaaacaggtgaaaattttaattaaaaggttggaattttttggcattctattatccgttaattaaaattttatggccaaaaaattaagtaaaaaaataataataataagttttcacgtcttttttacataataaagcaggtgttaatttttgcttacctatttaacctaatcttagggactttctgtcatttttttaatataattttcaataattaaatttttgggcggcgccaaattggtaaattgagaattcacagaaaaaggatcataataggcatgaatgaaccttgaaaaatgatagaaaatttttttgttattaaagactaattttattcaaaaataaggcgaaagaaagccaattttttccattttcaaatgttaaacgaaatatatttttcaaaggataaaatattaaaaaaaaataaaatttgatcagaaacaaacattaagcatctaaaaccccataagtgaaaaataagcaaaaacttgtttgaaaatccgaccattttatttgttaattgagtttaataatttaaaaatttacaaaatttagttttagaattttttaaaatg

SEQ ID NO: 111840 - DNA, 1003 bp, Heterodera glycines
ttttgatatctcattttttgaaaaaaatagattttttagggatacattttaaaaaaatttttttaatttttcacaaaagattttctataatttccaaaaatcctcaaaatatgcaaaaaaaaatgaaaatatatatgaaaaattgcgaaatatatacgaaaaagtccaaaatatatgcatatgtaatatgtagaaaaatcccgaaatatgtaaaaatatgaaaaaaaagtcccaacttttgttcgcaaacacaaaaaagaaagtgtttttcctcctatttagagcatgaagaattcaggaaaaattatgtatttacataaaattcccatccctattaatgatatattttttacatcattttgttatataaacaattctaaaaaatgcttgttaatagattatacagaggacttgaaattctaaaaagaaatttaaattaaatctaattgcttccgaaaaaagttataatttataaagcattgaaaaatatattgaatggaaaaggactatttgttctcataaatcatgggtgtgatcttgttcttatttctaagaaatcttattacctaggagtagagccaattttcctttaaattcttcacaaaaattgaaattttatggcgaaatttcattatttaagtaagaaattttaaactttggcgcaaaattcttctgattttttgagttctattgaagtgaaatatatgatttactaatttattccacaaaattgttaaaattcatacgggaggcgaaaaataatatttaataaatttttgatggaataaattgtaaaaataactgatttgaatcaattttgcaaaatcttcttatttttcacctaaaatcttattttttagccatgatgttcttatagaaaatgtttcgatcagacccctgcattattctaaacgttttaatactgccacaaatttattgtttttattttattttataaaattttaattttggttttttcctttttcaggttcaatttccaatg

SEQ ID NO: 111841 - DNA, 72 bp, Heterodera glycines
atttttaaaagcaatttttctaaatttaggctaaaagaaccttatttaaaatttcagttgaatttcctaatg

SEQ ID NO: 111842 - DNA, 137 bp, Heterodera glycines
  unsure (1)..(137): unsure at all n locations
gacgggacatcatgccacttccagggtaatgtggtgaatgtggacgaaaagtttggcatcatttaaaatgccaagctgntcttaggcaagcgtaagccccgagggcccttgttcgccgccgcgttcgcttcgtcatg

SEQ ID NO: 111843 - DNA, 86 bp, Heterodera glycines
ttgacgcaaataaaatcgaccgtgtaatccttaatgagtgataagaattaataaagccccgcaaaaaaaggatatttaaaaaaatg

SEQ ID NO: 111844 - DNA, 1003 bp, Heterodera glycines
tagaatttttgcctactgcacttttttccgtgaatccaatggcatttttatcagtttaattagagtttatgagtccaaccaagtttaaagaagttgaaatttacaaaatctcagcgtttagcaattgacaaaaaaagatataataattaatgaattgttgatttttccaccttttaaatatttgcattcacttgttttctcgttacaaatttattgtttaaaaaattatgggttcttagttgattggactcatataaactcttaataatttttttcttaaatcttagaattttttattagcctattaaatttaacaaattttgttttatttctaaaaaaaaatatgaccaaaaaggatcaggaaatacagagttttttgaaggagccctcctcaaacggccgccgtaatcgagagaatgtgcactcgttttggcgcaaaagcaaatgtttgaatttgaggctttgcgaaaaacatatttttacatgctaataatgattaattattatttcggatttaattataaataaatgtgagcatgaaaatttattttctttttctttttttaaaattttatgttttgaattttgttgttttctcccaaatgaatttatttttacgtttcttcacttggcaaagattttctgtatttcctctaattacggtcccaaagggcggctattttttaatgcccactcggaaatttaagaaggaggtggggaggaacggcattttgtgaatgaaataaaggattttgtacaaaacaaaataaccacacgtgttcaaaataaattgacaaatatttttaatttaaattaaaaaatcccacattttggtcctacccaaaacaccgggtcaggcggggtcactgtggcagggcattttggcgccgtcaaatttaaaatgttataaattttttcatatatttcaatcgatgagtgtctatgtgttctctattaacctacaaaatttcataaaattattttaggctgaagaaaagatatg

SEQ ID NO: 111845 - DNA, 338 bp, Heterodera glycines
ttttcttacgacacaacatttttcttctatacaaatttttcaaacaaaattctcattcattcatttaaaatttcattaccatttacataagcaaaacaaaacctttcatatcaaaatcaaatcaatttataacacaaacaataaagaaagaaaaagaaacatttttaagactgtttttttacacaaactgacaaaagaaaaaaatgtaaaacaaaaacatttcatttttcaaagcattttatacaacacaacagaatgttaatattataggattttcttactgagcaaactaaggagtgcctctttcttttattaaatattttataaaataaaagatg

SEQ ID NO: 111846 - DNA, 646 bp, Heterodera glycines
ttttgttgattttaggaaggatgttgttgatacttacatagaataagaaacagaaaatgcattcattggtccgtggaaaaactagatcaatgataagccagaagttagtgctttaaaaactcaacattgaaattacacatatgtcagtttcaaaagttgtttaggtcatggacaattttttcaacaaagagagttatcgggtcagtttttgtatttcttattgcactaattgcgataggggacggttcggtgcccgccgtttcggtgccagtccaagttttggactacaacttttttcattgttgaccaaatctaataatcttggtatcatttgaaagctttatatgtttagaagctttttataatatattgcttagcgattaggttaccaaaaaagttataacatgaaataacaaaaaaaccaaaattttggaagttttttcctaataacttttttacaagctaatttttttttttttttttttgtaaggctaatagagcttgtgaagggctttcgaatgataccaaaattgttagatttggtcaacaagaaaaaaagttataataaaaaaactaaggctggcgccaaaacggcggcgccaaaacgacccgttcccctaaaaattatagtactaccaaaaaaatg

SEQ ID NO: 111847 - DNA, 371 bp, Heterodera glycines
tttcttattagaatctgaaatttctttgtttttgaagaaaatttgaaatgacataaaaatgaaatgaatgatttatttgatgcaaaaacattatagatattgtatattctctctttttattttctcattggcattatgtatttccaataggcgaaatgaatgtttctggcttagtaggcgaaatgaatgtttttggtttggtaggcgaaatgaatgtttttggtttggtaggcgaaataaatagtaggcgaaatgtcagtaggcgaaatgaatagtaggcgaaatgacagtaggcgaaatgtccggttttgggttagtaggcgaaatgaatgtttttggcttagtaggcgaaatgtcgagtaggcgaaatg

SEQ ID NO: 111848 - DNA, 240 bp, Heterodera glycines
ggtaatttgacacttttaatgtttcattttattttttattttaattcatttttcctctttttaagcatttcttcgcatctccaaaaatattttactgttttatggcttattttgtctgctctttttggggtttctatccttttcattagctatcgaattatgcgacgaattccgcaaaagtaactgccgattaattaactaattaattgattatttatttagttagatatttaattaatg

SEQ ID NO: 111849 - DNA, 78 bp, Heterodera glycines
tttttcaatttctcatttctttccttttcttttttgtctcaaaactaatctaaggttaagaaaccaactattgcgatg

SEQ ID NO: 111850 - DNA, 586 bp, Heterodera glycines
cgtgggggtttccccgcgcaggttcgaatcctgccggctgcgaaatatttttgtgtttttttaacagttttttctcctcaattaacctttcattttcttttgaaaaaattaaaaatgatatatagaaattaatatttatttaaaaaatatttttctttttaatttttagttataattcaatttttttaatttcgttgccttttttcgcgaaattttttatttatattcgtttcaattgtctttttaaaaatgtatttagctaaaagcatgcttttcataacgcagtcgtgtccgagtggttaaggagacggacttgaaatccgttggggtatccccgcgcaggttcgaatcctgtcggctgcgattttttttcttaaattacgactaatattatttaaccttttttaatatataaacatacattaaaattagaggagtcaattaattttttagatgtaaaccgacaaaatttgatgcatttttcgttttcatttatactattttttttgtctatttttcaaaatttcccatagcaattctccctataaatgtacgaataattatttttttagtttatcgaaaaatg

SEQ ID NO: 111851 - DNA, 706 bp, Heterodera glycines
tttgtgtaacaaaataacacattcatttttttttctctttttctcatattatttctctatcttccttttctttcctctctcatttcctctctttctttgtgcatatgctttctctgccatatttttttctctcttctcacaatatttctctctctatcttttcttttctttcctctcccatttcctctctttctttgtgcatttgctttctctgccatatttttttctctcttctcacaatatttctcaaatttctctctctatcttttcttttctttcctctattttctttgttctgtactattttttctctctcttcccatttgctttctctgccattttgtctgctatggtgttttgtattagcaagcagcaaaaattcatttgtttccttccttacatatttattagagcaattgaattttatcaataaactgctaattgttcactaatacgcaccatttaaaaaaaattaaaatattttttcaattattttcttggcaaataaaccccaaacaaaatcacctcattttaattccattagcagcattccaattaaaaatataattattttcgttatttttacacaaataacaaataaatattcatcatggcaacaccaaaagtaaaatgggcaaaaaataaaattaaaaatttaaaaaaagtatttattttattaaagttgtacaaattccatgtcgaaatg

SEQ ID NO: 111852 - DNA, 61 bp, Heterodera glycines
ctgtgaattgacggaaatgtaaaatttgaattcatcgtcgtcaataatactggattcaatg

SEQ ID NO: 111853 - DNA, 482 bp, Heterodera glycines
aatttgcggatcaatggcattttatatccaaaaacgatcaattatttttttttgtcgggttttgtgccaatgattcgtggctcatttttgctgacaacgcatggattcaattgttttcatcgttcatttgatttgtttcattgccatttattttttcgccattctctgttttgcccatcctttccaatgtctttcacgcaacatttaaacaatttccaaataaacatttgtgataataattaaaataaatttggaaaaatgcaatttcagttttaaaaaggtcgacaaaaataccgacagatgagcaatgattggatttgccgattcgttggagaattttaaatggatttgccgactcaccagcgactttgcatttaaactccgagattaaaaaattcttttggttaaatacacttttaattaattaggttcctcaacaaaattatcatttcaaagaacccaaagcagttgaaaaaggaatg

SEQ ID NO: 111854 - DNA, 71 bp, Heterodera glycines
gagcacggcacggattgctggggtcgtgggttcgagtcccaccgggcgagttaccttttatgttctacatg

SEQ ID NO: 111855 - DNA, 696 bp, Heterodera glycines
cttcaataaaaactctaagtctaaacagtcattcaaattttgcattttttaaattttaaatccaaaattagcacaaaataagcacgtaaggctgaaataagcatattatagctttctaagacccggcccctccaaataagcacaaatcttagaaataagcacacttgggaactctagatttcacaaaaaaaatgaacaaattttgcgattttgagttccggcagtgccgatggggcgccgccgggaaaaactccgtgacaatcaccaaaatgatgatgaatcagcatagttaagagcatatttatatcgaaaatttaagtagctataaaatgcataaacagcaataacaacaacaaaaaacaaacggaaatggaaaatattaattaaagggaagaaatttcaaaaaaaattcaacataaacctgaaaattatgtaaagcaaatacgtgtattatggaggcaataaaataataaattaacaactgctgaagagaattcagtggctgctaaaggaaatgccaaatcaattaattggatggcattaggcgacaccaacaaaaattattaaaataatataaacaaaatgaataaattttcaccatttaatttttataatcattcataattttgttaaaataaaacataaaaattaagcattaatattaataaaatcataaggtaacaacaaataataatg

SEQ ID NO: 111856 - DNA, 1003 bp, Heterodera glycines
aaaaactaaattattttgtaaagatgaaaacagtgctatgaactttgaatgtattttaaaaaagcaagtgtgtagagaatgttggataaatagtacattaaaggaagggcaacttattcaatgtgactgtgaagatctgataattggaaatcttgaacctaaactaccatttaccaatgataaattaaacttgagaagagaaggaaacaaaattttaagtgagacaaattatagtcctatacaattattagtgagagtttaaaatttaaaaattgtggctgaaattgaaggaaatacatgcagggcaaagcaaatcggaaaattgacgggttgttatgagtgccgaacagggggaactctcaactatacttgctggactgattggggtgaaagtatcgcggaagttaaatgtccagggggtcttatttttttggcaaaatgtaataaaaaaggcgaaaaccaaattgatgttcttccatttgctaaagctaaagttaataggaattgtcaagtcgtgtgcccaggaggaaaaagttcatttaaaatcaaaggcagacttatctatgtaccaataagtgaaagaaaatttaaagtgcgaaattctgagaaacttaaaataaaggatggagatggtattaaatgggaggatttattagaaatcgatttaaaaaatttattcaacccgtttaataattttaaaaatatgacatttctcattttaatgctattattagcaatgggtgccatttacattttcttacgatttctgccctattttatgggttaccgatttgtcataggaattttattgtgcaaatttgtaagcatttcttgttctttgtccacgggagggatgcggagcatcaaagatcaaaatggaatgataaaatttgatgaatcagttcatattatccaaaacgagaaggaacaaaggagagtatttaaatggaccgaaattcgggaaaggcaccattgttccaatattttaaaaaattcaaaaatg

SEQ ID NO: 111857 - DNA, 1003 bp, Heterodera glycines
catttcaatcactgggactcaacccacaagcatttcaatcactccagaattcaatctcaccaattcttcgaaacccaataaccggaaatgaatgataaaaccgacagcggctcgaccgcttagcggcctcgcactcttcttttggcattttcttatggcataacagttcttccttgtttcttgacattttcttacgacacaacatttttcttctatacaaatttttcaaacaaaatctcattcattcatttaaaaacataagcaaaacaatacctttcatatcaaaatcaaatcaatttaaactcaaacaacaaagaaagaaaaagaaacatttttaagactgttttttacacaaactgacaaaagaaaaactgtaaaacaaaaacatttcatttttcaaagcatttatacaacacaacacaatgttaatattataggattttcttactgaataaactaaggagtgtcctctttcttttattaaatattttataaaataaaagatgggatataaataaggaaggggtgctagacaaattcactattgtctctcccttccatttcttttactctcttttcttttccattgcaatttactctctttttttcccactccctccttctcccacacacacgcacgcgtccaacagactgctgctgcacagcagcacgcgtctgttcactgtatgcccctcccacccgccgctgcccgcgtagaaacacagtcagacagtgcactatttcccacctttccctccctctactttttttcaaattcatttttaacgcaaaattcaaacaaaacgccacactaattcaaaacatggacacatccggacagacactcaactttattatataggatcatgtacaatagaatagacactgacaaatgaatgtagcgcgaagtcgaaaacataatcgaaaaatttgatatactttttgtcattttaaaaggaatttgttaatattcacatagtacatttgcgccttaaacagcatg

SEQ ID NO: 111858 - DNA, 123 bp, Heterodera glycines
actgttaaagatgtctttattcattcgttgttggatttatacgaagcgagaaatcggaataaataattgaagtctgttccatcaccactactgactgactgatcactggggaaggagaaaatg

SEQ ID NO: 111859 - DNA, 1003 bp, Heterodera glycines
ttaaaatattttttgaataaatgtaaattttaatccgggttagaaaaatcttgggagataaaagggtctgggtgccgttaggttctgattagagaccggacgggatttttatgacttttatttctttcataaaaaattaccaaaattattattttaatttttaaaacaattgataaattttatttggtagttttatggcgcaacaatttctaagattttgtccaaaaatcagaataaaaattgttctctacttatttttccttcggtgcctatcggaaccgcctgacccaagaacccattattttcttttaaattagttcaaaacaaaatatggacagtatttggataaatttcgctaacaaattacatttcaaattttcaaaaattttcctggcggcgcctgccggcaccgccaggctccccccttgttccccaaaagtttttttaaaaatgcactgcaaaagaatttttaaaaaatctgattttttgattccgatgcacttcacgacttgctaattttcctcaaaacaagattaaaatatttttgtccacaataattatcaaaaatcattggaaatcaaaagttagtgttgataataaaaccgtaaatattaattcataagttgaaaatatgttaaaaatttaaaaaatcattaaaataacacattttaaaatgttttatgccatcagaacccattcataataatttataatctttcgttgaaaaattacagctgtaatagttaggagtgcgtctgtcaataaaactttatgaatattcttaatgcttgcttttatttactgtttttatgaaaatatagaatttttacaaaacttgattatgaagtgaatatttattatttgcttaaaatctttatttgattttataataatataatgcaaacctacaaaggtatgggtccatccctatcaagatggaaatggtcgcctcggaaggttagtaatgaattggatcctcgatcgcggcgggctgccaaacatg

SEQ ID NO: 111860 - DNA, 108 bp, Heterodera glycines
  unsure (1)..(108): unsure at all n locations
gcttttcattttcggtctattaaataaaatacaaaatgaaattttttagaaaatatgaaactgtgcntaatattctttcaaattgtattatttntaatgctcnnaatg

SEQ ID NO: 111861 - DNA, 225 bp, Heterodera glycines
tcgctggtacacttatgtaaattttttgtacgagtaacgtttagagaaatccccaactgatttcagggatggtcccagtctctccttccccccccccccaagacccctggacacccaaaattatatttttgctcaaaactttatgatttttttttttgctggtacctcctgcaagacctgggaccgtccctgcctgatgattgtcccctgccccattttagcatg

SEQ ID NO: 111862 - DNA, 625 bp, Heterodera glycines
ggggaggccgatcctttcgggaatagcttccctatagcctgtactttaattctgctttggatttttgctccccataattgtttgagtaccccaaacggacacttgaaaaaatcgatttttttgttttcggggcagtccccccgaaccgatgcgcccagatttatggggagaccgaatccttcgggaatagcttccctatagcctgtactttaattctgcgttggatttttgctccccataattgtttgagtaccccaaacggacacttgaaaaaatcgattttttgttttcggggcattccccccgaaccgatgcgcccagatttatggggagaccgaatccctcgggaatagcttccctatagcctgtactttaattctgcgttggatttttgctccccataaatgtttgagtaccccaaacggacacttgaaaaaatcgatttttttgtttcataaatatttttttcagaaagtgctctaaagtgcaccaaaattttatttacaacttaattttagcactctgatgctttagtatcaaaaaggaagatggagaaaaaatttttccttatattttggttatatcgttttgcttttggtggggtgcttggaacagtggaatcatg

SEQ ID NO: 111863 - DNA, 1003 bp, Heterodera glycines
cgtccttaaatgttttaaattagttttgtctgtccttggcattcatttgaatttgtctatggaatggcaaggacattctcatatgtccttggacattgttattaagcatcttaacgtgacggatatagaatttttactatgcgaatatggacagtttcactaattgcattgacttttgttccttcaattttaacacacaaaaatttcttgcctcctcccccctccgtaccaaatgtcctttaatttcttaactgcccttgaatttatactctaaaaagttgtcttcatatgcaaaattgaaaatggtacatgtataagtaatttttgtccttgaaaattgaatgggattttttgatgcgtcttacattttatttctatgtctccgaaattaaataatttttttttctaaatcgcttcccctcccgcgaacatccgtcgtcgtctttttgcctttaaatttctgtccttaaaaattgcaagggtcgtccttcctccaccaccacctgttgcttctgctcctgctgtttctgttgttcagcaaaaagttaaaaagttccagcaccaaaagcattcaacataaatcgcaaacaaaaatttgtttttaacttcaaaatatgctctcttaaaatattgaagaaggagcagcaaaattttatttttttcgctcatttggaggcggaaaaagggaagaaaaaaggagccgagggggggggggagggttcaatttcaataacagaaaagcaaaagcattcattccgcccgcccgccccgccccgatcggtcggtcggtggcgatcggcgccgctggcggcggcggtgaaaaggttttgttgtttttgttgtttggtcttccccctctcccccccccccctcggggctcctcacccttaggagctgaaaagtgatcagtcatcattcatccgtcatacacacacatttatacatacatatgtttaagggatgggggggggaggaggagggagggtgaaagaagaagaagatg

SEQ ID NO: 111864 - DNA, 60 bp, Heterodera glycines
gcctcaactgaaaaagcggcagcgaatggaatttcacttcggggaaatgtgccaaaaatg

SEQ ID NO: 111865 - DNA, 139 bp, Heterodera glycines
aagatcggtaaaaagcctgtatctgtacctgtatttcccgaatgccgtacagaaaaaatccaggctcctctaggcctggatccaggcctgtgtacctgtattttttttggtttaattacccaagtttgagcacgaaatg

SEQ ID NO: 111866 - DNA, 285 bp, Heterodera glycines
agatttctatgcatttgaccaaaattttttcaaaatttccctcatggcgtctaacggaatcacagggtcccaacttttttcaaaattttctcaatcacatggtaaaaatatgtaaaaatttcttatttatctcccagggcgccgaaaagtttttgaaaaattgtaatggaaaaatatttttttggcccgaaaagcataaataaataaatgattgtccctctcgaattttgttttgaccaatttttccaaacaaacagaaattgactgctgcgagtccatcaaatg

SEQ ID NO: 111867 - DNA, 612 bp, Heterodera glycines
tcgtactcagcgcctcaaaacacccgtagaaaagtgttattatggatttcagaaaagttaaagaaaattttttcaagactaatgaatggaaagacatggttgctcatttaaatttatttttttacagaattttgggactcagaaaattccaagaaccccctctgaaaacaaaatttttaaaaattttcctcgaactcgtcccccaaaacgtaaatacaaaattttattggtgcatttttgaatactggcaattttcgtaacaaagtgcacttaaattttcaatttttttcaaaaaaaattttcacttgggaaaagtcccggttggtcccggtcccgggttttttcgctgtcccggtcccggtcgaaaaacttggtcccagtcccggtcccgacttttctggttccggtcccggtttttgtcaaatttcccggtcccgctcaacgctattcataaccccagtacaaagaaaaaaattaacttaaattagacaattaggtattccctaaggtgttttggcaagttcaatcctagacacacaattcttttattctgattcatgcattacagacaatttgcctacgcctctttcaattattaaattattccaaatg

SEQ ID NO: 111868 - DNA, 195 bp, Heterodera glycines
ttgtttttagtctaaacaaaggttccttttttccggcatatttggctattgtttgtcttcgtcttcgcttaatctctcatggcaaatccagcagggtaaataaatatatatttttaattttttaacttttctaaatgtttaagccaccagctcccggacagtttattgaatgacatcttcaagtgtattaacatg

SEQ ID NO: 111869 - DNA, 682 bp, Heterodera glycines
attaaaaaatttagaaatttttttattatattgtatattttttgaaaaatttccgatttcttgcaccgcaaaaaagtggttttgaaaagaaaaaaatagtcaaatttatgaaccgttaataatttgatttccgatcaactttttaccgtcggatccaatcgaaaaatcttagtcgacccatcagccccttttaatgcatcccgccagcccctaaaaatttatttttcagcattttttgatttttggaaattttttgaatttaattgaaattttttcgaattttccaaaatcccgcaatcccgcacgggatcccgcaaattttaaatgcgggacttgcgggattaatcccgcgggatcccgtcccgcaaaaaattttgagttccagtcccgcagcgggatccgcaaatttgaaatttccggtctctactacaaaccacgtaaatagtgtttttagctttgtttgatgcttctaggatcctgttttacttccatatttttccatatttcagatttttgtccatatttccatatttgacaatgtgttggactcataaagtttaatagagttaaaatatttgttttaattaacccttattttcctaaataccaatattttaagtgaagaaatattgtaaattttcaactttcaacttcaaacgtcaaaaaccattgccagaaaatg

SEQ ID NO: 111870 - DNA, 675 bp, Heterodera glycines
ttttaaagtcaacaacaaaatttgtttttcaaaaattgccgtgtgaagtgaaaataaataaaaggaaaagacaaaaacctgttgcattctcgagaagattggttgtggaattgttgaccgaaacaacattgcaatatgttgatgttttgcactaattaggaaaagcaaaattcttttttaatacgataattataattattacccaaattgatttaagttttatcataaaaatattcattttagataaaaaaaaaatcgaatttaaatgctaatagaagtaaaaaattaaatcttattgctttaactctgtaaaagttaattaagcgcttcaaattgtttttgttgactctttgcccttccgttgccactgattgatgattgttacaactgcgcgcaccaatcattcattcattcgttgattcattccgatcactgatcaatcggggcaaaacaatttgtgttactatttaagcagcacacccaaaaaatttgccattttacattttttttctatttttgttattagaaattccgaattccctttcaaaaaatgctttctctgctctccattttgccaattgttctcgccgcgttcgttgcgccttttgcaaatgccgtcttttcacgcccagcgttacgctgagcttgaaccccaaagagattgaactgctgatg

SEQ ID NO: 111871 - DNA, 1003 bp, Heterodera glycines
ggatcattatcaattattatcgatagaacatccattatgatagagaatattaatcaaaaatcactattggaacattattgatcactgcactgagggatcaaagatcacttaatatcaatcgatcatcgtttcctatttgatcatcaataaaagacatgatcattgatcgctgtactgagggagcagtgacaacttttttatcgacagatctttttggagtttgaaatgccataattgcctgtcgcaaatgccacacaaatgtttttttatttttgccagttttgtgcttttctcggcaaaggacggcggttccatgctgcgcccggcacatctgcgcgaggtgctttcattggatgccgaagtgaatggccaagtattgcgcagggacagcaacacggggtacaaactagcaaaatttgcacagattccgagtcgaaattttgaactcgagatctcgttatttcatttctgaaacgggttttttccagcatgcattagttttttgaaaatctaggtgttggtgttgaatttcacgaaaaatttgaagccccccccctcgctcgcaaagggcccagagagggggggggggagtggaaattttcttaacaaattcattaaaaagtccaaaaaattttcccggcgacgcctatcggcgtcacccaaccccaaaaatctcaatttttcttaaaaaaattgactcaaaatcgtaaaaattggccatttttggtgaagatctgttaacaaatcacaaaagcgtttttttaaaggttcgggaatacagactcgagaatctcggccgtattaggagattcctctcacccttccaaaagcaaaacttttttgtaaaaaaaaaaaaatcgaccctaaaacccgaaaatattcttacgcctgattttaattcaaccgtcatcgagactctcgagtttaattgattcattataatggctattacaataaataagcatcatattaatcataattgaattcatccctccacagaatg

SEQ ID NO: 111872 - DNA, 422 bp, Heterodera glycines
tcgatgattgatcgaattcccgttttttttaggttgattactgtcaaaatttaaatgtcatttttctgtgatcatattattcggtctctgtttattgttgatgtcccatttctctgcttttttctagttgagtaaatttttgcctttttttgaagcgttttaaatttcgaattgcaagatttatggtatccgaattttttctatttatttattttaatacaaaaatggttgttgtatcacgcggaagtgagcttattctgccaaaggcagatcaaacaatcaaatgatgtacataattaaaatttgcgacaaaacaaaaagttttttgctccgacaattgtaaaatataaaaaagattactcgcccgatgggactcgaacccacgacccttccaatcaatcagcagggctgctggacacatg

SEQ ID NO: 111873 - DNA, 403 bp, Heterodera glycines
ttttttcgcttctctgtcttaaatattgctttaaaatcgatccgtttgttctcagaaaccgttttcggcactttttaatgaatttactgaacaaattggtctgatttatcaaacaactctaaaaccattaatagtttgaagtttaagaaagggaagaaatcgccgaaaatagtgccaataataaggacaagtcaaagcgaaatcgagcaaatgcgaagagaaagtgtgaagccgacgtggggagacgaagcaatcactttgaaggttggccatcaaaaacagtagaaggaccgaccgattgatccaaaacacaaagagtgatcaatccgaaaaataaagattaatcagtgaagtgatcagtcggatcagaggggaggggcggatgagagactgcgaatgaatg

SEQ ID NO: 111874 - DNA, 85 bp, Heterodera glycines
cgcctcatttgataaagttttgtccccaattttgcagatgtgacgccgctttgggactgctgtcaatatggtcaattaggacatg

SEQ ID NO: 111875 - DNA, 368 bp, Heterodera glycines
tctaaatgactgacagggaagtgaatgataaggggcgtggcataggagggcatactgtggatggatttcgaaatcctcccgtctggaggtccctgcgtgctctcacttgagtgggcgtggcctattcccacatgacaccccctcccccccccctctccgtcacgtcacatacagtacccccacacttttcccttctcattttcatcttaacacacaaaaatattcctcgaactggctcctcgtaagcagaatgagcagtttttggacgaaatccagagtaaattttaaaataaaacacaaaatataagcattttatagaagcgaaccacgtggaagaagcacaaaacaatcaaagaaaacataaaatg

SEQ ID NO: 111876 - DNA, 157 bp, Heterodera glycines
tttcatcctcagaggatggtgaatggcatagttcaatctcaccagccaattcccaggctgaaaatcgagagctttttgcttttgtcgaggttaaagaggcgcttcattgttgtcgagggacggattcgaatatgcttttgaaaaagactcggcaatg

SEQ ID NO: 111877 - DNA, 141 bp, Heterodera glycines
cttttattgggattaacaaacccataatttgtaatttccatttatttcgcttccatgtaaccgagaaataaaaagaattcacttaactaatatataaacgacctaattacagagtcgctttttagctaattaactaaaatg

SEQ ID NO: 111878 - DNA, 279 bp, Heterodera glycines
tctaatctttgcatatatttcgaaggttttatatgtttttcttaaattttctagaataatcaattggttggtccaatcgttccatttttgcttatttgtttgttttttcgatgtaataatatgaccatttgaaccagttctctctccatggcttccctcattttgctgcttttaccgctgttcgtctgctccttccttttcgtttttcgccacctcaaacttcgtcgccagttcagttccgtcccttcccctcgctcctatcccttcataggacacatg

SEQ ID NO: 111879 - DNA, 1003 bp, Heterodera glycines
ttttctacatattaaatatgtacatatttttatacatattttggactttttcgtacatatttttcattttttttacatattttgaggatttttgagaatttatagaaattttttgtaaaaaattaaaaaaaaatttttttgaaaatgtatccctaaaaaatcgattttttcaaaaaatgatatatcaaaaattaatttgtaaaatattcaaatgtgattctaagcctattctggtcatttttatggcattttgtgcctatttcactttttacgaagaatttttttccaaaaaataaccattaaaaaaaatttatttacatattttcctatacatatttcatacatattttagcattttttatacatattttatttacataaaattagcagccctattcattacaaataagatatttaaaaaatcaaaaaacttttataagctaaaatcgacatatatttataatgagaattaaaccattcttcgaagcatttcatgccaagacttgctgaagtgtatgaatgtggcttattattatttttaattattattattgttattaaatcttcgtatttttgttttcctgctgctgatatacgtattgacaaaaaattatatgtctgtctttgtgactaatttttttaattagcttttttgttgttgcacattagtctgagttaaatttgttgaattgataacaaattttaagatctttttttgactgacggcgtaagtgtcgaggcgcaaaagtcgcaacaagtcgaagaagccccaaaccaacaaatttttaaaaattattatttccgtcaacattttttcttattcaattaaaattggttgttgtttattatattcatttccgtttgcgcaattattattattttttctttattatgccaaaatgtatgtgcgtataataatgaaattccacatcattttctcaatgcataaattaattgtaaaaaattgaataaattattatttaccttttaaaaattaaaaatg

SEQ ID NO: 111880 - DNA, 145 bp, Heterodera glycines
  unsure (1)..(145): unsure at all n locations
caattattaatagcatattctaatacatacanaattatttagtgcacanatgatatttttagtttcaaaaaataaataataaatgaatgaaaaatatgataatatcataaaatcttagtttaataaaaatcagataacccaaatg

SEQ ID NO: 111881 - DNA, 615 bp, Heterodera glycines
cgggattttgcgggattccagtccgcaatccagcattttttggataaatccgggatttgcaggattaatcctgcgggaccaggtcccgcaaaaaaatttgaattccaatcccgcagcggggtccgaaaatttgaaattttcggacactaatcagaagcctccaagtgccaccgagacgttttgtgactgtgccgggttcctaatccggcttccaaatcttgacacaattgggcgtgaaacatgcggtcgcgcaccacgcattgggaacatcgaaaattatcatattaaaacctgccggattggtacaaatcaaattccgacgctcaaaagtttagaaaatttaaaaacgaaattccgaggcccaaaaatattatttcttggcacccctcggcattgtgacaagcggatttggcactaacaacagcagccggcccatgaataattgcccccgcttctcagatcactcagctggcacttgttcatcggagcctccattcggcgccggacagtgacgtggacgtagtggacggagaggaggagcacgaggaggaagaaacagaacatggaacagaagtgaataatggtgcccgagtggtagatgatgaaactgaaatg

SEQ ID NO: 111882 - DNA, 61 bp, Heterodera glycines
attggtgcagcaccaattgacggcgggggaatgcgcgtcgaacaaatggatacgaaaaatg

SEQ ID NO: 111883 - DNA, 447 bp, Heterodera glycines
actaaatagaaatctttgctcaaaacataatctccgcgaaaaccctaggaaaaagaaacattttggtaacttttcggaggactaattacctgggatagccaaattcaatcattttttccattcttttaatcatactgtattttaagtacgtggaccaacctcgggaaacaacttcagcctgtagaataccaacaaaattgaacagtctttcggaatttttttttaaacaataagtcctgcgggactatttattgctttatctctcctttatcagttctgaggaacttacatatcatcgttttattaaaaaatatattctaatcaaaatcttgaaacttatcgctcttcttttgatcctatacagttcgaataattatctttaagtcttaaaaaaaaaagaatagtatattttatcactaaccatttttattgtcactaagcaaaatg

SEQ ID NO: 111884 - DNA, 168 bp, Heterodera glycines
tagcggtctctgttctcgagtcacggagaatttcgactctcggtcagtcctagtgtaacgggctaccacctttttatgcatttattatacagtggagtcattttcggtattcttttaattatataatgtcatctcccattttagctactgtacctctgcatcaagatg

SEQ ID NO: 111885 - DNA, 89 bp, Heterodera glycines
tctgtaaaatgtttaatattatcagcctatcggcatcggcagactcaaattttccatttgtttaaaaatatatgttaatagttcagatg

SEQ ID NO: 111886 - DNA, 330 bp, Heterodera glycines
ttttcgctgacacagaatggcggttattacaaaaatttttttatgtatttggttataaattgtgaagatagattggccatttttgagctttttagtccatatttcgggcatttttagtccatatttaatgtccatatttggggtttttaatccatataatttcgagtcctattcataatcaaactttgtggcgttctttttacaaagttttgttatattgaaaattattagggatgaaccctatatttttgcaaaatttccagccttctaaatgatacactaatattatttttgtgaaatttaaaggtttttttagctcaatttgaaatg

SEQ ID NO: 111887 - DNA, 271 bp, Heterodera glycines
tgcaggtctaaaaataaattacctaattaactataaaaaataattgctttaaataaatttaattacctaattaattataaaaaataatttggtaaaaataaattacctaattaattataaaaaataattggtaaaaataaatttaattacctaattaattataaaatataattggtaaaaataagttaaataattacctaattaattattaaaaataattggtaaaaataagttaaattacctaattaattatagttgttaaaattatatg

SEQ ID NO: 111888 - DNA, 785 bp, Heterodera glycines
  unsure (1)..(785): unsure at all n locations
ttttttctacaacttttttaatagttaaaatcataagcaaaaatcatttttaaaaatttatttccaaatntaaaaatcaataaaacgcttttttgaggcgctctttttccaaaaaaactttttgggaagagggggcaggcggcgccgggaaaacttttgaaaatttgattaaaatttgttaacagattttcactaaaaaatgatcaaattttgcgattttgggccattttctaataggagttttgggggcgcggcggtgccgataggcgccgccgggaaaaaaattggaaattttgatcatttataaacaggttttcactgaaaattagccaatttataggtaaaattttgaaaaattttatgggaatttaatccaattcttaggggtgtaaaagtcgcatttcgcgccaaaaagcgaaatgcgaaaagcgaaacctaagcacatccctgtactttacttcaaatattgtttaatataatctgttctattttaagtagggtaggtcgggaccgggactttttggctggaaaaaccggaaaaaccaggactttccttataaatttctaaaaagtattctaattgatgggtcataattttgcccaaattacttttttgccgtcaaatgccagcccataaatagaggggagattcagcgcaaaagatcaaatgttcattcattcatttacatgcgaagatgaattttatttccaattttcatattttttttatttaaaaattttaatttgtagccagtccaattaataccttattaattcgaaaaatg

SEQ ID NO: 111889 - DNA, 1003 bp, Heterodera glycines
gatttgcaattacggaaatccgtaatccgtaattacggcgattttctcagttacggaaatccgtaatccgtaattacgggggtccaaaaaccccgtaatttcccgtaatccgcaatccgtaatccgtaatttttaaaaatcaatttttgtcagagttttagaaaaaaatttttaaatagtgattaataaaaatcaaaaaactgattttcttgatggagtttcttcattttttatttaaattttacaaataatttataattttgtgtctgatcaaatcattctttttgaatttatgggttgatttttgaaaattttttgaaagtctgatcattataatcggatttatgtatatgtatataattatttcaacattttaatagccagaaaaaaattacgggggggggggggaatccgaagaattttttttggtaaaatttatttagtgttatttaaaaaagttcagcgccggacagcaaaaacaggaattgtaaccatttttagccaaaaaaagactactttttgccattttgtagtcaaaatttaaaaaaataaggtaaaatccgtggtgagccgaagtgacaaaaatatcagtgagagactttcagaggggtggcgtcatttcagtacggaagaaattaatttaattaattaataatataatttaaaattgaataatagctaataataataaatatatttgttctctatttcagtttatacggccacaaaaaatacacgaccaagtaatttcttgataaatttcatgcatcataactttttctaaaaccatcaaaattatacatttttggtatcttttggtagccctaagtgttctctattttcctgtaaaatttcaaaaaatttcgttgagtttcaaaaaagttgtggtcacaaaggtttaccaaatcaatttatgaaatttacaagccacaacttttttgaaccacaaccaaattttttagaattttaaaggcaaatagaggacacttcgggctatcaaatg

SEQ ID NO: 111890 - DNA, 79 bp, Heterodera glycines
atagcatggagaagaggaagttgtggacacttcatcaatcgacggggaaccattggcctcagaaggcggcgatgaaatg

SEQ ID NO: 111891 - DNA, 155 bp, Heterodera glycines
catcaatttaaatatttattaatgtaattaaatattatccaaatcattttttagttcttttatttttaagttttttttatttaaaaatatgctttgtataattttaatcattttaataaattaacattttttttcagaatgtgccactgaacatg

SEQ ID NO: 111892 - DNA, 224 bp, Heterodera glycines
agtagggcatgtgcaataacatcataaactttaaaaattaataattttaatgaaaataagaaaatgttttatatatgcttgaaaatttccttaagagcaatagactaggatttagaaaagaattgtttagacaatcatcgagaaattgtcggagtcaaggaaaagtgtcaataattattttagtccggataataaattataaatattttagtataattttcatg

SEQ ID NO: 111893 - DNA, 193 bp, Heterodera glycines
aacaatttaaagaaaaaaaaacttttcaatcatttttaagttattatgaagagttaagagttagcaaattaaaatgtcatttaaaaaatgtttaatagacttggggaaaatgacattgtccattttattcatcccctttcaatttccatttgatttcctttgcttttcctatttcaggcaacttttcccaatg

SEQ ID NO: 111894 - DNA, 1003 bp, Heterodera glycines
ggacaaaaaatgagagtgtgaacacacaaatcgaaataacacaaaatggtggtgtggtggggggggggggggaagcgcaaaaaaaaataaattagcgcatacaaacatatggccaattttggcgctaattcgaatttgcgtacgcttttcgctgctttttgttgggttggccatttttgtaatgttctgttgttgtgttgtgtttgttgtgtgatgatgtgatggtggaagaatttatttaggctgttcatttggctgctgctgttccagcggtacaacacaaaattagggaacaaaaaatgtgacaaaaattactgataatttttacaacaaaaaaattggaaattttttgggatggaaagggcgcacgcaaacagtacataataccataaaagtgcaattttaaatttaaagaatacgacaaaaccattccaaacaaaatttttctttataaaacgaataaagaaaggcaaagggagttaattttataattgtctttagttattaaatctaattatcgcatgttttaaagtgaaattaattttattttattattccaaggtaattaggtgttatggttactgctaattaatattttaattactttcagaaattataaaaatattttaaaccttgttcatgattcaattattggattaaattaattaagtcttaaattatttggatttatttcgagcacttttccacaaaaatgctaattaattatgcattttaataagggaaatgcattcacatttaattttatgcaacacatttaaatttatattaacaattaccaaccgaacaaaagtgaatattttgttgttttttctgtcaattaccattaattaattgatagggtaataggcaacaattggtagtcggtaattaacaccataattaggtaaattagtcattgtttgtttttcccgcgctttctcagcacattccgtcatcaccatttttctgtttgcttctcattgaaattggcgcagcaaaaatg

SEQ ID NO: 111895 - DNA, 497 bp, Heterodera glycines
gattaatgacgacattctttcttctctctgttaaacctttcatacatgcatcattgaatacaatcacaatacacacattttatcagtggtttcctaaattaaaatttaattattgcaaaaataatttttaatttcaattaatttaatttttgtagcaaaaatttgagttttttttttaaattaaatgaaacaataaattgccaagaataattatatgtctgctgtttaatagtttatatttgtcattgttttaaacccaaaacaattttttgtccgttctcacgacaaaaaccaataaaaattaaaataatgacactcattagtgaattgggcacttcataaacatttggtacttaatatttgtctccgttttcatcgtcaacacattctttttccttgttccgtcatcgcattttatgtcgccatatgactgcgaattgctcagcaacaaaaaactttaaaattaatttgaaatattttaacggtaattaaaaatg

SEQ ID NO: 111896 - DNA, 499 bp, Heterodera glycines
ttctaagctattgcttcgcgattagtcaattaccaaaaaagttataacatgaaattgcaaaaaagccaaaaatttggaagttttttcttaataaatttttacaggctagaaaatctttttgctttttgtaaggctaaaatagagcaagtgaagagctttcgaatgataccaagatcgttagatttggttaacaacaaaaaaagttatcgtccgaaaacttgggctggcgccaaaacgtcggcgccaaaacggcctagtcccatttgcggggtccttttaaccaaaattcttaaaataaattttaaccgaatgtcagaaaaaatgaaggagttgagggataagaaataaaaaattttcagcaaaagtaaaaataatcagcctgtcggcacaccctgggatacatttcttaatttaaacttcttgcaaaaatttggtttttaaaaaattggaagataccaaatttgaaaaaattgtaattttttttttcattttttagatg

SEQ ID NO: 111897 - DNA, 65 bp, Heterodera glycines
tcaaacgatgaagatttaaatttaaataccgatcagcaatattcactcaaaatgtgcaagcaatg

SEQ ID NO: 111898 - DNA, 307 bp, Heterodera glycines
tttgaagaagtgtcaaagaacatgcagcaataagcctgcaaaatctataagtggaaatacatgagtatagaatttatttcagaaagtgtcacagacttttggaaaaatatattgcaattatcaacaatttgagaagtgagttagaaatgataaacttcacgattcaaaccagttttcggtgctctaattaaccgcgataaaaacatccgaatcaattaaatagcttctgagataataaggtttatcataaaatttcatttaaaaataaaccctcaattattggtatgaacgatactttccaaacatg

SEQ ID NO: 111899 - DNA, 1003 bp, Heterodera glycines
ttccccaccatttgttgcgtgacacttttaaacgaaaactgacaaaaaaaagaagaaatttctgttttgcaatgtcacgaataggagccaatgttttaaaatttaaaatttcagtgattagtttgagttaagccatttatttcactgtaaatcttcattatattaaattccaaaaaataaaaaaattaaatttttgtaaaagcatttcctaaattacaatgaatgaaacgcaaataaacgagaacgaagaaatgataatattgaaggtgcttttatttaaatatttttgataatctaaacaatttttttaataaagacgtgttctaatcaaaatccttgctggacaatgattggttatggcatatttttgttttttttgacaatcagtggaattttgttaaatttttcagtaattttcatcacaattcggacaaagtttacattattttttaactaataattcattacaaaatttctttcagatcatttcgtggctctgtgaatattttgttggcattttattcattttttgaaataatcaatttttgtggaaattttttgtcaatttttacggctttttcaggccagtattttatgtcatttaaattggtctttgctttactgtggttcctttaataagcaccggctgtgccctccttattatgcttttcattgctattgaccgactgtttgttgtgctttttccgctaaagtataaaatttgatttaaaatctttttacttattttcgttttaataaggaaattcaatcagtcactttttcttactgttgttttgatggttactgtaattcacattattgtgcaggcatttatttatttgaatttttatgatgataaaatgaatgcgattaaagttattggttattattacgaaattggcagcctcatttatgattcagtcagtttgtttgtcattgttttgcttggttgtttcaattattttagaaacattgcttaattgttcttttcgagggagcaatg

SEQ ID NO: 111900 - DNA, 449 bp, Heterodera glycines
agatccgtttgaaagtgagcgtaatgaataatattacaaataacaaagtgccttcttcgatttaatctgaaaaggtaatgtgggaaagtggatgaaaggagataatggaggagaaaaagcgggggaaggggcggatgaagacgaaaaaggtcgaaatgtgaaaaatgagtggggaggggggcacaggacgatgaaagtgcgggagggacagagtgatcttcgagacggcggccatcacttcgcctcccccaccccatttagcgaacaaatttttgtttaaagcgcgaacgtagacaccaagtgcgggaatttgccccgggcatgggaatgtgtgaagaaaagttggtaggaagcggaggagcgaaggaagaggaagaagagcggaagagagagaaagaaaaagtgagaggggaaggaaagggaaaaaaggaagaaaaaaggaagaaatg

SEQ ID NO: 111901 - DNA, 438 bp, Heterodera glycines
tgttcctagtttatgaaaaaatttcgccgaaaaaaaagcatttttgaaaagcaaaaaatagtcaaatttatggaccattaacagatttgattcccgatctctttttaccctctgacccattcgaaaaatcttagacgcccttttattgcatcccgccagcccctaaaaatttctttttcaaaatatcaggtattttttcttatttggaaattttttgaaatttaattaaaattttttcaaaatttccaaaaatccgcaatcctgcgcgggatcctgcaaattttaaatgcaggatttgcaggattaatccggccgggccggtcctgcaaaaatttttgaattctaatcctgcaacaggatccgcaaatttgaaatttccgggctctagtatagatcctatttaatttaaattttcaatttttagtttccgacggaatg

SEQ ID NO: 111902 - DNA, 90 bp, Heterodera glycines
tgcctattttggaaaatttcgttgcgatttcagatttattttaattattttattaatttaaaaaaaatttcagagcaaaatataaaaatg

SEQ ID NO: 111903 - DNA, 721 bp, Heterodera glycines
tgtattttgagtgctttatatagcacggtcacttgagtcccagttgagtttggcactccattttcggcacttttcatcctgaaaaagggcaagcgcgcccctaattctatttttccaacccatttcaaacctttttacatcgattctgaccgtttttaagcatttttgagtttggggcctatgatcaatattttccaattgtttttaacgatctttaaggggataagaaaattttttgaaaaaagtctcggggttttgggtctcggtctcggggtcgagtctcgggaaatttttggtctcgagcagcactaataattaaagagaatgtctaactgtaaaaaaagatagtgataaaaacttctaaattctaagtgaaccattaatagatagtgctgagaaaaaaacatctctcattttggtgtattatttctttatctctgttaatagagaaaaaatgaatttactttgcgacgtttagctataaggctttacatttaaaaaaaataccagaattttgaaatataagaaaaagtgcaaaattttaagaaaaattaaggattttctgttttatttaatttacatatttaatcctttattctttttgtttgcttcattttgtgtgtgtttcttcactgtcatttttcctaatgtctctgttttaagttaatacagtgaaattaatcaattgaaacggcaaagtgtgctaattgctatacaaatg

SEQ ID NO: 111904 - DNA, 156 bp, Heterodera glycines
aattaaaattaattgtccttattatttagttcaacctatctgtgccacttccattttcacagaaaattgatggttttcgagtgaattcaacattctttttccgtgttcaactgcttaatgaaacgcataacacagtgaacataacatttacagatg

SEQ ID NO: 111905 - DNA, 570 bp, Heterodera glycines
aacgaattgtctgagggctaaagagagttagaataggatgatttaattttttaaatcgatctttttatttttaataatttttacatttaacttttgtaaagtttaataaatgaatatttggaaataaaaatagtatcaaatgtatttgaacagaaataatttctgtaatcggaatttgctagaggaatgagatttttgatttgtttgagagtccatttggatgattgatgagaatttttgaatttgttttccgttattaatggaataattaattatatgcgccccaaaatgtcggtgaatataaaggaaaattcgccagatgcgcaaattggggtcaagaacacacattaattgttttgatcaaatttgattataaataaggaaattgtacgagcgagattcattcattcattaatacataaaatatttattattattatttctgttttcttaaatatttcacaaatgtctcaacaatgtaatttaatttaatatttttattattcatctaaaaatccgttccctttagccatgaactcatcggactgtcgctcaccgactcccgacatg

SEQ ID NO: 111906 - DNA, 1003 bp, Heterodera glycines
atatgtcacaaaggattaagtttaatcatttatttttcagcatatgatttttcacattaactgaagcagtactaatgtacaggtgctgtaaaaatattttaattcgatactaaaatatcggtaattttatgagttaagataaaaatatagatagtgcactttgttacagcttttggtcataaaatgcaaaaaaaacttctaatttggctctatttttaaaaagtggattttatcatcattttaagatatatttgagaaaaatataatttttgtactgttatgagcatttttgtaaatttgaagagttttttaaaattcattaatgtcaaaagtcaatattttctgtaaaataagaaacctgtaagatttacaggattaggttccactataaatgaatttttgtcttttaatatatgtagtgaaaggaaaagacatttgtataaaatttataactaattaagaaaaatacgaataaaaagtttcctttttaaaaacttcagcagtcgcgatcatggaaaaagtcaaatttaccgcaaaaacccatgggtattggctgttttttttcgcgcattttttcgggggaggggggtcgacggtccctggtttttttcacaccgaaacgaaccccggttttttttaccttttttcccaaaccaaagggtattattggctgtttgttttttcgttaataaattaaaataattttggatttaggttggggtttaatattaaacaattttttcatctttattttggtaatacaaaaactttttttttaaattatacaattttgaattacgtatacattaataagacatttgtgtgcaattgctgcagaatgccccctcccccccaattgaccccagacaaaatcaattctgacggataaaaaaatgacttataaactgaaaaaaagtaccacaatagaccaaaaaaagaaaaaaaaaggaaggaatggagagggagggaggaatgtattgagaatggattgagacgagggatg

SEQ ID NO: 111907 - DNA, 790 bp, Heterodera glycines
tttggtcaacgcttgggcagcagttggattcagcacatcaaaatcggcaattccggtacttatacagtttgacccacataaaaaaaattttttgtttctaatgataaaaacgtgtttctaggggttttcggggctgctgatcacgaatatgaactctattggacgaatttccgaacccctaacccgaaattcgaactttttttcgaaaaaatttttttgtttttaatccgtttaaaatgtgtcaaaatgcgtgctccatgattctccggtgagctgctcgttcaacacatactcaaaaaataaataaaatttaacaaatttctaaaattcaacaaaatgccaaaatatgaagtgtaaaattggcgcgacaatcagttttcgcatggatacaaaagatacttttaacgaatctggctacgctagaaactgtgcttgaatctgaattttgtagtttaagtcttactttagctacgaattattttctatcatgaaccagctggacaattttactaccaaaaaactttatgaaaaattagcattggatgataatgaattcaatgactggcttatgcagttgggcctattgcatggcaggcgtatatgtccggaatgtagaactgtaatgggacgtcgccagcctaacagaaacagaaaatatggagcgtggaaatgcaaaaatacacaatgtcatcgcccggaaataggctttcttgttggcacattttttgccggctctcatcttgacattaagcaggtgtttacattgtcatatttctgggcgcaggaaatg

SEQ ID NO: 111908 - DNA, 62 bp, Heterodera glycines
attttccaattattttgcccaatttcagtccgttccttccgctcactttcaatttcaaaatg

SEQ ID NO: 111909 - DNA, 148 bp, Heterodera glycines
tttttaaaaaattgcaaatgattgtcgtaaaacgacgggtgaactcattatctttgtgttaagccccgcccaaattgcgccaaaacaagcgcctttgtttccccgctattaaaaccaaattattttaaaatttttcaatttaaaaatg

SEQ ID NO: 111910 - DNA, 422 bp, Heterodera glycines
acgagtgcttgcagatgtcaccaaagtggccagagaaaaaactgaatggattgctgagctcagcaataattgattggaatcataataaaatttttttttaaacagaaaaaatccaatttatttaaaatactggttaatatgtagagaatcttaaaaattttgagggaaatcacgttaaggaaatcttgttgtccgcccatatacatatatgtatccccgttcaatcggtgtacctatggatggttgttatacattatttatacataaatataggtcccatacagacacaaaaaattatcagactattggagtgctaaacaactgttgcatcaatgaagaggactgcatctgttaaaaaaatcacgtgacgataactcaggtctgcaaaacttgatcagttgaaggagaaatattcaaaaatg

SEQ ID NO: 111911 - DNA, 609 bp, Heterodera glycines
  unsure (1)..(609): unsure at all n locations
tttntggtttatttcaaataatatgtatgtctgaaaataaaaatatgcatttaaaaagaggataaagttggtgtaggtaaattgagatgattaaattggaattaaaaaaaaattatgaatgaatgaaggacgtatacgaacgtatgaatttatatactaaaatttctctggagactcactttggctatgggtcaactccactgtgcagagaaaagcatagtactatctcgtcgtttctctttttctttgtaatttttctcactttggcgtactatctattcattttaattacctatataaaaaacaacatttacttcgtgacgtttacctttttatctacactagcggggaagaattttgccgttttgaaattaatccccggcacttcatccgatcctattgtaggcataatacataaaatccatgccaatacgttgccaaaaagaatacaaatatttaaaaaatgacctaataatgtgaataaatcaaaaatgactcatttctatacgttcattaactttattctttccgcctttccctcccttttttctccaaattcattattttagcttttcacttgaagtgttcaattttattacctgagaaatg

SEQ ID NO: 111912 - DNA, 479 bp, Heterodera glycines
tttcgggcctgattccaatcccgttaaaatccagtgttaatagcagattctctttaaatttagtatttttataaattggtccatattttcaatttatatttatatgaagtgcaccatttttctattaaggttaatcatccttttttgaatttacgcttttgtataaattattttatttatttttccattttaacagtgaatcatccaaaaaaaagtccatcacttttcgcttggaaaacgacacgactgactttttttgcacttcataaatatttgttgttagccaaacgaacaatgaattaacatttattccaattagttaatggataaaccaatccgtccatttgtttgaataatagtaaaaaaaagaaaaataatttaataaatgagcagcaaaaactaataaattaaatattttatttattattttttaaataaataaataatacacatataatcattttagcagggctaaaatg

SEQ ID NO: 111913 - DNA, 111 bp, Heterodera glycines
cattgaatcacaaactttaattaattttacgtaatttaggaccaatcatcgaagggacccgcccgtttcacagagactgacgcaaatgtccatgacctgaagcgcacaatg

SEQ ID NO: 111914 - DNA, 662 bp, Heterodera glycines
actgaataagcctggcctgaagcggcgtttgaggacgaccgaaaaggggaaaacaaataatggcatggattgatcaaaggcccttccgtttgtcaattttggcactttacttggtgcctgcaatcgaatgtccaccgccgccttcgccccgactccgttcctcgcctcacaagtgaacacgccaaagtgctgttcggagacctctctcagctccaaaaccgcctcaaactcgtctacggcatctaacggagagggaaatgtgaaggacagcccccctcccccctcccgcgtcactgacctttgacccgcgaaatgtgccgtttgtaatcgccccctccaaattccgtgccgatttctgttccgtctcggctccacgtaacttttggttcaggccgtgccgaaatccgacacacaatttgagccttaattcgaattaatttattggcatatgcaaattatgttcgaattttcctaccgatgcgccaatctctgccgctgtcagtgccaatccgtccacaaatcgttcattcaatgcaatcggctgatggatgacactgagcagcgattgactgctgacgggcggagaagtggccgaattgtgggccaagcacgagtaattgcccttgtcagcccaactgatcggatgcgcaaatcggagaatg

SEQ ID NO: 111915 - DNA, 567 bp, Heterodera glycines
taacgggtgccattctgcaaatcactttctaactttttaaacggcaccttaagatggtttcgttttggtaaacatttgaccccctccaccctcctctcagcggtggttttagtctctgctcggagggcaaagtgcgcaaaagtgggcgtcataatcattcactcattcatttgcccttccatttcgccctccacccaaaacagcgacaaattcttcgccaaattcctcccaaaattacaaaatttatgccaaaaaatcaattaaaaatgccaaaaagaaaaatgccgaccgaattaaatgtcgaaattgtggcggcacttccctttgatattcgctgggccaatgtgcgaatttcttttgcatttgaccattttttgtacaaaaaacaagcccaatggatcagaaatgaattgatcagacaaaaaattgtggaagaaaatgttttttcaattaatttttaatttatttaaacaatttttttggatttagaggcaacggcttggacaggcaaaacgtcggattaaattaatgtcgttccgtctgtttgaaaaccgcttgcgcaacatg

SEQ ID NO: 111916 - DNA, 460 bp, Heterodera glycines
agttgttttttgtggttttttaggtttagttggtattacgtcggattggtctttgtcgggttggtttttagtcgttttttataggcgttggtgttttgtcgtttttgggtgagttggtgttttgtcgggttggtgttttgtccgcgcgccttccttccttctcttcccattcccaacacctccctttcctcccctcccattcgtcgattaacgattaacccactttttgctttctctcctttccacatgtgctagacatcgctgcatctctgccttaacatttattcagcgcttattctcctctgagtttcatttctaattttctcggtctttccaatttcatcactttttctttcccaatgtaactgtaatgtcatcatttttatagtggccttaatacataacatttgaattatcttttagcgatcgaattcaacaccctttcaatttggcgatcatg

SEQ ID NO: 111917 - DNA, 631 bp, Heterodera glycines
ctgcttttgcctttggctttgccatctttggcgcctctttcatgccattttcttttttcttcctccccccccccttcccctcttgtccattttgtgcttcttctctttgtgcttttcccccgaattttatttatgcgctcgctgtccactcgcctttccgcttttccttcctccttaatccgttgccccgggcattagtccccccattcatgcaaaaagaaaagggagcgaaggaatggacagccgcgacggcggacggcaaaaatttgcaatccaattaagcggcaatggcactgggaattttaagtgactcggctgacggaggtactaatttaggaaaaaaagaatgttcccaattcgaaataaattttgcattttttaaatttaaatttttggaaaatatttatttaatttttattcttacagcctaatatttgttttcttaaattgcttattttattcaacatgttctctttttaacatttatggtgtttttgttagcgataaaggtaaattttgggcgtttacaaaaataattatttttaatatttattaattaaaaaattaattaattttttcaaaaaatattttctatttatttgttacctttttagaaatagaaatcaaaatg

SEQ ID NO: 111918 - DNA, 651 bp, Heterodera glycines
cttttggctttttctaagcctaatagagaatgttaagagctttcgaatgataccaagattgttggatttggatgcaaaagaaaaaaactatagtggaaaaacatgctctatggcccaaccgtgagggcccaactgacgggttccgctaaatttaactttttttgatcaatttaggaacaaaggtaatacataatttgaaaatttttattttcgctttttgtccaaattcgggtccgagattcgaaattgcccaaaatgaatgttggattcgggttccaatcgaaccgtaaattttatgaacaagaaacggaaaattcccgtttttttccattcttcgcggcaaaattttttccatgccgacatttttaagtgaggccaacgagtatttaaaaaaacttcctattcggggaatcaaacaataattgtaataaattttcattatctaatcaccgagcaataaaattctcagttttttgagtcgtcatgctaaaattttatccccataatttttgtgcaattttatggccatgtttagaatttttagtctctattttatgtccatatttagtgattttatatccattttttccgaaccctcctcattcataatctctcacaaatgtgcggcgcctggggcaaaaagacgagatg

SEQ ID NO: 111919 - DNA, 395 bp, Heterodera glycines
agagagcgaacattggctgattttctgatattcatccattcctgtttcaaaggatttctaacatattgtcacttgcaaattccataaccccacttcccatccgatgatttctttgacacacagtaaatagcccaggatgtatttactaacaactaaatatgcttataaaaacgtatagttcagacactcttttgattgcatcctcggtgctgatatactgtacatttgaaaattcagagataaatttatacaaaaaaattacaaacaaactatattaattttttattacaaaaaaattaaatttgatttatattctaaaaatgaatggcagttattctagaaaattgataagtgtgttttttattgtcagattggttatttttattttatcgatg

SEQ ID NO: 111920 - DNA, 363 bp, Heterodera glycines
aaataaaaacaggtaatgggaaaaaaatgaaaaaatgtgccaaagtcaaagaaaagaataattaagaaaagttaaacaaacctcaaggaaaaacacttaaaaaatgcaaataaattaataattatacatgaatagagaaatggaaaaccaagagtacaaaatcatcccgatttgaaaattaaggaaaattaaaaacaacaagcaaaaaaagtctgtatggcgtatgcatttttttctttttgatcattcaatcgtgctttttttttttttgcgcaggccaagcagttctgtgttgagtgcgagcatccggttgaccggcgtacgcacccgctgggctgccgcgctgtgtgtggcctgtgcatg

SEQ ID NO: 111921 - DNA, 128 bp, Heterodera glycines
aaggctacttttgtaaatggagtttacttttccacagagaataaatgccaaatattcctacggtgtcggcgatactgtaggaattggcgttatttgtgccaatcgacagatcgttttcaccaaaaatg

SEQ ID NO: 111922 - DNA, 428 bp, Heterodera glycines
aaactactattggcagagggggcacgagatggtgaattgcataagagcgctcctgattgtatggatttggacacatatgggtacggaggcaatttatgttatgcttcatttttgataatacatattttaattaaatttaaaaaaaaatccaaaattcaatttcattaattgccgtaagttccctgaaatcattaatccattttattcgtacctaataattatgcaatgcttttaaaaattcattaaacccattttttatttgatcagctgtaacacgtaatatgtacacaactctatggaaagcctcgcgattcattaaattcgctgaatttactgaaatatttaagtgagaaaagggaacggaaaaaacacatttccattttactaataaacattttaaatttccgtttaaaaagtattataaaatg

SEQ ID NO: 111923 - DNA, 206 bp, Heterodera glycines
attacatttatttgcacataaaataaatacatcattaaataaatgattttagtatatttgataaataaaaataaaatttaagtaaattaatgatttttcttttaatttaaacaaggaaacattgaattaattaattttttggcattattttattgattatttatgtgataattaaataaataatttaacagtttaaaattgttatg

SEQ ID NO: 111924 - DNA, 980 bp, Heterodera glycines
ttttacccatgcgaatagtctgtcttattttctttatgcgtcttttcgtgcatttgtattgctttagttgcatgaagtcggaattccgacttccgaaaaaattttggacgtcggaattccgatttccgaaatttttgatatacattttctattttattttgttttcaaatgaaataaactagagtgaagccggaccgggaccgggccgggaattcccggtcatccgaggtcccggtcccggatattgaaaagctcaggtcccggtcccgataggggaaccgggaaaaacaagcactggtaagaatgggggtctgagtgaaaaattactgatgaaaattgaagtcaaaggaaaaaatttaaaaaaagaattaatatatgtttcctataaatatgattgctcatagttttttttattgagacatattttatcattttttaaagaaaatccgtacaaattgagcatagtaatcccaaaaaccaaccttttttgttgaaaatctgtaaacaaatcacactcaaattttcaaaatttccccgacggcgcctatcggcaccgccggaccccctttctttcccaaaagttttttggaaaaagcgcgccgaaaaaagtgatgtgaaaagcaaatctgaattgctaataatattcgatcatttgagtcataaaatgattaattgtttgaaataactgaagtaaattcgatttgaaaattttcagtaatttaatttagctttaacttttggatttataaaataaatagcaatataaaaattaattttgtattatttacacttgaaataaattaaaatttgaatttttttaaattttaaatttttttttgaattttcaaaaattcccggttggtcccggttccctgtcccggacgaaaatcgaggtcccggtcccggcaagtcccggtcccggttttgcccaaaattcccggtcccgcttcactctaaaataaactatttttagctcaatg

SEQ ID NO: 111925 - DNA, 811 bp, Heterodera glycines
gataaatttaaaaaacccattttttaaaatttcctccatttttaggctacgattgttcaaggaaatgtttttgtacatggaaaataaacaaacacttgaattgcgttcggtgttcacttccattgtggaggtgtttaattgacctttttcatttccaatatttcgtttttaaatttagaaatttttactctccggtgaaaattggcgggaattgctctttctcctcaaattgtcactattttcgcccgcggtgactttgccgttcattaatgaacttttgcctcacatcagtgggttttttgtcgattcgttttctcaaaatttcgttggattttttttttaaattacaagtgacacaaatttcatgtcaattgttccaatggacaggaatacaccattttcagttcaacacccgttccttgttgatcgtcttcaggaactcgctgccaatccggcactttccattgccatttcacccacaaattttttgcagaatttttttgagaaagttgttgaaaatgcgagcacggaatacgtgtttaaacttgcaaaaattgtttccttttccctttaatcctttttttctgtcatttgacctttgaatgtgaaaatgctttaaagtggtaaaacaactgctgaaaatctcacccttaattaattgaaaataaaatatttatattttttattgtaattaaaacgccgaattaaattcatttttcattatattacattaaaaaatacctatttgataactttacttaaattacaattctctgcttttcttctcactaacttttgctcccaaaaaatg

SEQ ID NO: 111926 - DNA, 703 bp, Heterodera glycines
tttaacacggcatcggctcgactcgttttgacccggtccaaccattcattccctggcaatgagaagaaccttttggttttcccaaagtctcgacccatttgtctctgtcgagaatttgtgacctttgacaacatttgacccccacaaagtctcgagattcccgatagaaaaagcactattaaacttcgaaatttttcaagagaaaaatcctgattttttttataagaaaattccatcaaaaaattttttcaccgattcgggcggcgcaattttggggtggactctccatttggtgattgtccaaggcgcttaaccgatgtgccatcccaccactgttagcggggtgtgcttctttgttgtgccatgccacttccatctcatttggctatcactgactgcttcctcgaactcaataaatcctagtgctgttcaagacgctcggtcttgactcgagaaaagtctcgggttttttggtctcggtctcgagtctcgggaaattttcggtctcgaacagcacaaataaaccccaaatgtcattctttggtcaaatgtctatttaacaattttggcacgttttcagcaaagaacgggacagtttgttgttcaattttgtgggcgacgaaatgcgcactctttgcgacgccggcgaaacggcggcggtggacgacgacaacgatttgcacatgaacagcctgaaggcatg

SEQ ID NO: 111927 - DNA, 229 bp, Heterodera glycines
ggtttgtcgatccgatttggaattttatttttaaagcccttgtctcaggtcattgctgaggcggccaacggaccgacaactccggctgctgatgcagttttgatgaacagaggcgactgtcttattgtgcccgacatgtttatcaacagcggaggtgttactgtgtcgtacttcgagtggcttaagaatctcaaccatgtctcttttgggcgtctgacttttaaatatg

SEQ ID NO: 111928 - DNA, 361 bp, Heterodera glycines
actcgaatttcactttttattacacaacaaagttgaaatatcaactttaaactgtccttttggcctttatccgattgctttccgttggcggggggacaaatgcctaaaatagggaatgccaattttgtttaattctgtccgaaatttcattttgcatttgcctttcagctccaaattcgcgagtgccggattggccgcattgacgagggtgccctcggggactgttcacggtcggctctgtccaacttcagtccaaccaaattgtgcgactgtcgcccggttggtcttccggcatggacaatgttggcaaattggtgttcacttacaacaccgtgcgtgagccgatggtgtcgccagaatg

SEQ ID NO: 111929 - DNA, 1003 bp, Heterodera glycines
aacgctgagtcagtgtccaaatttttcaaatggattttgccggattttgaaaaacataaaaggattttttggagaatgaaaaacaaaagtttaagacattttctgaacaatgaacaacagaaaacgacgcttagcctaagaattaaaaaatagaatggagcagcagctgaagagaattcaaaaatagagagaggcgttgttgggagaaattaaaatgagagaattttttaaaaaatggtcccttttatagagaatttggcaatcgtttgcttttcaatttttaacttttcgatcattttgcctgaatttacaggggtataaaaggggacaattttggctgacaatcattgcatttccattcactgtttcgtcacttccttttcattgtaagtttattcaacatttggggacgctgatcatactgatcacgaaacaggcatccatttcaaccaattccgcaccttgggccaagattcgaaccaaaagtcgagaattcaaatttctcgagtttcgcatttttgtctatgatgattcagtttgtttcagaaaatccaaaccgattttcaaccaaaaatgcgaaactcgaaaaatttgaaatttcactttctgttcgaattccggcccggaagttcgaaatttgtcaaaatggacgccatttcacattactctcttttcttcatttgctgttgatgctgttccgttccacttccattctctttcagcgcctttgctgaaactcacctctctgtgctgctgttctgtaccacccgctttttgtgttgtgttcactgtgccgacgaccacaacgactccgaccgtccgcaaatgacaagaaccagccgaagcagcagcagcaacagaagccgaggcaggacaacaacaacaacaagaagccacagaagcagcagcagggaaagtccgagaagtgtgctgatgcgccagctcgaaatgttgatgcaaagcgcgagcaaaaacagcggattccgtgcgtgtctcaacgatg

SEQ ID NO: 111930 - DNA, 686 bp, Heterodera glycines
tgaccactggattttcggattttttttttgagggggaataatgaaaaaaaaattttaatttaaaaactgataattttcaaaatttagcgctgttctaaaacttgaatcaaaaagtcgaaattctattttgttgtttgagttaaggattcgaattggtcaaaaatggatgtcagatttttcaaaatccgagttcagtgattagcgtatttttaagcctagaaaaagtgttacgaattaaaaaaaaaatttttttttcgggaccgcaattccgaaagattgccagttttattgttttaagttagggttggttcggtgcgtttttaccttttacttcgagttcgaataaaaataaaatttcaaaatttgtttggcaatttttttggcattttgttttcaaatttcaaaagaactttttttgatctttgattctttgatacttctctttcattggattttgacgattgaattggcttttttcgttttaaaattgatgtataggcccaaagattagttaaaatttttctataactccgttttttttattaatttgtatgaaaaaataaaggtacaatcagaaattcttgaaaatttttgatttaaatgattttaagaaatttggattttgtcatacgacttatttactaattttagcattttacaaattcgtgccaacaatttgagggatg

SEQ ID NO: 111931 - DNA, 694 bp, Heterodera glycines
ccccccccccccccgaagccaaggattgggttacgcccttggtctggaggtaattaatttttgaaagcgaaaaaatttgactttttatcagatttgaaaatgttgataattttgatcgctaaaagtatttgtttttctatgattcaataaaatttcaaagaatttattaaacctaattgcaaaactttaattatggtccgaccccataattaacctcgggggggaaaaaccggcgctcaaattcagtcataatgagttaaattttgttcacataaaatctagcagcagatgaatgaaaacactaccacgcatcttttgaaatctttgacaccctgacgaatattcgaacaatcatataactaatgtcctcatgatatcgtcattgacatcttacccatcagcagggtaactctgtatcaggaaatatacaattcgaaaatggtatgtatggtcccttatgggcatttttccaatgagggtattattggtacaggaagcctatcaattctttgttcctgtacagctcatgtagtgaaaggtagcgctgatctgagcccggattcgtgatcagcgacctcaaaaaccccttaaaaatttattttcattaaattttaaaacacatttatatgcatttgaaaatgtatgctaaaagtagcctgtaaactatgaaagtaccattaaattttaaaaaatg

SEQ ID NO: 111932 - DNA, 94 bp, Heterodera glycines
tttgtcaggctttttcggttttgtggccgacaaatattagatgcgtaaaagtgaacatttggtgctggatgtcatttttgttcacccggacatg

SEQ ID NO: 111933 - DNA, 306 bp, Heterodera glycines
cacattttttcaccctagaaaaaactaaaataaaatttttcatttaatttttcatcgggaccgcaattctaaaggattaccaaaatgatcataaataaaattttaaaccaaattttgaaaacaaattgattgagataacttattgttgagaaaaaaggtaatcaatgacactaacttaatcagacgatcattgggtatgaaaactcaaaatgtccaaaacctataatttgtcactaatttattaaatttcatttgttgattggatttacttatttgattttaggctatattcaatttttggagatg

SEQ ID NO: 111934 - DNA, 486 bp, Heterodera glycines
aaaaggcataataaaagtcaattgtagaagggaaaatgggtttttttatgctcaataatcggaactaatgcgcagaaaaaaggcatacacctcaaaagtgggtctctactaatttcataatccttaattattaaataatttaaaaaactaaacacattaaatgtaaaattttaatacgcatatttatttagcttgagtatttgttgaatttcgcaacaaatgttgtcaagcagttttgccaaactgaagctgcaagcgctgaccgcacacttttacccattgccaaacgtgactatttaatgcaaaaattaatacatattgctaacttttggcgttgggcacactgacaggaaaaacctgaaaatattttcccaaatcttctcggcggtgcctattagccttgcttaacccggcccaacctttttcgtttgcttcggcacctatcggcaccgccgaaccaccattttaccatatttttgaaaaatg

SEQ ID NO: 111935 - DNA, 171 bp, Heterodera glycines
gtccattccgatgtcaaaaactcaacaaatgtttcttccactcgctcttcattgctgcatttcgatcccatccctccgctgcatcgacaggtccttccttcccttttctttatcactttgccaattatttggttttgccggggactccaaattagttgtttatggacaatg

SEQ ID NO: 111936 - DNA, 60 bp, Heterodera glycines
cgtgtgtacggagtggtgccgaagcacgtgggggagacgcgcagggaacggccgaaaatg

SEQ ID NO: 111937 - DNA, 553 bp, Heterodera glycines
cccccccccgctcattccgttgtccgttgccaaatttaattagtgctggcagatgctggaagccattggtcattaattaaacgaaaaattcatttctaattctgtttaaaatttcatttcactatatttgtatttcaaattgaaattttagagtattaatttattttaggtcccctttttggtcaaaaattttcatttctttttcttgctaaagtaacttaaaaactttattttgtgtttattgggattacagacattggcgccccaggcattttacgcctcgggaattttcgtcccaagcgaaaatcggacatctgcgccccggaaattaatttcttacaatcagaaatgcatatgaaaaaactgatcttgtgtgccaattcttgcttgatccaattgcatttttttgttgctttgaagcacttttgacaacaaaaagtgaaaaaatatgaaaattttaacccaaaaaggaccaaacttaaataccaattttaattttagataaaaaaatcgaatgtcggcttttacataaaaaaaaataaatttgaaaatg

SEQ ID NO: 111938 - DNA, 613 bp, Heterodera glycines
aatcattaaaatttagtaaatttaacaactctcgtgcttaaaaatttatattttctttaaatttaaaaacctggcaatgttattatttcgtcaattcttagtgggtttaacgtagagttaaacatgtatttgtttctgtttggacttagtcctgaatacccagcttagttgggcccgaagtatcaagagtcccgtctaattctgtttaactcataaaatttcaagtctttgaacagaccgagcattgtaatgatagacaatacaaatgtatgacattgacaaagaatgaattgtaatgagtttagcaaaataagcatggttaaaattgaatcgattcataacttgtttcaatttaatatgctttaaattagatgtttgcaatttatagacaattaagaatatttttaattttagtccttaatttggtgcccaaacttccgcctcccttttcagccccccccctccccttattttttaataatttctatatatgcgtctttgaaacgagcgcaaattattaacaatgtaacttaaaacaattttcaaactaaagcaggaggacaaaggacaatcgacgcttaaaagccttccgactcgtcaatatttggacatg

SEQ ID NO: 111939 - DNA, 1003 bp, Heterodera glycines
atgataggctttttgtaagttagaaataaatatacttttggtatatttttgcttcattttgtttactcgtgggtgtggtccggtgggttgttctcttggttatgttcttcattttagcgttggatcagttccctccaagtaatttttttttcttctaatttttcaaaattattcctttttcgataggaattcaatcaaaattttaacatttaaaatcataaaatattgtcatttttggactaaatctattaacaaagtgcactaaaatttcaaattttccccagcggcgcctatcggcaccgccggccccccttgttccccaaaagttttttggaataagcgtgttttgaataaagttgtaaaaatgagcttttttgactcaaaatgaggcttttttgcataccaaatgaggcttttgaaacttttaatctgggagccctgtttttagcattttaattttgattcataatttttcagttgaataaatgcaattatttcaaacgtaatagtaatttttcataatttttaagaaataagaaaattttaaaaaaaagtaattcccctccaagtagttgtttttcttctaatttttcaaaattattcatttttcggtgggaattcaatcataattttaacaattaaattcgtaaaatattttcattttttggactaaatcagttaacaaattgcacttaaattttaatgaatttttgttttgtgcgtttttgaaatgataaatattgtaacaaattgaatcaaatttaaaaaaaaccaaaaattagttaagaatagagtcaaaaaaatatttttaacgatttttaagcgaataggaaaattttttgaaaaaagtctcgagtctcgggttttttgggtctcggtctcggggttttcggtctcggtctcggggtcgagtctcgggaaatttttggtctcgaactgcactataatcttctaatattaattgctgcccatttttgaacccactttccaatatatcacaatg

SEQ ID NO: 111940 - DNA, 387 bp, Heterodera glycines
gaaacgcacaaaacgtacaaagtcattttttgaagggattgtcaggaggaaaaatttgaagaggcgaaaatggagaatgaataatgacgaaaagtggcagaggagcaaccacttttatactaatttttgttgttacaatttttcacgatttttataatcagtcgtatttcaaaacgcattgctataaaagccttctctcctctcccatttcctttcattcgctcatttttttctttccgttttgtttacgcaaaatatttccttacttttctcggtttttcttgttttaaaggaaaaattggttttacaaagttctttttctgtttttctaataagcaaatttaaatctgccgaaaactgtcttaataatttgccaccaacaaaatg

SEQ ID NO: 111941 - DNA, 834 bp, Heterodera glycines
cttcgaaatgagatctttgtattttccacaactattatttaccactcttacatagacagctactttttacatatattttttttattaatcttatttatatgattccaaaatagttattcgctttgcaaatatgaataaggacaatagcaattataatattttttaaaaaatctgtggtatttttcttattgctatattgtaatattttccttgtatacgatttttacaacttatgataaaaaataataaatttatctcatatcatcttttaaatttaattttttattctttatacatacaataacaatctaattagattttaatttgagacggttccattatctcacccaaattataatgtgtagatttttttctattttttcaaaatatgtgattgatgtaaaatttatattatttaaataataatggttttcaataaaataatgttcgatcccacttcgaacgagatgttgtttgagattatcattttcgtgtttacaatgacagtccacatttattttaaacaaagaaataattttaatgcatttttcatatttaaaaatgtatttttaaaatctttaatttgttaaaaatttaattaaatttatttatttttatgttggattcgaacccggacccccaaaattaggaatttaaccaactgagccaccaacttcatgtgaaaacacagccaaattttcgattttcgaggccctgtaacttttgaagcaggcggaatgcaccgctaaaattaaaaattcacaatacaagtcgaccccgctctatccaatggtatatagcttatatgcattttcccactcacagctcggaatg

SEQ ID NO: 111942 - DNA, 60 bp, Heterodera glycines
cggataaattgttcgggacctggcttccggcccatgagctgaccagttctaccgatcatg

SEQ ID NO: 111943 - DNA, 722 bp, Heterodera glycines
tctggatttttttgaaatttgtttcaataagcaaacaaaatgtttatgacctgtggacctgtggacaaaacccaggaaatccaagtccaggaaaaatccagcctggatcgaaggtcgaactctaattaaaaattggagccgaaaattttaaagaatttgataattataaaaaatagtaataaatgaattattaattaaatgttttttccacctcagaattgatgccactgactttcaattgccccattactatgaattctttaaccaaatccagctcaaatacagcaagaaattggtgatctgatcgggttttgaaaataattttcgccgctcgcccattgatccggaacaataaaaagaaagggaaaagtgatcagccacagctagccataaaacaaattgcagtcttaaatcagtccgtacatcgtaatactgatgaatgatgaagaaaaaactggaaaatcgaaagcgaattttattggcgcgccgatacaaaaaaaaaaaaaaaaaaattgaattttattaattttagtcgattttttcaattttcccaattaaaatgagacccaaatatgctttaatcaaggttctgaatacatagtttagatggaaaaaatagaaaaaaaactacgtgaatataaatttttcccgcagcccaattgaaaaaatatacaacagggatatttcgagaagaaaaataaattacgagacttgcaggcatg

SEQ ID NO: 111944 - DNA, 101 bp, Heterodera glycines
ggtgacaaacacacacactaaaatgttataaatgtgtgcaactttcagtcatctccttgtggaccacctcagcagcgcgcctcgttctactcaaggcaatg

SEQ ID NO: 111945 - DNA, 108 bp, Heterodera glycines
  unsure (1)..(108): unsure at all n locations
tctagagtcagacgccatttgagggacaatttacatttgcgcattcattgtggaccaaattacccgcgggaagcgccgatcgntcgctttaccactaaaatcaacatg

SEQ ID NO: 111946 - DNA, 619 bp, Heterodera glycines
ttgtttgtacttttcttgtagaaatatgctcaggttggagtcactggctaaaaaattagtttcgtacaattatgaaccctctaagagttggttcaaaaacctagttactgtttatctagtgaaaaaaggtttttttgaatgggtcttaacaatccgttctaaatttattttctaacaggttatctgtttattttatttaaaattaattcttacgctaaaaaacgtcaagcatgaaacgccaaatataattaacataattttgccgctaattttaaatattgttcaatgcctttttatttactttgattactatcagccataactcgctcgcttcattcccatcgagatttacaattaggaaaaaggtcatttgattatcattttattagggaataacttttgttaaagctttgccgctccttaaaaatgattccgtcgatggtaccattgacttctctcactgagatgaatcgattgaattataaataaaaagttatctaaatcaaggtgtcaattattcttggcttttacctttttttacagctttcctaaacattaaataatcacgctaacatttcacgaatacaacttcagcattaaacagtgttgaattgaaatg

SEQ ID NO: 111947 - DNA, 1003 bp, Heterodera glycines
actcatttcccactgacgcactttccgggagcccctagtgctattaatgattgggcatcggatttttaaagtcgaaaaagtccaaaataaggccctaaataagggcgcaaaaaccgaaataagggcaaaataaagtcgaaaagttcaaaatttagggggtataattttttaaattgctgtttttttatatgaaaataatttcaaattaagatacatttgaaaattttcgagggtaaaagacatacgattatcgaaccaaaatttgtttgtaaatgaaaaaagatttccacgtcacaagatgccaaaggagtaaaaaaaattttcgagatattttaatgtgttttttcatgtaaatgctgatttcctcgagcataaaccacaaaaaggtcgctaataattttctcaacagatatcttttccatgttcatatcattttttatttaattaaaaattctaagtttgtatttaaatataataatacaatttgataagaaaattaataaacatttttattgctttcaatacggatcaattgtttcttaattgttgaatttgaagtgaatgattaaattttttgagattttataggaatttagagccggctgtagagttgtttattggaaagcgagaagaaactaaaaaaatgtacgtagttcgtcctgagcctacaattcacttcgcatctcagatttgatttatattgtatttatttgtttgtaaatgaaaaaagatttccacgtcacaagatgccaaaggagtaaaaaaaattgtcgagattgaatttttaagaaccttttcatttcttatggatgtcctttttgtaaatgttagggtcgattcttagggctatattgttctcaattttttgggaaaatcttatatgttatttttcgtttttttattgcatttttgtcaataattcttaaaaacccagtctctaattgtcgggttcacttgctgtcgaaatcacgcatagaaagtgagaaaatgcgaaataactatg

SEQ ID NO: 111948 - DNA, 240 bp, Heterodera glycines
ttccctcgccttcgattgtttattttcttgtggcccatcattttttggcagagtgtcccaaagtcaatcactcgggatgactttttcctcctctcccctcccgccctctccctccctttttccctcctccttaattaagaatttccgatcaaataattacttctttgtgtcactaattggccctcgggcgttaaacgacgactgacagagtaattaaatttttccgacgccaaaacaatg

SEQ ID NO: 111949 - DNA, 387 bp, Heterodera glycines
ggtaatttgtccaaatgcaaatcactgcacaaatgtataaaaagccgttgttccgtatcggtaattaatcaatctcgagaaattttccatctgatgacaaatgatcagctcatctaattgagttggattttctataaatgattctttctgaccattttaatctcataatggttttttaatagaaaatatttgtgtctccttagccttaatttaacttttaaatttacagagttatttttgaatttatgaattgttttttagatcccggaaatttcaattttgcgaattccgctgcgggattggaattcaaaatttttgcgagaacgaatctcataggaatatcccgcaaaatcccacaatttccaaaaaaatgcgggttgcggaatg

SEQ ID NO: 111950 - DNA, 1003 bp, Heterodera glycines
attaataataaaatattcatttattcttataaataatttaaaaaattattttttttcttaataaaattcatttttaatacaatttaatttactacctccatcttaacttttgattttattaaaacaaatgaatttatttatggttgaagaacttttctcaacatcataattaaattttttatttctattcgttaaaattaattacagtactccttaagcgggccaactaaataaataaattatcaaaagggaagggagcccaataaacaaataattaacggaattttccaaactttaaagttaaaggaaatgatggaccaaataattaaaataatatttataaattaaattaataattaaaaagatttatcaaattattattattatttctgaaataataattatattttttattttaaatttacaaataaattatttatttttctcataaaaatttttttataacagttttatttacctacatgattacttttgtacgattttattatttattttgaaaaattttctcattgtttattcgatttttccttgttttcattggcggtccgtcgttctcatctaacaaccttattcatttccctatttttttcaaatcaataaggttctttattctttgccattttcggctgattgtcaaaacttaacccaccaaaacaaatgaaccgaattcgaaaagcatcgacagtacacagcagaaatgaatcaaaaattccggtgttgaaccctaaagccgatgtttgtaaaagagcaaattaaaatgagtcatttctcggtcttataacctcaaaagcaaaactttgtttatgtagcagcaaacatgttcaagggggagtacatcatgtgcatggaaccgcgggtgaataggaaacataattttgaattaccggatttttaggagtacaccccaaatctcaccggcgaatttttttaaataattaaacttattattataaaatttttttcaagaaataaagttgaaatg

SEQ ID NO: 111951 - DNA, 605 bp, Heterodera glycines
tttttatgtttagaaaatacatcaattttctgatgttgataaaaagaataggaagggaaaggtagcaaaatgttgtataagaaatgtcatttttaaattttaatttaggctattgctaaaatgataatgtcacccaaattttcgacaattttaaggccggaaagaaaaacatatcgaaccacaaacaaaagatgttgatgaacaaaatgatcaaatgagtaaaaatattttagcattaataactaattttcaaaattaatttcaccgaggcaacaaattaatcttataaaattttttttagacagaattaaacagaatattcaccaaaaaaaattttttaaataatttttaaatttaggaaactttaaaaaaaattattccacaatttaatatttttatacggaatagaaaacatagcgattttcgtgagaagaataaagggaaaaacttaagaagagtaattaaaaatatagttattaatgcgaattttaccaatgaatttaataaaaatgttgcaaaatttaaattaattttatttataattaattaagaattttaagagaaaaatattttatctttttaagataaagcaaaagtgcccgatg

SEQ ID NO: 111952 - DNA, 112 bp, Heterodera glycines
tccgttgtaaagacgccgcctcacgaccgcctatttgtgttaaatatccgattttgggttgtcacgacatttgcattggtcgaaggattactacataggccattccaaaatg

SEQ ID NO: 111953 - DNA, 249 bp, Heterodera glycines
cgctttttataattcctacctttctgaccgatgccctatgagtttcacttacaaattattttacacccgctccttttgcactcaattattgatcaaacaatttcattttccaattggatttaaaatgttcgccattcactctgtaaaagagagagatagagagagcgagagagaacataaactaataacacgagacaaacctgatatatttaaataacatattttcagttttttttaacattaaatatg

SEQ ID NO: 111954 - DNA, 175 bp, Heterodera glycines
ttttgcattttttgttgttgcataatttagggattaacttagatgatcaataactgaaagattgtttccccaaactatgtttttgatggcgtgaatttacatcaaacaaatttctttttgcattctttcttatttttcccaaatcattttccccaaaaaattaaaattattaatg

SEQ ID NO: 111955 - DNA, 158 bp, Heterodera glycines
gagaattggacatgtacgatgacgtccgattggtggagccgcaacttggtaagcgaattgggggagggaaggggggggggggattggcggatcagcgaaagggctaatcggagtgattgaagagcagccactgttcatccccgagatttatcgcaatg

SEQ ID NO: 111956 - DNA, 769 bp, Heterodera glycines
attttgaaaattttcggtttttttaataagatttacaaatttttgggccaggcaatgccggaaggcagcgccaggtgaattttaaaattcagctctattttcgaacgggttttaacaacaaaaatttttgaatttccgataatttttgttattcttcgatatttggtcaaaaatattttgaaagatattaaattttcatgatttcgtcaaagaaaattgaattttttaatttcaacgaaaagaaaattttaaaaaaaaaatttgggttaatttgttaacatattatgccaaggatgatcgtttttatgggcatttttgtttaacattactttatttaataaaaatttggcaaaatgtttaaaaaattcaaattttttataaattttttttgccttttctccaacgaaaatgccatgtcttaatcctgtaaaatcccgaaaataaatttgcaaaatgccaaaataggtgtcttaatcctgtaaaatcccgaaaataaatttgcaaaatgccaaaatacgtttcttaatcctgtaaaatcccgaaaataaattttcaaaatgccaaaataggtgtcttaatcctgtaaaatcccgaaaataaatttgcaaaatgccaaaatacgtttcttaatcctgtaaaatcccgaaaataaattttcaaaatgccaaaataggtttctaaataatatttagggagtaagcaatcattggagttcaaatttttgacaaaatggggatgtacggagaaaaaactcaatgaatttcgcatg

SEQ ID NO: 111957 - DNA, 294 bp, Heterodera glycines; identical to SEQ ID NO: 99762

SEQ ID NO: 111958 - DNA, 242 bp, Heterodera glycines
ttgctgtttaatcacgaatctgccttctatgtcaacaaattccaactccctccaaaagggtacccctcttagaagaaattttttagagggccccaaaatatgtttagtttacggagtttgcactaataaggtgcatatgcattttggaatttagaaaatcaagaatggccagcaaaaacaacaacaaaaaataaataaataggtaaatatttttttggcgaaattaatgatcaacaactatg

SEQ ID NO: 111959 - DNA, 581 bp, Heterodera glycines
gctgaaattaataaggtaagaaacaaataatgaaatggagagttagttgaacgcgcctcattttggcgttggcgttgtcgcgcgttgtcgggcgctctgtcggcggacataataacaaataatgtgaatgaatgactgtaaacgaaaattcccctctttatatacacattttctcttccaaatcgacacaataacttcactatgggtcaactccactgtgcagagaaaagcctagtactatctcgtcgtttctctttttctttgtaatttctcttactttggcatactatctcttcattttaattatgtaaaaaagagaaattaatctgatgctaatatcttttttttaatgctaccaatccttttcaaacttttggggccgttttattagaggttttttggaaaaatgccaaaatatgcacataaaatatgcacgaaattccaaaatatgcacataaatcgcgaaatatgcacaaatatgcaaaatatgcatatggaaatacagtctagaagcttcaaaagaagctaaaaacatgtttttcgtgcgtttcaggcctcccacagtctaggaaaaaaatatg

SEQ ID NO: 111960 - DNA, 478 bp, Heterodera glycines
cccccccccccccttatagtccaaattgatccctcaaatgcccttttcccaatggtacccctatgatccccttcccctcctccttcccctccggtcattgaaaggctctctctttctgttaaaagatggcaagggcaagcagtacaggcacagagagaggtacacgtgcacccgcaatgcacccaaatcattcaaatatataatccccagctgtaattgatgacgaaaaaaaacaacaaattaattggggtgggcggggaatgaatggtgttccttccccttcccccagaaagctatttaaatgccaatttttcacagcagaaccataaagaacggcaaaaaataaatttttaggtattttagcaataagaaatttatttaaatcaatgcatttttaaaaaacaattaaatcattattctatttttaattattttcagttttcctaatattaacaattaataattattagcacaaatg

SEQ ID NO: 111961 - DNA, 215 bp, Heterodera glycines
caattggaagagtgcatgtcgccattgaatacgtgccgacttcggggattcgcttttggatcaaaaggacatggtccgaatttcactatttttccaaaaaattacgttgttttatgcactcaaaagcactttttaggagtcgcattgtctgttcttgtccggccgatcgttctcaaattgtgttggcatttctcaaaagggtaaccaaacacatg

SEQ ID NO: 111962 - DNA, 246 bp, Heterodera glycines
ctttgccgtctttctggaaactttaaatttctgggggttatttttctaaccaatgtttccaaaaaatcatggggtattcaagagttttcccgtttctttgaaaatttctctataatgatatagtctattgtccataaatcggctgtcaatttcccattttttcatattttagtttggacgatgccaacggctgtcagaggggcggcttaggacgcggaaacggcggcggcgccgatttggaggatg

SEQ ID NO: 111963 - DNA, 211 bp, Heterodera glycines
acactacgtaaacattcatttataaataattttatgatttatcgtgaaacattctgtcagattaaatatatattcgtaataatcacattttttcaccccaagaaataaattaatgggaaatgctttcttacgaccaattctcacccctcaagttcttgaagtcattgtgtaaattctcgcattggaaggcgaagttggacgtgccgccatg

SEQ ID NO: 111964 - DNA, 905 bp, Heterodera glycines
tcgctttactcggtgtttactgtccctgcacatatttgcggtgtttgcctctttttgccccccccccgccccaattgactgatgaaagatgagttcccaccgtttcttaacgttaacatttactgtcaatcattgactgttaggttttcactgctcacagaagggatggggcggttggcaatgaaaatgaaggttaaataccatgtgacaccaaaacggaatgaatgatatcgctgttattattttgggataaaatgggggaatgaatgaatggccatcagttgaaattggggagattagtacaacgattttcagttagtgagggaaacggagggaaaaggcggagccgaggggagaggggacactgccaaagagcagtgagtaagcagagagagagaaagagttatttacgagtcaattaaattcattatttgttatgatcggacacgtcgagcaatttaatgagcgaccgttgttttggacataagaatcccttttctcggtcttttgatcagtgccaactaacaattcgtcattttctcattgctccctttggttgttccatctcattttattaattgttattatggccacaccttctccatcaatcgttgggtttaggaataaagttaaggacaccactcctcggtttgcccccccccccccctccagcagcagtgtgctgtcaactgtcatcaatgacatttgtctttcttccctgtgaagggacttctcccggggaacccccgccccctccgttttcccttttggggcgggaggtcccaccgatcaaagacttcccccccactcatttgtcagtggtgctttttatcagcagcagattttcacctcattgaccattttaacatcatttcagtgaactgtcacatcactcctttccgatg

SEQ ID NO: 111965 - DNA, 221 bp, Heterodera glycines
ggtttgaacacggaaaacattttagtaaaaaagaaaccgcacaaaattgaattagatccaattattcatcgggtcacaatgtaccaaaatccgtttgtcatttagaaattcatactattcgaaccattgttgcaaattaaaaatatattgtatgccaatgtaaggtccaacacgtgtcgaacatttcctcgcatccgtacggttcggtttggctgaacatg

SEQ ID NO: 111966 - DNA, 129 bp, Heterodera glycines
accaagttacgctcatcatcggacccttatcgtttaataatgtattcggttgcataaattcattagcagccttcgtaatagtaggtatcttatcgttagtatagtttacaggtaaatacgaaaaggatg

SEQ ID NO: 111967 - DNA, 111 bp, Heterodera glycines
aatttttgataatcaattttcatttttgattcttttttgcataataaattataattctcttaaaattaggtttgaaattacattaattgttttcccatttgctaggccatg

SEQ ID NO: 111968 - DNA, 544 bp, Heterodera glycines
gagtgtgtgtgaatttgcaaaatggtgggttactttggttatccatctctccccttctccccccccccccccttcttttgtgtacctttcgttcgttcgcttaatcaatttttatcttctgtgaagggatgactcactctcatcgttcgcatttgtcacattttatttttccgagtttactctttaaaaaatgtgcagcttatttttcattgtcagaatagcaatttaggtaaaccatcaaagtaagtgatgaatgactgtacagagaattcggaaacggcactccaacaacaattattattatcagaaaatattcaacagaaagagaaaaaccaattccaaagccgaggaaatcactgccaaacaattttcacaataaatcaacttttatcacgactaaatacgatttggataagagcaatttggtcccaattcacaatcagccaattcaaatagccaataccaacagaaacaccacttaataactcccacccggccactttcgccacctccgttaccgccgcggccttcgctttccggcatg

SEQ ID NO: 111969 - DNA, 1003 bp, Heterodera glycines
acacgtcagcggacaatccgtcagtaatagacaatctgtcagatgtccttaaaataatttgatgtccccaagtcgcaaatccccaaatgttaggtagccgagtgggtcagcatcattgatttttcgataaattctgaatttttttgttcataaattggagacgagaccagttataaaatacaaaattttaattttataaatatgctttttttattttttaagaaaatgattttagatccgcccaaaaatcttttttggctcggatttcgggattttcatttcgaactagggattagctctaatatcactgcttagtacatacaaatcccctttctcgtcaacagacattggcaccgttcggtccattggcgtggcaaatttcgactcagaccatgtcgaacacttagtcaagaacggcatacattgtgtgccggccgttgtccaatgcgaaatgcatccattcctacagcgtgacgatctgcttgattactgtaaatccgcagggattttcctgcaggtggtcaaatttggaaaaataatctaaaaagtcggaagggtcagtgaaaaatgcaccagggaatcagataattttctaacaaaatttcagacgaattttttcaaattaaattgttaagccaatttgtgttttaaaaatttaccttgcggcacaaatttgcacgaagggcacaaaagccccttaaattttttctaactataacctaaatacttaaaatttcgccaattggatttgaattgtgagtgtctgtttctcatgtttgtggatatggtgctagatggtcctagaaaagtttctcattggggcgagccaggggacaaataaattagaaaatcttttctctattaattgttaacttttaaaggcccacagcatttttgcatacaaagaacaaaaaccttcctacctaaagcaacaccagcgctatttgctgctgaaaagcatagcatcattttacaaaattggcacatcggtgagtgatggatg

SEQ ID NO: 111970 - DNA, 702 bp, Heterodera glycines
tttttcttaccttcaaattttaataaaaaagaacgatttatacaaattatgtgcatttaaattttacgaaaattccctttcgaataacatggattaatgtatatttttatgaataggccttcacaaaggaatatattattacatgaatgaaaccatttattcttggatttggccaacataaaaaattgttattatacattttgttaaatttgtctaacatataagcagttggcccactctgcgccaggcccaatgggctctgtctttcatatcacattgtacagacggttccaggaaaatgcgtcaatgaaattttagtgtgataaaaaaacaaatccttgggctttggaggtcactgaccacaaatccggtatccatttctgccaattccgaaccacggacccgaattcgaacaaaaaagtcgataatccaaattattaaattttgagtttttggtttaaaaaatgcgtaaatgttttcatattgaaggattgattgatggcctttcagtttacttccatgtgttccatgtgtttaaatcgattttggaccaaaaattcaatttcggatatttagactttcgactttttttcgatttcgggtccggggttcggaatttagaacaatgttattatagaattttacttttatattacaatacttaatgctacagaactttcttttaacttatttgtatcaatg

SEQ ID NO: 111971 - DNA, 519 bp, Heterodera glycines
atttagctgggataaagcgcttcgcgcttcttgagcttcgctacctagataagctattgggttgtgaagtaatttggaatttttaaaaaattttcagggatttttaggccggtttgcggcccaaataaaaaattataaaaaaaagatcaaccaagaaattatgaatattgaaatttatataaagtaattaagagagttcaattatcataaacagaatgctaatagtttaattaaatatttattttatttaaaaagagtgcaattataattagttaaaaaatttctctcataaagaaaaaaatgcatgcttaaaactagggccgcgatttcatgttcacattattcgttttaattgcatttttaattttcaaatttggtcaaagtgaaatagaaaataaaaaattgctacaaaaaacttttgatgaaatatctggagaaaatgggaagaaattggagaagaaaaacaaatgatgaacaaaaagttcgaaattgtttaaaaattcatcgaaatgacaaatg

SEQ ID NO: 111972 - DNA, 375 bp, Heterodera glycines
cccccccccccccccccccctcgcctcacgcatcattttcctccaattctcattctcagcgccaccacatcccgccaatatttcaccccatccattcattcattcttcgtacaaaacagcagtacggccattgcttgtgtcccctccgccatcaccatttccttggcttcgcaatttttgcttcaccttcaaattttgaaaaattttacaaaattggactgtttttttattgcatcataaaaatcattgtttctgtgcacaaattgttgttattttgttcagcaaatgcaataaattacaggctttttggccgatgaataatttattttgttcaaatttttcttgaattttctaaattttagaggaagaaatatg

SEQ ID NO: 111973 - DNA, 619 bp, Heterodera glycines
tttcaattcaacactgtttaatgctgaagttgtattcgtgaaatgttagcgtgattatttaatgtttaggaaagctgtaaaaaaaggtaaaagccaagaataattgacaccttgatttagataactttttatttataattcaatcgattcatctcagtgagagaagtcaatggtaccatcgacggaatcatttttaaggagcggcaaagctttaacaaaagttattccctaataaaatgataatcaaatgacctttttcctaattgtaaatctcgatgggaatgaagcgagcgagttatggctgatagtaatcaaagtaaataaaaaggcattgaacaatatttaaaattagcggcaaaattatgttaattatatttggcgtttcatgcttgacgttttttagcgtaagaattaattttaaataaaataaacagataacctgttagaaaataaatttagaacggattgttaagacccattcaaaaaaaccttttttcactagataaacagtaactaggtttttgaaccaactcttagagggttcataattgtacgaaactaattttttagccagtgactccaacctgagcatatttctacaagaaaagtacaaacaatg

SEQ ID NO: 111974 - DNA, 132 bp, Heterodera glycines
tttggggacacttgttgggccttcaacattatattagggggtggtaaaaaacgatgaatctgagcccaattcaacaaatccaaattcgtcggaattgacaattgccccgtcgtaccccttttttctacaatg

SEQ ID NO: 111975 - DNA, 274 bp, Heterodera glycines
taacaatgcgactgaatgaaacacaaaagaatgagtgaaccaattaacaacgtaattaattaatgaggtgtcaacagaataatgacggaaaaacaaaaacaacaactcactattctctggtgagcattgttgctgaagtgcagtccaaaaaaagagggaaaatgaacaatgaatgattgtttctgtccgtaaaccatcccttttatactacacactttgcacgtcgtcattgctcagcagcgacaaaaatgaattgtcatacctagtagggatg

SEQ ID NO: 111976 - DNA, 287 bp, Heterodera glycines
cgccaaatttcaaatgctctctcaatgagtatttggccgctgttgtggcttataacggtttttatttcaatgttccagtgaaaacaatcgcaaaaattgtattgagtttgatttttgctgttctgtcctcccaaaatttgtccacaaaacagcagcagaattctaatgagacaatttttgatggcattttgacatttgaccatttttcggtgatccgtccaaatgaatttgaatttggcgccgaagaattggcgggaaatttgaaaattgaatttaacgaaacgatg

SEQ ID NO: 111977 - DNA, 421 bp, Heterodera glycines
  unsure (1)..(421): unsure at all n locations
gagaagccctttnttaattcgtgtaattttggagaaactcaagaaatttaaattttccattattaatntaattnttataaatttcacnaataaatttatcaaacggcacttattgaatttaaataaattatgtctttaaattatttttgtcaattttatatcgaataaatcgagcaagaaaatcaaaattaattataactcttttaaatgcattctatcaagaccattaattttaatttatatattgaaaagttaaattaataattaaaatttataaattcttgctttcctcatatttttttttgatttataaatctcaaatttcatttctattattaagttaaatgaccgcactgaaagcttgttcatctttccaagcacatgcattgccgcctaccgaactgaagaggaacaaccgatg

SEQ ID NO: 111978 - DNA, 471 bp, Heterodera glycines
tcccgttgatcaagagggaagtcgatctgctgataaagaatctgctcaaggccgactgattgaagctttacaggcgattctcgcataaattatttatattttcttctttcctgtccttccttttggcatctgtgaagaactgtccttttaccccattaaaagcttaggcccatttttggcacatgaaattactaagtcacggaaaccaaatcaaaaattggcaaaagtttgttgttctcttactatcgtgtctaaatctgaaactccatgtaaattttcttttatacattcactctctttttctgactgatcatcgtttatttcattttttgtttgaatgatcatcttttctctccgtgaactattggataaaggaagttgttgatttgttgagaaatttcattcgtgtaacgattaaatattcgctttcgttaggtttcgtctcatataatttcttttgaatgcccaatg

SEQ ID NO: 111979 - DNA, 130 bp, Heterodera glycines
agtaaacttagttttccaattttaatttcgcaatccaaattgcgaagggtttcggcaaactttgatggaaacgggcgattcgcttctgattgtgtgcgaccggcgcgaccccgagttgggcattggcatg

SEQ ID NO: 111980 - DNA, 184 bp, Heterodera glycines
agtaaagaaaattctaactttttttttctaaaaatgttcttaaactgcagcttcccactcccgggtgctacacaaaattttggccgggacaaacaacgctgaatctttttgaaaaaaaatcaaaaaatttttcatgaaaatcttaaaaaatttttcgcgagttttagaataaaatttactaatg

SEQ ID NO: 111981 - DNA, 265 bp, Heterodera glycines
agtttttataataatatcacaaataaagtctggtaaaaaaatttgtgagccccggactataacttttttctttgtcaaccaaatccaacattgttttatcattcattcgattgcactaacaaataagtgtcgaaaatatggtttgatgtatttttggccataagtttgttttatcttaacaaaattttttgaagtttttgcacgctaatagaggaaacttagggctattgaataataccaatattgtaggatttggtctacaatg

SEQ ID NO: 111982 - DNA, 92 bp, Heterodera glycines
cgaccggctcaccacccagaggatcggccgcttgtctttctaacatcattggacgcaaagtgcgcaccacctacaaccatcgtaatgggatg

SEQ ID NO: 111983 - DNA, 1003 bp, Heterodera glycines
tctagtaatttctgtttatcttattctttatttataaaataaaaaaagcgctgacccacaaaatgtccagcccacgaaatgtccaagtctcgaatttgagttttttattattcagatgggcctaaggttaggcaaggggtaatataaagggtatattcgtattcagagaccccgaaaaccctaaaaatcctaaattagactcattttgtttttataaattttgggcatttcgtggcttggacactttgtgggggtgccaaaaaaagattattattacatatattatcaatttgacaaaaagaaagagacaggaaggagacaaagttgagagaaatgagatttggatgaaaaacgttattaataaaactctatcaaaatttattttaaattatctgaaaaacgccccgagccggcgcctagcactcgtatgttattattattcaatttttttaaatttaaattttagcgttttaaataaaaatttgttgacggattgtccattggcgtaatgtccgtgcccctccccccactttccatgtcccttttgactttgtttacgttttccgcctctctctctctctcttttgctcaatgattcgctcgctctgttttctctctgtgtttccatttcattcgctttctttcccgaacattctcagcaaatggagtgccatggagaagcatttcatgcggcaataaatacgcaaaattttcgggctgttcaattaaagcttctctgcagttaaatctgaacatcccaaactgatttatgctcctctccccatttccgattacttttccgtgattttttctctttttcccactttttccatttgatttttagtttcccaactgatccgattaaacatttctctttatttacaattagcaatggttttcctgtcaaaattctcccctaattcaattcaaaaacaataattctcccgttgtttttcagcatttaaattcaaatctttcaaccaattctcttttcgtcaaaatg

SEQ ID NO: 111984 - DNA, 382 bp, Heterodera glycines
tctcgttcaattctaagttgcaccaaaattcattttatttttgaggattcacaccgaaaacttcaaaaaataaacattgaaaaaatgaatttcgatgtaaaaagacaaaaaaaaaaaacgaataaatgtttaaaaacatcatttatttaataaattttcagtgacaaatttgtacttttcagtatttatttatgtcgggcctacctgattatatttctgtcgtgtcggacaaatgttggcttttgctcaaaaatatgagcatctttcaccttttttgtgtaattttagatttttttaaataccaaaattttttacttctaacggtcgcttcacaaatccgctctcaacattcgcaacaaaggcacaactgaagaaaaaaatg

SEQ ID NO: 111985 - DNA, 220 bp, Heterodera glycines
  unsure (1)..(220): unsure at all n locations
cgccgctttctttctcaaaagtgtccggaaatgtacattacgtattgccgaggtgngcatgttggtaaaaatgttgctaccgtttaccacccattcttcccagctgtactccgaagaacagttcaagacgtacatgcacgaggcgggcgatgcgatccgcgactgtgcgttgggttgcgccgggtggcggttcaattacgacggtgtgtcaccgaacatg

SEQ ID NO: 111986 - DNA, 594 bp, Heterodera glycines
tatcattgttgatttgaattattttggcgttttgttttagtttttgtgaccctttattttattttgttttgtttggagtatgtgtgatatatgtgctcttcctaaatttgtaattgattgctgtgtgctgttttattaattggaagtaaaagaaagcagtgaaaagagacggcgatttggttttggatttgggatacaattcccctttcccattggactattctttttcctacgacgtggcgctcctgtacaaaaggtggctcagcagtggcaataaacgacaaatttggacgagcaacaacgattttaaaaggaaaagtaaatccttctgcaatttgtaacaggaaaagcaaatcctggtctctggaaaagggaaacaaatccctactgaatttcttcattggttgtggaccacaaaatcagtaaaacgggaaaactaaatccctcttcatatcaaaaaaaaaaaaaacgcagcttcgaaaaggaaaagccgtaaagtgtgaaacaaatcacgaaaatttgtcagttcggtaaattaactccgtctacaaaactgacttcaaaaccgggaaacgaaaatcccatttcaacatg

SEQ ID NO: 111987 - DNA, 168 bp, Heterodera glycines
gtcccttcatgttctactttgaaatgaaagtcaccaaattggggaaggtaaaatgacatttattaactaattaaattcacaaaattcgcataaaattattgtttttggcattttttatatttacatttttatagttttgcctcgattggattcgccaccaaagaaatg

SEQ ID NO: 111988 - DNA, 296 bp, Heterodera glycines
tttttcaaataatttttaattttaataaataatcccagaaaaatgctattttttttttggagaaaattttaatgcaacaaacgctctcgaacatgaaagaaagggcggtgcgccgtggccattttatttttcaaataatttttaaatttaatagatattccagaaaaatggctatctctttttttgagaaattttctatgcaacaaacgctctcgaacatgaaacgaagtgcggtgcgccgtggccattttatttttcaaataatttttaaatttaatacatattccagaaaaatg

SEQ ID NO: 111989 - DNA, 421 bp, Heterodera glycines
tacacttccacagttgctcaagtcggcgccaaactgaatggagcgcctcgtcacctttaaattcagattaatgggatagaaaacatttttcaccacaaccctgttcatctaaaaggccaagaaatttgtgctcgcgagcgaagggaacaaaatggctcaacaaaagatgtgccttgggcttctttgagagaaacacgcgcattcgctcctgggcagacaaaaaagatttaaaatcgttgacacgctcctctagctcatccaggtcattcggtgacaatgggctctggcctaaatttcataatttagtttgagaaagaagaaaaaagggacttttgaaaatttttggattttcccgaggtgcacaagggttctctgcaaattgaaaaattttcgaaaatttgttcccccaaccagaaaaatg

SEQ ID NO: 111990 - DNA, 112 bp, Heterodera glycines
tagagtcggttaggtaaaaaattaggaaaaaactgacattttgaaggcattttgttgaaatgtttacccatttttatgctcttatcttttaatatagcttggtgaactgatg

SEQ ID NO: 111991 - DNA, 412 bp, Heterodera glycines
agttcgtacggcacatttacagaaatgacaaggctgtcgagaatccgaggagtctatggatgagaatttcaagccttagatctctccctctttttttctttctctctctctcgccctctttctctctctatctttctctctctccctctttctccatttttctttctctctctctatctcctctttctctcctccccctctttcgctctctctctctcactctccctctcgcactctctcctctactcttttctattctcgacttatgctcccaaaaattctcgactgtaaaactcacgggatcacaggtttggctgctgcccggacggcaaaacgcatgcccaaggcgcgaacaatgagggctgcggctgtgagtacgcgcagtacgggtgctgcccggacgggcacaatg

SEQ ID NO: 111992 - DNA, 210 bp, Heterodera glycines
gacacagtgcaaccgcagctgctgatcggaatacggcgattttgggacttcgtacaaggatttcggaagacggcggaggggacttatctgatcgacaccgtcttcggcactgtgatttgcggggagcagtttcagaccacgacgggagttactcccgattcgtcggtattcgcgatccccccatgtggggaggacgagcgggatcaaatg

SEQ ID NO: 111993 - DNA, 472 bp, Heterodera glycines
  unsure (1)..(472): unsure at all n locations
tgcaaaaaaaaaaaattcttcccatactctcttatttttctatagaagtatcattntaaattaaattattataattaattgattattatttgttaattagcagctaattattaaataaaattagtcacaatttcaagtctatctgtcgtcaatccccaatcgttcattcatttttagaattattattattttttggcctatatacgtcattgaatgcatactgatcaactgcaaagagaacatcatcaataatttgctgattggaaagggaaaaagtgtcaaattaattgctcttctatcaacgcaattcttgtccatttgtaacaatttttgaggtaatagaaaccatttcattgattgcctttagtcttttttgacaattgcaatttttttcgcttttagtaccgaacatttcctcgcccccatcttcgcatcattcgttcattcttcgaatttttttactgagtgaatg

SEQ ID NO: 111994 - DNA, 211 bp, Heterodera glycines
atatgagcagcgggttgccgagctgaattcggtcctttgggtcctttttgaaaatttatgtcgatgttctaatttcattaaaaatttaaatttcccgtgcggcattggcaaaaagggttttcagttcctgattttttatacaattcactcgtgtttttaggcgcaaaatagaaaaaactgaccatattaattaattttttaggccgggatg

SEQ ID NO: 111995 - DNA, 111 bp, Heterodera glycines
ttatattatataagcccattaaacaatagggaattttcttgaaatgtccagctgtgcgctgtacgtcgtttgcacacctctgttttgcgacgttcgattgctgtgccaatg

SEQ ID NO: 111996 - DNA, 1003 bp, Heterodera glycines
ttgagccatagaatttccgcattttcgtctgggattttttttgaaattacatttttgaccgcactgtttgtttgtgctgtttaacaattacttaataatcacaaaacagactccccccacccctcccatttattcacgcttgcataatttatttttgttccgccatttttgtttattgattagcggagcttttttgggttaaattcctattaataattttttttcattccgttttactttttttcaccgaaattgaccttttttatagtaggcacagtttttcaaaaaatttactgaatttaatttcgccattacaattttcattactcaaaccaattatcttttttttgaagaatttgtttaaaaatgtcaaaaattgagagtgtataggcaggcccgtaaccagttaggggccggagtaggacaaaacgtcgtcagccgaaacgtcgtcgaacgaatttttcgaccataacttttttctttctcaaccaaattaaacattcttggtattattcgaaagcattcgaaaaatgctattagcctgcaaattttcaaaaatttttatttatgcacaaaaaaatcagagcaaaaaaagttcgaattactgggtttttgagttcattctggccataacttttttgaaacttaacgaaaatttttgagattttgcaaattaataataaacacatagagctatcgaacaacaccaacaattcttaatttgattgacattgaacaaagttatggttcaaaaagtcttccgacgacgtttcggccgacgacgttttggggtgcaccggttaggggcaactaaacgccgctggatgccaattttccatatgttttcaaaaatcaggtctcaaaatggccaaaatttcctttttttttccagtcgccgccgaaaatttaggtcaaaattacactggaaaaatttttggaccgaagagccaaaaaaaagccacatcacaagctgttttgcaagaaaattgtatcaatttgaatg

SEQ ID NO: 111997 - DNA, 483 bp, Heterodera glycines
aaaaaattcaaattatttattaatttctaataattataatttaaataaaaatttataataaagggattcacccatttttatgtagaaaaagacaatttttttttgtaactccttttattatttcagtttataacttaaaattcttcatgaaaaatattttctaaattatctataaaattctggaaactttttatgaattcgaatatctcttcaaaaattaaaaacccaaaaatatgtttaattattataatttagtggatttatgtataaaatttttgtgagtaaatatatattttttatttctgaaaataaatgaatggagttaaccgtaaaaaaaccggcattttgtgggttttttgtacataaaaatggcatggtgaatcccgctattaattgaatacagcgaaagaattgacattctatggccgagtttggcccgaaggcaagtacaaacttttttgggacgtaaaaggctttgaaatg

SEQ ID NO: 111998 - DNA, 354 bp, Heterodera glycines
aatgttatatgtaaaaaaataatgaaataattttcagtaagcaataaccaattaaattttatttaattattttaataaacacattaattgttttcttgttcggacaattatgtttcaatacaagagtttgaacaaaagaacgaaaatttaaatgttcgcaattttcagttacaaaatcttattggaacttagttcaggatttttggattcaaaagtcataattgaattcccctctgcagataatatttttgcacaaaaattttaaaaaattataattttttcctgaatttagctaattttttatttatattttggcaccaatcctccaccaacgttcagaacccatcagaaatg

SEQ ID NO: 111999 - DNA, 77 bp, Heterodera glycines
agttggttgaattattagaatatttggtaattaaaatatgaatccctttagaattggtctgcccaacgatagaaatg

SEQ ID NO: 112000 - DNA, 641 bp, Heterodera glycines
agagcgtgtggaaacgaagaaaaataggactgttcgttgactattcgctggatgtttagtttcctgacattgattatttgttttcgaaaagtcacttgaatgctatgagtatattatttaattaaactgaataaaagttatttctctttcgtcaaaaccatgcaattaattaaaacttgggtaaagttaccccgaattgttaacaaaatcaacaaattgtggtaaatgttaattgctgaactttttctaaagataatgaaatttacaagggctcaaataatttgtttgaattattctggagccatttatacgatgttggtaagttaattcttgcagcgacctctttttgctgttcttttagacgataagtggggtcgcaactttcaacctttatttcacatgccccgatctttatggtgattgttattggacttccattttcgccctattgattctgttccaaatatgtgtcaatttgtttttgtttcattattatctcaaaaggaatcaggtacaaaacctctaacctaccaaaatccctggacaaattcacaaaattcaggtacaattttggaccgccaaaagcagttggttgtttgatcatcagaatttcgagaaaaacacgaacaaagcgctgaatg

SEQ ID NO: 112001 - DNA, 443 bp, Heterodera glycines
agcgtaatgaacgaaacaagtgcgcttaaaaactatttaaggaagggaaatttttttggttcgcaaaatgtacgagttcagtccatacattcgcgcaaattcggatttcttcaaaaaattagcctcaacaaaatcggataaaaggaaaaacgatttgctgaaaggcgcatccgtagaacaaattctcggattggttgagatttgtgcaaatattttaaaatttaactttcgcctcaaccggcgacagaggagacgattggccgtgtacgcagactattaccgagcaattgcacgttcacgtagtgagcgcacagccagacagaggctacaacagggcagcggaatagctttaggagctattttggcgccaattttgagcgttttggctgaacagctggtccagaaaattgttgcaactccatcggcacaacaacaacaaaatg

SEQ ID NO: 112002 - DNA, 149 bp, Heterodera glycines
ttctgataatgatgaaagaaacaaacctaagtcagcgctaaaaaaacaaaaaggtaataaaatttatattcattagtcaaaacttcttgaaattctagacaaaactaaaggtggtaatccccatactccaacgcgtagaaaaatgaatg

SEQ ID NO: 112003 - DNA, 1003 bp, Heterodera glycines
aatttttactcagatttttaaaaaataatcttcgcaaaaaataataatttaataatatttgattttttaaaagcaaacattaaaaaatagatatttgattttactataaatagaaaagaagtatctctgaaagataaaattgatatagtaaagattggttgcctctgagaataattaatattaccatgattacattaaaatttttaaaattaaactttgaagagggaaattctcaaaaatttggccaattttctttaatagattttattaaaaattataaatttttcttaaaaaattggctgaaaattacaaagtttaatgtcattttctttagcctgagatattattggatgtgtaaactttatagaattattaagatgaaaattaaattttttttttgtatatttttacatatagttgaaaaataggaagtaaaaaaaaatggacgatggctaaaacaagggaaaaaagcaaaaaaaatttcatgtaaactcctaaagattgacaaatgaataagaaaattttttaattaagtctcgggtcaatggaaattttcggtctcgagcagcacttccgctcaccataaaaagaaaagcaacgggaaggaaaaaagcaaatgttagcgtttgtataaaagcagaaaaaggagctgatttacgattaaaatttaaacagttttcatattaaaaattagtgaattatcgatatttacatgaatgccaagaaaatgggaaaaattgagcaatatttgtgaaataaataaataatattacagaattttttatacaatttccattatatataaaaatgaatttgtggcatttattattaatatttgtcaaagcttttataattgaatcggtcaaaattcgaccaaactttgatgaaatatttggcgacggatgggacaaagatgggagtgatcaaacagtaaaatgaacaaaagaagcaaaataaaaatttgaaatttgttaattttcttcaactaaacggtgatgaaatg

SEQ ID NO: 112004 - DNA, 962 bp, Heterodera glycines
atgcgcaatgaatgaacgcggcggacggcgatggcattcgataataatggacgaacaatttcgcatttaattgtctgtcgtgtgatatttgtgtcccccatttttgatgtgttcattcattcatttcctgtgtatgttaccacatatgtgtagtattgtgtttgtatgctgccaattcggtttgtatgtggaataatgtgtatatatgtataaaatatatatgtaatcctttggaattcggccagttattgctagggttaagatttatgtttatgaaaaatagtgtgccctattctattcattttccttccacactttaacctgttaaaaaacggatttaagcgctttgccgcatattttttgattttacaaatctttttttaacacctaagaaaacctataatttttggctctgggccatcaaatacaatttccgaattgggggccacatattcaaatttcgtcaaatcttgaacactgcaaatccaaacggatccattcgatgatttttagcctaaattgttgcttttatgcctcacaaattgctgaagcgctatttttggatatttagcgaactctttattgacttttttaaagttctcgacgagctaagtctaaaaatcaaggaattaagtcgaaccggcgccatttaataagcactgggacaactgagtcccaatgaaaatggaaacttcagtaccaaagaaataaaatatgaacaaaaataatttggtcaggtcaatcattttatggtacattttggtgtttttgtttcagtttatatggctaacttttcaaatcaaattgtttgaaacgacaaaactccgcgttgtgcttttgcaattcagcgaattttccctatataaatgggtaaaatgtgaaaaaatttcattgtctatcaaattattatttcgttgctctgatcaaagttcaactgtcttctactgctgtacaacaaaatg

SEQ ID NO: 112005 - DNA, 454 bp, Heterodera glycines
atagcttttacaaattgtttaaaccgttgtttttcttctactgtcccctttttgaaaattcgctttttctaataaagtggcaaattcgttttccgttgttttttatagccgaaattttcgtgttttgtttaggtcagcggctgctcgtcgcctatccctgcactttgctctattcggtgtttgcactgctcgccattttttgacactctccccccatttatttgtttggcctcttttctgccattgttatttatttatttttgtattattttgttatttgacggtcttttatgcctttcctttgttttggtcattttttgggttggccatttgcataaatataaatattctttcgaatttttccttaaattatcaatgcttttcttcgacattttccaaaatactttttgttttgtttcatttttgcattaaataccaaattggttttaaaatg

SEQ ID NO: 112006 - DNA, 682 bp, Heterodera glycines
ggtaataattaattacacttaattaatagggcttccttttttaggcacaaaaaatcgcgaaataggcacctaaaaaggcataaaaaaatcgcaaaataggcacaaaaatcctcaaataggcatataaaattttttattaacgctttttaggtaacaaaacactttaaatcttaaatatttcaattgaaattattaaatatttttatgtttttttcgaatatgaacaaatttttaaaccaaaaaatttttattaagaaaaaatattaaattttgggatcaattttttgaaaattttttcaattcttatggggtgtattttctggaaaaattttttgggtcatttcttaggggtgtatttttcgtttttattgcatttttgttaaggattttttcgaaaatcctaaaataggcacaataggcacaaaaacccccgaaataggcaaaaataggcattataaaagtcatcgtagacaccccaaaccaagcggaaaacgcgtcttttgtgcttatctatgcgtatcaagtatgcaaaaattttaggcatttgcctaaaaaaggaagccctattaattaattaatcgtcctaaattgtgcccgaattttcccacatttttgcaaggcccctccactgatttcgctctgtttatctatcggctttctttggttcagtgaattggaaatg

SEQ ID NO: 112007 - DNA, 423 bp, Heterodera glycines
ttcattcgcattggacatttatttattattttgttctcctccgccgctgcactcctccgacctcaccattttgtgcatttatttttatttgtttattaataaattgttgatacacaacaattttggcgcagtcagcagcagcagataaattctgcacatcatcaagccaaatcaaggctaattctgcaaaatcttcaagccaaatcaaggcatattctgcacaacctccaagccaaatcaaggcataattcagcaagcctaattttggcaattcaaaagcctgggcggctttcatcggacatcgacaaaaactgatcacctgggtggtgtaagttccgctgggtgcggtttctcatcaacaaaaactgatcacctggggggtgtaaagttccgctgggtgcggtttaatcaacaatcaaaatg

SEQ ID NO: 112008 - DNA, 105 bp, Heterodera glycines
atttatgtcacaataattttcctgaattaattgtcaggaggtcttttttgctcactaaacaattgtgaagcggcggcgaagccaaacgaactgtggcagcaaatg

SEQ ID NO: 112009 - DNA, 133 bp, Heterodera glycines
accatggtttagacccggtcaaactgttcgaccatctgctcgaggagggggtccccgaagttacgcatctgctcccggaactgatcacccccggggccatggcattccttcgggaagaattgcccaaacgatg

SEQ ID NO: 112010 - DNA, 382 bp, Heterodera glycines
tgtttgaggcaactaggccaggtggagttgcaattgcgcctttgaaataaattatggaagtacacaaaagcagttttaaaaagcaatgggaaacacccatttttaaaaattatttaaaataatttagctgaattaaaatatattttaatcactttttatttaaaaaatgtttataaatttattgaaattagatttcagtccaaaaaacttttaataaatctattttaaagctgaaattctaatttttaaaagcaattttgttagtaattaattacattatcaaatattgaaaaataatcgcttttatatcgaaagatttaaaataattttttgtccattaaattaaatcaattcgtcaaattggtcgccttttattaaaatg

SEQ ID NO: 112011 - DNA, 73 bp, Heterodera glycines
tgtcgccgaattgggccattgacgatcaccaaccgccgccctggcccgcacagccagaagcgggagtccaatg

SEQ ID NO: 112012 - DNA, 440 bp, Heterodera glycines
tcccccggcggtggatggagtcacgggcacgggaggtcagaatgccaaaaaaggaggaaaattcaaaacctaccaacgatgggttggccgagttttgcgtgatccccccccccctttaaatttcgaaattcgtcgcatttacaccagagcacaaacccattaattaaatttaaaaataagaatcgaaaatgtcgaggaaagaaaaaacagcgaacggaaattcttctgagcaaaaaccatctttaatgattgtgagtggcactttgtccacatcggcacactgaacgattcatcgagaaaaccatcagcacaaaattgaacaaaaagcgaagagaaaatggcacaactttagaaatttaacaaaatataaatattaaacaaatattaatttcaaattaaaaaaataaatgagctgattgtcaggtcgcattctgaagatg

SEQ ID NO: 112013 - DNA, 732 bp, Heterodera glycines
tttttttaaatctattaaaatgtaaaactataaataaaaagaaaattccattaaaaaaaaataaaatggacgccttccaacaatttaaaagggaggatggacaatttcgtcatccattcacaatgattgtgtctgggagcacaggcagtgggaagtcagagtggataatgcgtctgttgcgaaatgtggacaaaatgatctctacccccattgaacgcgttatttatagctatggcgagctgaacacaaatgtagtgaatttacagcgcgccggcaaagttggcaatgtgccagtcactgtacacagcggcgtcccacgagcggaacaagtgcgggagtgcgccaaaaaagaaaaaaccttactggtgctggatgatttggtggtggggatgagtcagcaatatttagacgcactcttcacccgtggctcacacaattggggcgtcagcgtaattttggtgactcaacacctgttcaacaaagagctgcgtgtggcgcgcacaaattcgcactatctagtgttaatgcgaaaccctgcgggggctttgcagatatgccaatcgccaaccacctcttcccgtcaaggactgcccattttattgaggcctaccgggacgcatgcgcgaaaatttttggctaccttttggtggacatgcacccagagactccggaagagatccgccttcgaacaaatatatatgaacaaaaacaaatagtttacatgccaaaatg

SEQ ID NO: 112014 - DNA, 1003 bp, Heterodera glycines
  unsure (1)..(1003): unsure at all n locations
ccaaagaaagcaatttgttagttttattatagaatccgaattagttaatattaaataaattttattaattaatatgttcattttttatattttttttctcaagagaaataataattttaggattaaattaaagcattttcaagctttcgtgtagtttatgtacttgacaacttaaaacccatgatttgccttcattaatatgaaattcattctcctttcaactttttaatacctaaatccggccttaattgttttgccttattttanacgtgctcaatttttttgtagaaataaaaacaaataatttttgaagacaacacgaaaacaaaacgccaaaaaccaaaatggaacaaaaaccatttgtgtttgttcttcatatttttctcgtccttcagctgtgccaagtcgtaaattccttcagaaaatatcggtatcacaataataaacaataattattggctattttaagactatttgtgtttagtttaataggagagagatgttgtgataacaaatttaacttttgctaatacatatttgaaaataaaaaaaacttttttataaaattaagaaacaaaatagagacttttttcaaaaatatagtcgtaagaaatcaaattacttcaaaaaagtctagaaattattcagtttacaaatttaagaatggtttagggatttttatgactttttcactttttcaaaaattaataaataaatttttttaaattaaaaatttttaagcatattttatttttttttaagcatttgcagcttgcttcatagtcaagggagagcatttttttggtttttattatacttttcctcattgttgataaaaaaatttgtattattccgcataggccatgagaaatcgaaaattctttttggggtaggtgtacccttctctgtntttcatttcggaaagatcgcataagattacatataatgttttttaaaaataggcacaaacnccatttattggcattcacagttgccacttatg

SEQ ID NO: 112015 - DNA, 230 bp, Heterodera glycines
tcggtgactttttttggttttaaatttttaatcctaaaaaagaattcatttaagttgcttgttataattcattttttcttttatgatatcattcacacaaattcgaaatttggacaataaattaaaaatttcaactcatttggacaatcaaatttaaattaattccaaattaatttaataaggcccaaaatgaggagaaatcggtgcttgaccgttgcaacggaaaaatg

SEQ ID NO: 112016 - DNA, 212 bp, Heterodera glycines
aattttaggccccccctccagccccttgcttctcccagttttaagtcttggatttgtcaaataaattcaagacttcaaaataataatcaaaaattctcttaaaatttttttgaacccaattcaaaaaaggaaaaaaatttgcagtcaaaaaattattcgaatttctccaattttgtttccataatttccgaaagttattcggtatcataatg

SEQ ID NO: 112017 - DNA, 608 bp, Heterodera glycines
tttggtgagagtacagtgccattaaaaatctttgtaaaatatttttttaaagtgtgccaccactgttggccatcggtgggacgtgccaatatccgccaaccggtagcaatgacatttaaaattggcaatatgtaaaacgcacattaaagcattcatggaatgatgatttttttctgcatatttaattttattttttcatttaaaatattttatttctaattattaaatttaaaaaaattattcccaattgattccaaaaacattaaaaattttctaattttaataaaagattaatattaatgaggttgaaagctgcgaaatagcggtgccaaaaaaagtgccgaaatacgaaataacacacttggtgccgtaatgcgaaatagcggtgccaaaaaaaaatgccaaaatacgaagaccggcgactaaaaaatgccaaaatacgaaataccggcacttttcctgcgataatgcgaattaatggcgccaaaaaatgccggaatgcggtctaatctatgattgacgcaatacttaaaaaattgcttattcaaatcattaaaaattcatttactttacaaaaatttaaaattaattgccagtgccaccggatg

SEQ ID NO: 112018 - DNA, 729 bp, Heterodera glycines
aacgaagctcttcaagttcggaccattcaaaccacccaaaattatcatcgtgaacttatttaggcgcctccaattgtcaatccattggggcaaaatccgcagcaaatgatccgttggccaagacaaccgtggattgggagacctgttgaccctcgctcacccccgcattgacgaaaaatatgcatttgttaataaattttttgttgattgagcattttatgtaaagggttgaacattccctgattcctaaagttttaagggacagaaacaaattttaggaaaatgttaaacgacacagaaattaatcagaaagaaaataacgaaaaagtaattggattggctttaattttagttatttattcgttttcttttttgtgtttctgttccgctatcgtaagagaatgacaccgtgtcttttttagctaacaatgcccctgccccccgagttattgtttgaaatagttgaagcccttccctcctcaaaattgtctacagtcttcttgagcaatcatctcttgtcgtcgtgggctcaaaaacgtctcagagggactttcaattcgctgatgtcacagaaacaagaatggagaaatctgttaaaaatatctcgtttggtttttgaaagtcacagtggattaaatatgcaataattggtttttagtttttcgtggttttatatccattttattgttaattcttaatgcgtttttaattagtttttcagcaaaaatg

SEQ ID NO: 112019 - DNA, 210 bp, Heterodera glycines
ggtatgtgaaaaacaaataacaaaaatatttaaatatttcccgaagtaaataatatttataaataaaattttacgcaaaatgtcgagaaatttttttaaataaaactaaaaataaaatttgcttatttaaattttttattcaatatttaaattattcataaaaatataattataattaaatcatatttttattttcttttatacagaatg

SEQ ID NO: 112020 - DNA, 1003 bp, Heterodera glycines
gcggacggcacccattaccaacagagagaacgacgaccaacagcaaaaagagcaaccaacgaaaagcaacagaaattggaggagcaatggacgactgagagaaggtaaaggaaacgtagtgcgacattttcggaccgacatttgcgtatcactatttctgggctaaactgtcaaaaaacaaaaaataataatttttggcactatatggaaagtgacagtttttgaaaattttttcaaaaggggggacccttttgttttgcaaaattttttttgtgatagtcataaaaatttattctctggggtttttggggtccccgatcacgaatccttcaattattttgatccattccgatttcctaatctaaatttgaacaaaaaatcataattttaaaaattcaaaatttcgatttttattcgagttcgggttagggattaggaattagtcaaaatacatgtcagattcgtgattagcgacctttaaaaccccggataaaaaattatcatggttttttatcttaaaaaaattttgcaaaacaaaaggatcccccttttgtttcaaaaactgttactttccatatagtgcctaattttttttcaaaaactgagtgaccaaattagttttatttgtcattttccgacttgaacaccattcttaaagagtaatgtgatcaacttatgcaatcaacatcgaaataacctattttatatataagaagtttagtttccattaataaaaatagaaaataagaaaatgaatgcaatgccaaagtgaaattgaaaatggatgagagatgacgaaagcaaaagtacaaaatgcaaatgcagatgatttgtgtatattctaacctttatttttgcttcaacagaagcagaaggtgtaattgatttggaggaagaggaaaaaggccaattaattgatgaaaatgggaacagcccgaggaggaggaggggagaaatagaaacggagagaattgtggtaggggagagtgaggatcaaataatg

SEQ ID NO: 112021 - DNA, 55 bp, Heterodera glycines
tcccgacccttttgccatctttttaatcccgtttctcgacttgtttcctctgatg

SEQ ID NO: 112022 - DNA, 1003 bp, Heterodera glycines
tcgacaaattagaatgtgactaattatttatggaaaatggctcttacacagtttaggcccgaaaataaggttcccggtgatttcgtcagtgagtgatttcgtcagtaagtgatttcgtcagtgagtgatttcgtcagtgaaaattaattaaagcgtacaactagctaaaaaaattcaaaaattcgagtccaagctctaaatatttaaacgagtcacgatttgcagtcttctataagatttctcaaattgttgctctgccgaatccattttgatttgcgcttttcacgtcccactttacgtcagctgggctacgcgaaaatcacctaatcgtaacacactcgaaaaggaaaaggtcgtttccatgcgtgatcggcagacgcctatgattcgacttggagacataaaatgattaagagcatcaacatactcaaaatgtagaaatacaaaattattagacagggatggagcgaggacagaaagctcacgcggtcgcgcattgcggattcaaattgccgcggtcgcgctccacccctggtaagaaaattaaaagcgaaattccaagattatgcagaatgaatggctggcgaccaagaaattaacatataggattataaaagtagcaaaaacgaggcacaaatacaaaatattttatgatatgcaaatgaccggtccatatatcgattgacaaccgagcaaataatttcattttgcatttaaatatcgaacgaattttaattttaaatgttttttcgtaaaaaatgattattatcactgacgaaatcccttactgacgaaatcacttctgacgaaatcacatgtttccgaaaataacatatattttttacaattatgaaaattaaaagaattgtttaatgattaaacgatttgtttaaataattgataaaaatagaaaaaaattaaattaaacttaaaattttcattattttgtaagattatatttatttcattttttaaacccaattacagtttgacgaatcggatg

SEQ ID NO: 112023 - DNA, 340 bp, Heterodera glycines
tagacaaaataataacaaacattaacaacagtgtgaataggatcattgggggccaagccagtatccgttacttttgaaaatgcccgtgcgctctgggaaaaattatataaggagaaggaatttaaaatttcgaaaaagaaaaaatttaaaatcggtgatatcgttcgtattaccaaggacaagggaaaattttcaaaggggtacctcccaaactttaccgaagaattgtttaaaatcgttgttgccaattcgacgacacccgattcatacaggatcgaagatttggaaggaaatttaataaaaggcatattttataaccaggaattagtgaaaacagatg

SEQ ID NO: 112024 - DNA, 454 bp, Heterodera glycines
aattgattatttggaaataaatgatgatgatttttgttaaaagtaatattgtatttgaaaaattctggcaaataatttttaatgttggaaaattaccgggttttaccggtaccggtaccggttgaaaaagttggtaccggtaccggtttttgcagtaccggtcggtaccggtttttttacaattaccgaagctcaactctatgttattctaatgaatcttttttaaaaggtaatgagttttattatattatgattcattttagaaaagttttttctttttaaaatcaattgtaaataaaaaattttatgcaaaaagtcataaaaattcaattatttcttaaaagaaaattttttattcatatatcgattttcatatttaaaaagacgttgatttcctttcaaaaaagttttaattaaaattaatgttttttatttttaggaattaattttaatg

SEQ ID NO: 112025 - DNA, 68 bp, Heterodera glycines
tttttgctgtccttttgctgattgacactttcgcatcagtggcgggcggccaacggcagcggagaatg

SEQ ID NO: 112026 - DNA, 165 bp, Heterodera glycines
tgcgagattaaagcaaagattgacttttaacaattaaacttttattttttgttttttacgcatacacattcaaaagtcttttttactactccattacttttatgcttttgttgtaaataactatgtacatatgtattcgaagattgtgcatttcattttgctatg

SEQ ID NO: 112027 - DNA, 192 bp, Heterodera glycines
ggtccgtccgtttaacatttaattatgcttaattaatttaattattcaattaaaacatatttagtttttgtttttccgtcctcgaacagagttttcctcggtaattttttatcatttaaattaatttaaatgtttttctgccttttttttgttttataaattttattttcgcctcttttcttccatcagatg

SEQ ID NO: 112028 - DNA, 402 bp, Heterodera glycines
ggcacgtttttcaacgcattttcccggcggcaatttaaaatttacacaatttttcatgaatccctgactaaattttctttccttgttcgtatcccctccaaggctttcctatcaaaatctctcaaaaaatttcgcaaaatttcttttaaaaaatccaaaaagcactcaaatttccaaaataaaaataggaaatatagtaaaatgcttaattaaacactgaaaatcgtttagtacttaaactaaaaaattatttaaaaaaattagtgaacattttctttcagtttccatgcccatttgttcgatgcccatcttcgccatgcgctcgactttcccgtccagtcccgcttctccattgcttttgcgcacattgccacaaactttgagaatgcgttgcacgaaatg

SEQ ID NO: 112029 - DNA, 1003 bp, Heterodera glycines
ttggcttttttattacctttttatgaaagttttaaaattaatggtatttaatcataaaaagagaaaaaagaatatgcattttatttcttttggttaaatttagaatgaatctgaatttagccagtattttttgttcatttttattcatttttagagataaatttatagtcgaatttattggatttttattaccgtttaatggcagttaaaaaatttatggcaattaaccatagaaatataatcaaaacattttatttttgcaaaagaaaaaccatcaaaatattcagtcaaaattcagtccattgaaatttttttttgattttttttattacagtgcaaaaagaaaaatgaaatttttaaaagaaaataaataaagatttccaatttttataacacgaatttgcaaatttaataaaaacattcattgaatgtgtaaatagtcgtcccaatattcgcgcaacatgtcaccctcacacgccaatgaatcgtttttattgtgcaatttgccacagcacatacagtaatggacggacaaaaacggtgtcgttaccgtatcagtcgccattttatttcgccaaaaaattttgttaataataagctcaaaaaatgttaaattaatcttaatcagtctaaaattttaattttttttaaaattatttaatttaaatgaaactttggttctgaaagtaataaaaaatgtacgtttcaataaaattcattaagtaaataaaattatgataaaataatcggtaaatatattctttttaatataattttttttatgaaaaacccggaacttagcgatagcattttaattaattctcggctaattattctgcgttttgatgtgtgtaaagctgagaaacgaactatgaaatgaccaaaaaactgaaaataactatcaaatttttaatttttcgattttttgaaaatttaatgaaatattcttcaaataaatagaagtttggaagattaatgcatcaaacaagaaataaaaattatg

SEQ ID NO: 112030 - DNA, 1003 bp, Heterodera glycines
taataatgcattgcaatacatttaaaattgataattaggcaaccttaattaacttttcgttgtgtttcgctttttctgtttttgtaaatatttcgctttctttcggcccctccgttttttgtttttcacctttcaatcgccaaattacttataaaccccggactttgtacacaatatttcaccaccacctgcacttgtcctccgtccgcatttgctgtccattatcattatcattgtcaattatcattaatatcactaatatcaattatcatttttatcaatacaaacatttcgcggtcgatatgggaccacttttccgcgccatgctcccatcccccgccggcgatggtctgtctctgtcccttcctccttttgctgccccattgataaaggagccgcccgctgcaccaatctccccccccccccgggggaagcgacggaatgaatgatttccctattcttttatgtatttatgctcttttattaacgatatattttttattcaattaggattcccctttgttcagtttaaaataagcctaattagcccaaagtttcttaatgaattcgcttttattttgcacattgatttatcatttattgattgacctttatcaccaattttcctttcccaaaaatttaccacccctcatttgtcgggaaataaaaaaatgtttattttaattatcttcaacagacaatttctttttgaattgctttctttttgattcctcttttttgtgaaaagtgattaattaattaattaatattttgctataactgtcgacagcgtaaagaaagaaacacgccattcatttcaacaaaagaaaaagctcgccttttcaattaatgacttttgtgaaatgtgaatctctgctgctttatgcattttttaatttttaccattatttaagctcaattattactacatattgtcaaatatgaatttatctaacattgatcaattaaaagtgtcgcctctgtatgaaggcagttggtaatg

SEQ ID NO: 112031 - DNA, 679 bp, Heterodera glycines
tctaaatatttttaatttaataaattgattgtcctttaaatttgtgcattaaaaatatttttgtgagtttttaattaaattttcgaattactcccgctcccgcccgggactcccgttaaaaatggacgggattttaacgggagcgggatttttacgggaatcccgttcgggactcccgtcccggaaaattttgaactcccgatcccctctcccgctcccggaaatttttttttaccggactctacttaaaaatatacctatagaattttcgttatcttaaaaaaaattttttgtaagttaaaaggttcccctttttggttttatttttgttttctcaaaaacattttcctttttgcacatcaaaaggttccctcttggttttttaacaaaaaactttagtttttcgacccctattctgattttttgtcgacccacactctatatatgtgccccgatctcagtgccgcttatatgttctcaacaatttttaatattttcattagggtagtttgcgaccaattaaaacccgggtacatgcgcaattctcctgaatttgtccagcaggctgacagcactccgctgatggaggtacttacttattcacacttccatggaatgttccattgtatttccattttgctaggcatgttgtggcgggcactctgacgtagttcgaatg

SEQ ID NO: 112032 - DNA, 566 bp, Heterodera glycines
tttgaggattgactttctaaaaaaataaaatcaaaatttgaatgttcaatatgatgagattttttcttataattaaataaaaaaaattattaaattaaaatattttcacaaaaaattaataattacaattattgaaaaaataaaattttcatttacccttagctttttcaaattttggattcttccaaatattaatttttaaatttatgagatttttgagtctgtcggtaccaataagcgccgagtcaaatcagatttaacctttcaacccgcaaatgtcgtactacatgggcggggcatgtcttaatcgagaaataattggaggtgatcgacagccgttaccgcttaattggggactaattgggccgcactgatgcagctttaatgaaaaataattggaggagtggacaatgttttattaagatataattggtctcgagcatggcttaaatgagaattaataaattaacttaaattagaattaattaaattaattatggcttgaaaatgctgcccaacttttgaaggatatgcccaatcttccgaaaatagtcaacaaaaaaatg

SEQ ID NO: 112033 - DNA, 314 bp, Heterodera glycines
  unsure (1)..(314): unsure at all n locations
agtcaaaatgaatttatttattcgatagtactaacatttaactatttatggttaaaatttnaaaaaatttaattgagtattaaaaaagttntggtaaaataatttgattcttaaattattgaaaattttggagtataatttttttataatttaatataaaaattttataaattaatattgtaatagaaaagatttaaagttattgtataatagtatgaaatataaatttggtttaaattgggttaagatatgaatttatatgttttatatttttttgtttttatagtagttggaggatttaggaaaagtatatg

SEQ ID NO: 112034 - DNA, 98 bp, Heterodera glycines
gacccaattcaaaaaggaaaaaaatttgcagtcaaaaaattattcgaattctccaatttggtttccataatttccgaaagttattcggtatcataatg

SEQ ID NO: 112035 - DNA, 463 bp, Heterodera glycines
acagctataaagtgcaaaattacaaacattaattaaaaatgcactagataagcaataaacgatatgttggaaatttacttatattaaattacaaatgagtagggacgaaatcaaaaaaaaaggtcaaaatgatggaaaaatggcgaaagttgtaatagagacgctaaattgcagagtttagaggggctaaaaaaagaatgaattttcgtgaagttctaatctaaaccaagaaaccaaaaataaataagtaaaagtaaagcgtttcacactttttttttgtttttctagtgggtaccctttgctataaaagtgccaataaaatttgaaatcttgtttaactatacttttattatatgcgtaaaataatttattaattaaaatttccgtaaaataatataatttgaacaagataatatttaattaaattcaattattaaattaatttttatttaattataaaatg

SEQ ID NO: 112036 - DNA, 1003 bp, Heterodera glycines
tatatgatgatttttataaagtttttagtgtatagcgagtatttaaataatgcggcgcttaagtgtaagcttttattttaatgaaaaaagttaatttaaaaaaaaaaaaatattttttgggttttttcagggcctggttagaccagaaacccggcccgcccgcacccggtttaaaaacttagacccaaacccggcttttctggaccctgtaataccaggaccaaatttttgcttaaatacccggcccgtataatcctatttcaaaccaaggaaagctcaggaaaagcttaagacactgcagtgaggattagggctggaattaaagtcattaaaaatctccaaaaaaagacttaaaaagcataaataaatcgccaaaattcattaaaaaacaacgaaaaatgcaaaaatatttctgaaaaattaggcaaaagcaaaagcaaaaaaaaacatattttaacaattttttgaatgacatttaataaaaaaaaacttgtgcgatttgtttcaattccgtccataccgatgattagggcggccaatttcgtgtaaatacatattttttcctggttctccttgctaaatagtaggaaaaaatgatttttttcaccctataatttaattaaaaataattttttgtttttaattttaaaataattattttccttttactttgatcacttgcactttttgtacttctcaatagcatcgtttcaattgaatttaatttcggatatagatgagatcagtaatttgcttgaaaagagacttaatttcttttaaaatgttaattagtgagtctgtctgtgatttttaagcccattcttctatgtgtcaatattaaaatttacttttcttattaaacgaataaaggtctttgcttgtcatcgtttggcgtattacttttttctctttttctttattctgaatgctccaaacaatgggaaaagtaattaataaaattccttctaatttattaatataaactttaattttagcagtaatg

SEQ ID NO: 112037 - DNA, 81 bp, Heterodera glycines
tcgcggacaacgaatcgtcaattcaacgcatcatcgtggtgataaaacattttttgaattgccgcacattggtacaaaatg

SEQ ID NO: 112038 - DNA, 157 bp, Heterodera glycines
atttttaaatttaatacatattccagaaaaatggctctctttttttgagaaattttctatgcaacaaacgctctcgaacatgaaacgaagtgcggtgcgccgtggccattttatttttcaaataatttttaaatttaatacatattccagaaaaatg

SEQ ID NO: 112039 - DNA, 533 bp, Heterodera glycines
gctgtaaattgtttaaaaaatgaaaacaaataaaatttaagaaaataattaaattaaatttttgaatgaatttaattttaataaaaaaaagaattataattgggcccgtgacatttgtaaaaaattaatttaataattaaacaattatttaaatttcaaaattgtaaaaataactttgttttttttggacctatttttttttttttaaaaagcgcgccgcaaaaacatttttgttgatttttaattatttgggataaattatgaaaatgctgaatattaacccaaacttaaattttggatgcaattaattaataaatttaaaatttttaatgggtgtttttaaattaattttttattttggactaaaaaactaataaaaagcaatcgataaattaaaaaatgaattatataaaaattaattaaaaaataaaccatttttgaaaatcaaatttcatttttttcccacccaaaacttacattggccgcgatccgacgagacctccttggtgcatccgatgttgaaggcagcaatg

SEQ ID NO: 112040 - DNA, 151 bp, Heterodera glycines
ttttcaactttatctgcgccgatggtgggttttggtgttggatttccttgcgcctttttcaacttggcttggaaattgcattatcaaccgtcgatttgctttttacgttgatgaacacttcaagacacgcaaaaggatgttgggcaaaatg

SEQ ID NO: 112041 - DNA, 595 bp, Heterodera glycines
  unsure (1)..(595): unsure at all n locations
tcagaaacaaaaaatnttagagaaattaaatatgcatacatttaaaaaattgtacccgtttttattaataatttttaaaaactcgaaatctttttcagggggggttgttgatggtgaaccgctagaactcaaatttccatttattttttttaattatccgagattttaaattttttttttggaaaaatatgtttaaatcgtgtaacattttcaaaaattccaagagggttacgattggcccagttgacgctcatttaatttttttttttttaaatgcacagaaattttttttgctattaataagcaaaaaatttgcgcctaaatcctttttttatctcaacagcagctgatcaagccattgcttatggagcaatacaatttgctcaagtgtaataaaactatggcacattcgctacaaaatttacgcaatgccatcggcacaatgaaaaacgcaatttttgagggtttgaaaattaaaacaaatatattaattaataatttaatttttttaaaaggaaaagcaattgcaaattctaaaattaatgagctaaaaactgtgttacaacaatcgcttctttcgttggtcgaccgaatg

SEQ ID NO: 112042 - DNA, 54 bp, Heterodera glycines
agtgacttcgtttgttgttgttactctaattaactgataccactttagaatatg

SEQ ID NO: 112043 - DNA, 86 bp, Heterodera glycines
  unsure (1)..(86): unsure at all n locations
aagcgctttaaatggacaacaagcgttcatatttgcntaatgnataggaggtccagtatttttctcgtagaattgtntaaaaaatg

SEQ ID NO: 112044 - DNA, 245 bp, Heterodera glycines
tttatataaaataaaaaaaaattattttaaacaaaattaataaaaaagaaattagattttttggtcggtggcagatattcagcgctattgttagacctttaataattgtaaatcctttttcattgatgatttaaaaaaatccggcaattttcaatacaaaagccaattacttttaattggtcacataatttagagcggataatgcggcaatccaatttataaaaagtatcaagcgcgaaacaatg

SEQ ID NO: 112045 - DNA, 270 bp, Heterodera glycines
ttttgtcaaagcgtaaaactaaaggccacctctgctaatttccagcatgaaaaatgcggtcacaaaatcggcgacttcgtcgcccggcggcggaggggccaaaggcggcggagggcaccgctcgcgcaaggcacggtcacggtcagtggagttttgtttaatttgaatggctggctaattaccaaattggcactaaatcccccctccttttgcataaatcacactttggccaattcgatgccggccgttcacattcgaacccacgacatg

SEQ ID NO: 112046 - DNA, 561 bp, Heterodera glycines
atttctccacaagtccgacaaaaacagcgaagattttgtcatggtaactaacaaatacatttttgttccttttaaattaccatttttttcctgtacagcttgaaaattttctgtacaacaccaacccgctcattttgcatggcaatgggccgtccaagtcgcaactgaacgtgctggagaattacttgactcgtggcaaaatttatcaggtttttttcaacagttttatgtctctttattttggcaccgctgaaaaaaacattaaaaattcgtacattgatagtccataatacaataatttaagaaaaacccaaaaaacattctttaagaactttcattaataaaattttcaaattttttgaaaaacaaaaaaaatttttttatttttctgatattatatgaattgtcgtgacactttctcatccacctgtttattgttaatgccttacatctttgaaaaatttttttgttatagtcctcttgacaattttccccctattttgcacccacaaaatttatttttttccctcccttttttcgaatttgccggccatcggaatg

SEQ ID NO: 112047 - DNA, 506 bp, Heterodera glycines
aaagtgatatggcaattgattttactgtgggagaagaaagaatgacaaaaaagcggaaatgaccggccgataagtccacccaatcactcacgttctgttgatttgatttttggaaatttttacaataaaattcagaaccattttccggtgccttgcctgtaaccgactggcacgagagttctaagtctgagaaagtacaaatgtgctagtttatctgatttctgattttgggctagtggctaaagttcgttctggtttcttaaaatttctcataaattttgaaattttatggaaaattaaatatttatacagcaatattttaaagtttgactcgaaattaaaaagagccataaaaacttgtttccgattttttgatcacgtttgcactgaaatacacaatttgcttattccctccccaaaagacaaacaaatttatttgaaaattttattcctttttcttagattcttagcaaaatgccgaccccaaaactcgggcccggcacatg

SEQ ID NO: 112048 - DNA, 194 bp, Heterodera glycines
  unsure (1)..(194): unsure at all n locations
attgcgctaacaaataaatgttgctttatcatgtgcctgatganagttccctaagaatttattttttggtctttttagcaattttaaattttgaagcagaacagaaaaagcagcaacatttacaaatttcaaattaagaagaataaaacgacctctccaaaaatatttatgtttaaataaataattacgaaatg

SEQ ID NO: 112049 - DNA, 1003 bp, Heterodera glycines
aaaaatattgttatttaatgaaaatgtgaaaccatttttttcaaataattcacaaaactatttttaaaaaaatgcaaattaattttttaattatttaatattacttatttttaataaatagtgcgtaaaaaacacttcatatgaaaatgtgtaaaacattttttttttcaataatttataaaattattttttttaattttaattaattttttttatttcatctttgcatttaaatggtttttgctttgttttttttttggctatcaaccattcaaatttatgacaaattaataaattttctaaaattgccaataaaaatgattttccatttttttttataaatttttgttccgcttttcgtcattatttttgtttatttgggcgcttttgggaggttctgcgctccgtcaaagacaacaacatcaacaattgcaattttccacaccaatttttgttcgttcgtagcatccccaatttttcacatcaatttacgtgtggtacataattccagcaaataatttgtcgtcgttccattataaaaaatgtatatatattattcccaatttctttaatcattttttatttttagacttataatataatacaatacttagtaatttatcttgaaattttcgttttttatacataatttctacgactaaaataataaaatataaaataagtaatttttattgaactctttttttgtagattaataagaattatttcaatttatttaattttcaattaatcatcaaattttagaaaatactctcgtcacgatcgatcaagaatcgcttcatatttattcattcttaaaaaatctttttatctataatttgttaaatggcaatttttatttatttaatttattttttaaatatcgttaatatatttttttaattttaattaacgtgatttattttcacaccttagtcactcatcaacattgattcgttatttcaataacaatttatttattttttcattttaagataaaatg

SEQ ID NO: 112050 - DNA, 541 bp, Heterodera glycines
cccagggccttcccctcccctttccctggctctgtcccccttctcctccctttccgtcccctcttcttcttttgctccggctgatgtttatggccgatgaccaaagctctcgccatcctttcccgtctcctttcttcctcttcctcttcttcccctcatcatcgatggaagagaagggccatcctcccacctttgaaaccccccgggaccaccaaattggagctgatttactggggaacaaaggaaaggaaggagaaaagtgaagaaaaaaagaaaagaaacgatggaaagacaaagcggatggaaaagaaaggcaaagaagaaaaagaaggaataagtcattagtgggcttaacaaagtgatcatttgttgataagagaaaagtaatgccatcccaaaaaactcttccggcaaaacagaacaattaacggaaggaaatgggtgccttggaacaattcattaattattctttatttgaccgacaaagggaatgagaagcaagggataagaggagaatgaggagggagatattgtaatgatg

SEQ ID NO: 112051 - DNA, 307 bp, Heterodera glycines
atcagaaattgaatattctcacagggggtttttcctgtcgcaattttgattggaatttaaatatttcagttgggcataatcagcagataataaccaagatttatacttttttttgtcgagaaattttcatagaatcttgggctccatcattgatccataacaaaataatgatcggtgtaatttcgtgtgattttctgagtcaactttttctatttttccccaataagttttttttttaaatcagaataacgggagcagtaccagcagcggcagcaccaacgccaacaacaatagcaacaccacaatg

SEQ ID NO: 112052 - DNA, 130 bp, Heterodera glycines
tttacataaatgtggaatattaattaatattttttattaactgttccaacctttgctcatttttcatcaaatttatccgttttgttttaattaccctcttaattatccttcccccgttgccttaggcatg

SEQ ID NO: 112053 - DNA, 1003 bp, Heterodera glycines
aaaataaaataaagatagatatgtattacgtatttttcttaaagattaaaaagtaattctctatcgaatttggtgagaaaattggcgggaccgttggagctgaaatttttcgtaaaaatcctgctgggtcaattctgaatttcattttataattcctgaaatatcaaatagcccctgctaggccagtaaaatttcaaaaaaaaatttgacaaatttttttttcttattttgtaactaatcatagtgcctcaatcgtccccccccccgtcatttttcgctttgtggggggaacatttattatcatttatcaaaattatcagagagaggctcagtttgctgtcaattaggattccaagatctcggattgtttgggtctctttaataatttttccattaaattggcagggaactttaaaattatccttgccaatgtacagagaagctgatttttctggtgaaaatggtagaccccacataaaaattttttggaaaaatacacatgtatcttatttattcatcaccccataactttaaaattggatagtaaataaataaataattcagaattttttttctctattacctatatgcaaaatttgttgtggatttatgtaacaagcagaaaaaaaaaaaaattttatttttacataattaaaacaaagagatagtacaccaaagtgagagaaattacaaagaaaaaaagcaactacgagatagtatgtgctaggcttttctctgcacagcggagttgacccatagagcacacctctgaaccaaaaaaaccttataaatatgtcgtctcttggggttaattttcattttgttgtatcccattgtttttactctttttcgctaaaaacctgaatccgcatagtttttcgagacaaaatttgtaaaaagtcgactaaactttttctgatttctcccacctttgaaaacattttgcttctatctctataatatgtaaactcggccaaaaatttattcagtttaaattttcatg

SEQ ID NO: 112054 - DNA, 514 bp, Heterodera glycines
attgcaattgattgacactgaaaacatcaatgaattcagctcagttggaaataattctgaaaaggttgcgccctaccaaaaataaattcattggtgttttcccatctgatcgaattccgaagcgtgtttctaaatttcctcattgtatggtcgtgaatacgggcaaagaagggacacgaggtgagcattgggtggcttgctatgcttcaagccatcgaggggtggaatattttgacagtcttggtgagtacccaaaccccgatttagccgcctacctcaacacatttaaagaggtgctggtcactaaagaccaaattcaacttcccacatccgatacgtgtggccatttttgtatatattttttggcaagccgatgttctggcgttcctttctgccatgtgattgagactttgcgcaagactcgaagtatggcagattacctggtgaaatggtttgtcagaaacttggtcaacggtctataaaagctcacgtttcctgaacagtgagaaaaatg

SEQ ID NO: 112055 - DNA, 308 bp, Heterodera glycines
ttgcgttctttttgctctctcatttttccaactctctctttttaagttacataacaacagagttttgccttagctcttttttgacacaccaatcaattggaaaaagggaaaattgagccacaaaaatgaatcgacggtaagaaatttccgaccgtttcgatgttttggtgacacgcattttgatggaaaaacggaattcacaatttggagacgtatcagaattgaaaaggacaaaggaccaaaagcaaaactattggtctattggatggattttccgatgccggaatttgtttgtgcctttatatatg

SEQ ID NO: 112056 - DNA, 116 bp, Heterodera glycines
ggaaaacaatcgcaagcttgtcaaagcattattgccttttatcgtgctaaatatgattggagtggcactaaaatcactgatcaacttcttttttcagctgtttatggtagtaaatg

SEQ ID NO: 112057 - DNA, 128 bp, Heterodera glycines
  unsure (1)..(128): unsure at all n locations
tattnnggttagtttgactatttaaattcggtattgttatagttgttaactgggaataacttgtgacgaaggttttgaccttaaacttataattgacacactttcacaatttcaggcgttgtccgatg

SEQ ID NO: 112058 - DNA, 388 bp, Heterodera glycines
aactcctccaacagctcaatggcacgcacctgtcgatggcaggggaaagggacggcacattattacgcaacgcacaaagtgcaggaaaatttcaaaaattttgcctggcgatggctgccagataaaagggaattcttcgcccttttgcatgaaaatttaaaataatttacaaaaaaaaaaaaaatttctgcttgacggcggcatctgacaaatgagcataattataagaaatttttaaaaagaatttattttttaaaacattttgttaagaaaattgtcttaaaattttcaaaaaaacattttttcttgaaattcccaggctaggtgcttggtatggattgaccaagtaggaaaaagaaaggttatggccaaagaaaatgaaaatatg

SEQ ID NO: 112059 - DNA, 1003 bp, Heterodera glycines
cctaattttaaagtttttttttgtgcatattttgcgatttttgtgcaatttcacggctttatttgcatatttaggtgcacattttggtcatttttcatgcatattttttgcagccctgctaataaatgatattttatattttttggtatcttttcaaattatgtcctttgaagtgggggcaccccaaaacgtcgccggaagactttttggaccataactttgttcattgtaaatcaaattatgcattcttggtgttgttcgatagctttatgtgtttactattaataggctaaatttaaaaaattttcgttaagtttcaaaaaagttatggccagaaggaactcaaaaacctagtatttcgaacttttttgctctgattttttttgtacattaataaaaaattttgaaaaatttgtagattaatagagtttttcataagctttggaacaataccaagaatgtttaatatggttgagtaggaaaaaagttatggtccaaaaattcgcccggcgacgtttcggctggcgacgttttttcctggtccgctttgaagtcagctcggacggtgcacaattatgtattgagaatgaaagaactttagccgatcattgatcaaaatgactcatcataagcaaaaggaagcttaaaaaaggaaggagctgatcaatattgtgtaaaactcgctgttcagagatcacatcactttaacagttgtgcttattttgtttactttaaaaataaaaacaagaaggagaaggagtgtcgaacgcttatgcctaatggtaaacaaaaacatttgtggtgcctcccgggagagggggaagaagcatggacacatacataaataggatcggtcggtcgtccatcgaccgattcatttttctttttttctttcccgcaattgtcttttatcctgaatatctgtttttttcaaatcctcgaaatttaaattgttttaagccttaacaaattacacaattcctaaattgcttatttgaaaatg

SEQ ID NO: 112060 - DNA, 199 bp, Heterodera glycines
atatattactttaatttttgttttattttagaattgttaaacaattagagaattgtttttctgccgatacggctcattttttctaccagtttggtcaaaaatctggtgactaaacaatttatcgttgtttttctgccgctacggctcattttttctaccggttaggctttttcaaatctggtgccagcctgttgccatg

SEQ ID NO: 112061 - DNA, 263 bp, Heterodera glycines
  unsure (1)..(263): unsure at all n locations
agaagaattaagagtgaaggtaaaagagaaaatgtgtgtatnaaaggattttaatgggaaattttggtagaaataaaaatgaaaaatggaagtaatgataataatgagaaatgtttgggtattttatttttgtgaaatgttttaaatgaaggtagaaattaaataataattaataaattgtaatgaattgttattaagataaaaattggagttgtaaatgttgggtaatgattagaattgtatcagaaaagtgaggtgtgatg

SEQ ID NO: 112062 - DNA, 971 bp, Heterodera glycines
ttcgccccaatcgcacatttgtcttaaacaccgcgaggactttgagcgcgcaatgaattgcctaaagtataaaataaagagggcatttttaattggaataaatcggacagagaagcaaaaatacccgggaaaagcctaaaagcaaatgataatttgaatcgaagacacaaaccgatcaaattaattgggctttcaattaatattttttatgaatgaattgcatcgctttgaaaataataatgaaaaaagaatcgaattaaataatttgctaaatttctctttgttccttcacttcagcgccacaaattcgcactttcatttccacgccgcctgctcaaaggcggccaagcgaagcattgacattgaccgcgagttggcggagacgcgcggcttcagcgcaacggaggcggccaattaccaccagcaggacttgcggtgccgcttccaagcgtgcactttgcatgccagggtaagggcgaggagaagcggaacgggggcatcactaattacataattaaaatttaaaataataattttctatgaaataaattaaacggtaaaaactatttttcactcattcgagttttaaaaaaaagtttaatcttttgaatgaaacttaataaacttttattttacactgaaaagtcaaacttttcttattattttttcgtcaaaaaagcggtgcctttttattgaagaattttttcaaaaagcaaaattgacaaaaaaatttgcaaaagtccaaaaaagtgacgtaattcttttagttggcaaaaagtccaaaataatgatttttttggctttagatgaaaataaaattgttttccatgggtttctcatcaaaaaaaagctgcagaaaatttttggaaaactgaaactcccagcccgattgatcagcaagccaagatgggatttagatgaaacaaaaaaatttttatttttttgcggagataaaaaaataaataaaaatg

SEQ ID NO: 112063 - DNA, 619 bp, Heterodera glycines
ttttgattggtcgccaaagtgtccattgtgattggccatctaaatgtttgtccactaaaatgtcgaaacgtggcgaaatcagtgccaatttgaggccgagttggtgacgaccaaaaaacggcagaatgttcatccaaatgtcgctgcacagccaactgaaaatgcgggaaaacagtagttaaatgaagtttgtaatttttaaaactcattaccgtcggttcattttgtggcaattagcacaatttgccgtattagaattgcgaaggacgtcaaaagggcacaataataattatgttagaaatatttttaaataatgagaggcaaatggaaaaagcaaacatttttatagttctcatgtcctttgctctcgcaatctggaaaaagaaaactctaaactttattttatcagtacttttcaaactatttttaattttttgtaaaattatttaccaaactcaaaccagcacaacaacagacactgttcgtttggttttttggggcggttttttggggtttatttatttttcaacagatttcttccaacaattcttttgctgtcactaagccgcccttttttctgcccactgatcccttttggcggcccgtgttcgatgcaatg

SEQ ID NO: 112064 - DNA, 228 bp, Heterodera glycines
aggaaatattcggtgaaatgttaattttctttcttttttcgcaataaatttctgaatatcacagaaagacaaaataaggcaaaatcttattgaaaaagagagggggggggggggggaaataaggaaaagcactgaaattggttaaaatttaattaaataataaatgacaatttgttaggtgttgtgcgctccatgagaaatgttatgtgaattcttcctgtaagaatg

SEQ ID NO: 112065 - DNA, 355 bp, Heterodera glycines
gtcagtgccatgctaataaatttggaggcattgctctccccgggaaattagcattcgtttctccacgagggcgacccctttggcaaattggcgttgctgaacagctgcgaaatgaacggaaacagccaaaagcagcagcaaaacaacggcaacagaacacaacggcagtcgacggttatcacagcggaggacggctgccaacttttgagagtcgacgcaacgaaattcagcaggtgaacccccgcggggggggggggggggacagagtccgacggggaacaaaaagggacaaaaaaacagtgccaaatggaagggagtaaatggcataatactgatcagattgctgagtgagatg

SEQ ID NO: 112066 - DNA, 183 bp, Heterodera glycines
ttttcaattttttttttcttttttattgtcgcaattgcttttagattaatggaaacgcttaaaaattttaaactttatgatttattcaaagtattggctctaccagacaacgaattcgaaaaatggctcaaagaacttaaactcctacacaccacccgtttttgcgactgtggcacggaaatg

SEQ ID NO: 112067 - DNA, 83 bp, Heterodera glycines
ggttggggtttttttaattttaatgagtgttttttcgttttctgaaattaatgcccccggacatttccagtcccataaccatg

SEQ ID NO: 112068 - DNA, 264 bp, Heterodera glycines
ttgcaccgtttgttttcacgattttaaagaagtcatttagccaaacaaatgatgccaatgtttggcggaaaactcttcaggtgcgcactttcccctccctttgtttaagtcgcttttcctaagattctgtcggcctccggcttttgctgtgttgcgcctcacctctcaaattttgtttttgacgaggaggaaaatgtaaattttttgctgaacttaacttcacatatcggagcacgtgaagttgtgcttgtggccagttcgatg

SEQ ID NO: 112069 - DNA, 351 bp, Heterodera glycines
tttttgaatattttttaattacaatatatttttcaaaactttcctggtttactccttttggggtgtacagtaaattccatttagttttcactcagatcatcatttttatcaatgtttaatttcccggttcctatttttactcgagaaaaccgtatatattaaaggaaaaacggaaaataaagaataaaaattaggattcttaagtgcatatttatacaaattggagattctatactttgttgaccaatttttagtaaatagtttatgattttaaaaaagtccttaaggtgcctgtcaaaaaaagattttttcaaaaaatttcatatataaaaaacaattttaggcctaatg

SEQ ID NO: 112070 - DNA, 880 bp, Heterodera glycines
attgagctggatcatcggaagcgctattttcggacacattaacacacaatagcaaccagtctgccggattgagtctgccatacagcgccaattaaatacatatattttgttaaatattaaattcgaatttggaattaaatttttaaagtttaataatttaaatgaatcgacaacagttctgctaaactctaatgggaatacaaattctcgaagtatttaattagaaattataagaaattaatttatttgctcaagagtgagaaattctgaaaatttttggataggtttaataaatatattttattaaaaatttaaaaatattattacccgatttcttggatttgattttaatgtcctgtaaatgcggaatttttttccattttttgaaatttcttgattcagccgatcctactattttgactatttatcagttcaacaatttcacaaattttgtttgatcgatgaatgaaagcaataagcagaacatttgcttgccatctactggagatttaatgaaagcagcagctgttgaaaaaatacgtataaagtcaaaggaacatttattttcagtttcatctgtttattaattattttaattttgaacaatggataaatatacatattatttttatatgtttttccacatatttttgtatgagaatgcacaaaattcatttttgaccgaaatattttgtgtaaaaacaattttaaattaaaaaaaaattgtactccgtggtaaataaatattaattcacaatatttattattattatttgtttccctgttttgtattctaatacaggaatcattaattttcgattacagataatattttaaggtatttttattaaaaaaaacaattaattttttgtgtaaaatg

SEQ ID NO: 112071 - DNA, 923 bp, Heterodera glycines
  unsure (1)..(923): unsure at all n locations
ggtcaaacagacgcttttcccgagaacttnttggactaagtgagtcgcgtccagaaaagagagagagaaaggggagcagcggctttcggtggtttgatcggtcggtttgaaggggccttcccgccatggctttaatgctctctctacacgaactccacatcaataagctgctgccgatcagtctcattcttcacccactcacaactctctccttcctcccccccccttttctctctaactctctccccccttttctctctccttcctcctccccccccccccttttcgccctctctctgtcccttttctatctctttcttttcagtgcctttctctcatcgcttttccctcgtttcgctgtgatcctcgtgaaatgagatcaaactcaaaagcttgttgatgattgaattaatttaatttagccccatgaggcagcaaatattactttcctttccaaatttaactgcaacttaaacagcagcaaaaaaggcacttccaatgcccatttaaaagcgtcgacggaattcggactattttatggcggaagggcgacatcaatttggccactaattgtgcccctcggcgagggcattgtgccgggccaattgcctttggcctgcgactgttgcgccactcatccaaatgcttttcttcattttctctctcctctttccattgaccaaccacaaaagtgtctgtccgtttctcttttctcccattttcaccattcgatgatgagtcccttcccctcctttcttccccccccccccggtgtatctgattttgctaatatttctccgattaaaaacatttttctgctcaccattcgccaatcaaatcgcttatttaagctttttttttgctcaattcaatgattttttgagtcaatccgttgtttttttgtttgtttttcaacggaaatg

SEQ ID NO: 112072 - DNA, 68 bp, Heterodera glycines
ttgctgatgcatttgcaattattcccggctcgccaactggaaacccatacgacttcggttctgtgatg

SEQ ID NO: 112073 - DNA, 103 bp, Heterodera glycines
atttaaaaaaaaaaactcattaaaaggcgaaagtctgtcaccggaagagattctgctgaaaagaacggttttggacgcgcgggagcaggacagaggcaaaatg

SEQ ID NO: 112074 - DNA, 769 bp, Heterodera glycines
gttaaaaatctgattttttgatctcgaatgcgctaaaatttatgctttgctaattttctccacaaaattgttaaaaccgataatgggagatgaaaaatataatatttgatacacttttgatcaaacattgtaaaaataactgatttgaagcaattttggcagaatttcttgattttcggccccagtatctgattttttgggcccgatgttctgattttgaaaatttttcgatcctagccctgcgataaacaaacaatttttaacctactgatataaatcattcaaataaaaaatatattcatctgtaacactaatcccccaattaaaaaaagagaacattgtatctctatgtatgtatatattgtatattgtatgtccatatccctgtggcattgtcttgctgaatgtattctcccacaaatggttgttgttctatttaattatgccatatacagtatatgtgtatttcataattgtatcatgtttgcactgtttatgcatgttttatggtccttgttctcattgacgaataaatatatatttatatgaattgtgcattttccaattctctaagacttgcgttttcaaatgtcaagaaaaaaaaaaatttagaaaatgttcatttttcattctgataatttctaattagtgctaaataataattatggcattttgtttatttgatgattttaaatttttaactcttaaattcggcaattttcaatcaaaagctttccaaatttgccattcccattcagatagaaaaatg

SEQ ID NO: 112075 - DNA, 135 bp, Heterodera glycines
tcaatcggccacactccccgcgttactttcgacctttgagcaaatcggatccaaaaccaaggttggacttgttttgacttgtgatgagaaattgaaactactgaaaccccaaacgaaatagtatgaatgaaaatg

SEQ ID NO: 112076 - DNA, 573 bp, Heterodera glycines
gtattactgtctaaatgaccccgggaggctggcgattctatttcactgggccatcgacagattaaaaatagtaaaaactttgctttttggtgggtgtacgttcggaggaccaaaatgtgatcttcgcagggctttctcggtgtgattttttttgctatatcgtcgtgcacaaattggaggtcagggggcaaagattcgcagacatttcatcaaaccacgttcaagtcacttcgatgcataagtacaactacacgcggtatgaataactcaaggagatggtgttggattaccagaaacgagtgaatagaccggttcgttatccggaaaagaattgggccgacaagggatagcaggatactctccaaggatgtaaagaaagaatatgggcccgtgcagaggaaagggattgttgatgaaaactttaatgtgttgccttttggatatttttgaataaacttttgcttttattcctccgccttgtaaaaagtaaatcattctttatttaaggcatgaattgtatcaatcatcatctatttatggcagaatttatcaattaaaaatactttaagaatg

SEQ ID NO: 112077 - DNA, 207 bp, Heterodera glycines
  unsure (1)..(207): unsure at all n locations
ggatccaagaggaaangggatcaatcggaagagcaaaatgatgaagaaagccggtggaaggaagatttggtgcgaattggccgaagaaatgatcacaatgaggcctggcgagagtttctgaccacaacgacttccttggacagagaaaaggaagagcgattaaaagcaatgggcaaaattggtttgggggaaaatggccgaagaatg

SEQ ID NO: 112078 - DNA, 566 bp, Heterodera glycines
aacactgattttttgtgtattatctcctttcattgtttttctgaattgatccatttaattatcattgatatgccaaacaacaaaaaatttgtcgactttcaaaagaaagtatggacaaaataatttaaaaactgcttttccgaccatttttggtcgtaactttttcaaattaataaaaaaaaattgaaattttgcaggaaaattggaaatatttagggctacttaattgaatttacatttttgaatggacttcaataattaaaaatgttcagaaaaccttgggatttgcaattttttaattaaaaattttcgagcagaatgatcgctcacccccccccccttgtttaggcctgcttgaccgtgccgaactccgtctgcgcctgtccgacttagacctgcgccgggttgcccagtactgtcgcaatttggccgacttggccttgatcagcgacctgttgcccaccattgccggcctgtacttcaccgcccgggtggacaccaaccgggccccgttggacctgtcccaggccgctgtactgctcggtgtcggcctgcagcgcaaaatg

SEQ ID NO: 112079 - DNA, 605 bp, Heterodera glycines
atttttccagcaaaatgatagaaattcttcaaattttaatgaatgtaaaatttatttttttatttaaaacaattttcgttttcagcataaagttgcccacattcaacaaaacccaaactttttcatggccagaaggaaaaagcgtgcttctgtcttcggtggctgcttctttggattgcttttagcactgatcgctaccgtacctttttatagctaccgtttcaaaaaacgagatgtgtaccaataaatagagagtgccagagaaaaacattatctttttttctctaattttttgtcttcttttggcgtactatctaatatttttattattaggaaaaacaacatttatttcgccacatataactttttttctactcatacaatttacaccaaattttgcatatcgatagagaaaaaaattctgcatcgaacgtatcaaatatttttttaggttatacatcccattttttcaataaaattcattttatagcttttaatatattcttttttgttctatgggtaaaagaaatttaccacgcaagcttaattgcaaaaaggcgttgaaagagcgtgagaagaagcgggaggagagaaaagcaagaatg

SEQ ID NO: 112080 - DNA, 140 bp, Heterodera glycines
ggtaaggatggaaatgaaaatattttatcaaatttaattcgattgattggtaaatgggtctttttcctcttcgtatgtccaaactccaaaaccgagaaaggaaattattaaacaaaatatttcaaatcaatattgaaatg

SEQ ID NO: 112081 - DNA, 1003 bp, Heterodera glycines
  unsure (1)..(1003): unsure at all n locations
actctcgacgacgccccaggggggggggagtcgtaaatgtgccccgggggatatttagttgttcattgtcgctgttttgcaaaattattagggatgatcggaatacaattttataaaagttaaagcgtgccgccgtcaaaatgtggagaaaaagagcagagaaaagcataaatttaatttattttatgggaaaaggagaaagaaatctacgaataaagcatatttatttttcatcaaaaatgaaaaaaagaaacaatcgaagcaaaagacgaaaaaatgtaaaataataaaaacataaaaatataatataagcacataaaaaggaaaatgaattgatttaagaaatttaaaaatgggagaggnnggggggggggaaagaacaaaagaaaatgaatgaatgaatcaccgggggggggggagagaagtaggccataaacgaattaataataaacaggttctaaaattttaaaataggataaaacgaaaaaaaggtaaaaaaaggggggggggaagggggatggccgagggaggagactgatgtaaggtatcgatatttgtcttcttttgttgggggaggattgaggactcgtgtcagttcagcttattattcacgtgtcaatttacggggttaattcacgtgacaattcacagtcatgatttacgtgttaattcaaaatcatgatttatgtgttaatttacggtaatgattcaaatgttaattcccgggcatgatttacgtgttaatacacggtcattattcacgtgtcaatttacggcttaaagcacgtgtcaattcagctcattattcacatgtcaatttacgggttaaatcacgtgtcaattcagggtcatgatttacttgtaaattcacgatcatgatttacgtgctactttacgggcatgatttacgtgttaatacacattcatgattcacgtgttaattaacggtcatgatttacatgttaattcccgggcatgatttacgtgttaatacacggtcatg

SEQ ID NO: 112082 - DNA, 86 bp, Heterodera glycines
aaaaaaattaactaaaaaaattttgtgtacaagttgcctagtgcacgaactctgtataaaataataaaacactcatttttaagatg

SEQ ID NO: 112083 - DNA, 268 bp, Heterodera glycines
aaattttcgaaaattttaaaatttcaaaaaatcgagctttcaaagctctacaataagttcgctggccaccccccgctcagatcaaagcctggcgcggcattcacctggtactgaagtgtactttttgagctcgcttcagttagccaagcgtgcaggccagggggtggctctaataaaaaaataaaaaataccagcatatagaggacccttcggcggagtgccctcacagcgggaagtttttgattcgggatttagaaaaagagttatg

SEQ ID NO: 112084 - DNA, 161 bp, Heterodera glycines
cctaaaagagcgaatttacaacaacaaaaaacgaaaaacaattgacacggggaaagaaatgagaaaaattaattgtcgggatggaagcaaaaatgagcaaatcttggtaatttaattctcgtggcacctcaaaatcggccactttcactgcgtaaacaatg

SEQ ID NO: 112085 - DNA, 289 bp, Heterodera glycines
gttcccctccccttcgtgtgtttatgttatatttttccccattcgtccaccattcccattttagtatggcgttttgtgcgtgtgtctgtgttggcattttgcccattcattttactcaaaaaaacccaaattctccttctccaataaattgcaaaaaaaaaatatattagttttttttaatttttgggcgttaatcaacgccatttcacatatctcttttttgttttactaaaatttgttatttatttacaattttgtgatcatgtttagctgtgtttttgccagcatg

SEQ ID NO: 112086 - DNA, 247 bp, Heterodera glycines
ccgtaccactatcatcacgtggatcattgaagaccgttgttcctccctccgtgcggatgctgtttgcatccgcccggaggagttcactaaaccaattgagtgtttgaacaccgctcatttgggatcattctccgaacacttgttggcggcgccctgcaacgccaacgtctcgatcaacctcaccgatgtggtgcagcagttgaacaacgccaacattgccaaggcgacgggatgcgtgaacagcatg

SEQ ID NO: 112087 - DNA, 241 bp, Heterodera glycines
gttctattaaatgcatacaatcaaagatttaaaagattaaaagatttattaacaaaattttaaggggttcctgaaaagccgagtttaaaatgaatttgaataaaattttaaggctttcaataaaacccgaattttcaggaaaatttaaaagaattatattgatttacttaaacagacactttcagtgaaaattatatttaaaaaaactttggaaatcaaataaaaactaaggccgcgcatg

SEQ ID NO: 112088 - DNA, 278 bp, Heterodera glycines
attacgctatatttagtttcggcgggggggggggggatacggtggctgagtcggggatacggtggctgagtcggggatacggtggctgagaatttttcttttcaaaaaataagatgattttttagctttaaaaatgcaaaaaaaaggatggtgtgatctatacatatttattatgattgccattagatcattaaagaattaattattcttaattattctgtacgatggctgaaatttaaaagtctgttaaaactattttttagcaatttgttcaaatg

SEQ ID NO: 112089 - DNA, 113 bp, Heterodera glycines
  unsure (1)..(113): unsure at all n locations
attgaaagggaagcattggcattagtgtatgcggtttcgttattctcgccatatatnagttgggtctgggggttacaaaacttataacggattgtagtgccttaacaggcatg

SEQ ID NO: 112090 - DNA, 1003 bp, Heterodera glycines
aaatttaacccctaatggttttctaagttcaagttagactcatttacctaagctttttcacaatttcagctgggtgttgtgcaacgatatttgatggacactttcccctctttttgaccgtctacaactcggcctcagattggcactgatttcgccccgttttgatgtttagtggagaattcgatgggaaaagcaaaatgatggtggagcagaattcgcaatgaaaaatttgaatgctgtaagcttttaatattttttaaattactaaaataccagtttcacaaaaaattgtcaaaactttttgatttttttataaacaaaaatttttggctctaatccactttgtgtccaatcacttttatgagtccaaaggtattttaaatgtaataatatgagaaaacaaaaaaaacaacatttaaaaaaagcaacaaacgaaaataatcaataattacttaaattattaaatcttttctgataatggcctaaacgctgagcttttatatattttagcttctggactcataaaatacctttggacttataaaaatcgattggactcataaagtgcattagagccaaatgtttttagttctaatctatagtttcttttactacgaatttttttaaacccattaatttaacttggtacaactaaaaattttatttattgtgttacattattttatttggttgcccagcgatgtttgggtggacatttccttttatcgtcctcaaattggcactcatttcgccccgtttcgatgttttagtggacaaacattttgatggataaagtggatttacgtaagttctattttttcaacatttttacattgagacatatgaaattgggaaccaaatttttttttgacttatgttttcgttattgaacaggcttacaaattaagaccttttcacttcttttttgggttttgaacataaatttggtactttttttttgctattttatattcttaacattttcagcaactgcgtaacaatg

SEQ ID NO: 112091 - DNA, 247 bp, Heterodera glycines
gatatgaagctgacatattggatttataaataagtaaaattgcccataaaggattcatctaattcccgctttaaacccaaagttacgcaaaattgcatacaaaaaatttgaaatttttctaccatatatctcgcataggtggagctttggcctagtcgcacttctgacaacatttaactttgtttattaccttttcgtcctgttgctattcccctgctggactcaagagaatactgtgcgcaatatg

SEQ ID NO: 112092 - DNA, 147 bp, Heterodera glycines
ggtaaaaagggggaaaagggaaactaagtgatggcattcaaaccaaaatggcattggcatacactcaactcaattatgtgaaaccaatttggccaattccctccatataactcctaaaatgttgatattcccgaagacacggacatg

SEQ ID NO: 112093 - DNA, 232 bp, Heterodera glycines
ttggcacgcgcggtgctttggtaggccatttaagcaattcgagggcaacctaaagcaacataaattttattttattcccttttcataaatgccactacatatattcatctccatgttgtttttgcctatgatattccatggggttgctggctttgtttggcatgccaattttgacaattgcaaaaattcatgcgacaagctaatcaaaagagttgagcagctgtcaatcatg

SEQ ID NO: 112094 - DNA, 1003 bp, Heterodera glycines
ttaaaatcattttttaaataaattaaaatcactagaaggtcgataatttaatttttattaacggaaatttcatgccatctcgcaatttttgtccatattttacgaacccaattaaactcatattccccattttttttttgcctttttggtgattgcctacctattcgctatgttatctgaaaaaaatgttttttcttaaaatttgagtttccttttccctattattttacttttttaaaaatctatgactcaacatattcacttttttattgttttttaaaattttaattaccataaccatttattagcctccaaaatttcgcaggcagtttatatagccttgcgcgcctcaattggcgcgcgctaaggctagaggccttcgttggcgccgactgcatgtgattaatatttttaattaagttaataaatggttatggcaatttctatatcaaaatctcgcggccagttatatagccttgtgcgccttgattggcgcacattaaggctaggcgcctcaattggcgccggctgcccgcgagactgttaaatagattagaaaaatatagatttgtatactttaaattttcttgatgaatgttttgagttaatgataggtctgagtaatcgattaaattttttaagtttttaaagttttgtcaatgttagtaaatattttgccttttctgcccaatcttcttaagatacaccccttaaaaatcggcctaaaattttctgaaaatacgccattaggaaattaatttctttaaaaatatatacctacactgcgctttttgcttttaatttaatttcatgtttttctagtccgttgcgaaatcaaaacgaccgcaaatcgccccctttaaaactccttccaaaaaatctgtccccaaatcgaacatacaaaaaaaaatcgccaaacaaaatcgtaaatctaccagctgtcgcggaaatcacttgcttgagtggataaataatttaaaaaataccaacacaatactatatg

SEQ ID NO: 112095 - DNA, 1003 bp, Heterodera glycines
aaaagtgcaaaaaccaaaactcacttttcccattacacaatcttggtatcatacgatagcccttgaatttcgttattagcttgttaaatttcaaaaaattttattcactttttcaaaagttatgacaatttttccagctttttggcttaaacttttgaaaaacttaataaaattttttgaaatttagtaagataataatgcaattcaagggctattcgtatgatatcaaccaatattgtgcaatttagtttcgtctaagaaaagttatgagttgatttagtcaaatagcaaattttgcactttttgccccttgacatagcaccttgtgttcatagcagtgtattttaagtgccatactattttaaaatttgaattaacaaatattgaactacaggtctcaagaccattttgcgcataataaatttgaagaaaaaagcctaagcctagacttagccaggcaaacctaagcgttgctctaatttcttattttttaatatttatataaagaaaacaagattaagaaaattatattgttgatcaatgtcatcattttaaattattgcatcattatttaatataatataaaaactacattaaactaataagggatgttggataattcaattgatgtcactaatttaaatttttataaggctgcatgattttcaatttttaattttaattataattttacttaaattgacaatactttttttataaaaatagaaaatagaattttaattaatttcttaataaaaaattgtttttaattaattttttatgtaaaaatattaaataataatcaatgtgcatttatgcttcattaaatcattcaatttatttaatttaagaaaacataatgttttgttctttttcgaaaactccttttcatattatcattcatttttttctaattcaaatttcgaatgcaatttcatcagtgagttaattaacagttaattaattggtcgaatcattttttaattagggagacgacaaaatg

SEQ ID NO: 112096 - DNA, 258 bp, Heterodera glycines
tttgcacttgtctaaaatcgggttcaaatctgagtttttcaattcctaatgtgcaaatgtctggggtgaaaaagcccgaggcgcaaatgtggggtaaccattcggaaaagccttcaaacgcaatagaataagaaatgtttaaaaacttaaaagtgaaagtttccaaatcatttttgccttttcttacaaggcaaccgcaatacaatacagccgttccttaatgctttttttagcattttggcctccatcggcgcaatg

SEQ ID NO: 112097 - DNA, 1003 bp, Heterodera glycines
cgttttattcggtacagtcgtaatgagggaatagaaatatatggatataaaatggcgaaatttggccataaaatatggacaacaaatcgcgaaatatggacatgaaatagcaaaaatatgtggaataacaataaatatggaaaatatggatatagaaatccacccaagaagcttctagtcaagctaaaaacatgtttttcgtacgtttcaggcctcccataatccaggaaaaaatatggatttccatataattctacttcctattatgaatttaataatagataaaagcaaatttaaaatttttttttataaaaatattgaatttaaagaatctaatggacgtgtttatgacgagaccaaggctacgcacattcagtctatggcaagttaaaaaattattcattatttatttttcgattttgcattgaacgcttttgtgttatgtaaagcgaaaacttaacaataactgagttttgcttattttcactaaagaaaaataattattcattttttaaaaattaaggtgcatttttcttttttcagtcgatttttaggagtatatttttcattttttgaaatcccgtattacggggtgttttttacttagccgtttttcgccaaaaaaaaaccttttttttttgccattttagtcttcgtttttcaaaaatctggtaaagtgggggtgcggcggtgccgataggcgcccccgttaaattttttcagaattttaatgcgatttgttaagaagttaaaatttgctgaatttacttttttggatttcggggggggggggggggcgtcaaagcaaagaatttccgcacattaaatatatttgcaactttatttcaaagaaacaaaaacactaggaaaggaaaatggttttacattttggtttaggatgtcaaagcactgatgtcaaggcgcttcgcacacgacggaggaggaagggaaactttcctccgccaacttcggctcctgctcgccgccttccaactccgtgatg

SEQ ID NO: 112098 - DNA, 262 bp, Heterodera glycines
gcggtaatggaaaaaattttgaagaggctatgcggaacggagtagcatcggggttacgagatagaaaattgtcctaaaaagagatagccatttttctgagaattaattctcaatttccgcagctcttgcggtaatggaaaaactttgaagagtctctgtggatcggattagcatcggggttaggagatagaaaattgtcctaaaaagagatagccatttttgtgagaattaattcacaatttccgcaactcttgcggtaatg

SEQ ID NO: 112099 - DNA, 51 bp, Heterodera glycines
ttatacataatttctttttaggcgtttattggactttcttttatcattatg

SEQ ID NO: 112100 - DNA, 365 bp, Heterodera glycines
agggatgtcgtaaatgatttttcacaaaaattcaaaattgaaagttaatgcgaaaatggaggacaaaattaattcgagaaataattattgtattaagcgaaaatttgcgttgatcagtaaagacattttgtgtagggcaatttggacaatttcgattaaaaactatttttgtgaattgtcccaattcgtcaaattcgatttttgcagcataacgggagaccatttatgcctcaattaattaattgtttgtgcaacaatttgtaccctttaaaaagcaagtgaaaatggtcagaagaaagcgccaattcatttattttattcagtttaattattttgtcttcgaaaatttaattgcccaaaatatg

SEQ ID NO: 112101 - DNA, 660 bp, Heterodera glycines
tttttgtgccgatttaattgcattaagcttgcacacaattttccttttttccatataattaaatttgccttaaaataaaaattaaagttaaataaaagcgattgttttctttaaaaaagcgattgaaaaatcctatatttttttctctatcgatatgcaaaatatgaagaaattctgtaaggcgaaaaaaaagttctatagagcgaagtaaatgttgttctttacattattaacaatgaagagatagtacataaaagtgagagaaataaagataaaaagtaaatgtgacagaacgccaattttttcccataattatccataaaaagatttattgtcgcttttttttcttttttaccgtccatgagtgtgtcccaagccccaacaatgacaagaatttctctggaattttataaatatattttttccagtttacttttaggttaaatttcattatcattataaatatagctaataatataaacaaatttaggtgaaattctttgtcaaaccatctattttaggttagtcggtgaaactccgattttgggttaataggcgaaacgtaaggcgaaatgaatgttttccaaccagagaaaaagcaattttagatttagtaattattagggaattttgctggcgatggcatcgatgtgcaaaatg

SEQ ID NO: 112102 - DNA, 627 bp, Heterodera glycines
aacggtgatgagaaattatacatttatgagcggtcgcccataaatgtatgattgttaattgctgctaattaaataatgattatcgtgagttaatagactcaacgactgtccataactgtaggatattaagtgctcaattaaataatgattgtcatgagttaataggctcaacgactgcgacgatggcaacgaggacggcaacaacgtcacattggcacgcctttttcgagtcaatgccaaagtggtggctaaagacaaattgaagcaaaccaagctgcagaagttccttcgtccgcacaacattgcagaaaaatactcctccggcctcggcaaaaagaaggcaagtttttaaatgagtattccattcaaaacgtacaagtcaactcgtacactgttgtacaaacgcaattcgtagaaaaatcaactcaaattttacaaaataaagcctaggcttaagcctaaacctgaacccgagcaagcctaggcctaacataaagcttaagcctaatcctaaagcctaggcctaacctaaaaattgtacgtgtttcctttgtacaaaaaaacagtgtatgagttagccttttgtacgagttggcttgacaccagcagttggagaagtgccagatg

SEQ ID NO: 112103 - DNA, 739 bp, Heterodera glycines
gcgctaacccccgctagttttattaaaaaggttactgtcgaaaacacctggtttaaaactagcctaaaaaataaaacgccaatacattcaaatttaaaaaaacttttggtgggctttcatttttttctgctacaaattttttgtttatcttggaatgtacaaatgcacgaaaatgcatttattagtttgtttcatttggctccctcttaatttagcaaattccaaattttactaaaatgagcgaccattcgtcggacgattcaagcggggctgagggtggtgatacttaccaagtttgcgaaaaaaacagcgtcccatcactttttggaatttcaatggattttttctaggttgaacgggtgttgaagaagcgcattatcaaaggggggaaggtggaatattacatcaaatggaaggtttgaatttagaaaaactttttttacattttaaatccgtcccctttccttttcagggctacgaaaacatagaggacaacacatggtaaagatgctctgtttttttttctgaatatttgcatttttctttacgggtttccgaccccggcgcattacttttcgattttatgtgccttgcgctttttttttgttccacgcgctaccgccaaatttgtgagatcaaaattgtcagagtatgggtcctgaaatagtgtccccccccccccgcaagtacggaatctgggacatacgcccttttgttaaatttaaaaaaaattcggatg

SEQ ID NO: 112104 - DNA, 211 bp, Heterodera glycines
tttctaatattttttaatgatttattcattataattaggccaaagagccttttccgtttttatcccaaaattaacttttgtttgttttccgttcttcttttgctctctttggtcgccttttattttatttcatttttctattaaaattcttttttttttggtgtattttcaagggcatttcgtgcattttttgtacaaatttttgggcatg

SEQ ID NO: 112105 - DNA, 394 bp, Heterodera glycines
acaaatttcgtccatttgtcccttttttcgacaatttgtcatgccaaatggggccagctaactcgaattgcttagtcatagttctatctagtcgagaaatttcttgggttttgggattctcggctttctgcaattagcccattttgatactttgtcgtgcgatgtcgaccatttgtccaatttattaaaaaaatttcggttaaaaggttcataaaaacaaggatatttttcaccttgtacagaattaaaaagtattttctcgatagtctttcattttttgttaccccaatttaaaccgtaacccaatgtgttaggctaccgtatcgagttgacactgtcgcatcaggcgaacattgagcaagcagaaaaaagtgccgaaacggatgacaacatg

SEQ ID NO: 112106 - DNA, 411 bp, Heterodera glycines
ttttaattttatgaattaaaaaataataaatgtcaattttttatgttattaatggtttgtatctctctatcgtctttaatgtttgtaatggttttggtctttttctgcttttaattttggtatggatcatttatacaaaaattgaataactaaaaacataaaatcaggacatttatttttcaattagaaagactcgggcaattaagaacgtaaagaaaaaagagatccagaccatattatggtaaaaaattcatttatgttttaagttttaatttataaattatttattattttatctatttttatttgatattttgctttatttttagtcattttatgaagtttttcggatccaagttggaatgaatgaccaatttgtccaaattccgtctttcaggcatcttggacatg

SEQ ID NO: 112107 - DNA, 353 bp, Heterodera glycines
tcacgaatcttacatgtcttttgactaagtagtaatcactaaccctcactcgaataaaaatcgaaatttttaatttttcaaattatgatgttttgttcaaatttagattaggaaatcggaattgatcaaaataattgaaagattcgtgatcggggaccccaaaaaccccagagaatacatttttatgactatcttaaaaaaattttgcaaaacaaaagggtccccccttttgaaaaaattttcaaaactggtcactttccatatagcgccaaaaattttattaatgccattattacctctttttccatgtttagaccgaacaaaataccccaatattttctttctaaattatg

SEQ ID NO: 112108 - DNA, 304 bp, Heterodera glycines
  unsure (1)..(304): unsure at all n locations
tttaaaaaaagttattgaccntggctgagaaatcaaaaaaaccaagtttttttttgaagagttaataatttttttgaaactttactaaactttttgaaattttgcaggctaattgatggcacctagagctatcgaatgatataaaaatttaaaaatttggtttcttttaagaaaagttatatgaaaaggtcagccgtgttccgggaaatttttttttgaataatttcctgaaaaatcagtgaaacttagtttttaatttaattaaattaaatttttaatttagttggaaaaaattgaccaaatg

SEQ ID NO: 112109 - DNA, 127 bp, Heterodera glycines
tggtaatctaaacatttatttatttattcttattttagcattcattttttagttaaattttcatttttaggccatttaactaaaacataacttaatattcttcttctccgttcacccaaacacaatg

SEQ ID NO: 112110 - DNA, 1003 bp, Heterodera glycines
catgttctttcaaatatttccttttctccactccaaaattttattaacaaatttaatcaatactgtaaatttaacggccttaaaatcgcttcaaataaatgtttaactttacatttaggacacaaaaaccaaaaaataaattattttattgatgactttccaattcctaaaaatcccggaaacgaaccagtcagagaccttggcatttattttactaatgatttgaaatgggcacaacatattaacattatctcgaaaaaagcattacgatctgctttcgctatactaaagtcaatcaaaactcgtgatacgaaaatacttgtaaatttgtttaatatttattgcagaccaattttagaattcggatctccaattttcaatccttatttaaaaaaggatatagaaaaattggagaatgttcaaaaaacttttttgagagtaatatttagacgtaacaattatactgttgattacctaattatgctgaattgttaaacatttatgatcaaaagtcgcttgagagtcgtaggttaaaaatagacttaaaactttttcatgaaataattttaggtaaaataaatttacaaaataacgaatccttttctttttccaaaaaccctgtaaaaaacgaattcactgtaagaacagcttattgctcaaccaatgttagatacaactcgttctttattcgaacctctcgtctctatagacttttacctaaagagacgagattactaaatcctaatgagtttgccattcttgaaagatctgatcttaatttgttgatttctttgccaccccaactccaaaagtgaccaattgattgttttgatattattatttcattatttctttatttttcggcgtcacgcttttgcgtataaatgattgattgattgattaaaaaaattcaaaaattcgagccataagaacaggcccgtaaatatttaaacgagtcacgatttgcaaagtcctctataagatttctcaaattgttgcaatg

SEQ ID NO: 112111 - DNA, 812 bp, Heterodera glycines
atcacagttttgaaggatggcagagaatttgcaagtgcactcgcgcagtggacaaagtgaagccaaaaatggagaaagagcggcaaatttaatggacttttacatggaattgatcggcaaaaaagaaggaaaggcacaggtaaagaaaaaacaaaataaaatgtaaaaagtggaatttggcactttcttggcaaggctttcactcaaatgccggagcatcgactgacaattggcacacaaacggagcgaacagagagcgagacgaaagagacacaacggagcggagatgggacggaggaaaaaagtgccgaaaagggagggcaacagaacgccaaacaatgggcggaggggaggaaaagcagcggcacacgacgactgaacattttcctgaaggcggttgagcatgtcagtgcttttttgggctgtttgccaattattactcgaggcttttgggttcaaatttcaaatccagttaaataaggggttgatttttgtgagttcggtattgactctctctctatcttggccgaattcagagaaaatgttgcatttatttggtgtttttatcagtctcagtattaattagtgaccaaataattgctttgtttgttcagttggtggacggcgttctttcacttgcgcacacttccgccacagatcaccgcccattgcttcagcacaactccaacttggcgttcagctcgcgcttctccaccttttcgcttagcaacgcttttttcaaaggcatttggccattttccatttgccatgccaattcaaattcattttcagaaagccgtttgtgcgctatg

SEQ ID NO: 112112 - DNA, 1003 bp, Heterodera glycines
tccaatttttatgaaaattgactattatatttcttatgcagtttttacaacccgttttaaaccggttgttcaccgtttaaaccgtttaagtcattaaacggttgtgtttttgtaattttgtaatttcataattttaccattgtatttcttacgcagtttttacaattgtctattcttttgtggtccgacggattgagtttgtgttttgcaggtgtttcagccggattataatttaaaaggttccggattaaactgttttttttaaggttaaacggttgagttttagtaattttattttacaattaattgtatattcctcagtgtaccgacggattgtgtttatgttttgcaggtgcttcaaccggtttataatttaaatggtaccggtctaaactgttaaacggttgtgtttttgtaattttgtaaattcatgttttaccactggattttcttacgcagtttttacaacacgtttaaactggttgttcaccgtttaagccgttaaatggttgtgtttttgcaattttgtaatttcatattttaccaatgtattttcttacgcagtttttacaacccatttaaattcggttattcaccgtttaaaccgtttaagtcgctaaacggttgtgtttttgtaattttattttacaattaattgtatattcctcagtgtaccgacggattgtgtttgttttgcaggtgcttcaaccggtttataatttaaaaggtaccggtctaaattagggttcgagccccgcccccgcccccgggggcgggacaggttttttgggctcacccccgcccccgtgactctgacccccgcaacccccgcccccgcgaccttcacccccgcgggggaacgggggtgaaaataaaaatgtgtgatgcattgttaattagctgatgatacaaaataaataaatttactttccaattttttatttaacaaatatttcaaatcacaactttttttatatatttttcttgaaatcaggcaaaaatg

SEQ ID NO: 112113 - DNA, 74 bp, Heterodera glycines
ttttttgatatttgtttggacttcctctacagttactgctcgaactcggcggtaacaatgccatcattgtgatg

SEQ ID NO: 112114 - DNA, 888 bp, Heterodera glycines
  unsure (1)..(888): unsure at all n locations
ttcacgatcatgattcacgtgttaattcacgggcatgatttacgtgttaatcaaatcnatgatttacgtgttaatttacggtaatgattcacatgttaattcccggggcatgatttacgtgttaatacacggtcatgattcacgtgttaattcacggtcatgtgcgttnaacttacagtcattattcagtgtcaatntaggggttaattcacgtgacaattcacagtcatgatttacgtgttaattcaaaatcatgatttatgtgttaatttacggtaatgattcacatgttaattcccgggcatgtacgtttaatttacagtcattattcacgtgtcaatttacggcttaaagcacgtgtcaattcacggtcatgatttacatgttaattcccgggcatgatttacgtgttaattcacggtcatgtgcgtttaatttacagtcattattcagtgtcaatttacgggttaaatcacgtatcaattcacgctcataattcaagtgtcaattcagggtcatgatttacttgtaaattcacgggcatgatttacatgttaatacacggtcatgatttacgttttacttcacgggcatgatttacgtgttaatacacagtcattattcacgtgtcaatttaggggttaattcacgtgacaattcacagtcatgatttacgtgttaattcaaaatcatgatttatgtgttaatttacggtaatgattcacatgttaattcccgggcatgatttacgtgttaatacacggtcatgattcacgtgttaattcacggtcatgtgcgtttaacttacagtcattattcagtgtcaatttaggggttaattcacgtgacaattcacagtcatgatttacgtgttaattcaaaatcatg

SEQ ID NO: 112115 - DNA, 1003 bp, Heterodera glycines
tcaaagaggatttttttgaaaaatgaggatttgcgggtttttgtggtcttttgagaaatttgaggatttttgtggtcttttgaaaaaaaagtgacaaaaacgcatatttttttgaaaattaggtatatttggcaaaatgttcgaattttttcttcaaatcttaaacatttttttgacaaaatttgttaacaaatcgcactcaaaattccaattttttcccggcagcgcctatcggcactgccggaccccctcccccaatgcttccaaaaattttttggaaaaccgcgccacaaaaagagcaatttaaaagcaaaaaaatttaagagatgtcaatttattaataaaacaatagaaatcgaattattttatattattttttggaggttttaaataagattagttttagatatttaccaaaaattaccaattttgcggcctaattttgcgattcttgaccaattttttaagaaaaaataggaattatttgggtccggcggcgttgataggcgccgtgattgttttcaaacggaaaaatgacagttgactgattttgtttgcaattttatgatgtttcaaaaaatgaggatttttccttccaaatgaggattttttgaggtattttaatggcaaatgaggattttttatggctgaaatgaggattttcaaaattttgagatcacatctctggtatatggtcaaaagaaatcgtctaactatgctaagaataaacaaaatactcatttaaaaaagttgaacacctaattagagcactttttaatgaagcaattgatgtaaaatcaaaattaaagaatattagccaaacaattatatatgtatattatggaaattgatatgctggggcaggaaaagcccattgaagcagaatgaccacgaacttttttacctacccaaagagcatttaagtttaatatttttcttatttctttttttgcgcagcgctttatttctgtgccactttttcgtcggtttttacaaaaaaatg

SEQ ID NO: 112116 - DNA, 259 bp, Heterodera glycines
attatttttttttttgagattttcagcagttttttttgaaattttatgataactttcataaacttttcacgaaacaacttaacatattttttccttgaaaaatttctgtttggaattttttttttttaattattgctaccagattccggagtttgacattattgggaatgcaatatgtaccatttatcacatacattgatcactccgcgctcactatttcaccgctccaatcactactatttgcgacaggacaggcatg

SEQ ID NO: 112117 - DNA, 188 bp, Heterodera glycines
tgcaggtcgaaaaagaaattatttaatcagaaaaatggcatagagagcaattcacggcacaaaatttttcggttaaatctctctggattgagtgatccacgaaaaaatacattaaaaacttaaaaattgcccccccactctttcgtgtgatcacctccaaatgctttgactcgatcagtggcgaaatg

SEQ ID NO: 112118 - DNA, 397 bp, Heterodera glycines
aaaaatcaaaaattttcaagaaaaaatcttattgttagaaattttacaagaaaatttcaaggaaaaaaattttgaaaaatttctagctattttttggaaaatttttcttgaaaaatagtaatttatcataaaatgaaaaaaacgctaggaaaagtttaaatttgtttcttgaaaaatttctaactttgaaacggcgggcagattttgggcgcgatagtttggagtgcacccagaaaaattgccactttttgcaattatttattttataaatttgtgccctcccccgaagaattatccggcactccgtgcgttcgcttctgtccgtttgcgtgtgcccgagccggacggactgctcaatgtgctcgagtgggcaaattcgttggcgcgccgctccatg

SEQ ID NO: 112119 - DNA, 497 bp, Heterodera glycines
acacagtgtaaaacgaaatttagcaagaaattttgggaatttaacagaaagtttttcgttttatgcacttgagaattcgaatttgattctgagtcctggaaaacttttaaaacactaaattttctactaagacaaaaaattttcgcttattttttcaatttggtcagatggaagagaacgacgaatttgcaagaaaatttttattataaaaggacgcgttttcgcaaatgcgcatcatttgttcaacaaatcgctattcaattcaattatttccgtcatttctgcccaaattttcgtcgtcaccgccgtcgccgctcataataacgcgcaatgtcttcatcaaaaagtgaaccccacaacagcagcaacaacgacaacgacacacgccgcaaaacaacaatgacaacgacaacaacacgccgcaacaaaatcagcagcatcaccaccatcatcatttgccacgtcgctcatgcaactcgcactcgtcgccgatgatg

SEQ ID NO: 112120 - DNA, 455 bp, Heterodera glycines
atcaccgggaccgggaaaagtcccgattttttcccggttttcccagccaaaaagtcccagtttttcaacccgaaaaggtcccggtcccgggtttgcccaaaattcccggtcctgtacaacttcacttttaattaataaattatatagcacaaaatgattgaatttggtttttttttttgttcgcagctattaaaaaaacaacaacaatttaattgaatttattttttcaaattaatgaaatttgtcgaaaattactcctagatgacggaatttacgcaatttaagcaacgacaaattcatcaccaaattcatttgccatttctattttattaaacaaaatatttttaaattttcaagaaaaaaaaaattcaaaacaccaaaaactttaccctaagcattttcaattaaattcacaaattttttaaaattaggtgctcagtaagcctggcgttatg

SEQ ID NO: 112121 - DNA, 795 bp, Heterodera glycines
  unsure (1)..(795): unsure at all n locations
tatannttttttgaaaaatttcgtcgaaaaaaatttttaaatattttttttttgtctgagacggagttggccccttatgcactaagacggagttgacccctaccgtccccaaaagccacaaaaatcctcattttccaaaaaaaaatcctcattgacctatcaaaaagccacaaaatgaggataaatcctcagatctggcatccctggttattggctatcattcttgaaagatttggctttatgtttaacaaatcatcaatttaagtaataagtaaccgattttcattaataaaaatatcaaatatgaacaaataatatggaaaaaaacaaaaacatgtggaacaaagccaagcaaaaaaaagagaagacaaatgtgaaaatgcaaaaatattttgctaattggaaaagaggatgatcaataaacgaacccaggtttaaaatcaaaatttaatgtatagaacataaaagataaatcgcccggtgggactcgaacccacggcctttcctcaccgtggaatgctctaactgactgagctacgggtgcctgttttggttctctcatgtcctttatctcactttctttcacactccgcttccttctgacatcacagttgggacgcggacagaaaatgacgcggacgcgacacgcgtttgttcaaaattttgttttttattttaattaaaccaacgtttgtaaaatttttgagctaaaattcggtggtaaaattaaaatgcatcactgactaaagaaagtgcctttccttcgttctgtcgtcaaattccctcctcctgatg

SEQ ID NO: 112122 - DNA, 234 bp, Heterodera glycines
attcggctttttgtttgaattcaggtccgggattaggaattagtctaaatgggtgtcatatcatgatcagcgaccggaaatcccctgagtgactttttaaacataaaaaaccagtttttgcacattttgatctcacaaaaataattcatttgcactttgactttttcatcttcattctttattttttcgtgcaattaactttctcgtttttcagcaaaaaagctattaattatg

SEQ ID NO: 112123 - DNA, 1003 bp, Heterodera glycines
aaaataagagcgtaaaaacaaaaaccaatatcctgcaaaataatatgaccgaaaaatttacccatttcaagtgaattatgtatgggaatctgtttctgaaatttcactttcacaaataatgtttataaaatgccttcgtagaaaaaatttgttttcttctaatgttataattgctttggaataattacttccaacaattatcaaaagttagtgaaatttgttgaaagaattaattaatggcttagatttaaatcaaaattgcagcatattaaatctgtaaaattcatctgaaaaacagatacatacgaaaacttaactcattaccttggttgatatttaagcacaggaagatgatttaggaaattttccttcacctattttcatattaaaataagagcgtaaaaacaaaaaccaatatcctgcaaaataatatgaccgaaaaatttacccatttcaagtgaattatgtatgggaatatgtttctgaaatttcactttcacaaataatgtttataaaatgccttcgtagaaaaaatttgttttcttctaattttataattgctttggaataattacttccaacaattatcaaaagttagtgaaatttgttgaaagaattaaacaatggactcaaagctccggcattctaaacactgggactcaacccactaactttcaatgacattccaatcactgaaaatcaacccatcagcatttcaatctctaagactcaattatcagactttccaatcgctgggactcaacccaccagcatttcaatctctgggactcaaatctccggcattccaaacaatggactcaaagctccggcattctaaacactgggactcaacccactaactttcaatgaattccaatcactgaaaatcaacccaccagcatttcaatctctgggactcaattatcagactttccaatcgctgggactcaacccaccagcatttcaatctctgggactcaaatctccggcattccaaacaatg

SEQ ID NO: 112124 - DNA, 1003 bp, Heterodera glycines
  unsure (1)..(1003): unsure at all n locations
cttccgtaccaggtgggcacaaaatcatgaaaatcgcgnccggatcagtcaccagcagagggttacnccatgaaatatcgagaaaaaaccctcaaatctcgagtctcgctgagttttagttgatgggaagtcttgcgatttaaatacgttctcaaatttttaaatatataaagaaagagagagcttcctagatccaggcctggattttcctgggttttgtccagaaaatacaggttcaggtccaacagggaagcaatccatgttcaggctttttcgaaagtcgaactctaaaaaggtataaaattcattttcaaatggacataaaagtgagaaaattcaaaacatttaaatcttagagatcacattagccaaccatttctaagcctcaatctcgagtcttggttttaaaaatgaatcatttcgagtcgagactttgagacgaggaccaaaaaaacagaatgagacttggcccccaaagactcgagaccgaaattctggaacgacaataacattttgttgaacagtttcaatttgatggcttcagtttcaacttttaaaatatttttttcaattttctaaactttaaattgtcaaaaaattcagcttttcgatgaacgagtcgaacaaatttattgtgaattgacgctgcaaaagaaaaggcgaaaaagtccggcgaaaaagccgccactgaaagcgaaaatgaaatgcgcaacgtaattaaaaaagcggataatgaacgaattaaaaatgaaaagcgaggatcacaataattaaacaaaataattacctcctgattacctaattaagcgtaattaggtttcccccgacgccgtccctgcccaacacattgttgacgaccggttaccaaaagaatgggaaattgatgtgcgtcaactgcacatttccccatcagtcggacgtggacacggattacgatagcgacaattacggtatggtagagcaaagcaacggccaaaattgggcggagacgacaccgatgatg

SEQ ID NO: 112125 - DNA, 237 bp, Heterodera glycines
aaaaatgcgcaattgtccacaaattccacgtaataaaagaaagaattaagaaaatgggaaatattcgcgagaaaattggattaaaatagaacaaaaaattagcaaaaaatagggaattaaacagacaaaaatttataaatgaaaaaagaattaggaataaaaataaaaaatgaccaaaattattatgaaaagaaaaaaagggaatttattaaacaaattgacgagtttaaaagaatg

SEQ ID NO: 112126 - DNA, 1003 bp, Heterodera glycines
atgccgagcagatcatcattattttattatttatgtaaatggttcaatttgattgtttgtgctgcttcatgtgcgcataagataataatatggcggcaggccctttatttgcttggacaaacccgcgtaaacatttgcttttcagccattaatttgatttttttttatgggaacgcaaacatcccgaccttctaaatatgtggcttgaatcccggatgttttcagcatttcacaaagtgatgctcaatcccaaatcaaattacctaatttaaaaaaaaacacccaaaaatcttcaattctttctttatattttcaaaaaatgccacattgactggctccttccaaaattagaaaaaagtgtaaattctctgattctgagaaccctagcaaaacttcttgtgaacaaagccgattctttggcggcgccaaatcaccattttttatggcctaaaaattgcaccacatccctttgataatcatgcaaataatcatattaatcggttttgttctctgatcagaatttgcgcagcaactctctgcggctgttgctgatcagtgatcataatggatcagcttcaattatgatcaacagaggaactgataagcaatgatcagaattgttgtaggataattctgttgatcaattttgtccccactagttaattattttttattttaaattggttaaaataattcattaatttcctaaaaccttgttactctgatcaaaagaattatttttttgatatctaagcacatttatcagctaaattaactgatcagaaaacattatttttcgatcagaagaattcgagaaattttttcaaatttctgagttttccattatttatttttttgcaaaattaattcataaaacattttttaagaaagtgctctgaaacgcatctacctatatcccggcctggtcccggttattaaacaaataactcagggatttaaaatcgaaaatcccgggaaatcccggccctgatcccgaaaaatg

SEQ ID NO: 112127 - DNA, 356 bp, Heterodera glycines
cggcacttccaaaacagaagcagaaacgcccgaagcagcagaggggcgaaggggacgccgcgctaacgagtgggagaagttccgactcggaaaggcaaacaaaaggggggggggggcagaagtaaagtgtatgcaaccgaacccccaattaccacgccactccagcgaaggtggtaaattcataatcttgcatacaatcaagaaagtatcagcctgcaaaagttcaaaaatgttttcggggaattcccagggaaaaataaataattttgcatatgaataagtacactaatataaccaaaaaggattaaataatgcgaatatgagcccgctttaagactgtgtgaattttcagaatg

SEQ ID NO: 112128 - DNA, 114 bp, Heterodera glycines
ctattagtgtttttatattttattcttttttttagtagaaacataaatattttaaaatttggaatatttcttctacagtttttttataactttttaatttgattttagataatg

SEQ ID NO: 112129 - DNA, 498 bp, Heterodera glycines
ttatgaaccgttaataatttgatttccgatcaactttttactgtcggatccaatcgaaaaatcttagtcgacccatcagccccttttaatgcatcccgccagcccctaaaaatttatttttcagcattttttgatttttggaaattttttgaatttaattgaaattttttcgaattttccaaaatcccgcaatcccgcacgggatcccgcaaattttaaatgcgggatttgcaggattaatcccgcgggatcccgtcccgcaaaaaattttgagttccagccccgcagcgggatccgcaaatttgaaatttccggtctctacttggagcccaaaattgaatcgccgtgtttaaaaaatttaattttttcgaaaccggctgaccctatgaactgttaaaagtgaccaatacgcataatatttttcttttaataaatttcagcaaaacgcatttatttgttcatttatttctgttgacggactgattattggcaaaaatg

SEQ ID NO: 112130 - DNA, 605 bp, Heterodera glycines
aaggttatgggccagaaaattttaaaaagttggttttctacactatttttggctataaattttttgaaaccagacggaattttttgaaattttgcatgctaatagaggattcttaggactatccaattttgacatgacaactcgtacaacaagggacctatcaaagaatagactagtttcatctttcattttaacattttacaatattttttaataggaaagattttctttttaattttttaaaattaaattgtcttttgtatgagttgtcatgagttgttgccaatgttttccaatttttaactcattctcagcacgcaacaatgaattcaagaaaaaaaagcattggaaagtgggtccgacgatgtagtagtgattttgtccaaaaaattctaacttttcaacggggaaagaggtgagaggtgtccgccgagaaaacaaattttcgtttttcaccctgcctcccccggccctctacgcaccccttggactgtgtgtgatttttaaatatttacgaaaatttatgaaaaaacaacttttttaatgcttattgtttcttgccaaccatttctgcgtccaattttggcacatacaacattgaaatg

SEQ ID NO: 112131 - DNA, 340 bp, Heterodera glycines
cccccctccaaaacacatcgggcttttgcacgctaatttgtttttggcatactttgttaatgtcggttttattccatgatgagaagattgtttcgcccagagcatatatcaataccaatggcccgaagaactggaatttatttctttttcgatgtttatactccccctatttattttccactctaccaataataacatttaaataaaattataattttttatttcttatttgattaatttcgatcaatattttttgataattaaacaaattgtatttttcaaaaaagacctttctcgcagtagcaactcatcggcttttttttactcccttcataaaatg

SEQ ID NO: 112132 - DNA, 381 bp, Heterodera glycines
aaaaaaaagttaaaaatgctatgcttttttctttgttcactaacttagactacatgatatcattcgaaagcttaaatgcttagaagatatttataagctatttataagggattacgcagctcagaaaaaaaaaatccgtgggcagctctaccaatgagctaccgaggcacatttgccctttcttttactgatcgtatctccacgatttaagcgcacagtcagcttcttccttacagtaatagttagtaggctattagagcctgtgaagagctttccaatgatatcaagactgttggattcggtcaacaatttaaaaagttatattgtttccgaaaaatttttgggtttcggaattccgaaaatttttggtgcctcggaatg

SEQ ID NO: 112133 - DNA, 93 bp, Heterodera glycines
tctgtgaaaagaaaagcaataaaataccgtagtgcaaaaatactgtacatgtttttcatattttgaaatcccactgtagggatcaataaaatg

SEQ ID NO: 112134 - DNA, 811 bp, Heterodera glycines
aaaaaaaaaaaaaaaaaaaaaattattttttttcttttttttttttccttccccccccccctccccccctttttttttttaaaaaaaagaaaaaaaaaagagggggggggggtttttttttataaaaacaaaaaaaaaaaaaaccccccctctctttttttttttttaagaggaaggagaaaaaataaaataacacccacccctccaaggggcgggcgcgccccccccaattttgtggggcgggggcggggggggggggtttaaaaaaaaaaaaaaaaaaaaaaaaaaaaaatttttttttttttttttttttcccccgcccaaaaaaaaaaaaaaggtgtgaataattttttttcgccctggggggtttttttccccccacaaactcataccacccccttgttgtttttccactttttttttttttttgggggggggaattttcccccccttttttttttccccccccttttttctttttttccttgggggagaattggggggggaacctttttaaaatgaaaaatttttaaaaaattttgttttaatagggggaaaacaaagggcttttttttgggccaatttgggggggggcttacccaaagataaaggagttcccccgttctttttccgccaatcctttgcaatttttttaaaattggtcttggtcagggaatttttgcgcccagttttttggttgttttcttaaaacccttcgcgatcttctaaaccatcctgaggatggggaacgcgcactgaaagagtggaccgcaaaaaagttcaaacaacctacaaagaccgaaatggcatg

SEQ ID NO: 112135 - DNA, 156 bp, Heterodera glycines
ttttgaaaaaacgatcgggacggatcccgggtcgggatcccgaccgaatcccgatcaatcccgaagatttttttcgggatcccgcgggattatcgggatttgctcaaacccatttttttttacttaatatcaatttttgtattttcgcctcagatg

SEQ ID NO: 112136 - DNA, 551 bp, Heterodera glycines
aaaaaatataaaatttcaataacctcgcggccaatttgtggcttatacctcattttttaataataattttttttagaaaatcacacatcccaaaggagaatgttttattatgactaaacccaatgctctttgttacaacctttggaaatagatgactacacatagcttaagaccaaagaggcaaacaaatttaaaaatgaacaagcaaatatttttttaaaaaaaaacttcatattttataaatcaataaaccaaatcaataaataaaatcaaatttaaataaaatcaataatgtaaatcaatcaataataatatggtactacttataaaatattctgtatattagagacacagacagtaacctgccaaaatcttttggttcaaattaatcgataaaaatatgttaagtgcaaaaaaaattaataatgtactattgtaagcgcacaaaaaaaaatcaataatatcaaaaaaaatgtgttccaataccttttggctagagacagagaaattactgccaataccttttggttaaaatcaatcgataaaaaatg

SEQ ID NO: 112137 - DNA, 210 bp, Heterodera glycines
ataaatgtaaaaaattgtttcatatttcgtaaatttctttgattttaaagctaaatttagttaggtagacttaaaaaattcacataatttaaacgctgtctatgccattcaaaaacgatgaaacatttttgaattttaaaatgattttttacaaaaataaaatgggcaagtccccactccccggtgccctcttcttttgcagcaacaatg

SEQ ID NO: 112138 - DNA, 1003 bp, Heterodera glycines
aaataaagcagtaacgggataaacagttgttttttcaacggtcaaatgggaaccaaagttttagtgaaacttaattctttctaatgaaaatacatataaagcataataaaaaagaaaaataaattaaatatcataagtgatttaaaattattcactattttttttattaaaacagattacccatgaatttttcgtcaaaaaacacatgtgatagactgaaaaaataaataaaccactttaaaatattgggtattaaaatattacagttaacagagcatataatttgcaaattcactttaaaaaataatattgtgtaatattgcgaaatgttaatacaatttacaaataaatatccttacaaataaataaaatgaataaatattcaaatattttaaaattccattttttatgtcttttcatcgattcccactgccccctccccaattaaaaaaataatgtattatatagcaacaaattatagacttagagaaaaaaaagctaagtaaaatattaagcatttaaaaatacaaagttttcacagcacctaaattacaaattcagttaaagaaatagaaattgtttaaaaattgagtaaatgttgatccgctttgaatacaaatatgtgtatatagacaataaaataaataaagatttaaaatgtttttaatatattgtagattaaattttaaaaaataatcaaaaaataaaatcgaatcaaaaaaggcaaataatttttacgagaaaacaaaacctcttaaaaacgatgaaggaaatattgcataaaataatgcgtgtgctataaaacaataaaataaaaattagaaaaaatataaagcaaagttatttgtattttaaactcactcaatgcataaaatataaatgctgaatatgatcaatcatggcggaaaccaaataaatatataattttaaaaaattaaaaacggtttattaaaataattgaaatatcttttctatagacgatccaatacaaatacttgaaatg

SEQ ID NO: 112139 - DNA, 208 bp, Heterodera glycines
ttctgttcagtatgtttttgtgtgtgtgtgtgtgttgtgggcttttgccattttaatcaaatccaaaaagaagacactttctctctacatattaaaattttttgtatatttttgagaaattaaagaaaaatttgaaaatttagctcttttgaaaaccatttaaaccagaaacgtaattcttcacaaaaaaacgaacaaacaaataatg

SEQ ID NO: 112140 - DNA, 223 bp, Heterodera glycines
gctaaaaatagcaaattatgaaaaagaggagaaaagacaaaccaaccgaacagaaccaaaatcggacataaaagaacgaaaatgaggaagtaattgtgcggaaagaccaggcaaattcatcacaacatggaaattcaagggaaaaactcgttgggaagggccttcaatttcatcgctttcctttcgcaaattttggcagaattcgaccactttttccgggatg

SEQ ID NO: 112141 - DNA, 523 bp, Heterodera glycines
ttttctcagctgaaaagttgtgcttctggcgcaccatttgacttaaattgcgttcaatttttttactaaacagacaagagaaaatatatatgaatttgtttttggaagggataaacaattatgtttaggatttaacctttttagggatcgtattaagaagcgggcaaggatttcttgggaaccatattccccttttcgggaaaaactggaatgttgtcgcaaaaaatctgcttatcaattctcgatacacggtttttaaagtttaaatttaaatttaacttcgatattattttggcgtaatgttttccttccatttaaatttttttcttcgttcctttcctcaagactatagagttgtacgggatcgggaattttggacaaaccgggaccgggaccaaacgcatgaaaatcagcaaaattaaacggagaattgctaattttcaaattcagaccccccccccttactttttcccaattttgtcggattggggcggcgagtgacgacgaaatcccaataaaaatg

SEQ ID NO: 112142 - DNA, 291 bp, Heterodera glycines
gttgcgactattcattaaaggataatatcggccataaaatttttgtgaaatcaagtgaacaaagtgatttctataccctcgtgttgggtttaaagcatcattcggcgtatttttgccgaccttacaactttctgctcgccgattaaaagcactcgtgttgtgctttacgaattaacgaattttgttaaaagctcgtgttgttttaaaactgatctttattgttttatctcgtgttgataaattctgatgattttccgctcaccaccactgacaaggcaaaggctcagaatg

SEQ ID NO: 112143 - DNA, 669 bp, Heterodera glycines
aataaaattaatatttaataaatttctaacaaacatgcccattcgctaaaaagcgaaaatgttaaattaaattaaaaaaataattatccggacaacaattcccaaagaaaatatttaaaaaactgacaaaaaattatactaattttttttttgtcaaccaaatccaacaatcttagtatcatttgaaagctctaagctcttttacatactctattagccttacaaaaccgaaaggattttaagcctggaaacaatttattaaaaaaacatcaaaaatatcgattttcaagtttacaggtaataatttatttgataattgtctaattgccaagcaatagcttagaaaaaacttctcaacatattaggcttgctatgaaaatcgtttgatttggttggcaataaaaaattatagtcaaaaaattggttggggccgaactgatcgagtccgtccgggccacaagcccaaaagaaaataaaaaaaaactgacaaaaattatagctagatgagatttttctagtaaaattatgcaaagatgttttgaataaatatattttacacatttaaaatcatagctttttgaattcgaaaaactacccattcgttaaaagcaaaaatattattgttgctttttctatactttttttttgaaaaatggcactttaggtatg

SEQ ID NO: 112144 - DNA, 1003 bp, Heterodera glycines
ggaaccttaaaatccttaattttctttaaaaaatgcctcaaattttaaaaaattggctatttttggacataatctaacaatgtattgtatttaaatattcaattttttttccctgcggcgcctatcggcaccgccggcctccctcttccaccctggtcaccaccaaaaagttttttcaaaaaataagccgcaaaaaattgttaaaattttctgcttactaaatttttctgtctatttttttctctaataaaaggattgaccttaaaatttgtgcattaaaaatattttttgagtaactcccgctcccgcccgggactaccgtaaaatttctgcgggattttcacgggattcccgatcccgctcccggaaaattttgaactcccgatcccgctcccggaaaattttgaactcccgctcccgctcccggaaaaatttgaactcccgatcccgctcccggaaaaatttttttaccggactctaattttattgcatttttatgcgttttaaggttttggacggttcagtccctaaggcatttggccacttcagtcccgggtctgtaactcttcagggattggaatataagctcaaatttgtggccagcaatgcattttttaagcctagaaaaaatgcctgccaaatttttaacattttttcgtcgggacatcaattcttgatgattgccaaatgtttcatttaaaaatgtaaatttttgttaagaaaattagaattgtcagtgcgaaaataaatgattttgcctgaatttaaatactccttttggtgctcacaaaaaaaaaaagatttttttgtctgttgacagatttttctatttaagtgctgtctcgttgctgctctttgctcattcctttggcaatttctttgcccattcaccactattcccgttccgaattttatttagtcattcattttcattttaaattttatattttttgtccccacaatttagcacatgtacataaataaataaacaactcttctaatg

SEQ ID NO: 112145 - DNA, 187 bp, Heterodera glycines
aaacaaaaataaaaattggattttcactttttaaatttaaaattttcttaggtgtatgatgacttatatttcgggtaaatattgaattaaaaatttttaattaattactatttgttaatttttattaaagattttatcaagtgttacaccggcggacataacaacaccgaatgttgcgaagaccatg

SEQ ID NO: 112146 - DNA, 681 bp, Heterodera glycines
ctgataagagccgctgggaaattttttttgtaattttaatgctatttgttagcagattttgtctaaaaatgccaaaatttgagatttaggctaattttttaaataataatttgtacgatgccgacgacgacaaatggaaaatgaaaagagtcataaaatgaagtcgaactttacttatcaaattttctcaatttaatttaaacagtaaaaatgacggactgggacactatagtctggccgttatagtctgagccaagtttagagcatcataacttttttctttactgaccaaatccaacaaagttgatatcattcgaaagctcttaacaagctctcgaagtcaaattacattttcaaaaaattccccggcggctccttaataatgattctttctaaaaaatattcaaaaattcaaaatgtttcctttaaatttaattttacttaacaattgaaatcactgaataaattatttgcttcggttaaatttttttaaagaatggaaatagcagaatgagacaaataaacacactttgtgcacattcacaaaagactacggtggggcaaagagtttggcctttggccgaccgtcccccgccccagggccataatgtaaatgatcgattataatcatccgatccaatgcaatttctgacaaaaaaggtcattcattctcgcgaaatg

SEQ ID NO: 112147 - DNA, 185 bp, Heterodera glycines
gcgccgaacgtcaaaaacattttaatttaaatttatttgatttgttccgacaataaaaaacgtcattattttgtttggattttgtcatctttttcttttgttttggatacttttattaccttgaatttctcattatttaatgaccgaaatataaaatacaaagaaaggatcaaaaaaatcgaatg

SEQ ID NO: 112148 - DNA, 59 bp, Heterodera glycines
ggtaattaccggttttttgggtaccggtaccggtaccggtaccggttttttcaaaaatg

SEQ ID NO: 112149 - DNA, 176 bp, Heterodera glycines
ttccctttcattttgttttgaatcaatctttccgctttgttcagtgcctttgcgcaaaagtcattccgtccatggccgtccgttgaacgctccgtcgtcgcggggctgcgcgtgggaaagggacggaccgccaccgccgtctccgcggagtctacgcgagaggcgcgtgggaaatg

SEQ ID NO: 112150 - DNA, 364 bp, Heterodera glycines
agcaacttccggcactgtttggggattgccctccctgccgatcgcaatccgtgaggacttcggcatggacacggtcatccagaacctggatgtggcgcgagggacggacgtcacaacattgtcggtctgttttcgctcacactctgctctcgtccgctgtacggaggccggtttttacaaaccgcacggcgggcagttgacaccaggacgcgacgactccgagcgggcgctcatgaccgaccaaacggcattcaaattgccgaaaaagggagtccccctcattttagtccatcagaacacgcccgcgcaacgcgacgaagtctccacctcttcggccaatccgggccaaaccgacacagcgatg

SEQ ID NO: 112151 - DNA, 106 bp, Heterodera glycines
acccgcgttctactttcttagtggaccgggtggaacaggaaagaaacatgtgaacaaggcaattgtacatatgctgagaggtcagaagaagaaagtttgtacaatg

SEQ ID NO: 112152 - DNA, 135 bp, Heterodera glycines
cccccaaaaatttttttttggaaaaaccgcgccacataaacaacgggtgtgaaaagcaaaaaaaaaaaaaaggtcgtcgcccgggggaggtgccccccccaagccaaaatcctgggaccgtccctggcataaatg

SEQ ID NO: 112153 - DNA, 203 bp, Heterodera glycines
ggtgaaaattaaattaaaattttacaattcaaggcattatatgtcttgttttgtaaaacttacacagaaattaggaataatttaaagattatttttaatatctttacaacaaaaaacaattaaaattggagccctcaataatgactccataaaaatctatcgttaattaagcggtgcgaaaattgaaaagtagtgacaacatg

SEQ ID NO: 112154 - DNA, 172 bp, Heterodera glycines
tttttcaaaaaaaaaaaaattaaattttctttccaattataaaaaaaaaacattttataggaattctttttgttcagttcggtccggacaaaaagcgttattccatttattattcaattgttggaaaagatgtaaacagtgtaatttcattaattatttgccaggtgccatg

SEQ ID NO: 112155 - DNA, 165 bp, Heterodera glycines
ttttaaattagatcgtgacatcatccaaaaggatggccagcctttgtatttgccgccattcaatcgaccaatgctgctaatgccaggcaaaattcacgaaattttttaaattttataatgccaaaaatatttggggaattgtgatgggagagaaagtacacaatg

SEQ ID NO: 112156 - DNA, 74 bp, Heterodera glycines
aattttctgaatcgccagctcaagctatcaatgaataaaaataaatttattatttagtgaagatctcaaatatg

SEQ ID NO: 112157 - DNA, 261 bp, Heterodera glycines
agtcagtgaattgtttaaaccaacattagtttggctttttcctgcggttgtgcaaaatattcaaaaagttttagtgccgaaccgcttgccaagcgggagaagaagcagttggtcatccccgtcctccaagtgtccagcagagcacaaatttctcgcattcagaagctggtggacgagggaacagccacagaaacagacttagcacgactgtcgctgttaatcgacagtttggacgacgagcaaagggttggtggtggaatg

SEQ ID NO: 112158 - DNA, 133 bp, Heterodera glycines
ccattcattttctgtttttcaccttgctcattttacgatcccacccgggttccttctctcttaagatttaacaaaaattaatcccaacaattctcctatccccttagcctgcgggcaagaaacagaaaatatg

SEQ ID NO: 112159 - DNA, 1003 bp, Heterodera glycines
aatggtggaatcaaagaactaatcaaaaaaattctttaaatcaatttaaaacaaaaataaaaattcataaattgtcaaaaaataattttaaaatatttgattctcaattattaattcgaagaatataaatttttaattaaaaagttaaatttggaaaaaagcatcctaaaagcttcaaactaggcaaaaatatttttttactcgattttaagccgaataagtggggaaaaacatggaaatccataaaaaccggccctttctaatgaatttaattttgtcttttttgagtttgctaatgggcaagtcaaaactgatcgcaaaacaatcagcagaatatacaagacgggtgaattcagctcaatttaatgggttttggtgttgcgcaatttacgggagatcggtgatcgatcgcaacgtcacaagaacaaagcgggccgagcgaatgttttccccatcatttttttgtgtgttttgtggaaacaatcaaattaacactaattacacagccttttcttctttttcttacgcaattggatctcttattttggtgcccagcaattagggaaagttttcttaagcttagaattagacattaagaagaaagtgaaatgaattaatcaccttccgatttaaatttgatttccgaggctaaaaatccataaatcgagaataccaaaagatatgacttcttcagcacgagttctcaggtccctcagattattcacttaaagattttatattttgatgcataaataaaaatcattcgcttaaatggccgccaatttttaaattattagcgcgaatgttttaccggtaataaaaatatttaaattaatttaactcaagaattaccagacttggaaatctaaacgaagaaacgttcagaaatttagttacctttggccttttctcagcactttcaagtagaactttgacaattttcttgaaatagacttatttttatttaactgatcttttttaaaggtgttttaaaaccaaaatg

SEQ ID NO: 112160 - DNA, 460 bp, Heterodera glycines
aatatttatttgcaatttttaaattttgaattaatttattttgctaaatcttattttttatgaatgtgataattaattaagccatcttcacaatcagtcgccgagtttcacaaagcgcgcgaagttccgtatgcgccactcgaccaaagaggtgctaattaaaagcaaaaaacacaacaataaaaccgaaaatattaaacaaaacattatgcaataattttttattgaaatagtccatttaaaattaaaatttcgccaaatattaaattataaaaaaagatttttttaattggaaaatttctttttttattgtaaaggatatcaaaagctttcttctttaaacatttttttaagaaatgaccatacttttcaaaaaaaatccatttcccccccttttttccgtttccaatttttaattagtcaatttgttattcaattagcgcgtcgcactgtggaaatg

SEQ ID NO: 112161 - DNA, 110 bp, Heterodera glycines; identical to SEQ ID NO: 98226

SEQ ID NO: 112162 - DNA, 127 bp, Heterodera glycines
ggtccaggtcgatctctaatttctacctattaaaaaatgttcagccattacgctgggccgattcggcattcactgctctgccgaggtgtcgccctttctcgccgactttgtccgcccctggtgcatg

SEQ ID NO: 112163 - DNA, 499 bp, Heterodera glycines
aaaaaaaagtttaggggggcgtttttcgggttttttggtaaaatgccgaaatatgggaggtaaaaatggaaatgtggaaataaaaattcatcctagcagcatcaacccaagctaaaaatgctatcttcgtcgtttttagggggaaatgagttggcaaaaaacatatggaaatccatacaaatccggtccctagtgatcgcttgtgcgttatttagctgtgttttgttgaatagtaatttttctttattgtatcatgcgttcagataataataacataataattaaatagaaatattatatattattgtatcaatgtcgtaaagatctgtatgaattgcaatgagatacggcaatagagtaagctgtataatcaatatgatattcctaaagggacttaataaaattctccttcatagtagaattgattaaggcataatgtgctggatttaattgattcataagaatgtataaacacatataattttttaggcaatcaatg

SEQ ID NO: 112164 - DNA, 912 bp, Heterodera glycines
tgagccgtcgaattccattgcccaaatttttttttttttgaaccgtcggaattcctattttcgatagtccgaaattttttgagccatcggaattccgattacacaaatgttttgtgccgctggatttccgatttcccaaattttttgagccatcttccgattttcggctccagaaattttttgagctgccggatttctattgcctttgcataataccaagattgtctaatttagttataaaattttcaaaaataatttaaataaatcgcatttaaaaaaaaaaactaagatttttaatgtcgatgaacggattcgaacctccgcccttttaaatgaaaatcaaaaaatgttttaaaaccaataaaatcacagccccattgcagccctggatatgaaacactaagcgcggatgaacagttgattaaagatttgcgtgaacaggatgttccaaaggcaacgttcgaaatttttcgtcgctacaagcgcaaggcattttaaaatcaaaaaatttaaaataagaatttaattaaaatcataaatttaaaataaaaaataaaattttaattaaaattgaaaaattttaattaaaaacgaaaatgttaatttatactttagctgctcaatgattataaaaaaaagaaattgttttttaatttttgtctattccatgaaattaaaattgaaaaattttaatttgaaaattttaattaaaattgaaaaatgtatttaacttttagctttcaatgaatttaaaatggaaaaatttaattagaaataaattcatttttaactgttcaataaagttaaaatagaaaaattaaaattaaaattgaaaattttattttaaaaaatgaaaaaatttaaatttaatttaaaaaacaacaatttttatttaattttagctgtacaatg

SEQ ID NO: 112165 - DNA, 231 bp, Heterodera glycines
ttccatgcgtttcctgaaataaaggccattcctaaaacggtgttagagttggagttggggagggaagtgggactgatcaccccaggaccccctcacaaaaatggttggatttctaagggttgggagtcccaaggcctaattcagcgcgttccactggcatgtgtgttactggtagcaccggatggttaggcatttggcctgggcggctaagggacaacccataggaaaatg

SEQ ID NO: 112166 - DNA, 590 bp, Heterodera glycines
ttatgccaaggtatgcctcatatttttgcattgaatattcactgatttggatttctttatctctcctttgagaaatgcaattagcattttgtcgtctccgtaattaaaatgattagacaaactaattactctaatttattaactcactgctggcatagcatttgaaatatgaattaaaaaataattaataaataataagaaaaggtattacaaaaaaagaaaagaacattatgttttcccttaaaaaataaaaattaaaacgatttaatttttagtttcaacttatttagataaaaaattatttaaaaatattttttattcgatatagttagtttttaataaaaaggggattgcttaatgaataacgtaattatgaaaatgaaaaatggaaagtaacacagccttataaacggagcaaaaaattgttttgaaattatgatcatcagtaggattacccaaatctattttttacttaaataatttgttattattatagcatacaattacaccggattacagtagtgacgtcacccaagccaaaaggtattggcttggtcccaaacctattgcaagggtgcaggccagggatg

SEQ ID NO: 112167 - DNA, 145 bp, Heterodera glycines
tgcaaaggggcgtcaagtattattcaaatggttggcgattttttacgtaacctttatgtttaaatgattaatcgttaaatatatttgacaagaatttttctttacttagggagtaaatgcatcacattttggtggaatcgccatg

SEQ ID NO: 112168 - DNA, 173 bp, Heterodera glycines
ctgactgactttgatttgaatttggccatttgttgcggatattgccgtcccattctgctgaccgtctgattggtgaagcagaaaaataaccaaaaaaatttggagaaaaatttggcaaaatgttttcatttttttaggatttggaaaatttgaaagtatgctttttcaaaatg

SEQ ID NO: 112169 - DNA, 412 bp, Heterodera glycines
ttatttcctataaaaatttcaaaaaaaaatgcaaattaaattttttttaaatatttttatttatctagtgcatacggcggatttccaatgctaaaaaatcgtgtcatgtctcataaatcggaaatatttctgagcattttccaacatataaaattcacgtgtaaaataataattatgaaatcatttataaaatatagcaattaattttataaaagaaaatttttcataaaaatatattttttatatatttgcctttaataacaccggaaaatgctttatgtcagcatattcaaaattgatatgccaacaatattaatggccttttaatgtatatcaatattcttcattttatgtttttaatgtaaaaaatttatttaaaaatttgccgaaaaaataaaaatttacagaaatg

SEQ ID NO: 112170 - DNA, 840 bp, Heterodera glycines
gacgtgcatctggtgagcagaacaacaaacataacaataataattgttggggaaagagatattaattttgcttttatttacatacatccaattttgaagaaacggacggcttttcaatcggctgctgctggacgatgttacccccccccttccccccccccccccgactttctcccatctttttcacacaattatcccaccccccgtgtgtgtttcggattgatgggaggcactgaaaaccggcttaattccgctaatcccgccttgtccgcgcacatcctcagccaaccatttctcggacaaaaattgtaataaaaacgaatttaaatggaaaaataaataaataaatacaaaaagcaaattaaatggacagttagggacaaatactgaacagcggaagacattttcaatttaatggtacaaattttttcattcgcacaatgccgtaaatggtcgatcatttatttgtattttgactttcggcaaggctaacgaagagacaaatgaaatgaaagcagccaattgccagcagatcacattgaatattgacagacactctttattttattcatttcaatccgataaattattcttttttttcttcttttttttgttttttatttttcctgaatttcacttcccctccctttccctttgctttcccccgcgtgcttttggctcatttctcgcgatcgttccacttcccacacataataaaagaacaataaaatgcgaaagaatgagcaacaaattgggaaaccaaattgttttattgagaataatgaatgaaagacggacgaatggccaaatgattggaggaagagaaaaaagaaagaaatg

SEQ ID NO: 112171 - DNA, 1003 bp, Heterodera glycines
ttgggaaaatcctcagaatcttttaaattttgataaattgtcataatgttttacaaatatttaataatttgggtttctaatagagcatcaaaacgaaaatctcacccaaattttccaaaaaattttgctaaatttttataaaaaccagaaaagaacaaatttttttctaaaaaatcacaaaattaataattttttaatgaaaatctgttaaaatatggtcaaatttctcaatttttcccctggcggcgcctatcggcaccgtcagcccctaaaagtcctttattttcttataaatttgctcaaaatcacaaaatttggccatttttgtggacaaatctgttaacaaatcgcattaaaaattacaaaattttaccggcggcgcctatcggcaccgccggccccttattccccgaaagttttttaaaaagtaccgcaaaaaatcagcttcaatttttcatgctcagaatttcacaaaaagctagcaaaaattgctaaaattggtcatggacaatcaaaaatataacatttgaacattttaaatgtgttttgaataaatttgtagaaatgaggcttttttgcctgccaaatgaggcttttgaaaattttgatctgggaaccctgggaatacaagagacgaggaagagaaagaaagaggaacaaaaggcgaagaggaagaggaagagaaggggaaaaggaacagaaagaggctattcccggccattaaaaaatctaattcccctcttataaaagctttttggcgcgtggcgcccgctagagacagtgtttaatagcgaatctatttcaattttttataaataaattaaaatcgtctctttcagtgcccgtacggcactggttacctataaattttaatcttgtcacaagtcactttattttatgtctgctttttgttgatgttgttgtttgttttgtttattttcgctattctatagatcattgatatttattgctaaacggcaaaacgtttcccaatctttaaatg

SEQ ID NO: 112172 - DNA, 126 bp, Heterodera glycines
  unsure (1)..(126): unsure at all n locations
cccccccnccaccgcccaatccctccgccgtctcctccaacctccaaatccaaaccaattccgcgcacgcatccctcgcagcttttcctcaacaaatcaaacagcaatccctccaaccccaaaatg

SEQ ID NO: 112173 - DNA, 59 bp, Heterodera glycines
tttttgatcagatcgtcgatcggttcggctgggacaactccgcctatgactacgccatg

SEQ ID NO: 112174 - DNA, 1003 bp, Heterodera glycines
aataatgaccggaaatcagaagtggagagaatttgttgaccaaatgttgttgaaaggccattgataaaggcgaaaatgcaaatacaacaaaaatattgtccgatttgatcagaatttattgggaaagaaaatgatggattttattggcttttcccatttaaatagccaattaattgagtggggtgagcaaaaaagggcaaatgaactttcgataagtgagaagcaaaggaaggaaaatggagggtaaaagttgcactttcgtacacaaaaaataaaacaaaaaacgaataaattaatggccaatggaacgaacgaaacatttaattggcagaaagagaattatcataaaatatttttatctttttcttttaattcttttggaaattaatgaaagggcaacgaagcgaaaatgaaagtgtaaaggagaagaaaaagtgaaatgtgaaaatggaaaacgcaattttgagagggaaagttggacaccgaactcccgggcattttcaagaccgggatttgattttgaaaatccaactcgcataagccggtagatcaaaatacactgataagggggaaggtgacttggcgtaatgagctttctgacgaacgcctaaatttaacattttttgacccagaaccccattcttaccagtgtacttttggacccggtcgggtacccggaccccggccaaccctaattttgctaacaatggagcacaatcatttataaatttattccacaacattatgacaaaattaaatattaatcaaaattattaaaccatttattcgaaaaaacttttaatgtttttcacaatgtctattgcattttcctaatacataacaaaactgtgacttccttccgtttttcagtccaaattaactgcatagacataaacaaacgccaactcggcaaaattacgtgtcaaaaattgattgcataacaaaattattttttataatagctgatttttcaatcatcaaattaattatcatttttaaaatg

SEQ ID NO: 112175 - DNA, 1003 bp, Heterodera glycines
cggaaaatatggagtgaaaaaatacttccttggcgtcgactgccaggtcgctaaattttgataaattttttagttataaattaattaagggcgagccgaggaaccctgtcaaaagaatggcgcaagaagaggtttctgatgagcctcaaataccagtgaattgggtcctaaaaggatatttttcaatgcttttttaatttaggatgtggtttgtaacgaagaacttgaagagaacatttttggatgcgtatgctgttttacgaaaataaaataatattattaaaaaaatattaagccaaaacttttgggatgctttctccgaccgcacaaatctttggtaaatcagctataatacaaaattgtacttaattttgttagacgagcctgaaggtttgcatgcccaatgacctgagaaacgaggaacaatgtgtatgtatattttattctttattatttattcaaattaatattttttataaaggccgagcctttgccgccaactgaggaaccgccgacaactgcccaaacagttttaattattttttaaaataatttttaattcggttacagtctacgcaaaaaccaccggatgagatcccaattgaaactggaggaggcggccaagtatcataataagggcgagtgtttgtatggatttacatacatattttttaatcaatttttcaaaattaaaaacaaaaatggaaaaaagcgagttttatgggaaaattgtttgatggcacataaaaagttgataaattccaaaatgtacaaatttttacgtttaagtttacaaaatgaaaaattgtttaaaatattattataatttgaatcttttaagtaaaattttgaatttttgcaaatttttggcattttttgtggtttaaagcaatttttggtactatttagtgggtctttgggtgctttttaggcaataatttatgccaatatatagttttttattggtccatacaaacattcgccctaattatagcctaagatg

SEQ ID NO: 112176 - DNA, 1003 bp, Heterodera glycines
aaaaatgcattttgttgggtgattttaattttcctcttttaaaagcaaaagacttagcatccaacattttgaaaaaagaaacaatcaccttgaatcacttttcatttcatttttagagggatataaattaagactaatggtcaactcccctacacggggaaacaatttattagatttattatttacaaacaacgaaaatctattgaataatgttatagttgaacccccatttggtaatagtgaccataatgcaattcaattcagcataaatttacaggttaatagtaatgcttcaaaaaaattttataacttcaaaaaagcaaattatttggaaataaatgccatactctcaatggttgattggaatttatttttttctgattgcccggacatagagcttatttaccaaaaatttatgtttttcctaaataatttgataaggaattatgttcccatacaaacaacgaaaaaagttgaaaaactaccagaacatattttgaaactaatcatctatcgtaaacagctttggaaggacattcacaaagaccatataaaaatcaaatttttggaagtttcaaaaaaaatcgatgtagaaataaataaattttataaaaatcgtgaaaataagtttttgcggaccttagactctaaaaaacgtttccaatttataaattctttccttaagactaaaaatactatgatacctgcatttactgataaaaatggtctaatcctcttctctgataaaaaaaagtcgaatgcattagcgcaacattttttttccgtttttacagatcaaaatctagaacaatttcaatgcatagaaaatcctgaaaaaaatatcgaatatttcaacataactccatatgaaatttatttctctctttccaaactttcaaatgctaacaacactagtattgatggaattcccaacatttttttgaaaaattgtaaagaaaatttagtccgaccacttttccatatttttagtttctcattgatg

SEQ ID NO: 112177 - DNA, 326 bp, Heterodera glycines
ctgttcacgcccagtccggatggtatgccgaagtcctctagatgctctgttaattcaccggatcaatggttttgctgcaattggaactcaagattgtcacaaaaggcaaattatcgttagcttaaaatagagacaattaggaaaaatgagatcgaaaagaacacaaacaagagcaaaaaacgataagcgatgaaatcaataaaaaacaattttttttacgacattctgtctttttttacacaaaaaatgtctttcggatgaattattgaatcaatgaaacttaaaaaatttgacttatttttagcttaggaatgcttttcaagatg

SEQ ID NO: 112178 - DNA, 533 bp, Heterodera glycines
ttttttggtactgatgctagttttgcagaatgaaaattcacaacaatataagatttatatttttaaaaatctaagtttggtgtcgtattttcttagtgtcgcattttcttgaaatgaaaaactttctctcagtgtcggattttccgctgatgtcgtatttgccagtgtcgcattttcagggagccctctatttgaggaaatacggaattttatttttcagtaataataaaaatttttattttttaataatccattatttctgggcagaagcaaaattttcaattttgttgctatggtaacaaaataaaattcaaacattctcaaatgtttattgaacttgtgaatctccaatccactcttaaattagcccaccaaaaatataatttttaaataattttaattcatttaaatttcgaaatttaatattttaaataaaaaaaatcggacatccttctctcttcaaagaatcccaaattttaaatgaaattttaaattgtttgaatccaataatttaattttttgcgacagcaatg

SEQ ID NO: 112179 - DNA, 263 bp, Heterodera glycines
  unsure (1)..(263): unsure at all n locations
cgattcactaaatgttttttttcattgagcttcgctgtntaggctatccctcaatgaaagtctcggaatgccttatgtttcagttcgtgccattgtttctgttctgtggctcgtttcctctaatgcttttcattgccattgaccgtttaattggcgctatcttcccaattaagtaataattaatttgttgcgttttattaaaaaatattttaaaaatttcccttaattttgaaatactttaggtacagatcggttaaaaaatg

SEQ ID NO: 112180 - DNA, 1003 bp, Heterodera glycines
ctttgcgatacttaaattttttaggggattttcccttgtaaaaacacaagagccgatctcgagttaaaaactagacaggtaaaaaataaaatgtgattcgatagagggggtcaaaatatgggcctatgcaaaattttaagaaaatctgacccgaggaaaatttttttgaccctagtaaaaatttcaataaatttaactcttttttagccaagtgcgctatttaaagccaaatcaaataaaacttacaatattctccagaattttctctttaaaatgaatataaaattattatatttggcctattattgcccgagttataagtctggaaaatttcataaaattatcgatgatgtacctaaccaacgctttttgaatatgatttttattgacacgaaaacttttattaatggaaaataatttttcctttcttctttaaacgaagaaattgaaattaacacacaacatgaggaggatttgaacctgagaccccccttttggtgactaactcacagaccacctacgaaaaaaccaacttaattatacttggagcccaaaattgaatcgccgtgtccaagcttatctgctatagcttaagcttaaaaattagagaccggaaatttcaaatttgcggattccgctgagggattggaactcaaaattctttgcgggatgggatcccgcgggattaatcccgcaaatcccgactgggacccgcaaaatcccgcgcaggatcccacgccggtctctattaaaaataattaatttacaaacattatgccaatttttattctataatctaaattactaattaatgctacatattgtggattatccggaatcctcggatccggaatgcggatgtgtaggtatgtatgtgctgcaaaaattaaggtttagaaaggaacttaggaaatttccatcttaatgttcgaccattatcaaattacccattttcagcaacatgagtattctgtaaaattttctttcatttttattctaaatg

SEQ ID NO: 112181 - DNA, 212 bp, Heterodera glycines
gaacccgaaaacttcgttgaagttatcttttccatttatgtcttaaaaatttggagtaaccatttttatcccttttttccatttgtgcactgtccaaaagtgtgtttgattaattggccccatttacaataaattcactttagaattcgtgatgcttgttctgaacctgcttcaacacgaataaatttcgacgcgaatccatcgacctaatg

SEQ ID NO: 112182 - DNA, 522 bp, Heterodera glycines
gacaaaataaattgtcagctaatgacttgttaattatttttaattaccctttaactacatttttaatttgtttaatctcgaattcgagtgaaagggattattttggaattaattaccgactaaaacaatgcttcttcgcactatatgcaattaagtgcccattatctttgattatttcattaattattaattgcctcctaatttagcttaacgcgacttctcaaattaagaataattttttgagaattaatttttaattgcattttaattaacaattctttttctcaaatattctaatttttacctgttcttgctcagtccattaatgaattttgtctccctttttagtatcggctaatggtcagtgctttttctttcatttgtttcgccggaggggcgggcggcaaaagttggcgcaaaaagcgcaaattgaaatcgcaaatttaggaagaaattgcccaaggcagttacggcattgtgaagctggcgtacagtgagcaggacaaaaatttgtacgcaatg

SEQ ID NO: 112183 - DNA, 86 bp, Heterodera glycines
ggtaatcacccttttatggtctttttttctcctacgaggtggattttatggaataaatttttagagttgggagaacggcacggatg

SEQ ID NO: 112184 - DNA, 82 bp, Heterodera glycines
  unsure (1)..(82): unsure at all n locations
tttttttttgttccaatagcnttgcatcggcccacccttcccggaccgaacccctggacaanaaacggagtattttcggatg

SEQ ID NO: 112185 - DNA, 199 bp, Heterodera glycines
tttgtcagctaaaaaatttaaaaaattaaataaaattatataaatttgatgtcgggcctcgacggataaaaggaaaacgctctctccaaaatttagggtgccattgattgagagtggatgaatatttatcccgaattcgccttgcccattttaaatatttattcgtcagctccgagactctttccaacataaataaatg

SEQ ID NO: 112186 - DNA, 203 bp, Heterodera glycines
ttgcttttcaaatggccaacctgtcgcaaaaaattgaattgacggcacaatcaaaacgccaacaatttaaaaaaataagtacagtaactaacacccaccaaaacaatgtcattttcacttttgctggaggccaacagccaatgcgcggtgacgtgcacttgcggcgaatgggccaatgcttttagaggagaataatacatatg

SEQ ID NO: 112187 - DNA, 761 bp, Heterodera glycines
tgctgtcgtacttttggcaatacttttacaacacctgactgtataatagagcaatcctaaacaattaggacaataaaatagaaataaaattggaaatgcacgtccaatggaaaatgaaatgtaaagtaataaatatttaatttcttctgggcctaattaggtaacattatttgttatctgggcctaatgattcaatgattttggttagttagtgtatggcgttcttttttctttttctctctcctttgcccagaaggaattttgaaattctatacacacgtgaattgaattcttttccttttcttttcactttcattgcttttcttttttattttctctacaaattccaatatattgatttgttctttcgtacattcgtacaatactaaacaaataccaaaagcaacatacatataactattcaaagaccaaacgaattatttagctaaaattgtatataaacaaattaaacgactcgtacaaaagagaaagttcaaagttgtacacctccgtatgccaactttaaactataaattttcgattcggaattggaatttaggaaaagagttgtccatctccgtgtgccaactcttaaacgattgaaataattctcgaaagttgttgaatttcattgttttccagttcagttcttgaaaactctaacgaatttaaggataaaattcatatttgattacataaatatctaattactttaaataattaccgcttgtttgaagtgaacccaaaaataaaaacaaatg

SEQ ID NO: 112188 - DNA, 668 bp, Heterodera glycines
ggaaaaaaaaaagactgaatttttcagaaagttaattaaaaattttaaaaaaattattcgcgttaatttttgcaaaaaaaaatactaaactgaaataatctccattaactagagtatttagtttttgtaatgcaaaatataaaataacattaaaaattaacaataaaaactctttttctctcttcgttcccccgacaaataaaatccctttattttacaattattattattcccccccccctctttttgcgctttattacaccccttccatcccaacggccgactggccataaaaggctttgatttccgcgcgccctggatatataaaaaattttaaatgtgcttgaatttaatggaactttccccttatgtccttggaaattggtataccttccttggaaagggaggttgcccgatcctagccctggcattaacctttgcttcatcgcctttttcccttggacgcaattagtggaaataaagtgaatttaaaagagtgcatttgtttgcgtttgtttttgtatattttcgtttttaattcggtattgggtcaaaatcctaaatatatgaaaaaaattctattgatttagaagggctttcatccaaatgatagaataaacattcgaataaattaattcaacaaaaaatattccgacttgtaaaaaatg

SEQ ID NO: 112189 - DNA, 1003 bp, Heterodera glycines
gatttcattcatgcagtcggttttaaccaataatattgaaaataagaatgtcaaatttttatagacatcaaatgtttttgtaagccaaacagaaatatgcaagagaaaatgggataaatgtgcttttttacgaaaactaatgaccatttaaccggatcgttaaatcctattcctatgaaagccatttatacaccaatttttgcaataaaaaagtaaatgaagttctcgagtgtgccagaatatgcaatggattattttaaaagatttttaatttgcttattttagaatttatttatttttcaatttgaataaaaataattgcatgtttaaatattttaaataaattcatgaaattattcctttcagcttacaaaaagcttgaccacataaaaaagaaacgcatgtcaagaagttgataatgattagattaattaaaaattatagaagaaaaattctgatgattaatcgcataaaagtttgatcatttttcaatcggaaaatgaaataaatagaacgcatataaaaattttaaaaaattagcttatagttagttcagcaaggtttaatatagtgataataaagttaaataaatagacaaacaaataaaataaataaaaaaagaaaaaactaataaaatgaaaaaaattaaaaaataattacatcaattaagcctaagcaactcaacaatctttttgcattgacattcttttatgaaccagtggtacattttaaagagaaataaccaataaatttttatgaatttaatcatattttaaacatttaaaaaacaaataaaaaaaatagtttaaatgcttaataatctttctcctgcccgaatgtccggaatatcttgcaatatagaatgaaaggtgaaatatattactaaacataaattaaactatcggtattattgggttaaaaaaagaaggtacaaaataatacagatcaacaacgggcaaacaggtcaacaaagcctcaatccgggtgctattgaaacacaatg

SEQ ID NO: 112190 - DNA, 256 bp, Heterodera glycines
  unsure (1)..(256): unsure at all n locations
aaattcatccaatcnaatggacaatgctaggctcgctcaggtattccaaaataaagcagaaaagagttattcagtttggcaatttatgggtccccagagaataattttcagaaagtatggaaaagcgcttaaggaaaattcatccaaatcagtggaaaaagattcctaggctcgctcaggtaattccaaaataaagcagaaaaaagttatttttggcaatttatgggtccccagagaataattttcagaaagtatg

SEQ ID NO: 112191 - DNA, 153 bp, Heterodera glycines
agtgtgttttttgatttaaatgcattcctttaaaagtatattttatttattttttctaaaagtatattttaatttttttttccttgttttcttttagaaataaccatccatgagcagttcgcattcagttttaccactttgcttagcgatatg

SEQ ID NO: 112192 - DNA, 411 bp, Heterodera glycines
tttcttgctagaatctgaattacgctagaaacgaaattataaaaaagtgaaaggaattcttaagctttgattgatccaaaaatggttggaatgaacaaatatgaaaaaagttaggacataagaaatgatgatggtcactgattggacgtgtaaactggaatagggctgtatttgatattaacacagcatttttttactctttttacttttttctttaatttttttaactatttggcgaaatgtcagttggcgaaatgtcagattttggcttagtaggcgaaatgaatgtttttggctgagttggcgaaatgaatgtttttggttgagttggcgaaatgaatgtttttggctgagttggcgaaatgtcagttggcgagatgtcagttggcgagatgtcaagttggcgaaatg

SEQ ID NO: 112193 - DNA, 188 bp, Heterodera glycines
cgacagtggctgatttcgacagtgaccgatttcgacagtggatttcgacagtggatttcgacagtgactgatttcgacagtgaactattttcatttattttactgttttccgacattcccgacagtggctgatttcgacagtgacagatttcgacagagaattaaattattattttattattattatg

SEQ ID NO: 112194 - DNA, 84 bp, Heterodera glycines
catggaagcgatcctctcgctttggggcacaaagcttgtgggacgctctcatgaggtacggagtttggttattacacccacatg

SEQ ID NO: 112195 - DNA, 519 bp, Heterodera glycines
taatctgtaaaaaaaatcaataaattggcttgggtttcactgtgtgtttgaattggcgcccttttgtatctttctctaaccactactctctcgtctatgtgtttgtggatgggcgtggcctatcgattaaaagggatagcccgtctggaggtcgctgcgcgctaacacccctctcactatcaatcaataattacgtgttttttcgcaggttcattttatgcttttaacaattataatcataaactatttcttaatcgtaatggccccgagaaaaatcaatgatcaattggtgtttgagaacaaaagtaatcattttttttgggttttttataataattttaaatttaaagaaatggatgagtcgaaacgggaaaatttttcccctcaaaatgatgatgatgtcatcacaattggagacaacaacaacactcaaacactgcttgacctgcaaccggggccctcaaaaaggggacgcaagcctcgcttggacaaatccatgaggaaattgcttccgcaatg

SEQ ID NO: 112196 - DNA, 155 bp, Heterodera glycines
tgtgcggggcaatgaaaatgggactatttgttgggccagctcattagttattttgtagctcccttcctcattaccgtttgtcggttttgcaacgaaattttgtggcacttgcctccgtttacaccaaactgtggcccctcgtgcaacgaaacatg

SEQ ID NO: 112197 - DNA, 139 bp, Heterodera glycines
aaaagaaaatgactcctctgggaaatcaagacaatcttactttaggcgacgcacattggtggcatgggagcagcgcaaagtgcagaacactctcagcgggcacggaccgggcactttcccaaacataacgccaaaaatg

SEQ ID NO: 112198 - DNA, 468 bp, Heterodera glycines
ttcaatgaaatgcattcacataaaatattttctttacaattattttttgaatagtaaaatgaatttgtggcattttatatttataattgtattttttttcataatttatggaaatgaatccggcaaactccgagcaaatttcgatgaaatattcggcggcggatgggacaaaaatgaaaatgaagaaaaagaaatggacaaaaagtcactaaaaattgaacaaaatgaattctcaacggttgatcatatgtgtgaagaaaatggaacagacccaattgatcaacaaaaatgagaattgattaaaaaatttgacctaattaaagaaaagctgaaggaaaaaggaaaatgccaacataaaaacaggccaaaattgagaggaaaattgcaaaattattaggcgcaaatcgccacaaaatatacaaatggaaaacagaattaaatttaaataagattaaaacgaacaaaatg

SEQ ID NO: 112199 - DNA, 687 bp, Heterodera glycines
tgctcaggtccagcctctcccacctgggcctccgttgcctagtaaagccaaaaagcggaaaagcaataaagttgatgaagataccgaaagaaaaagaagcagaattgactctcgaaagagggacttactggcagaggcagcctctgcccctttgccggacgactttgaactctcacaacaacccgggacctcggctcaagtcgagcctctcccacctggacccccgttgcttagcagaaccataaagcggaaaaccaacaaagctgaataaaaatataccgaaagaaaaagaagcagaattggttctcgaaagagattatcttcaccaagtgttaccaaaaatctgccaaaaaggcaaaagaactcgggtagcgatgcactctccgaagagcagcgtcgtcagtttgcagaggatcaacatcttttcagcattccaaattcgcaacttaccaatgagcaaaagagaagacggcttcagttcgtatttaatagaaaccccgccaagtacggtgttcagggtgacaccattttgaacagcgcaggaaacccaataaccgacagcagtgtcgcccaagcattagactatattatcgaacgcagagagggacgaattcctcaattcagacagccaccaggaacaaaattcattcgagatcgaatcaaccgagaacttattttgcgaacatg

SEQ ID NO: 112200 - DNA, 257 bp, Heterodera glycines
aaggcagacactaagcaagttgaaaaggagcgcagagaaaggaatggagagagaaccgatgagttagagaaaaagcggggagcgccctttttcaaatgctttattatcgacacgaaaagtcatcgccgtgtgcctgcacttcgcttcccgcgtttttcccttgcataaaacggacgccaagcgctgcattcgcttcactttccttctttcattcgttttctgtctgctttccattcaactaaactgtgctaaatatg

SEQ ID NO: 112201 - DNA, 298 bp, Heterodera glycines
ttaatttctaaaatatgaaattaatatttgaaatatgttttatatttacatactttacagcacaaatttcacattccttgcatcaaaaattggtgaatgaatcgttcaaaaattatttattttttaaaataaattagatttaggtttaaagctcatgtaacttgcccaatttgtagtgccattcaattcattttggttgaagggcgaggtcaaatttattcaaaggcttttttcaaaattaacgaaaacctatttttgtttttttaataaatttatttttaagttgtaccaaactatg

SEQ ID NO: 112202 - DNA, 524 bp, Heterodera glycines
tgcagttgtgcattcaatgcaatttgcaaaactctcacatcacgtgtttcagttgtccattcatttgccaaaccagcagcccgttgtatacagggccttccaactgggtgagtaaagctgaggaaattcagcgcggcgaactcccagagacgccatgctctgcctattggaagcaatggcaaaacgaatggcagcatgttccttcgctcaaggacatgctttttcaaaaagtcccagagcaatttcgatgggcaaaagaccgttgggtcccatataaaaggaagcctaccaagaggcccccaatcggtcgtgttgtacctgtccctccaaaggacattgaaagatttgcactttatgtgctgatgcgtcactttcctggtgatcccgaccacttaaaactggtcaatgggcagcagtacagcaccttccaggaggctgctttacagcatggtcttcttgaagatgaccaaatttggcacaaaacgcttggcgaggcagccttgcatcgctggccggaccagatg

SEQ ID NO: 112203 - DNA, 670 bp, Heterodera glycines
ttaggtattattttaaatctgagtattttgagcagcaatttaaaaattaccttgggccttagttgtatgtctgggaccccgaactcaggtaatcctgaagaatgggtgtccctaaattttatattttttttaattttgggctcaaacccagtttttagtggttatcgagggtgctgattctgaatcttaactaaaatttgcccaattccgaaccccggaccctaattcgaacaaaaaaattgaatttttttttcaagaatggattttttagggtaaaagcttctaattcatttaacaactatttagtttgatgtaaaacaatgcttaaattgttaattggacaaaaatgcgcaatttgcgtcctaaatttgaccgattttaacgaatactttgcaaattttgccccgccccgactccaaaattgtacaaagttatactcgattgctgacaatccctgttattttttccactcttacacagggacaaaaccattgtttatgcgttaatttgtgtttttgtttgtgcggtttaattattggcgttttaatctattttgaatttattaaaatattttaaaaatcggaaaaatttgtaaaccaaattccaaaccaaagcaaaaaattttattcatcaaattttcttctattacaatattttatccttcacaatg

SEQ ID NO: 112204 - DNA, 544 bp, Heterodera glycines
tccgtctttttcttgaataaaatttttgaaaaatatttattaaattgattaaataaaaaatatatagcttaaatttgtttttatttgaattaagccaatcaatatgtcaagcacagttttggtcgttaaaaaaagaaaaatagcaataacattaaagttatatcgcttaaaaatttcaaaaagtttaaaaaaagtatttttataacggaacctttaagtaaatccaagttttaaatggattttgcaatttaattttttcataaaatctttaagtaggcactatttaggttttttaaaatttcataaaaataacctgcgcaataaattagaataacatacaataacaaatctaatccccattacgtcaagggaagaaatattggcatttattacgtaaattagacgtcaaattatgcatatgttaacaaaatattaaaatatttacgtaaatattatttggacgtcattttctgaaaaaatcatataaatatattttaacaaaaataagaaattaaatatcatttaaattcattcgattacgatg

SEQ ID NO: 112205 - DNA, 141 bp, Heterodera glycines
atttttaaatgctaaataataaaagttatttgtttattattaatttttattaataactacgttaatccgacaaaaaaaacaatattacattttctttgtttttttctgtttacaaaaacaaatgacaattaatgggcgatg

SEQ ID NO: 112206 - DNA, 71 bp, Heterodera glycines
aaaaatgggggaaaacgcaaaaatattaaatccaaaaaatgagtgaacaaaattgttaatccctaaaaatg

SEQ ID NO: 112207 - DNA, 569 bp, Heterodera glycines
atcggcgaaccggcttcggcgaatagtcatgtacccccccccccccccccccgcaccccggcacccccacatttaacgcattttgcgacggattttgtgaccgatttgaaaggaatgaatgagtaaatgaatgcatgggttggtgtctgcttcaatgcctgaaattgaatgacgagctgacccagcgttgttcccgtaatccctgggaaaatttcggatgagaaaatttaaaaaaaaacgggcaagaaagtgaaatgacaactctaccaattttgatgagatttgctagtagaatttaggaaattgttttgaaaaagtgaaatttgatgtgaccgacgaaggcaaacgcaaccaaatttcaagaaaggtgccccattagccaaattttttaattttttcacctacttggttacgtatgcgtaaaataaacccttgtaaaatgttagggaaatatttattccaatcgctatgttttatttgtgacacaaattcaggacgaactccaccctcagccccaacaacaagaccaacagcaaccattgttgctgttgttggacgaagacgtgatg

SEQ ID NO: 112208 - DNA, 62 bp, Heterodera glycines
  unsure (1)..(62): unsure at all n locations
aatttaaatttaaaatatatttttatnnntatttgcaggcaatcactgctgagacagaaatg

SEQ ID NO: 112209 - DNA, 499 bp, Heterodera glycines
atttataaaacctacattatttagcaaatttaagtaattatcaatatttgccgcaattcatctcaacatgtatttacaatcttttttgaattaatattttttgttgttgtaaagaatgtaaatataatgtatgctaaaaaataccaggaatatatatgattataaaagtttattccataaaattctctccctctttttataactttcttttattttctttctctctctctctctctatatgtataggcgcgctgtcaaaatgtccctgcgtcaaaatgtccctgcgtcataatgtccccgcgtcataatgtccctgcgtcataatgtcccccaagctaaaaccagtcaaaatgtccccaattgaaattagcgaaaaaacccaaaattacatatttttatcttttcatactatttgttattgtaaaatttactcatttaggctcaatattaatcgtaaaaagattgaaattatccaaaaaaaaaagtcgtaagcgaaatg

SEQ ID NO: 112210 - DNA, 96 bp, Heterodera glycines
agtgggcaaagcatcaaactgacgcataattatgtgactaatgtgatcaaattgctcaaggatttggaatggggtgagagggcattgtacaacatg

SEQ ID NO: 112211 - DNA, 505 bp, Heterodera glycines
ggtcaataaaattaaaaaagcatttaaatttcaattctaaattatttctcataatttaatgctttgatggcgccgacgaattgtgccgtcccatcgatggcactccgttccacgagcagtgccggcactcggcggtggtcaaacagaagggtttcgtgccgcgccatttgcgcccgccatggcttaattcgccgctttttgacgacaatgaactgagcagcggagaaaacacgtgctacgcatgttataaggggacaaaagcgagcaatggcatggcaccgggggaagagtactgtgcgtgtacggtaggcatttcatacggtaaaactgttaagctgtgccatcttttagtacaaaggtcaagtgccgaacgagaaattcggcgtcgtttttggcacattcaatggaagtcggcggatttgtctgagggatttgcaaaaaattgcatttgtaaaaataataaaaaattattttatttatattaatttgatttcttttacagatg

SEQ ID NO: 112212 - DNA, 221 bp, Heterodera glycines
aaaaaagagaaacttccgctaattttaacaaagaacggggatatgcaaacttgagattaaagaataaaaaaaataaatgatatataataatcattttatatttttttattctctatgttccgttttaccttcattgttctttaaactttacgaatcttttttaaccaaataatttgtgttcttataaaatgacgtataacaattaaaaatttatagaaatg

SEQ ID NO: 112213 - DNA, 1003 bp, Heterodera glycines
tattataacagtcaaaaagatcatttaagctctacatacaatatcaaaaattctgtttaaaatacagaccgtaattccaaatttaaatacacaaaattttgtgcttgttgaacttgtgctcttcaacttaatgccgcattacaaaatcggcagctgtcacaagtcaaaatcccccgccccattcagctaaaacagtgggataacacagggagggagggaccgacgacttaggaagggtacacaaacaaaagaagaagccgagaagataaagcggaggaggagcaagcagaagcagcaaaagcggcagtactcaacaacaaaatgggactaaagttggggtgggggagggggaaggccgatcagtgggcccattccgcttctgatcaatgagagtgggcagaaaagaggggcgtcgggggagggagggcaaggaactgaagcgcagggagggttaagcagttacgaaaagtcgagaaaatgtgagtcggtcggccgggaaaatggattcatttttccgattttgccgatgaatgggccccttcttccgccggggtgggagaagcttcttcatttactcctcagcacaatgcgcacaaagagaaagcagcagcggaagatgttttcgtcgcttttgtgcgggcgattcctttcattttccgcctccaaaagtttgtcacacaaattccgctgatttgtgagatgctctgtacccacaaacctccgacagattaatgtgtgtgattttgttttatatctttttttccgatttattcatttttcacgaaaaaaattttaacgtatttttaggttcccatttcttttttaattcaatggctttgtttatttaaatatgctttgaactttcccgaaggaaacattttaaagcgttttctcattattatagataaatttaaaatcgatagcacaaaagttgttcatcatctcgacaaattgtctttttcctgtgctgttcggcattcgtaacttctcttgaaacaaaatg

SEQ ID NO: 112214 - DNA, 229 bp, Heterodera glycines
ttcccgatgacgagctatttgtcgcatttgttgaagacgtttcaattttgagaaccattgcattgaaacggaacgccagaatttgttggcgcacgtcggattactatcaaagcgaaagggcaaaggcaggtacgatattggagagaccgtacggtatttgaaactacagtatgaagcataccttggcgttgtgcatttgttgaaaaagaaatggaattgtgagaaaatg

SEQ ID NO: 112215 - DNA, 950 bp, Heterodera glycines
aaatgggcacttcgccctcccctggtcacagtcctaatcatgttattggcctttgtccatgaagcgcatgccgcgccgcgccctctttcttgtgacgagcaaggaatttgggtgtttcttaaccctaaggccgagaattcgctggtctgttgtgaggggatctgtagtagcaggagccatttaaccccttatttgctcccccttcccccggatttgctagccagtggttttgaatgccacctttcgtactcaattttgggggaaaaaatttcaacgcagattcagtgcgaccccgtggaagggtgtaatctcattaagtgctatttctgttgggagcgggtccttaatccccattgttcacccttcctcctggcctttgccattgggacaattgctggggcaattggtgccgtgattttcatatttctttgtttcttgtggaccgtccaaagaagtgctgtgcggggtcgatggaccgggttattttcaggtattttttggaaaaaccggcgcagtcccgaaccgactgccaaatggaggcggagtcgcgtcataactgaggaagggtcagacgaggacgaagttctatttcagcacgaggacttagcgggcgggatcatccagcagagggaaataggtccggctgaagaaaggccaactcagtcccggactcaaagagacccgactgctcggcctaaactcttaacccgcttcggatatgcactttcccctcctttactcgggctgctattcgccttattttttatcccatgcataaaagcgggactagaagtggtgtccgtgtcagccgacacggaagagtgcgttgtcgatcacggcagcactcagtgacgttttgacagtgtgacttcacttacactgctaccagtcggccaaaagccaatcatccgcaaattaacataacaaaaacaattatgaacaacgacatg

SEQ ID NO: 112216 - DNA, 281 bp, Heterodera glycines
tcacaaagggcgattctcaagggaccgcagcaaaaagttgggaagcgcattactcaacggcagaggcacctttggttccggcggtgtgccccttctcgacaaaaagccttcaaggccatcattccctttgtgtgctgtccgcccacgggggcggcggtggcaacggccaaagggcgggcgcccaagtggccactctttctatgcccacaacggccattgtcgtttattcccgtggcccctatcgtctgccaccaagccattcgttcccacccccgaccatg

SEQ ID NO: 112217 - DNA, 77 bp, Heterodera glycines
taattttttttatcactaaaattcattcattaaaaattataataatttaatatttatttctaaatttagttacaatg

SEQ ID NO: 112218 - DNA, 228 bp, Heterodera glycines
tcattttttgactcaaataatatctgatcagaagcgatgtaatgattaagaaaagcgaaaaaatttgccgaaaatcagtcggtatttcgcaatagtcctatgtagatggggaaggcagtgcctgtcggcaccggcgtaaaaatctgaactttaataaaatttgttgacgcaatttatcacgaaattcgccaacttttgggacattgattcgattttttttaaattatg

SEQ ID NO: 112219 - DNA, 113 bp, Heterodera glycines
tcaccttcacttgtttaatgtttattcgcagcaattctcacgcaatatttgcatagaaatttttgaatttttgaaaaactatcgccatattttcatattatttttaggtcatg

SEQ ID NO: 112220 - DNA, 345 bp, Heterodera glycines
ttcgctgaaaaatggggggggggggcaattagcacaatgaaaatgcacataacaaaacaattaattacctaaataaactgacgatttaagtggcggtggaggaggacgaataattaagtggatggaatgaatgaacggaatgaacgtggataagcaaaaagtgtgggccttaaatagcaaattttttagtcggaagagtcaaatttttcggataaattcatatataaaaggcacaaaaaattcatttggttgccattattttcatcattcattaattatcggcaattcatcttcatcaatcatcccttctctgtgtacaacgaaaacgacgacaattgagcaatg

SEQ ID NO: 112221 - DNA, 186 bp, Heterodera glycines
ttgctaaaaatggtgaaaattttaaataagggggagctttttaaagattttaattgcattttaaaaaattaatttaattccgtgccttaaaaaaaattttttggcgacacttttcaatttaaataatttgcttgtcattaaacaaatttttttaaatttttcagttttcttccgcacgccgccatg

SEQ ID NO: 112222 - DNA, 163 bp, Heterodera glycines
  unsure (1)..(163): unsure at all n locations
tttttgttttggttgacttggccattttggcttgtcgcttntactgaatatcgaagatacatataaatgtaatagttaaacattcttcatattgccatttttgaagatcatcaccgaattccactaccacaaatcgcacgtgccaacctatggggtgataatg

SEQ ID NO: 112223 - DNA, 856 bp, Heterodera glycines
aacaaacgactcatttcggacatatttagccgcagaaacgaacgatggattgcgagaatcgttcagttgattgaacagaattcacagaagcgcactttcttcgcttttggaataagtaaattggcaggaccgatcgtttctctctctctctctctctcacccccccccactctcctctctctctccctccctcccactcttcctctctcgcctcaccctctttacactctctccctttcctttctctctctctcctctctcaaatagctttattactctcactcattaatcggtccttccttaccacaaaaggtcatttgctcggcaatggttccatcgtgcaactgttgcgattgcgcggatattccgttgatgaacgacaatttgagccaaatggaaaaagaaaagaaacggaaaatgccatcgtaaaaatcaatgccaatcagcaaaagactgacacagggaaagaagaagagacgaggtaaaaaaggcgaaggcattcctttggagatgggcacagctcttttggccaattgaactttttatttcattttcctaaataaattttacccattttttggcggggagggggggggggggggggtaacgtacccctcataccgtaccgccccctccctgagattccctcccccagcaattctctgttttggacacttttcgccgtcgcaattgcaattccatgtgcatttgcactgtttggagtgatcaaatatacggaggattgtgaacagaaagacaaatcacagcaaaaggggggtacaatgcaagtgaatacggtaaaaaaaaaaggaggaaatcggaaatgctgaacattggcattttgagaagcaaaatg

SEQ ID NO: 112224 - DNA, 333 bp, Heterodera glycines
  unsure (1)..(333): unsure at all n locations
gacaaacaaactatctaccgcgaccaacgccngattgtccatgacaacagtttctgaaacaacaataatcgtgatcggcgctcttttcggcacgaggatgtcaaaagcaaacgcagaaccgacaactcgaaagatgagcggtcggacaaagaccgaacattttctggtaggtaaatttaaaactaaaaaataaatttcatatgaaaagttaccacttttggatttcaaatcaaattttgggtaattattagccaataattaaaagaccaaacccccattttttgacgaaattttgcataattcataaaaatgcagcttcagaaaaaataaatg

SEQ ID NO: 112225 - DNA, 1003 bp, Heterodera glycines
tcttatcactcacaaatcactgggggaaaattaagatgatactgatgattagcgttcttgttcgattttggcgctagtgcgatatttattctcatggttcttggaaagtactcaggaagtatttcgatttttgtaaataaaccatcagctgatataaagaaaagcattcttgtctgtccttttccaattatattgccatttcggcatcggtctaacaaagctgcgcatggctttgggaaattcctcaggaattaattttcgttgtctaaagaaatgcactagtgtcgggcattttgacattaaaatgccattaaggcaccgttgtagcaatgatgcacgtggtccttggaaattcctcaggaattaatccctgaatttcttctattttcttatcactcacaaatcactgggggaaaattaagatgatactgatgattagcgttcttgttcgattttggcgctagtgcgatatttattctcatggttcttggaaagtaatcaggaagtatttcgatttttgtaaataaaccatcagctgatataaagaaaagcattgttgtctgtccttttccaattatattgccatttcggcatcggtctaacaaagctgcgcatggctttgggaaattcctcaggaattaattttcgttgtctaaagaaatgcgctagtgtcgggcattttgacactaaaatgccattaaggcaccgttgtagcaatgatgcacgtggtccttggaaattcctcaggaattaatccctgaatttcttctattttcttatcactcacaaatcactgggggaaaattaagatgattctgatgattagcgttcttgttcgattttggcgctagtgcgatatttattctcatggttcttggaaagtaatcaggaagtatttcgatttttgtaaataaaccatcagctgatataaagaaaagcattgttgtctgtccttttccaattatattgccatttcggcatcggtctaacaaagctgcgcatg

SEQ ID NO: 112226 - DNA, 697 bp, Heterodera glycines
  unsure (1)..(697): unsure at all n locations
tccctcccccatcatcgccactgttgggagtgggcaaaagaaatttttttctcaatttcgttggatgattgatagggaaatttgaatatgcctttgcatttcggtgcgcttctcccctgccaggcaccactctgttattgcccactgcgatgggagggcaaaaatggactgaaagaaaatgaaatttcttcgcgagtttagttttgattgacagttcagtgtcataaaaaaagaaaatttgaaggaccaaacggaattgtcataaaaaattcaaatgcgaaggacgaaagaattgcgattgcaaaaaaaacaaaaatagtaacgatggacaaaaaatttttgtgcgtttgtgcacaatttaaatgagaagaaaaaacttgtgcgtttgtgctcaaattatgttgggcaaaaaatgataactgaacaaaaaactttgtgcgattgtgagcaattatgattgggcaaaaacatagcaaaaaacttgtgggtgcgtattttgtggaagaaatatgatgaaaaaccagaataaatagagatgatggtcgactatcagtcaaaatgggcagattattaaccaaatgagcattagtttttgtgtaaaaaaacatgtttnttgtgagcattttggtttcggtttgccgtttgtggggctatntaagacggtagaaagttattgtgatcgtcattcgagcaaatg

SEQ ID NO: 112227 - DNA, 1003 bp, Heterodera glycines
gctcttttttatatgaaataatttcagactaaggcaaacaatctatttttgaaaaatttagtgtcgattcataggggtatatttttctgaaaattttttggttgattcttaggggtatatttttcgaaatttttttgagtcgattcttaggggtgtatttttcgtttttattgcattttttaaataaattttggacaaaacgccaaaataagggcaaaaacttattttaagggcgaacaactaaaagttgtaatttacataaattaaaccaacaatttattcctctaccacttcattaagttctatttaaaccatcaaatgctcgaaaaccaaagttcaaaattaataatgatgggggggggggggggaaaggtcaatatatatgtacgtaatataggtaataattattatgaaattttaaattttaactcattaaatttagaggaaaatgtggcgtgtgtttgcttaaaattgttgttgtgtaagagaagagcgagagatagagagagagggcgaaaggggagagagagagagagggaggggaaagaaaggaaagaggagggtaagggggagagagagggaaaaagaggagagagggggggggagacttgaatatgttaatgtaaagaattactgaatgtacggctaaaacctttccttttttaatggcgagtgcgtcatcatatgaagcaacgtgtgaaccgtgggccaaatgggaagcaatttaattcatgtttttttttggaaaaaaagaaatgtattttggtaactgtttgtttttttgcctttctttttattcttggccaaatatttctaaatttaccaaaaacacgacgagattagtacaaggcctttctttgcaaacggaatggagccaagcaaataccaaataatacacgcaaaactaacacaaactaaaacattgaaatttagccatgccccaatatttaaaaaaataaaatagttaatcgaaataaaagcatcacaagacacagcgacaatg

SEQ ID NO: 112228 - DNA, 312 bp, Heterodera glycines
  unsure (1)..(312): unsure at all n locations
cgcaacggaaagaagaaatgtggcacaatcctttaaaccgntagatcatttgggnttattttaatttttcatcttaacaatatgccataaattttcgctgttactataatgagctttttttggatgatgaaaaatacttaaactatttttcggaaaccctaatttactgtttgccttattatttttatttttttaaattttttgtattaaaaacaagctgatgttattttcttactcgtttttttaatcgtttgtaaggcgttttttgttcgtttggtctgacttcattcatcagtggttttttaaatcatg

SEQ ID NO: 112229 - DNA, 638 bp, Heterodera glycines
aaattcccttttagcatcattggaacaaactcagagaatcgataaattcggcggtgagtcaaacgatttcgatttgaatcccgaaatgccatttgcatgccgttgggctgtgccgtgccccacccccccccttttccaacattgctccctgccttccaccgcttcagttttcctccgctcatccgcaagcggtccgcccgtcgccgtccatcgtcgtcgataggctttcgcccaaccaccgcgcccctttgtcgctgctttcgcccttctcgcgtctccgctcgccggtcgctgcctttgcgcgtccctctgttttcgtgccgcgcctcgtctcgcgctgcgcttccaataaccaatgcactgtctcttccgcttcgtccaccgtcgcgcctcccctcacccattcgtcggccgccttttcctcctcctctttctctgtttcccgagtttcctccacctttttggatgccatgcgatctcagctcagagtgggctttggcattttcaatggccaatttcacttccaactttggcagagagtgcagcgttctctgttggatgagctgttgggttggaatgcgtttcgcgcccgtgcccaaatccttccatcgcttcaattagtccttaaccgttcaatg

SEQ ID NO: 112230 - DNA, 225 bp, Heterodera glycines
ataaaaaaatgattatgttttaaacttctaataaattgtgtgatcattttttattttttatttactggatatatgtatggaaagatttttagaatgggtccgttcactgaatatttccgagaggagctcgaaaaggtattttaattttgcgtcaccaatcacatacctgacgtttatgagtcattttattggaataaaactcgtaaagacctcaaaaaacgaatg

SEQ ID NO: 112231 - DNA, 277 bp, Heterodera glycines
caaaaatgccaaaatatgtacaacttatgcgccaaaaacacgaaatatgtgccatatgtttttatgagccaaaatgacaaaaaatgtgtatttaggacaatatgagaaaatctacatcaaaaatcgctcgcagaaaatgttatttttgggcttctctcgacataactaagccacataacaaaatatgacaaaacatgaaaatcccatccctaataataataatagataaaccgaaaaaaaaaatgaaaatggaaaggacaaaaacaaagtaaaaatg

SEQ ID NO: 112232 - DNA, 427 bp, Heterodera glycines
ttgcgggacaccaatattgtctttttatttttcttaaattttcacatcctccttaaaaggaattttacaaattatatactcaaagtgcttatcagtatttttttgtttagttttttgaaaaaaatttaaaatgctaagattgatccaattcaggttgtccaacacggagcttgtattaccagccgccgctgtccaatttactgcgccataggcaattttaaatgagatacttggagtgcagcatgtgttatgcttctttgtggttttatgatgaatttgactttttaattaaattttgattatattatttcgttcatttacaagcattatcttttatgcgttttttcgtgttatctgttttgaaaattgatttttaaatcaaatttgtttagaaacagatttatatttgcaataacattgtcaaatg

SEQ ID NO: 112233 - DNA, 222 bp, Heterodera glycines
ttaggcaaacttatgtttttttacaaaattgttttgactttatttttttaacattttttgaatttttgcatatattttggtattttttgaattttagcgcatatttttacattttttggatttttaacctcatattattatatacatatttatgttattgttttacaaaacagactggctcaacttatggcgaaatgttttcaattgcgctcaaaaggcatg

SEQ ID NO: 112234 - DNA, 1003 bp, Heterodera glycines
aaattaaatttaaaaaattacgcttttttattttgaaatggttttagatttagccaattttagatttttcagaaattattcgctaaggcgattcaggtgtaattaatgtctgtaaatttatcggtttttatgatttggctatatgtatttaaacattccctttttattaagcaaaacatttcaaaattttaattcttcggcaaaatgtgcaaccgatggctgagaactgtgcaactgttccttctaaaactaataaaatttataattataatttgaaaccaatcgcttagtcaacagatattcatcatgaaagcaattatttttgaaagaaaaagccattaaaataatttgttttagacaaacgctgatcacgggcaataagaaaaataaaaaatttaagtaggaattgaaaaggaagaattttcattttaggttattctcgtttttctatatttaactttagtttaattattcctttgcattttctccaaatttcattaattggttaagcacttgatttagagaaaaatgaaaattaatgttcgaataaaaatgcaattatcatatttaatccaatccctgcttatgaaaaatcgtaaatgattaattaattgatcaaacagatgctgatttgatagtcaatggtcaattgaactaaattaactcttccaatcagcagatgctcccccccccccccaattagttaattggaggaaagagcacgagcaataaaatgaataataagacggaccaaccagttatgtgataactttgattagtttaacttctgatttgctttctcccattaattttatcctaacaaagaaattgccttccccatttcctttcttaaatagttaaattataaatttatttttaaatttttgtgtaaatttttatttaaacgaatttctaaaaatgcctctgatttgattacttttgtatttttttggttcggaattgcttgtcagtaataattaaatgataatccagtaacaaaatg

SEQ ID NO: 112235 - DNA, 234 bp, Heterodera glycines
tttttctattttccttcatgtcttttattcttttcacatgtaaacaaatcatttgaataaacaacgatttttctgaccttaaaaatattgatcatggaattgcatttgcatctttttaaaatgttttccacatttttaattattaaaactttttctttgaaaatttgttttgttttttattgtcaaagttttttaataaaatatttttttttaattaaaagcacataatcaatg

SEQ ID NO: 112236 - DNA, 1003 bp, Heterodera glycines
gggctataaattatatgcactatccctaaaaatatgccccaaaaccctgaaaaatgcataaatatgcacaaaaatatgccttaaaaaatgaaaaaaatgttttaaacctcaaaaaatgccaaattgtgtaaaaaaaaaatacagaattgactttaaaaacatcaagagaataggttaaggagtcgaataaaaaattttgatttcaaaatttgtatatgcaatttagaaagcatacgtgcttattatgtgcttctttttgaaaataaaaaattcaaaagagctgtgtttgtttttgagccgcttttctaattaaatagatatttttcaaaagttggaaaataattttttatgcaaataaaagcaacaaaaaagatagttgaaagaattgtgtggctttggggagggggtaaaatttgtacaattgaaaagaaagataggtagccaaaagtggaaagattttctgtttggttatagcaaatgatcaaaagcaacgggaaatggataggttggttcatttgagatgctcggttctcgaaataagaaatttctcggaattcttggtttaggaggggtctgtcgccaaagcgactgagaaaatggaagaaaattgaggaagagaaatttaattgatttaaattggataattttaaatattgtgattaattttattatttaatttgtgatctttgaaattgtgattttgtccctccattgaacattttgtacatttttagcattagtcactctttttgttgttgatcgctctgtccaaattgctccacctacgctttttctttctatttaaacacgcacatttctcactcctcacatcttatacagacatcttattcattttatattatatttattaaataaacttctttcttatttgggaattattttcccccttattccaccccgccctctctccctcgcgccttcccatttttgcccccatctcgccgtccgagccaacaagtggtgccgctaacaaacaaagatg

SEQ ID NO: 112237 - DNA, 62 bp, Heterodera glycines
cgtcgaatcagccgttttgtgggagcagtcccatttggattcccaagcaattgctcaaaatg

SEQ ID NO: 112238 - DNA, 66 bp, Heterodera glycines
ttctattctcgctttacgcacgagaagcgcaatgccaaagcagcaaaagcggtttcggcgccaatg

SEQ ID NO: 112239 - DNA, 242 bp, Heterodera glycines
taattattttgacaattatttcaattttatatataaagttttcaccaatcggaagaggatacaaattaataagccgaaatttaattacaattattatttcttttttattaattaacgacaaaattttctcggcgagagggtcacataaatgtgacaaaaattcatatgaaatttctgatcagcaaacgccaaaatttaatgaatcacaaaatattattgttcataaaatcacaaataaaatg

SEQ ID NO: 112240 - DNA, 249 bp, Heterodera glycines
ttcagtcaaccagccctgaaatatgttttttcataaaatttctcaggcgccagcttcgaaacgaaattctcagcttattaccggggccgataggcgcaaccttttattttgaatttgataaattaaattaaatagaaattcaattttaatcattgaaaactctaaaagcattcaaatttttaaatttttcagcgttaaaactaaagcattcaaattttcaaatttttaagcgttgaaactcccaaaatg

SEQ ID NO: 112241 - DNA, 372 bp, Heterodera glycines
aatatgtttgtctaattcaccgcaattatgtacataattaattaatttaaatatttaataaattataaatgattataaatagggatgatatttttaggcaaatgcctattttttcctgagctccccgtggcctgaaacgcacgaaaaaatatgtttttttgggctgttgttaagctacttttcgagttattaacgcctattttctagtcttttatcccctatactaatttggtgctgtatgtacgtaagtttttaaaattgttaacaccaaagttcaaaaaccaataatactaatggtatatgattaactttaaaagtgccggatcgatggcagttgtgccaactctcaaaaattagattggtttaaaaatg

SEQ ID NO: 112242 - DNA, 244 bp, Heterodera glycines
acttaccaatggagcaaaaaagacgacggctgcagttcgtatttaatcgaaaccccgcaaagtacggtgttcacgatgacaccattttaaacaacgcaggaaacccaataactgacagtagtgtcgcccaagctctcgactatattatagaacgcagagcgggacgaattccacagtttagacagcccccaggaacaaaagttattcgagatcgcattaaccgtgacctaattttgcgaacatg

SEQ ID NO: 112243 - DNA, 1003 bp, Heterodera glycines
atgctaaacgatttgatgaattcgaaaaaagatatgaacgtttgaaaatttgtttttcttataactcatgaaatataatgtataagccaaaaaatggctgtattactgaatgcgttatatttttctctatcgatatgcaaaatttggtgcggatttaacgtgcaggaaaaaagttaaacgtcacgaagtaaatccggtttttctctattaacagagataaaaaaatagtacgccaaaaagagaaatgtttttttctctgcactctctatttattggtccatgtctcattttttgaaacggtgtgtaaaatgggtaatacagagaatacatgtcaagagggtcccaggtatgtgaatttccgacatttctgggcccgaaattccgatttcgaaattttttgggccgccggaattccgattgacgctgccgaattttttggtaaagacaccaaattttcggcaatttgttggagaatcggcaatttatttttggaaactaaaaaaatggatttcgcctatagagttggggaaaaaaattaatccgggaatggggttctcgcctttttcccgttcccgtaaaagtcccatccgggcaaaaaagatgggaaggttatttccggttttcccacggaaatcccgttcctgcccaactctactttattctcagaaggcggccttatctgttccggtttgacctaactgtgaggctttagcctcttattttttcccgataaggctaaataaaaacgaggctttttatggctttttgaaaattttgaagctttttatggctttttggggaaaatctcaaaaattgtcattatttgccaaaatatgttaacaatcattccaaagatttctaattttattttggcagccaaatttaaatttttcactacctaatttttttttcttcttttcttcaacttatccgaattacatctttataaaatgcaaaaataataaacaagaccaaacgagataaattggtaaattaagaaatg

SEQ ID NO: 112244 - DNA, 469 bp, Heterodera glycines
ccagattttttaaaaaaaagagcaattttggagatttgaattttttaaatttaggattttagtttcgcgatcgattatttcaataaaattcttatttcttccaatccaaataaataatttctctctgattacatcggtgctaggacaaagaggattttctaaaatttaccatagttataaaaaatttggacaatatttaatcaatgcgtagcaaatgcaaaattcatcaaaaccaccctataaatgaaagtgattcagcggcaggtgctccctcccaattgtcactgcccccagggtaagtaccaattttcttcacaatttcgatattttttcaaattaaatcattgtgcattttgtcatgtgtcatgtgtactcagctgcaaattaaaattgaaatttcttaataaatttgccaatgctttcattaaatatttaattcaacttccatttgggaaaaaattcaaggatg

SEQ ID NO: 112245 - DNA, 234 bp, Heterodera glycines
actaggaaacgaaaaaattttagcggaattgatttaatcctttggcttaagagcagagaagcatttcatattgttgtataaaaattttgaggagagaaagcagaattatccaagttccactttttcacgaaaggggaagaaaattcgaaaacactgtctattacaaactatggaacatgaaattctttgcaagaagttgattaaaatagtgaggcagcagaaaaacaaaccatg

SEQ ID NO: 112246 - DNA, 199 bp, Heterodera glycines
ttcgggttcgggattcgaaataacacgaccctgagttcagattcgtgatcagcgaccccgaaaatctataaaaattggttttaaaaaatttatatatataaaaaaaaattttatgggatgtaaactgcacaagtaccccaaatttttccatttgttttttcagcagcaatttcactattttttttttgtttgattaatg

SEQ ID NO: 112247 - DNA, 331 bp, Heterodera glycines
atgtattttcccgaaaaattaatattttaattatatgtaattaattcttaacaggaccagttcgtcaaatctgtcaattggcgcctgataatgtgtatgatttaccaaaatatttattttatttttgtatatcagtggaattaaaatttcctattttgcctataaatccggagacacaacatttattacggctttttcagtttatttgccacacaaaaaaatttccaataaaataattattttgttattttttcacttatttttggaaaagtttgtatttattggactttgatcattttagaattttatttatttgtttagcaatgcgatg

SEQ ID NO: 112248 - DNA, 803 bp, Heterodera glycines
aaagaaagaaaaagaaacatttttaagaactgttttttactcaaaatgacaaaagaaaaaaaatgtaaaacaaaaacatttcatttttcaaagcatttatacaacacaacacaatgttaatattatagtattttcttagtgaacaaactaaggagtgtcctctttcttttgttaaatattttatacaataaaaaatgggttataagtaaggaagggatgcgagagaaatttcccattatctctccctttcctttcttttactctcttttcttttccattgcaatttactctctttttttcccactccctccttcacccacacacacgcacgcgtccaacagactgctgctgcacagcagcacgcgtctgttcactgtatgcccctctcacccgccgctgcccgcgtagacagacaatcaaacagtgcactattttcccacctttccctcgctctacatttttcaaatacattttttaacgcaaaacaatttcaaaacgccacacaacattcaaaagatggcagatacaaacagacactcaactttaatatgtaggatttttccgaaaaatgccaaaaaggcaccaaaatagcaaaatgccaaaaaggcattaaaggcacaaaaatcctgaaaaaggcataataaaattcagccggtcgcttaagatttgaatttatgttcaaaattgtttaaaaaacctcataccaagctaatatatccacattatccgtttaaaatgaatttaattcctaaatcaccattttttagtaaaattcttgcatttttcgtctcaacctaatcatg

SEQ ID NO: 112249 - DNA, 282 bp, Heterodera glycines
gataggttagaaaaaaagcaaacataagcttaaaaattttttagagatttggttggaacatgggcactactctatagactcccgccctcactttttgacacttcacgccgagtcgttgcaaagaagacaatggaggaatttttaaaattaccatctttttttcgcatgattttttataataaatattaatttgaaatgcctttttaaaaattggtttatgctggccaaactattcattcgatcctaatttgctattttttcgtagaaattcagaaaaaaatg

SEQ ID NO: 112250 - DNA, 65 bp, Heterodera glycines
ggtgagtcatcgtttcacgattgctcgaattttcacttataattttttacaggtccctggcgatg

SEQ ID NO: 112251 - DNA, 78 bp, Heterodera glycines
ggtacaagggttcttttctttgttttagcttttttctcttttaagcagggacatggaaagaaagactgcagtcagatg

SEQ ID NO: 112252 - DNA, 1003 bp, Heterodera glycines
aaaacacataaaaattttcaattgtaaatgaaattattattagagaccgcaaaaaaaggcaccaaaaatcgcgaaaaagacactataataggcacgaaaaaattgaaaaaaagcacgaaaatcccgaaaaaggcatttaaaaaattttttctaaggttttagggagcaaaacacgtaaaacttaaccaaaaacttaattttggtcatttaaatggttattaaatattttataatgtttttcgaataaggaaaatttttaaaccgagaattttttttatcaagaaaaaaatgaatttaggcgatcaatttttgagaaaatttttcaattcttaggggtgtattttctgaaaattttcaagtcatttcttaagggtgtattttcccgattttattctatttttaatggaattttcggtaaaaacgccaaaaaaggcatttaaggcacgaaaatcctgaaaaaggcaaaaaaaggcataataaaagtcaacatagaagcctcaaaccaagtggaaaatgtgttatttatgcttaatatatcgaaacaagtgcgcagaaaaaaaggcatatgcctcaaaatgcggtctctaattattatatattttagttttttttcagaaaagaacaaatttgaaaaccaaaattttttatgaaaaaatattaaattttgtgggtctagttttgggaaaaattttcaattcttaggagtgtattttctaaaaattttttcggaccatttcttaggggtgtgttttcgtttttattgcatttttgttaaggattttttcaaaaaccccaaaataggcattataaaagtcatcgtagacaccccaaaccaagcggaaaatgcgtttttcaagtgcgcaaaaattttggcatttgcctaaaaatggagtccctattaataaaagacaaaatgaaaattagaaatttttaaaaatttcaaataaaataataattaaaattattcccgttaaaattttttttcagaatttattaaaaaatg

SEQ ID NO: 112253 - DNA, 84 bp, Heterodera glycines
caaaaaaaaattatagaaaaaactgcgggttttaatattttttgttcacaaaactcacctggtgaagaaatgaggagataaatg

SEQ ID NO: 112254 - DNA, 74 bp, Heterodera glycines
attttgctacatattataaatcaaatgacaattatttatgtttcctaggaattccatttacactgctcgcaatg

SEQ ID NO: 112255 - DNA, 292 bp, Heterodera glycines
aatttttgaagaaatcataataattacaaattaggcctaattaaatttttaaatgccatttagcttactgatctgctacccgggcacattgatgcgcaatcatatgatcaacgagttcaaaaagatgtccgatttcagattgaaacggacattccaagtcggcaacaaagaagtaatgggaattttaattaaaaaatttatttaaaattttttaattttcgaacgattctctttcattggagtgcgcccaaaaaacggaacaatttgttggcatttcaaacccaaaacaatg

SEQ ID NO: 112256 - DNA, 713 bp, Heterodera glycines
ccccaaacggacacttgaaaaaatcgatttttttgtttcctgggcagtccccccgaaccgatgcgcccagatttatggggagaccgaatccttccggaatagcttccctatagcctgtactttaattctgcgttggatttttgctccccataattgtttgagtaccccaaacggacacttgaaaaaatcgatttttttgttttcggggcagtccccccgaaccgatgcgcccagatttatggggagaccgaatccttcgggaatagcttccctatagcctgtactttaattctgcgttggatttttgctccccataattgtttgagtaccccaaacggacacttgaaaaaatcgatttttttgttttcggggcagtccccccgaaccgatgcgcccagatttatggggagaccgaatccttcgggaatagcttccctatagcctgtactttaattctgcgttggatttttgctccccataaatgtttgagtaccccaaacggacacttgaaaaaatcgatttttttgtttcataaatatttttttcagaaagtgctctaaagcgcaccaaattttatttacaacttaattttagcactctgatgctttagtatcaaaaaggaagatggagaaaaaattttttaaaaaatttttccttatattttggttatatcgttttgcttttggtggggtgcttggaacagtggaatcatg

SEQ ID NO: 112257 - DNA, 280 bp, Heterodera glycines
  unsure (1)..(280): unsure at all n locations
tccgtcgccgtgccgccctcgcaactgttcaaaaacccttttgacatcccacgaaccaatctgtgcgcccagctggacaaaatgcggatcaacttcgagcagcaagtgcgcagcagcggcaacgggtgcggggcggacgtacacgtgttccaaggcggacccccgggacagaaagtcaaactgcaacatngtcggtgagttgtcccacccctgtcgatttgaatccggtgatttctggaaaatttaagaggatttggcctgcttgccgatcagcaaaatg

SEQ ID NO: 112258 - DNA, 222 bp, Heterodera glycines
ccttaaattggcatatcaattagtaccatgaaaagcgccgaaaaaattaataaattttcattttgtgtgaaatgaataattaattagtgccaatcaaaagcgccaaaaaaactaattaacctatttttaatttgaacataaaatgagaattatttagtgcagtcaaaaacgccgaaaaaattgattaatttacttgtcataatcaaatttgtagacacaatg

SEQ ID NO: 112259 - DNA, 667 bp, Heterodera glycines
agcacttgtccattttttccattgtttttgttcttgttctgatggattacccaagaataatcgaaagtgaactcgcttttcccatcccttcggggattattgtcagcgggccttcctcatcaggcaagacccagctggtccttcgcctgttacggcacgccaacgtattgtttgatccccgccaaaggcaataggcatgtgtaaaagggttttatgtgcagtcatttttgtgtctagtgtgggcatacggtgagtactcgacgcagattcccgagctagagcggcaggaagttgtccctcacgcaggtgcgccgtctgacgaaatgttgaaaaaaaagctgccaaagccttgtctgattgtgtacgatgaccttatgggtgacattgaggccaagaagcaggctgacctgtacacgaaaaaaattgtaccacaacaatttttctgtgattttcctcacccaaaatttgttcgataaggcactacgggtgccaagatccaacgcccagtacatcttcctgatgcagccgcccaacgccatgttgagcacacgtaatttggccagtcaaatgttccctcgggagcagggcattctgatcgaaacttaccgacatatgtgtgctctaccgtacggctacctgttcgtgaaccttcactgagccaaaaatg

SEQ ID NO: 112260 - DNA, 1003 bp, Heterodera glycines
taaatcttaatgagggaaaatagtttactcaaaagtaatttcgaaatcggaaggaagacatggaaaagtgactaatagcagagagaacataagagaaaccgtcgatcagtcagagtcagcagatgggcgagggggaggggaggaaatgcgagggtcgcatggagcggcggcagggaaaaaggaaaggatgagtcatcgcaaaatggcgtgtcgccttcagcagacagagaaaaaaaatgcagcgaagtaaatctccgcggcacatcactttcttctttgtccctttcattcacttcaaactatttcttttttctttctgtggtgcactaatgagaatatttcgaaattctgccttttttaataacttttcgccagattttgaattttcttgcagaaaagtaagaataagagaagggatatacgttctatttgttttcctgacctctatatggtctgaaacggacgaaaaacatgctcaatactgaattggcttaatttttacttttttgaatacgttttgtattttacacccctaaattgaggttttattaggggttggggtcaattccctaccgccaattccgagggcacctcgtttcccccccgccgattccccccccgcatcgtttcccccccgccgtttcccccccgaatcgtttccccccgagaaaattttttttttaaaaattgctaacttagaaatttttcaagaaaaaaatcttagaaagttttttcataagaaaattctaagaaaaaaaatttttcgagaaatttttatggtgaattactaagatttttcaaaaaaatttccaaaaaatcgctgaaaatttctcgaaaattttttttttcttagaattttcctatgaaaaaaatttctaagggggatacgatgcgggggggggggggggaaaatgaaagtcaccgatacggagaggtgcggaacgagctgtccccatcatttatgtgggttccaattttttaaattggttcaggcgatgacatg

SEQ ID NO: 112261 - DNA, 1003 bp, Heterodera glycines
  unsure (1)..(1003): unsure at all n locations
aggacggatcccatccctgctattaccacataaaatttatataaattaatgnaatatcattagctttcaattgatgtcgtctttttccgttttttaattaccatgacaacaagcactattcaaccattcacattccattcatcattctcaacaacacttacttttacccatttattttccattttgccactgatttggtgttaaagaaatgtttgagccggcttgtgaattccctgtcaaaacgggtgcctcttttctgtccaagaatttgtccgtttttcataacaaggcaaaggggcacacattcgctgcgtatttgggcaaggattcggtgggtcaaagaaaacaattggagaaaaacctcgaaatatttaatagtacaaatcagggtttgccaattcgaaattgattttttgatggtgtttaataagcccggacgggacttttggtactgagaccggctttttctctaacaaaaatttctcaattaaaattttggaaaactttcaaaaaatccacaacattttccgctactggccttataatttaatttgaatgaaaacgccgactggcaatggcattcaaaaatgcccgtttgtgccatttttagaacgggcttttcgttataactttctttaaacgaatcgggtattaatcaaattatcaagcattaatgttaatagcagagatatttttgagaattttttcaaaattcccgtccgggctctagtgtttattaatgtaaaaattagcacaaattccaataaattgatatttttctgtgcaaagtgttaacaattgcattaatatttcactaaaagcgatggtacccaaaaacccgggtccataaaaacagttgggatgatccggtctcataatcacaatctggacctgtggattcattcacattagggtttgtcctgataaaacagttttttaaagaaaaataggaaatttttccaatgaatgggttttgtccattttggcgcagattcaaatgatg

SEQ ID NO: 112262 - DNA, 187 bp, Heterodera glycines
ccccattataaaaaaggtgttctccaaaatgattaaatatttatttaggggcgattaaataaaccatttcccttattacgacgaatatcgcccaaattagtcccaaattatgactaagtgcgccgttgagaaggcgtccccctcctccgcctcctcccccccgccggcgttactctctccgatgatg

SEQ ID NO: 112263 - DNA, 696 bp, Heterodera glycines
tttttgtaatctattttaaataattagggattaactttggttaaatgagtaaaatagctagacttgtggcattttataattgacggataatggaaatggaaaaagcacaaatgaaatgaaataacataattttaattattttattaaaaaatcatattttttaatggcaaacaaatcttggcctgatgagctgcgcactgccatatgaagcacaagacgacagggcacctaaacggctcgggaaattagaaaagtttattgatctaccatgaagagctaaaagagatgctgtcaggataaacggagaccaggatttgatcaaccgccctgattaacagcaaaaatgagatagttattgattaaaaaaaatgcaaaatgttagccaaattttaaaatgaatagtgagaattagcagatgtcggatttttggggtgttcgcaatttttacttagaagcataatttatgaccttgacctatggaatatccgcttattcgactcatttgcatgtgactttattttaaattagcaggtgtttgatagaccaaagcatcaaggcatatcaatgtgtgcttgaaatttgggcatttaattgcgtcattttatgtcctgcgacggcaatttcggtgcttgtgccctttttttctccttcgttcattatgcattcattattccatttttaaatataattcaaatg

SEQ ID NO: 112264 - DNA, 298 bp, Heterodera glycines
ttattcaggtactctgccaaattctcagctttacagttcattagcttggataaggctgttgtcagtgggggcatctaaatgactgacagggaagtgaatgataaggggcgtggcataggagggcatactgtggatggatttcgaaatcctcccgtctggaggtccctgcgtgctctcacttgagtgggcgtggcctattccccacgtgacacccccctctccatcacgtcacatacagtacccccacacttttcccttctcattttcatcttaacacacaaaaatattcctcgaaatg

SEQ ID NO: 112265 - DNA, 431 bp, Heterodera glycines
actgcgctgcctaacggcggtgcttaaagtgcgctacccccccccgaatgattatcaatttttatttttcttaattccaattcgaattcgaaacgcaaaaatttaatcataattcatgtggtaaaaaatgcatttaaaaataaaaaaaattcttgaatttgcttctgaattttttaattttaaatagaaaattactttttcgaaaattttgcacaaataagaggcggagaaattcaactaaatttttattaggattttgatttaaaatgttgagaggtttaacaaatttgtacactgaatgttggatcgtcaacaccaatgagaaatgactaacagaaaagagggagaaaagggcgttggcttaggaaaatagcttataataaaggagagacgagcagacgatgagtgagagaaaaatagtggtaaaaatg

SEQ ID NO: 112266 - DNA, 78 bp, Heterodera glycines
actgtaatttgttgacaatatttttatattgaacctatatttataagtgatgctatctcaacaatttatgatgaaatg

SEQ ID NO: 112267 - DNA, 981 bp, Heterodera glycines
ggtaaaaaaaactgaatttaaaattataaaaatggtaatttatggagaaataatacgaaaatagaaaagcataaaatgaaagggctaaaagtaacagaatttgataaataaaatatatttactatacaattattaatcttaagactaaattaataatttgggtagcatattaggcacaaaaatcataaacacttaaaacggcagagaaatagcaaaataagatttaaaagggcataaaacgcttgaataggcacaaaaaaagcaaataaatttttacattgatccaaaaaaatctttgaacaagcatgaaaaaccatttcaaaatgctcttaaaaaatctgtaataataattattatgctgacttaattttgaagctggtcaaaagtattataaaacaacttgatcagatcactccttcgtgttgacctggacactaaaaaatatattgaaaatcggaaatttaaaaaaaaacttttggtaaaataagcattataaaaatcatatacaaaccccaaaccaggagcaaaacgtttgaaaaacattctttttgacttcaataaattatataaaaaatcaattcatttgtatttgctcttaaaatctattcatagaacagggattttttaaatttgtttgaaattcactttttttttgcgatttgtttgcggttgattttgagtgatggtagcgaatgaatggccgtcccatttgatcattaagtccccccccccctctcaaccgatcactcatttaaatgaaattcgatccaatatttccccttttcgtgtttttccttccttcctatgactaattgctgcttttgtgtggccattcacatggccaatcgaacaatcaaaagcatcgcttccccccccccccccgcaaatcattcgcccattgatcactcattctgctgatcagctaattttagtgatcattcaaattttatgtcgtttccgatcattctaaaataaaaaatg

SEQ ID NO: 112268 - DNA, 106 bp, Heterodera glycines
tcatctgaaacaacagtttgctttttacggctacacaagcaccccgtgctgcggcgatttccatctgagatgcttcgaaaaatggtcacactttgggttttgcatg

SEQ ID NO: 112269 - DNA, 1003 bp, Heterodera glycines
cccggggcttctattgttcaaccccctccaaagggggcttatattcgagggggggcttccaatcgagggggggcttttattgttcaacccctttccctatataaattcttaaaattttttgctttctgcataatggtacaatttaaatcttaatctgaaatttttgaattgaaaagatttttcattttttggcccttggaaatttaggcgaatgtttgaaaattcataattcacttctaaatgaatcaattaaagtgcaaaaaagcattaaaaatagagaaaaatctggagcattttatacctttttagaattttctatcttcaaaatgaagaagttattacataaattttggaaaaattcgttttttgagaaaaaaaattaatagcgctgttctgaaaaggttttttgaaaaacatgaaattcttcctctataagcttctgtttattctatatttttataagacttttgaaaaaaagtacaaaaataaactgattttggaattcgggatcatagatggaagcaactgctttttttgagccatgggttaagatccacttgcctgtaaaaatgttttttagggtttttgggaccactaatcaagaacttggcatccattttgcccaattccaaagcattgatccgaactcgaaaccccaaaaataatttttaaaaaatgttgcaggcatgtggattttaacccatggcccaaaaacccatttttaacaaaacaaaaatatattgggtataatatttctatatttgcttgaaaattttttagtgattttcatcaaaatcttttccagtgcaatttattaacagaaattttttctaagctattgcttcgctattagacaatttccaaaaaagttatacacgaaaattgcgaaaagtcgaaatttttgaagttttttcgtaataaaatttttccaggcttgaaaatcttttcgcttttggtaaggctaatagagcatgttaagagctttcgagtgataccaacaatg

SEQ ID NO: 112270 - DNA, 68 bp, Heterodera glycines; identical to SEQ ID NO: 99057

SEQ ID NO: 112271 - DNA, 61 bp, Heterodera glycines
tgggactcaattcattagcattacaatcatcggaactcaatctcaccgattcttttacatg

SEQ ID NO: 112272 - DNA, 395 bp, Heterodera glycines
cgtgccgaaaaaaggtggtttgtgaccgttttaagatccccaggattgtgtgaaatttgttgcatataaattgcatatctattatttatttattattaacattattatattattattattaaaaatgtatacaagctatatttctaatctacaacttatatccggatgttaatgaatggcatatgtttataaaaaaattattatcttagcatagaccggatattccatgcatatgattacatcattgacggaaatgaatttttacgaggaaacaaagtaggcaaaatatattataataatgtaaacaaaaattttattataaaagcaaacgcaaatttaaataaaatattattctaagaaaacaaatatattttttaaatatttttgccaaaatg

SEQ ID NO: 112273 - DNA, 1003 bp, Heterodera glycines
caaaatatttccttttgctctcaaaatgatttactcttgagtcttatgaaatcaaccttttaatgcttcctataacaatagggtgataaaaatcacaatcattaaaagctcaagattgttttaattccataatatgaccaaaaagctcgattgatccatgaatttaattcccattatttttcgttgactgccttttccaaataaggatattaaaccgaatcttagttttgttgttatcgcggtgatgctttataataggttttggaatgaagctagaggctgcttctgacattggcagtgggcatcacaagacgttgtagcccattcggcttcttctccagtagatagtaaaatttagaatttttttaaaaattttgttttgtttgcctgaagaaatacgaaactcaccaaattctaaagatcgccgcaaaatcccatcaataacaaaggatacagtcggaaaagtcagcatcatgaaggtgttaaaccaataaacgaagcatttttaaaatttaataagacggaatggaaatgcagggaaaatgttgcaatggctaccaagaaaatcaatttcttttttctttttttttgttacggtattttattaaaaaaaacattaagccaaatataataatctgttcatattttaaacgagcactacgggtcgggaccagagcgtttggacccccgtttttgggccccggggtcgtttgggcccccgtttttggggcccggggtcgtttgggccccaacccaaaaatagaaaaatgtgcttttttaaaaattaagattctaaaaactaagcctgagggatccctcgccacttggcataagttaggtttaattaacattgctcattttttacaattttacttattccaaatcctattattttttaatagttaaccaatttgatgtacattctgatttggacatttttcagttcattagttttaattttcaatatacctttagatatttgttaaaaacagtttttataatg

SEQ ID NO: 112274 - DNA, 237 bp, Heterodera glycines
tttatgatgattactgtttttctcaaaattttcttaaaattcactgaaaaaattttcaaaaattttttcctgaaacttccttataaaaaaatttctagtttttcgaacttttctttaaaaaactatccggtaaatgattgatgtgatttatttaccaaaattctgtagcagcctcaacatctgctgccacagtacgcctaccaccaatatcccaccgtagtcgaaaccattccgatg

SEQ ID NO: 112275 - DNA, 138 bp, Heterodera glycines
gatcattgttgatgatcaaaaatacgagctttttaactctgaagtccgttgcaattcattcccttttttaatttttttttttttttaaatttttaattttgtttttttccattaaagttttctccggtggacaaaatg

SEQ ID NO: 112276 - DNA, 508 bp, Heterodera glycines
tcgaatgtcacaaatccaatagactcgtgtatattggtctataggctagcgggggcacgcagtgatcccatagctaaaaaactgtaatcggaagggactttctctttctctcccattttccctcccgccccctccctccctctctctcccctgtcactctctctcctctctctctcctctgtcactctctctctctctctttttctctctctaactgttacagttacagtatgccgttttaaggttgcatggactcggcttcgtgacgatgctttgctcgcggtcggcaccagcacttttaccttggacccgcgttttcaggcatttattttgcgtttgagaaggcttgcttatccgttgttaaggtgtccaaaccacggcggaagaatgaatcggattgggtgttaattcttcggagaccctcgtgacttttaggggggaatttggagaataatgacgataattaaggcccactgatcagggctgttatctttgtggtaagaaaatg

SEQ ID NO: 112277 - DNA, 578 bp, Heterodera glycines
atccttttttttaatattgaaggaaagggattgtgtttttagtggactaacccttaagctgcttgaatttaattttgcggaaagaattccttttcgcaatggcacatccgcgcccggcataaaccttttgttggaaaatgagcaacatttgcgtgttcatatttgtgctagagaggccagggctacccttttatcaaacactctcttggttggaggcacttaccggttcatgcatttgaatgtgagaccgaagcgcgattttggacaatctgtgaactacactttatctttcgcatttggaagttcagttcacttgattcgggttatcctgttttatttatttatttgtcattttgaatttaatgagtttaaggggccgacagtagcatttaatccattaactcttcgaagtccgagcgaccgggttcctcaatttgtttgtccaaaaaactaaataaaataaaatagtcgatggtcaaaaaaattccctaccccctcaacatcagcagcacagtggaacgatttcgcacaatgatcgtccacataatcagcaaccaatgcaaggtagagacacaatg

SEQ ID NO: 112278 - DNA, 52 bp, Heterodera glycines
ctctcattgcatattttgtttgtagacctctgagcacacttactacaacatg

SEQ ID NO: 112279 - DNA, 1003 bp, Heterodera glycines
cactggaggggatgactgttgttatggggacatctttccttcattttggcccctgttgctttttgctcccacagcactttgagctcccacagctattttcgatcagccattacacagggtttcaatctcaaaattttaacagtatacacaccgtttcaaaaaacgagacatgaaccaataaatagagagtgcagagaaaaaaacatctctttttggcgtactatttctttatctctgttaatagagaaaaactgaatttacttcgccacatataactttttttctactcatacaatttacaccaaattttgcatgtcgatagagaaaaaaattacgaacaaaatgtaagggtttttaaaagcaaaaaaagggttaactaaaaagttattcgagaaacaaaatttcgaaccctcatatctttttcctaatcaatccaattgcttagcatttgcttagaaaaagcttctccccatcaagggctttcgaatgatgtcaagattgtacaatttggttggtaaaaacctccaaaaataattcccaaaaatggtcattttttaattttttgcacaaaaataaataaaaatattcatgttgcacaacggactcgaaccaacaccctttgtccctttactatcttacaaaaaccactgagccacacatgcaaatcttcttggaactgggaggccaaaattgaaacggtgtgtataagaacagttaattaacatataaataggcgccgctggagacaattaaaaaaatgtaacagattcataacatttctgacaattaagcatataaatttttaaaaaaaatctgttttaaggtgcattcgaatttccgtcaaaattgttgggaagaaaactcttatcaaaatgatatcaaaatcaaagatggcaaaagtttgacggtccattgcacgggaaatgcttggggtaattttttaattatttaatataaaattaatagttttattttaaaagtgtttcgttccatcttcgcaatg

SEQ ID NO: 112280 - DNA, 341 bp, Heterodera glycines
agatataataatatatggtatatctttaaaaaacaaaattaaaatgaattactcacattcattatcaatgacaacataattcttgtaaatcaggaatttataaactaatgcattgcacaagttgatcagatcactacttaaggatgatataaagtgatcaaaatttttagcaccaagaggaattgaaaaatgaactttttggaaaaactttataaatttttcatattttcattcgcattaacttgcttaactccgaaaaatcacatataaaattcaatattcagatgatcatccaatttaagaaaaaattttttttttgaaaattaaatccagaaattatg

SEQ ID NO: 112281 - DNA, 313 bp, Heterodera glycines
  unsure (1)..(313): unsure at all n locations
gtcaatggtcttcggtctcgttactgnagtaaatgaaaatttcaactctcgagcagctctaatgggtgttactcaaaaaacaaattgaaacccctggttttttgaatcatttaagtcatacttttctttaaaaattacaaattaatttaatccttaataaatatttaaataaaatatttgtttttattttatcattaattgtttgcttaggttgaattgaatttggtgcccagcttcgacgtagtcaactatgtgttcacggagttgaatttttatttgtttgcattttaaaaatggcagtgctttcagaatg

SEQ ID NO: 112282 - DNA, 1003 bp, Heterodera glycines
  unsure (1)..(1003): unsure at all n locations
anttnaaacttttctcggcggcgcctatcggcaccgccggcccccccggttccccaaaagcttttggaaaaagcgccgtaaaaaaggcagtttaaagaagcaaaaattcgtcgcttggcttaaaagcgcaaaaatttggcaatttttggtgaaaatctgttatcaaacttcactcaaatttaaaaaaattttacccggcggcgcctattggcaccgccagacccctgctcaagaatttactttgaaagaaaaagcgcgacgcagaaaatttttattgattttttcatatgaataaaaaaattttttattgatttttgaatatatattagagtgccacgggaccgggacctggtagcggacaactgagttcaactgagtaccaaggtcccggttttgaccgggaccgggactagtcccggtttttcccggttttcccagccaaaaattcccggtttttcaacccgaaaaggtcccggtcccgggtttacccaaaattcccggtcccgtggcactctaatatatatttaaaaaaatttaattattaacctgaatcccgaaacccgatatttttatcgtcccgcggcaaccctgctgcacatattaacatccgtaaatatacctttgccctaaccaatatccaaagacaacccgagaccgacacacataatatttaatccacaaattatggatttaattttgtttctttttttatttaattttgttgaaaaataaaatatatattatgtgtgaaatgcgtaaacatcaaaattttatttgtcactggtggccctgtccctttttattttttctttgttgtcaacattcttttgggagtaaacaactttataaacgaaaagcactcgcggctaatttccgcagaaagtgcattacattgattaggcaattatttttgaaaatataactcgcttataataaaatgtattttaatttattagcccaatttaattattttttgaattttcaacttaacttcatcaaaatg

SEQ ID NO: 112283 - DNA, 237 bp, Heterodera glycines
tgtatgaaactaatattttttataaaattttcaaacatttgaaagtacaaaaaaaaaattcgaaacccacgggcatggaaaattctgatcaaattcagcattgaaaaacagcttcaactgcccaacacggagcagttcggcacgggcaatgagcaggcgatcaaccaccagctgagccaagtgcagatcacactggacgtgctcaccaacgtcacgcatcatctaatgcccaaaatg

SEQ ID NO: 112284 - DNA, 1003 bp, Heterodera glycines
agagagagagcgagagaagagaaagcaccatcatcaaattaccattataaatgtttttccgcacccaaagaaatcgaaaattggaaattaaaaaaaagatcgactcatttgttgccatgatttctgttgaaaatgattaggacagaattaatctatcgaacgataaatatctgaaatttagttaattagggagtcaattatagctaattataataattttcttaaagaaaaaataaataaaatctaccacattggaatggattcaaaaacctgctaatttcattaatattaaggaaaaatttttcaaacaaagacaaaaaaaaccttgcttccatatgtgaggcttaagaaatggacgaggctttgcctaattttctggctttttgagatgaagatgaggttaactttttttttaaaaaagattttctgcaaattatggcttttaaattttcatattggaggttactaatttgtaagatgagctgaattggttacgatttttatgaatgtcaataacttttttggattaaattaaattaaaatatttgtgtcgtggggcggaatcgaacccacacctcttttacattgaccatctcacaaaaaccactgagacacagataaaaatactttctgaaccgggagcctaaattttcgatgttttttcaaacaaacaaagcttacttctttattaaattattgtaattatttttgatcaaaaagaattaatggatctatatttttgaattgtttttccttgggaaaaaatattttaaaatatagtttttttagatttttattttattaatttattatttaaaaaaatttgtctgcgttttgtttgcgatgcataggcaattaaataatatgaataaataaacgtggattatcctcccataattaagaaaataaagaaaaaattcattttgactttttaaataaacaactcttatttaaaactaattcaattattattgaaaattcattttaaaaaggcattattatg

SEQ ID NO: 112285 - DNA, 562 bp, Heterodera glycines
tttaaatattgacactctgaaattaaataaattggcaatgaacctattacattatttgaaatccaatataaagggcaaatgaactcttaattaaataaacagatcctttcattctttgacaattactatattaaaagataaaatttttaattcaaaattagtaaaatagataattaaaaataataattagctccactgactcaaaaaattttttaagaataaaaagaaaaaaattcatattaaaaaaattttcaagcattttttaaatttttatacttaatgataaaatgttaaaaatgacgactaattttgggcgtttcgtaaaatccgccattttagcgatttttttcgacaaaacatggcataactttgcttaaatgcaaccaaattttacattcttgataccatacgatagccaagctttttctctattagccttcaaaatttaaaaaaaaatttggtcatctttgtaaaaacttgtatgagaatatgtactatttctgccataacctatgctaaatttaataattttatgacttccattttttgattctaaaaaatg

SEQ ID NO: 112286 - DNA, 916 bp, Heterodera glycines
ttttattgacttcattgttttgaaacaaaacaaaattttttttactatttctgcgtttctgatttttggcgccgaaacgaccctggcgccgaaacgaccctggcgccaaaactggcggacgtctattcgaatcctacccaaaataatgaaccaatacattatgaaatgatttcaataaaagtctcgtttttaattaaggatgtttgcatagatagccttcataaaatgtggattatttatttggattccttcagattcgagttgttttttaattataataaaatttacacgaccataaaaatacattatgataattagaacaaaaaataaacaaatttaattttaggagttaatttaatattttgtaaaaaatttaactgaaacccaaaaattttggaaacgaaataagctaacaaagaaacttttagcgcttgataaactggttttttctttgcccaggaaaagcatgtccggattaagtccaggccataagcattcccaaaattaaattttcaaaggaaaaactttaaatttttgttggtctacaattttggaagatttttttccatatcttctttaattttttattattttttaaagtcggataaactgcaaagagccatactttaagcataaaacaaaatgactgtgataatttacaattatttttcatcagaaaccaaaagcaggcaaaaatcagctgattttgtcattggcattatcaagccaaaatattcacataaaacagaaaattcatgtgaccagtttgggccggattttccgacccaaccactcttaaacataggaaatgcaaagacgtgggaaaaccattttttatacttttatttatttttttgaatttatgttttcttaattaaaccgtagtaaaaggcctatttttcagagtttattcatg

SEQ ID NO: 112287 - DNA, 215 bp, Heterodera glycines
tgttcgatttttggcactaataaaattagaaaataaaataaaattgcacttacaattaggagattaacagcagtgagttcgccgcttggtccgccattctctttggagtcatttgtctgctgctaaatttggcaacactttttgcctacaaattgtgccgttgtcaaaatgccggtcttcaaaatgatgccagttcaaaaattgagcgcaaaatg

SEQ ID NO: 112288 - DNA, 1003 bp, Heterodera glycines
ttttgaaatttaaaaagcgcgacaaatctggtttccgcattttaatgtatacataatgagttttattaaatataaattttttccatttatttagctgacaatttttaacgtgatgaatagggcaaataaagaattattttaaataaaaataatatttatgaagtattaatttttcatttaaatttaaatttggatgactaaaataattattttaattatcaatcatataattctcaaggattcattgaagaaatatgcaccttctttcacttaaataatacacttttcttaatttcgtattaaaacattgttgcgcattggcaaagaaattcagttaataaataattttttaaaagccaatttattccgatattttttaattttagattgttttataaaatgtaaatctttgtttatctggctattcttctgtgcataattcgactattttttattttataattccatcaatcattttgaagtgattcttgagcccatcaattgtaaaattatgcagcggatatcattcattcgcgataaattatttttattttaagatattttattaaatgaatttatttattaacgcgcaaatatattttaatgtatgatgaaaagaaaaatatttattacctaaatttaaataatatttaaaaaaaattctatgtattgtaatgaaacattgattaatagggatgggacatttaaattatttttttattaaatttaattatttgcactatacgtgcttaaaaaaatataccttaaatttggaaaaagaaaaaagtcaaactgtcaaaatttcgcctcagatacaactgaacaaatttaatattgattatataccataatctgttagatttttcattttttcataaacaaaagtttttttatgctttaattattacgtccattaggagccaaatatatattaattttctgcttcatgttcgtttgctgcattgagcatttaatttgcttaagctaaactaaagctgaaatg

SEQ ID NO: 112289 - DNA, 54 bp, Heterodera glycines
ttgaggttttttggcaaaatgccaacaaaattaagtttttatttttgaaagatg

SEQ ID NO: 112290 - DNA, 979 bp, Heterodera glycines
  unsure (1)..(979): unsure at all n locations
aaaaaatttacgggaacgggaaagcgaaaaaacggggctggatccacgaacgggactcccgcctatttcccgttcccgtaaaaatcccatcaggcaaaaaagacgggaacgggattcccgtgttttcccgccggactctactgcaaatccataaaacattttttttctaaatttgaacttgttagttttgttctttcttgtcattttcctatgaatctttgtttgtttctttgacccattcgaatcttcattgtcttaaaatgtcttggtgtttgatttgtttgattgttaatgcaatccattttttagcttcacacattgaattatttatttccatataaaaaaggaacaaaatgactgatggacaggaggaaaaccagcaggtcactattatttatcattttgtcaatttgaagggttaatgggtaaatttgctgactataatagctgttttaatgggttttcttggtgtcgtctttttgggcatggtcactgtatagaaaagttgtgtaagacgtggtcattggttcttttttcgaagtttttggtttttcaaaaatccaaatccgcccttcccatttacgttttgcggagatggttctgtcatcacattgccccggcgtttgagtggggtgggaaggttaacgtgggcaaaacagaaacaccgtaaaagctccgtgggaaggcgcgtccctccatttgccgtataaaacaacggtattcacattccctgactcattctaacccaaatcaaagtccatcccacgactgattttgctctaatgacccctaaaccactccccactgaacttctttttgaaatggtccattttacaaaccctaattatgatttcactaatatttgtactcctcttgggttgtccgtttctttatgcttccccgcgtcgtcaaatggagaaaatcttattttgtggtaggaaatagagatttagctaattctnttattccttttaagatg

SEQ ID NO: 112291 - DNA, 440 bp, Heterodera glycines
cgagacggagcagcgacgggtcggcgagctcggcggaattccgctgggacagaaaacgctgagtctgcgcaatttaacaagcgccgggggcagcaaacgatttagtgccattgaggtactataaaggaaatgagtacgctaaaaagaggaagagagagagagagagagaaggtaatatgtagtgagagggtgagagtgagagagagacagcatggtagagagagagagagagagagagagagaaagtgtgtgaggagtgggagtgagaaggggacatggtagttggttgagagagaaagagagggagagagagagagaaagagagggagagagagataagggaatatggtagagagagagggaaggcgattacggtagagagagagtaatgcgtaagagtgcagagaaaaatttattgcttatttcaggacgatgaaatg

SEQ ID NO: 112292 - DNA, 792 bp, Heterodera glycines
cagtaagagataatgtcacaatttttcaagaaattttaaggtctgccgcaaaatttttttgatcttttgatcccgaatttactgaaatttataattttgcattttcctctccaaaatatcaaaattgataatagaagactaaaaatataaaatttgatcgaataaattggaaaaataactgatagaaaaatgttcatatttttgacactaaaatcttattttggacttggtgtttatattttgaaaaattttcgatggaagccctggtttaaaaatacgtagaaaggagtggggttaaacagaaatttttgcgaacccgtctcaacatcgaatttgaccaccattttttgcggcgctctttttcagaaaaacttttggggaacaaaggggtgatgagggcgacggtgttaggagccgcgaggaaaatttttttttgaaaatttgaaatttgttaacagatttttcctaaaaataccaatttttgaaattttgggacattttttacaaaaaaaaaaaaaattgaattttggggggggccggcggtgccggtaggcgccgccgaaaagtttttcggaatttttaattaattaatattaagaaaattgttcaaaatttcataaattttcaacctttccccccttcgttgttgaattaacttttttaatttttacaacgctcggagtccccaattccccgaattagtgtcggggagtcggggggcaaaatgtcgggggccggggacctcggggggcgacatgtcgggtgtcggggcggggaataggcccaaaaatg

SEQ ID NO: 112293 - DNA, 1003 bp, Heterodera glycines
aggccaaaaaaactaggttgcctaaaaaactggacttggacaggaaaactgaggcctgaatccagaggtccataaggagtttaaaatgaaaattaataatgaaaaaataaattgataaaatatttaatgaccaaattaaatattggaaataaaaataaaaattaaaaaatataaattttaattattttaaattaaaattgtaaatttttaaattatttttaataaaataaatatttttcattcattccttcaccttcacattaaaatagccagcaattgtcagattcgattcacacaacaccgggtcatattctgatcggcactgaggggaattccaactgatttttaaattatttaaaattattttaatagtgtaaagcgcaatttatcacatccgtttaatctctttctcacaccatttatccccgcttttccccatctttattccgttccataagtccaactatttaatcgggagcattctctcgataaggagtcagttgagcgggcagttaatcggcgagcgagagccgagagcagaacgcggaggaattattattaatgtaattggcaaatatttatattattattttgctccttctcacccatccccgcacgcgtattagatctagtaggcgcccatgggattaccaatttagggaggtcatttatccagggcccggattttggcttattccttattcccccaaatccaatcctcaattttcctcgtcccttcctcatattttggacataattttccaaattgagtgtataaaatttcttcatatttgctaaatgtaaggttaaatatgacctcaaaaatattaatattgtcttcgtttcagggtcttactaatcagaaagatttaatcatattcgtaatattcttaaattttgaactaatatttcgtgattttcttttaaaaatatttcttttttttgtttataatttaatattttatttaaaaatatcttccatttcttttattaatatctgatg

SEQ ID NO: 112294 - DNA, 138 bp, Heterodera glycines
aagtaaatttaaaaaatggaaaaataaaaattaacgtacatttacaatagtacgaccatttcattgtggtcgaatgcaaaggcccaactcataacgtggacaaattctacgattttgttggcaatcgcttgcgctatg

SEQ ID NO: 112295 - DNA, 1003 bp, Heterodera glycines
ttgactcttatttaaatcagagttcccaagtgtcctttttttaaagattgtcctttattttaggcttccccaaattttaaatttttttgtgcttaattatttatttcgctgataaaaatgctacaaaaactcccaatttcaaaaaattttcccggcggcgcctttcggcaccgccggcccccaaaaacttattttttgtttttttaagaaaatggcttaaagccgtaaaaattggtcatttttggtgaaaaattgttaacaaatagtgtaactgcccaaacacaattttacaattttctgaaattttttttcctaaaaaatcacaaaatttggacaatttttgggcaaaatctgttaactaattgcttcaaatttttctaaaaaaatttcccggcggcgcctatcggcactgccttcccccccccctatctccaaaagtttttttaagaaaagcgcgcctcaaaaaaagcgttttttaaaaacaaaaaaaggcgtctactggctaaaaatcgcaaaatttgtcattttttagacaaaatctgttagcaaatcgcatttaaatattacaaaaatttctcggcagcgcctatcggcaccgccggcctcatatactctactttcttttttggaaagaacgcgcagcaaaaaaaaacatttttattgattttttaaattttgagtaaaattttccaaaattattttttgtcggcaaaatgctgattttgaaaattttcagttgacaggcaatgtttttacgctaataaaatgttgttttaaatcgattttcatgtattttattgcgtttctttcgcgctaatattagttttagaaaaaaatctttttttgagggtccaaatcttagttttagtatcgtttgtcctttttttgaaaaaaaaacttgggaactctggataatcttacccaaagttcaaaatccaatttctcttgtgtcttccctttgaaggattctttcaaattcccgaattttattcagaaaaatatg

SEQ ID NO: 112296 - DNA, 92 bp, Heterodera glycines
gcgagaagtcattgggagtgaacgtaaaagcgaaactgtgcacatcaaaggattgccatggaaaatattggcacaaattgaaaagaaagatg

SEQ ID NO: 112297 - DNA, 79 bp, Heterodera glycines
tttagcacattcttttattacatatttaagattttagccccttttaattccagctcttacatcctacatattacccatg

SEQ ID NO: 112298 - DNA, 128 bp, Heterodera glycines
atttaattaaattggatttttgaaaaaatgtttatgctttatttttctcttgtttaggcattgacacctatgttgctgatgggcaaccaagttgtagaggagtaccgcgaggcattccacgaagcatg

SEQ ID NO: 112299 - DNA, 60 bp, Heterodera glycines
  unsure (1)..(60): unsure at all n locations
attgattggactcataannactcaatagagccaattattttacctagagcggacatcatg

SEQ ID NO: 112300 - DNA, 351 bp, Heterodera glycines
gtcataatcccgacgcgtcaaaatcccgatgcgtcgaaatcccgacgcgtcaaaatcccgacgcgtcaaaatcccgatgcgtcgaaatcccgatgcgtcgaaatcccgactaagccaaaatgagtcataatcccgacaaattaaaaatataaatttatttatttttgtacatctatttacatgtatattatatattatatatataaatatatcataatagccttataaacaaaatgaatcgaaaaaaaattgaaattcttcaaaaatgtcgtaaaggcaagtttctgaacaacaacgacggcaaaaacgcgacaacttctgaacaatgtgagcataacgacaacaacaatg

SEQ ID NO: 112301 - DNA, 200 bp, Heterodera glycines
ctttaacaaaagttgtgacgttttttctgtcgaaaaacagtacgagttgggtttttcccttcggttatcatgtaccatatacttatgtttaataagttaatctttaaatcctttacataattattgaaataatgattaatttatccatctcaacaaataaaaccgaatttccttatttggtgcgttatccggcaacaatg

SEQ ID NO: 112302 - DNA, 159 bp, Heterodera glycines
ctgtaacggaaaggatcatactttggcgtggcaggctatttccgtgacagtgacccgaccaaagtaaacgatcgaaggaaaaaggcggtggaggagagcaagggctttcaagcgataagcaagcttagcgccgacatattcaaccaggacttgtacatg

SEQ ID NO: 112303 - DNA, 943 bp, Heterodera glycines
tacagtgcactatttcccaccatccctccctctaacctctacatcctaggaggagaaatcttttaccttctttttctgtgctatttcttttgccttcttcttcatcttaactatttattttcgtctcttttctttatattctcttctttttcaaaacaatttcttttcatttcttttcaaatcattttttaacgcaaaaaacaaacaaaacgccacacaaattcaaacactggacacacacatacagacactcaactttattatataggatttcaaggttggctttttttaaactgtttcaatgactgattcaattcttttaatattgttagtgttgaaaataatttctaatttagttaagcatagatttaaaaaaaagaaaagaaaacatcagcaagagaagcaaaaatgactgcatatttccaaaagaaatacagtatatttcaggggcgtagtcagacccttggctttgggggcggctcaaatcggtttttaaggcgtgtatttttcttttttcgttcaatttttaagggttgtatttttctttttttggaatcccaaaaatttttttttaaattggtcgcatatgtccaaaatttaaaaacagtgaattattttttacggtttttaaggcgtgtatttttcttttttcgttcaatttttaagggttgtattttttttttttggaatcccgaaattttttttttaaattggtcgcgtatgtccaaaatttaaaaacagtgaattattttttaatgaatcatttctcaccaaaaacagtttggtatgttaagtgtttggattacacattctgtttgctgataaaattattcacttgtacaataaatcgttttattttcaccattttcacactttatttttgaaaattattctcaaattattgaaaaaacccaattaaatttagataatagtcgaaaaaatg

SEQ ID NO: 112304 - DNA, 707 bp, Heterodera glycines
gctgaagaacaaataattgaaagtgttttacacagtccccacaaaatttagtttaattttggggggttaaaaataaatttccaaaaataaaaatgaaattgaaaatgctcttcaaattttttatttttgaatgagtcgccgaaagggaaaacatttgatcaatcagaagcaattatttatttatttatttatatttgttaatgggttggccattgccatcggacaatcggagaagcatttgaacagcagcagaagaaaaggaagcaacgaccaatgcaccaccacacattaaggtggaataaatgataattaaattaatttaaaatatttgtgtaattaacaaaaatttaaaaatttacgaatttacttttattatataattaaaaaaataataaatatttttttaataaatttatatagaagtagtgaatcatttaaaagaattattttaaagaaatatttaaaatataaattgatgagagaatatataaataattcaaaatttgttcggtaataacaattttagaattagaattggagcctaaagattaaatttatttatttcaaaagttattaaatattaaactaaatgtaaaaagtttcttaattatgcaacaaaacaacaatcttttataaattcaatcaaaataattaattgtttttttcaaattggtcttttagcgaaaatttgtcccttgccaccaatg

SEQ ID NO: 112305 - DNA, 163 bp, Heterodera glycines
  unsure (1)..(163): unsure at all n locations
atgggattgaaaattcgcgcgctgtttcactgagcgttcggcntgaatttttgcctgaaatcgccgcggaggtaacttattttttattcttaaatgaacggaaagacccatatataaaattcatttttgtacattttaaatacatggaaatttttagaaaatg

SEQ ID NO: 112306 - DNA, 129 bp, Heterodera glycines
ttttttgaaaaatctccaaggatttttgggttccggaaacatacataggtaagttaattaaaatgctgaatccaatcctccaaacttttgtgcccatttaaaaaaagttttccccattatccagggatg

SEQ ID NO: 112307 - DNA, 284 bp, Heterodera glycines
  unsure (1)..(284): unsure at all n locations
ggctgcatatttcattcttaattcaaaaaatgttatacctagaaaaatgatttggaatttttgagactaaactttttcgaaaatttaatttaaaattttgcaaaataattgaattgagataaaaaatttggtgaaatataatattcaaataattctttctgaaaatttgctaacaaataaatgaaaatttaagccacttggaataaatgcncaaaaatagcagaagacaatttgtcaaaaatttcgcagaaaatttggacgagttggaccccctgcggcaaatg

SEQ ID NO: 112308 - DNA, 145 bp, Heterodera glycines
ataataataataataataataataataataataataatcattataataataataataataataataataataataataataataataataataataataataataataataataataatattattattattgttgttgtcagatg

SEQ ID NO: 112309 - DNA, 1003 bp, Heterodera glycines
tctctttctctctctctccctatctctctcccttccttctctctttctcctctctctctcactctctctctctcattctcgctctctctttctctcttccccgctctcaccctctccctttcacttctctctctttgcccctctaactctctttttctttctctcaccccaactctttttccttgccctcctccactatctacttcctttctctcttctcttccctttcctttgtctgttctcactattctcttatctttttctttcctttctctctctctctctctttattctctcccaacttctctctatgttttgtgctttctttcatctcccctcacaataaaataatttcataacaaaatctttcgtgtcgataaatattccatttttccgttcaaaaaacgcaaaaattttaggaatgacatacccaaataatataatagatcataggaaaatgagggaaaatattgatgagtagggattggatttatgtttttacttattttttctgcggctttaactcgacgagaaatgcacgaaaacaattttttttttgttcgaaaattttgcgttttatcgcccttaatcgaccttaaaaatccttattttagatgttcgctcttaaaataagtttttgcctatattttaacgtttcgtccctattttcgcccttatgtcgcgatttttgaatttttttcatgtaaaatcagggttcgcaagtgtccttttttggaggggccggatctttaaaatatcctttttttaaagattgtcttttattttaggcttccacaaactttttaaattttttgtgcttaatgatatattttgctgatatttatttattttattttcgttttaatactattttctcttcctctctttccctctcaccataactttttgttttttttgtgtacacaacctattgtcagacgcttcagaaagagggagcgcttttttggtgctgaccttggcttagcaaaagtggaacagcatg

SEQ ID NO: 112310 - DNA, 133 bp, Heterodera glycines
cagaattttaaaaacacgagttaatttcaaaaattttgcggtccggcgattttgaggcgctatccacgacttttttcaaaatgtctagctttaaaaatttatattttgttgtttagctttttttgttgacatg

SEQ ID NO: 112311 - DNA, 62 bp, Heterodera glycines
tcgatgaccgtgccaacaactaccccgtcttctacgacctgggcccgtattttgacaccatg

SEQ ID NO: 112312 - DNA, 64 bp, Heterodera glycines
ggtgggaaacaaaaattcaaatcgttttaattttttttttccaaagattggcgattcgtttatg

SEQ ID NO: 112313 - DNA, 249 bp, Heterodera glycines
  unsure (1)..(249): unsure at all n locations
tttaattactattttaaaaatataantcatttttaaaataccgtgggccatggaactgcgttatttcggcaacctatcgaattgtgtcagaaaagaccgaagcggagaattccattgggacattgtgtgactgggttatcaacagatcaaacatcagccggggatttggattttcattacttttgctgtgagtaataatttaacatatttacttaattgatataattacggttaatcaaggaactgatg

SEQ ID NO: 112314 - DNA, 137 bp, Heterodera glycines
agggagcggttgggttcagtgggcttactgtacttcttttatcgatcaaaataaatattttttcttctttttaactcatttcttttcctaattcccttatcattcctcgctttttgcagatgttccttatcaaaatg

SEQ ID NO: 112315 - DNA, 1003 bp, Heterodera glycines
aataatttatagaaaatttacttatatttagaggtatgtgattggttgattaattatttatttattttaatacccaaaagtgtgtaaataccctattataagtaaaataatttaaaatttatttaagttaaaacatgtttgaaaatgtccaaacaatctttagtagtttcccatttttagctatgtaatttgactttatatatttatattatttaacttcatccgaaccagcatttctatcttgttgttgagtcattgttcgttgttgcagagtattaaactgattttttcaccttttattttaattttttaattttttttctattagttgtagtatctgtgaaagtaatttatttttctgcttttatctctttcgaaataaataatttttatttaatgattattttagaaaagaaaatattattgttttaaaagtacttaataattattataaatttattaatctttaatattttgttcagtattttagttataaaactatagagctgatcctttctcaaggatgttggagttatatttatttttatatattagtttaatataataccaaatacttttcgcgttcatattcttacaaaaaaaaatctcgtcttatataggagtttgttacattttaagcagaaaaactttggtttttgaataattttattcaaattgttttaaattaagttttttatattaatgtttatttcttgtttttattgtattaggataattttgaaacaagataaatattatttggttaattattaatttgtaattctgtccttaaacatttattttatgtaattattaaattatcttttaagtattcaattccttttttaaaaaactttttttttcattatttatcaactcaatatcgtatttatttgtatggtattattcaaatattatctttttctttattttttttcacaaaaatctattaaaccaccatgaattattaggttaaattccagattatacattcaaatacatg

SEQ ID NO: 112316 - DNA, 287 bp, Heterodera glycines
ccagcaatttctgataattttccgactgaaagcgagcaaaacgaagatgtgtttgttggcgaaaatgaaaacaacatttcaaagcttgacttaacagaacctgatgcatcatttttgcgttattaccaattcaataagggagacaaaaacgcaaaatgtcgaatttgtggagttaaaatctcacgcaaagggcgaaacactacaggaatggacaagcatctgacacaacacaaaaagtcttaaaattttctttcatttctaagttgtttttcaggtatcacaagatg

SEQ ID NO: 112317 - DNA, 112 bp, Heterodera glycines
cacttctcactgatcttgttcaattgtattcaatcacttcctatggactgtgccccgatggaatttctgacgatgggccaaatgcaactgccggccaagcgttgtccaaatg

SEQ ID NO: 112318 - DNA, 126 bp, Heterodera glycines
ggtggccattctgagcaaagtcacaattttgtctactttcccccctactttttaaccttttagcatggctctgatgccgactctgaagtgagggactcctcttttgctgcgttgggtgccattatg

SEQ ID NO: 112319 - DNA, 369 bp, Heterodera glycines
ccattttgttgcgacgttttccagggaatgagagggccccgtcggtgccaacaagtgtcgtcgggggaattttttttttagaattttggccacaatttgcactaaaatgataattttgtagatttttttaaaaaatagcatatttttcgggacatttgggtgaaggaggccttggagagggtaccaatgaggaaaagcgaaaattttgatcaaaaacaattcttaaatgcgcatttccaaattttaacactttttgccatttttaaattttaatttgaattgcattttttctctggccaggctgaggaatgggccaagtcgcttgcgggtgcgttcgccaacaccgccccgtcagcaatgcccgacatg

SEQ ID NO: 112320 - DNA, 650 bp, Heterodera glycines
caatataaatatgacattagtgtccccaaaaaacggctccgttaaaatgcttcagtgcgcctctgttcaggctgtaggacaaaacggaaaaagtgcctcatatcctaaaaaataatatttccacaggtttcaacttcgtttcttacaaatttatttcgcatgaacgaccaatttcgccggatttcggtgcgtaaaacatttattttgagacatacaaattttgttcagacgcttctgctttggagtgaagaaaacgcgttgttctctcaaagcgaattttccaaaatcacagagcaaaatgtggaaaagctttctcatttggacaacatttagtaaattatttttaggggaattttttagatttaagtcaattttaatgtttttgttgaatgaatttgtttagtgcctgcacacggattcgttgtttcgtccacatcgattcgcgctttgtcgatcgaattgcggcggaggatgaagaagccgtccaaactttgaatcgaatgattttctccctcctccgcacgggtcgtcttgaagatgctaaaatattgctggccaatgtcaaattgcccgcattcgctgcttttatttctattcgggaattccttaccaatccgagtctttctccgactgatatttttgatgaaatg

SEQ ID NO: 112321 - DNA, 141 bp, Heterodera glycines
gctaaacaaatacataacgatgcggtaaattgaatattcagacattatatttttgcaaaaaaccggacagtcgacctgtctgtccactcgcgtgtacaccacgtgcgcattacgtggtgtcagtggcgtgccacccaaatg

SEQ ID NO: 112322 - DNA, 1003 bp, Heterodera glycines
aaatctaacaagggaaccgtcagaactgtgtcagaaaatgcatgtatcataactatttgatagtgcagggccggctactctgaatttttaatgttagcggtgtgttgaagccaaatagaaaagttattggacctcaaaaatcaaaattttgactgtgttttccccttcagggaaggtggtgaagtggggaaaatttaaaaaaacggtggatcagtgggttaaattcctatttttcggaggtccaggttcgaacccaacatgaaaaaaatacattttaattaatgtgcaacaaagttaacgattaaaaaaaccattttttatttaaaaatatacataggtaataatttttctttagtgaaagtaaaccaaaagtcgactaaaaaagtgactgccccatggggaccaatcgtaccggggcccaaccggcggggcccaatcgacccccaccgtcaatatttgaccctgttcgcccttgtccttttcttttgaataaatattattttattcctcttcggactttggggcgtaataatatttttttccatttcaacgaaatattttttcaaaaaatgataaaataaaatgatgattatgatgaaactattaaatgatgtaattcacatgatattttctctaaggattacataatctttttaacatgataaaacatttgactgtcacaaaacatcgcataataccaaatcagcaaaaaataaaataaaataaatttaaaaaataaaataacaatgtttagaaaaggaaaaaaatcaaatcacaaaatacaaaatacaaaaatggaaacatcagcgaaaaacggaacattcgtcgaattgataaaatgtgataattgtggtcgtccgttcattgccaagaaatgtcagtgtcaatcagcaaatatttcttttgaaattgacaaagaaattttcagtagaactaatctcgaagttacgaaatgttctcttccaatttgggtcttttgcttctcctcttcgtttcaacaatg

SEQ ID NO: 112323 - DNA, 341 bp, Heterodera glycines
attggtttaattgtagaaaaattattaaaaaaaaatacttgaaaactcattttgactgttttctcgacagctttagctttgattattacgaaagttttaattaatgcgtaaaataacagcgacagaaattacgaccaatttgcgcatatcatatccaattaataactcacatatccaccacaataataatgtttagcccattaatagttgttaaattgtaaagaaattttttgttggttgtcaaggtgatggaagtcgggaaatattgtcaatttcaaaagaattcaaatggtaaacttcgaaaaatgcattaaaagagaaaattaaaacaaacaaatatg

SEQ ID NO: 112324 - DNA, 121 bp, Heterodera glycines
ttccgtcattttgggcgacgacgacacttccattcccattgaatacgttgatgaacaatggcacgattgcgacgattcatttgtcccggttgaacttgttgatgatctcccaaacgaaatg

SEQ ID NO: 112325 - DNA, 1003 bp, Heterodera glycines
aaaatccaaatttttttgactccggatgcttctttcataggtctttattttactgcacaggtggtcacgttagctgccgtattgcgcgcccgaggcgttcgcgctggtgacgtagtgtccatctatttgccaatggttgtcgaattgccggtggcaatgttggcatgcgtccaggtggatggtggcaaagtgattgggattttgctccgagaataattggcattgaatattgatcgaatagagaaaaccaccctttgtcttttttttgcagctaaaaacgcttgcggaccaagcggccgaaatgtgtgcggagaagggccacttgcttaaaatttcaaaaaaaaattactgaaaattttcatcaaagagtcgttcattgtcaaatggataactgtaccgacgactcgaccgttcaaatgaaaaaccccagcaaaaaatgtcaatttgattcagtttttcctatttaaatttttaaaaaaaaacgaatattttgctcaacaaattttcagttttgtaaatttcactttacctttaatgagtagtaattaattaaattgtttgaattttactcctttataactagggcttatttttttggtttttatctattttttctgagctcccagtggtctgaaaagcacgaaaaacgtataacttgaggttgtttttatgctacttttcgcgttattagggccaattctatgtttttccaaaatttttagaacataaaaattttaaaaatttgaaaaacctattttggagcgccacgggaccgggacctggtagcggacaactgagtaccaaggtcccggttttgaccgggaccgggactagtcccggttttttcccggtttttcaacccgaaaaggtcccggtcccgggtttgcccaaaattcccggtcccgtggcactttaattataactttttttcttttctctatttttttgccaatttttgtattattttttgctctttttttcactgttttcctcctccaaaatg

SEQ ID NO: 112326 - DNA, 123 bp, Heterodera glycines
aaattggtgttagattgagtacaatttataaatggaagaaaaaatttgacctatgcaaaaaaggtaaatattttaaaaattctacatttaaaaaaatctttaaaggttatcaaaaattcaatg

SEQ ID NO: 112327 - DNA, 656 bp, Heterodera glycines
cctgaacgctgcgattttatatattttagcttcgttagactttgtgctttcgaatgataccaaaaagataggatttgttcgaacatgaacaaagttattgtataaaaacacgggattgtcaattgattggactcataaaactcaattggactcataaaagtcgattggactcataaagtgcactagagccgaaaatttttattgatttttcattcgataaaaaaaattcttatcgattttgaacatattataaaaatttgtcaattgacccgaaacccgatacctgaaacccgacatttttctcgacccgaaacccgacccgataattttctgccgacccgacccgaaacccgacccgatatttttttcgacccgcggcaaccctgatagtaatgtaagacaagcagaatttcttacagtgatatttggttgaaagcactgattaatattttgataattgttgtttaattttattaatcacatatatcatacattatatttgcttatataatgaaaaatatttagtttttaattaagttaacaacatttaattttttgacgcaaaaaatgccgaaaattaatcttatgattattttctttttatttttaatcgtactaattggtggaattgatgaagatttatttgatgatttatg

SEQ ID NO: 112328 - DNA, 327 bp, Heterodera glycines
ttgtaaaccgtggtggcccacaatgttcaaaggaaagttcatcgtgctacaatcccaagaaggggtaggacaagttgaccacaatcccgtgatgggcaggacatgttggccacagtcccatgaagggcaggcaacgtttaccacaaatgtgacagatgcccgaagggccagtcagtgaatcgcaaatggtgcgacgcatgccctgaagggccagtcagcgaaccgcaatggtgcgacatatgccctaaagagccagtcagcgaaccgctttggcgcgacacatgctcagaagggccagtcagcgaaccgcaaatggtgcgacacatg

SEQ ID NO: 112329 - DNA, 1003 bp, Heterodera glycines
tgaaaacaaacggaaacgaaaacgaactcaaagctcattttatgcgtctgaaagcccaaaattgtatccacgagaatagctgtacagagatctaaaaacggtccaagtggagtttcaaaattcaaaaaacaaattcatccgaaccatcattttcacataattccttgggagtcatttggtggctgcgacttggacgcaatttcagtaaggaagaggcagcagcacaatgggtacgccccactgtgcagagaaaagcctagtactatctcgtcgtttctctttttctttgtaatttctctcactttggcgtactatctctttatttatttatgtaaaaaacaacttttacttttctatgtgtacctttttttccttatgttaaatctgaactaaattttgcatatcgatagagaaaaaaaatctgcatccaaatggacatatactaaaattggaacaatacagagaagattagcatggcccctgcgcaaggatgacatgcaaattcgtgaagcgttccaaatttttttgttcattccaaatggacatatactaaaattggaacaatacagagaagattagcatggccattgcgcaaggatgacacgcaaattcgtgaagcgttccaaattttttttgttcattccaaatggacatatactaaaattggaacaatacagagaagattagcatggcccctgcgcaaggatgacacgcaaattcgtgaagcgttccaaatttttggtttaattacccaagtttgagctcaatatcgcagtcctttctgaaacgccccttaatttctaattccccgaatcaaattccgcaaaaacgtcatttcctcaacgaagtgacttcaacaaatttggccattgacacacttaacgacgacccgtccatttctcaagctgcccgtgtcatcatttcacaactaagcaatctcctcaaaatcgccgtctccctcgtcgacaattctgtctcagacattgactatgctgcggagatg

SEQ ID NO: 112330 - DNA, 115 bp, Heterodera glycines
ggggggggggacgtgctcctaccagtccgtggtagtagacttccattgaagtccgcttcgtgtgtgatgaagtgttgtagacgatggacgataataataataataatataatatg

SEQ ID NO: 112331 - DNA, 111 bp, Heterodera glycines
ggtcaattaaaatttcttgacagtaaactatttatcaaatctaatttaatactaaattaacaaaacgcagccggttgggacttattgtgcttgaacgttggtaatacaatg

SEQ ID NO: 112332 - DNA, 227 bp, Heterodera glycines
tagttggtgggtatgccctccaatgtgatggctttgggccggaaggttaaaaacacgtgtaggggcggacctatgcgcgtttttggctctccaaaaatggcccaaaacatcgctcaggggacgggtcatgcccgatttttttttgatcggccattttctttgacatttttaactaaactcaatggttgaattttcttttttttttaaatttaagaaagaaaacaatg

SEQ ID NO: 112333 - DNA, 650 bp, Heterodera glycines
tcaataaaaatatcactcacggtgcgaaaaatggggttttacaagtttattggggaaaaaaaccctttacaaaataatacccctgggagaagggagtgggaaacatgatttcagaattttcaattttttatagtctaatctaatcaaaccggttcagaattcaataaaaataacattcacggtgttaaaaatggggtctgaaaagtttattttgaaaaaaagactttacaaaataatacccctgggagaagggagtgtgaaacatgatttcaaaattttcaattttttccccaagttgcaaatccccaaaagtcgcaccacgtatgctttttcagcatttgtcactgatttaaaaaacctagttaaaaattagggcaagaagaatcatcgcattgaaagaataaatcagttagagtttttattttgcagtttgtacataacagtcataaaaacgaatgaaaaagcaaaatttttggcctatggtgaacctaaagaaatgagaaaacagcaccacgtgctaaagaggtgacaaaaacgggctgatctttgatcagagagaaagcagaaggaaggcaatcagcaaaaaatggtcactaaatagcataaaacagagagagattgcctgtggggacaattagcagctgaaaatg

SEQ ID NO: 112334 - DNA, 446 bp, Heterodera glycines
ttctgcgataattgaagaaattgagtcggaactgccaatcatttattgaaaatttcagtgaagttattttatatctattatataatttatttttacgcccctaaattcggaactttttaacaactatttacccatttttgcaactattttgggggttttttagaaaataaactaattattttggcacttttatgggcagaatacgccaagtacctcaaacttgggtaattaaaccgaagaaaaaggtgcattgggggaaaatgacgcctaaaatgaaggaaatattccatgctgttttcaatgggttttcgaggtcgctgatcacgaatacagcatccatttcgaccaattcctagaaatgaacttaatgtcacataaaaactgcaataaaagtttgtttagctcattttgaatcatatatgtgaaattctaaatttctacagatg

SEQ ID NO: 112335 - DNA, 895 bp, Heterodera glycines
ttttcactgacgaaatcactcactgacgaaatcacttcctttcaaaatcactcactgacgaaatcacttaatgacgaaatcaccgggaaccgcggcgatatttcggcggtgatattttgtctcgtccccatatccgaccaaatttgatttttcttgatgaaatgttcattggatccgatcaccttgcatcttcaacttttcttttaagaaattttgtttttgaattttattgttatactttaatgttagaaacaaaaacaaagtgctggagtcaaagaaaaaaatttaaataataataaaatattctttagaactaccaattttgcaaatggcctagtggctagtctccttgactttcccttcttctttctcttggtttaatctagagatcggaccggtcggtttttttcggtatttttcgattttcggtttcggtttttaaccgaaaaaaaccgaccgagaaatttttgagtttttcggtttttttcggtttcggtttttttcggttttttaaccgaaaccgttcgaccgaaatatttaaaacgtcatacgagtgcggagacccttttgacattattttcatcatttattttaaatttaaattatattttacatttcgccaattttatctttttattttgttttgcattttcatttgtcacacaattttctacaacttcgtctttgatcttttaaaaatgattttatattttgtcttctcttctcggcaataaatttataaaaatctatcgcttcggacccttttggtttaattgtttcagtctgcttttcccaaaagagcagtacttggcgctcctggtctacaaaccctcccaacttttggaacggccaacaagaagcactgactgaggattttgttttggatttggaaatg

SEQ ID NO: 112336 - DNA, 84 bp, Heterodera glycines
ccttgaaaatgatcttttaaattttcaaaataaatatttatttaaaatcattatttttttgcctttgcttgggtgtccaaaatg

SEQ ID NO: 112337 - DNA, 780 bp, Heterodera glycines
aaaggcattcattcagtcggaaggattcaattatttgttctaaaaaagcactgctcgaatattcgaagaaggccattgagagagatcaattcgcttcggatgacttacgcttttgctgggattggctttggatgcaattccaatcggcagatgctaacgaagtgcagaagaattacgggaccatgtgcgaagcattgtttggatgtcctcaattaatttactttcattttaaggttcgctggcattaaacacattttgaagggcacaaagtccagttcgaccatcaaacaggacgaaattacttacagaaaccgagtgagtggaccaacgagattttttggttacgtaaatatttattttcttttcggatttttgtcaacgaaaaacgactcaaaattttgcgtatgtgcaattggcccaactgcgccgtgagggacgagtgcaaggcgcggtttgacgaaatcgcggctcaaaacggagtcttcggtatcactcgcgcggcggcgttggcacttttttcagtgcagggaatgctcagcaaagaggtggccacagtcgagaaaggctttctgacaatgagcagaatcccccccccccctccccccttaaaagcaatttcttatttaatgccatttgttttaatttctgttttccgctccaactttttctattcgggccctcttttagtatttgactcatttgagcgagttcactcattcgcgcgaatttgccgaaacatggtgccgttccccctcctttgtgaccaattatcaacgaatg

SEQ ID NO: 112338 - DNA, 119 bp, Heterodera glycines
aaaatttttttcggaacaaatttttttttctagcttaatgatctaaaatttaaatcattcaatttgtttgttcgttttttaaaatttaattttattattatttactcaaaaggtacatg

SEQ ID NO: 112339 - DNA, 1003 bp, Heterodera glycines
ccagaaattatgtgaaaatttgggttccctttatagaaaaaaagtctatttataatcaggctccccctgattcaatttcaaaaaaaaagaatcaatttttgtcggccaaaaattatcatttcgaaaaaatttatttaagagcaaaacaaataggtaaaaaatatcacttttgatttgggccaatgatttcactgattccatcttcaatttttggtcatttgttttttaattatttttttaaatgaagctcagttaagttttggctggaattttattaaattaaagtaaattgtaacagattttaacctaaattaaattaagatcatttttgtaattttttcttctaaaaacaacaaaaaacatcaaaatgatagttaatgtaacacatctggtaggcttttttataatcatttttttaattccatttgataaaaatatttttattaaaatgtttcaattaagttttttttgcattttcgataaaattattaagaaaaattctttttgaatattttcatcgtatttaaaatttaggaaaatgatgttattttgattaatcaattagtttccgctgtgattttattattttgtatgtgcatatgagcggaaattggtcaattttattgaagtgtaaacaaaaaataaattcagagaatattttaattgaaaaatatgcacagaaaaatatttttctccatttcacagttggcataatccacctcgttttgcattgggcgtgcgtaaaattgggctgaaaatttgttggaaaattccttataaaaggggcatccgccggaccattcgtcatttgaaaacccattaacacaattaaatttataattaaattttttttttataattatgctgaaaatgatttaaattgtttagaaatttgattaaaatttattttaaaatttctggcgtattttccaacaatttgggctcataattaattcattttttagattagtgttctttctaattaaacagaaaagtttcaatg

SEQ ID NO: 112340 - DNA, 478 bp, Heterodera glycines
ttatgtttgcatatgtatttacgtctatcctgccttttggatggtttttggtgcacttcatacataaagagaatcagagcctgtcgtccactttgacgggcaaaacagaatatcgaattttctaaagaaatcatccaaaactttgagtattgtcaaggggtagtgtttatcttccgggtatttaactcgacttatgtacattggtttaccaatcgagtagtgtgtagtaaaattaacaaaggggtagagagaaatgaagtcacatagaaattttttcattccgtcttcaaatccgctcatttatttgttgctcattaacattttagcgatctcgtagcctaatacacttacaactggatggacaacttgacttcgtataaattcataacgttttacattcctctcccgcactttatcagttatttttttcaattagacattaatatacatcttctaggtagcgctaattgcaggcatg

SEQ ID NO: 112341 - DNA, 171 bp, Heterodera glycines
acctattgtttgttttagttgttgatttatcatttcttttaacttattgcctcatataaatcttcgttttcttttttttgttgctttgttttttacctttaatttaatatttaagtttcatcatttttcatatcctttttatatttctccgctcttttggtcctcagaatg

SEQ ID NO: 112342 - DNA, 1003 bp, Heterodera glycines
ttccgaaaatcgaaattcctacctcaaaaattttaatggaaatcggaattcagaccacaaaaatatcaaatcggaacttcgtgccatccctagtatacacctttataaagtaattgtctctattagacttaaaaataaatagattgttttccacttttgtattttgaactatggatcgaatacgagtggagcacgtatacggacggctttacggaaccgtagcgtagaaaatccgtgagaggggcgacggcggtgccggaataaattgggcttttaaattaagttttttaaaaaggattagggaatttcatttcatttcatttatacgcataagcgtgacgccgaaaaataagaaataatgaaacaatatcaaataaaacaaacaattggtcacttttggagctggggtggcaaagaaatcaacaaattcagatcagatctttcaagaagtttggcaaactcattagaatttagtaatctcgtctctttaggtaaaagtctatagagacgagaggttcgaataaagaacgaattgtgtctatcattggttgagcaataagctgttcttatggtgaattcattttttacagggtttttggaaaaagaaaaggattcattattttgtaaatttattttacctaaaattatttcatgaaaaagttttaagtctatttttaacctacgactctcaagcgacttttgatcataaatgtttaacaattcagcataattaggtaaatcagcagcataattgttacgtctaaatattactctcaaaaaagttttttggacattctccagtttttcaatatccttttttaaataaggattgaaaattggagatccaaattctaaaattggtctgcaataaatattaaacaaatttacaagtattttcgtatcacgagttttgattgactttagtatagcgaaagcagatcgtaatgcttttttcgagataatgtcaatatgtgcccatttcaaatcattagtaaaataaatg

SEQ ID NO: 112343 - DNA, 233 bp, Heterodera glycines
aaaatgaggctttttgacccaaaatgaggcttttgaaaatttcatctgcgaaccctggttgtaaataaaaatgttttttcattaatttacatattgtttgattttaatattttgtaaatatttaaatacagattttgcacttttattaaatccccaacatgcgtaggaaatttttatttctttatattttggtcattatgcataaacatttatttcgttcacaatcagatatg

SEQ ID NO: 112344 - DNA, 73 bp, Heterodera glycines
tggcagggataaatgcattttaaatttcttccattttaagggtccaaatggagcgcgcaatcagatcaaaatg

SEQ ID NO: 112345 - DNA, 65 bp, Heterodera glycines
ctgctggtgccggcggaggaggggagccgttgctgaagaagaaatatttggttttcgacgccatg

SEQ ID NO: 112346 - DNA, 212 bp, Heterodera glycines
gcaaattttgccatttcccccgggggatttttttgttaattttaatgaatttttattgcaattgggtaatgttttccgctaatttagtacgaacatttcattgtggtcacatgcacagcaagccaattccaaattgagcagttcagtgatttcgttggccaacgcattgggacggagttaaccgaaattgttgaagaccctctgaaaaaatg

SEQ ID NO: 112347 - DNA, 130 bp, Heterodera glycines
tctgcaaaaagaaagaatatttttttaattaaagggcaattggactaaaagaaaacgccgaatgctaataatttattatttattgttagtaattttattccctattaggtatttgcaaattaaaaacatg

SEQ ID NO: 112348 - DNA, 497 bp, Heterodera glycines
ttcattttgctgctgttcaccatccttctgccgactgctgatgcgttttcacttcgcatcgttttcataaatttgccttctttaccatcttttatattcattcatcttttgtacattcgtcccactttctctttgtttatttcatctttaaaaatttttttattttgaacaaaaatttattaaaaagatcattgtcgatttactaaacacggattctgacataagactttagagtcaattaaaataaaatttggcaaatatttcaaaagtattattaccctgaggatgaatcttgatatctaaaagctaaaacctattacaatatatgattatttgatcattcaatattaaacgtgattttgtgtaattttaaatcgtatgaacaaactcaatttaattcacctaaatgtttaggggctccgaattatacgggttttatcctacatatttgtcagcaaatgtttacccatggccaaggcgtgctggccccacaaatg

SEQ ID NO: 112349 - DNA, 60 bp, Heterodera glycines
atttcttctccacatttaactttttacttctcattttttagtctgtacggcgtgccaatg

SEQ ID NO: 112350 - DNA, 101 bp, Heterodera glycines
ggtcagtcctcaaacacagttatttagaggaaatgggtggtcaaacctttaatctaatttgactgcataacgctaagcattttcagatctctgcaaagatg

SEQ ID NO: 112351 - DNA, 581 bp, Heterodera glycines
ggacataaatggcaaaaatcgcaaaatatggacataaaatggcaaaaatcgcgaaatatggacataaatggcaaaaatcgcgaaatatggacataaatggcaaaaatgtcaaaatatggacataaatttttcaaaattgagtgcaaaatttcttcaaatttattggttgaaattgcatatgagatacatttccaaattttttgactcggtaaggcgctttgacaaagacggctttcgttttgcaattagtcggtcaacattcggaaattggtctcgaattttttcggcaattacgtgcaatcattttaaaagaaaaaaaacataaaagctaaaatttattaatttttttagcgcaaaatcaacaacaaaagcgaaattttcgcttttttgcttatttttgacataatttattaatttttaagaaaatttaaatttattcaatattctcgagaaattttggcgaaaaaatgattttttgaaaaatttttcgggttttgggctcaaaaaggctaatttagctgctgggggccgttctaatagaggtttttttgaaaaatgccaaaatatggacataaaatatg

SEQ ID NO: 112352 - DNA, 1003 bp, Heterodera glycines
gagagaaaggcaaaatcaacatcatttttaaaatttcgataatttttgaaattttaaagcaatttttttcaaatgacttttggcggaaaaataaaatggggaaagagataacacaactcattttttcgttatctctctaaataaaattataagcagggaacggatttatatgtttttacatgttttttttgcgcatatgctatcacatgaaaagctcaaaaataacatattttggactttttgggaataaaaacatattttggggtttcggcagtttttgtcataaattttagcgatttttcgaaaaaatgtcttttttggcaccaaaattcttggccaaatgcccaaaaatttttcaaaattttttcaattttttgacgcttttcatgactttttttactttaaggtaaaatttgatttttagcgaagaaaattccgaaaattagaaaaaatttacgccaaaaagcattatatagtttttttttctgtcctccttctctttctctctctttctctctttttcctcttgtatttccttttttctcttactcgccaaaaaaatgtctaaccaaattctcaattttgattttgttcttctattccttcacatgcctaattttcaacattgatgagaaatcaaaccgacctaaattttgaaaagaaagggactgacacctaaacaaaatgaaatgaatgaatagtcagtcatttattttagagttgagcgggaccgggacctgaacacggacaactgagtaccaaggtcccggttttgaccgggactagtcccggttttttcccggttttcccagccaaaaattcctgggttttcaacccgaaaaggtcccggtcccgggtttgcccaaaattcccggtcccgctcaactctaatttatttttatttgtctttttattccctgtcatttattcaacaacaacaacaaaattctttcgaggaaatttaaaatccaagcttgttttattggtatcaaactcaaaaatg

SEQ ID NO: 112353 - DNA, 71 bp, Heterodera glycines
ggtgccatttcaaactttgatttgcatttattacgctaatgactttatatttccattttagcgtcattatg

SEQ ID NO: 112354 - DNA, 212 bp, Heterodera glycines
tattatattattattattattatcgtccatcgtctacaacacttcatcacacacgaagcggacttcaatggaagtctactaccacggactggtaggagcacgtcccccccccccccccactccacattttaatttttgttttcaacattaagctgccgcgcgaggacgtagtggagctgctgccgaacgacggggacttcctggtgcgcatg

SEQ ID NO: 112355 - DNA, 1003 bp, Heterodera glycines
gtcgcgggttttttacccagaaatatgtagagaaaaccgcaacaaacgaaaaacacactcctataaatcgaaacaatttcagtaaatttactcctaggaattgaaacattttcttaaaaattcaaccctaaaatttgtttttctcttgggaaaatttttttcgattttaaaaatcttcgaaataggtatttaattagttataactggaataatccctactattgattatgttttttgtttattaatacagaaagaacaaaattccacttaaaagaatctgtcaccccaccaaatttggctgggtttgtggtggaaggcgtccgtccgtccctcactcctttcgtttgaaaatgcgcagatttatgttttgctaattttctgttcataaaaaacgggccaagaatttgactttgctgagcgaatagcgcaccattccgttcattccgttttgtaatcggtggaacgtttttcactttgttaaattactacacatactttacctttaaattttccaacgctggagagaccgcagaaatcacaaaaattctcattaaactaaaacctatcaaataaaacggggattggataattaaagaatatttccgatttcctcaattttttttcattagaacaaaggaaaaacctaaaaacattgggggagggaccctcttgatttacaaatgttttaattatatttttcgcaaataggatttttgggggttgctgaacacgagcttgatatttttcgatgaattctcgattttttgttcgagttcaagtttggagttcgaatttagtcgaaataaatatcaaactcgtgttcagcgatccctaaacccctagtaactaataaagaaccctgaaaaatagttgcttttctgtttaaaaatcgtcccacctaaactacatataaaagtaccgctatacttattgtcatttttaccaaaaaattacagaggtcctaaatatttataaagattttttttaacattggccactaatg

SEQ ID NO: 112356 - DNA, 907 bp, Heterodera glycines
attcaagattttttttatttttaaatgcattttttaccacatgaattatgattaaatttttgcgtttggaattcattttggaattaagaaaaataaaaattgataatcatttgatcatttttagcgcactttaagcaccgccgttaggcagcgcagttccaaaatttattccatgccacagatattatgggcaggacacgccaagtacctcaaacttgggtaattaaaccgaagaaagaagtgcagtggggaagaatgacgcctaaaatgaaggaaatattcgatgctgtgcgaactctttgtgacccctctctgactctgccaatgcagcagttgaccatttttaccactatttttctctcactcatcgtctgctcgtctctcctttattataagctatttttccaaagcccacgcctttctctcttttttctgtttgttatttctcattgctgctgacggtgtcttcctattttgccatttttggtgcttattttttctcacctaatgcatccatacttttttcattaacctctggaagccatgaaacgcacgaaaaaaatgtttttttggtttgacgctattggcttttttaaccgtaaagaacgtaaatactcggaaaaaaactttttcaatgttttttttctcgggaattttgtttaaaaattttgtgaagataaacaaaatagcaaaaaaaaaaaaattcacgtcatttttttttcttttgaaatcattttaatatcgcatttagccattttggagatgtttttaatatttattgcttaatttgttaaaatttagtgtgtccatatttcgcaatttttatatcccctacatacatattgctctgtcgttttatttttatttatcattttatttattttttggatcgaaacaatttctaatg

SEQ ID NO: 112357 - DNA, 206 bp, Heterodera glycines
atgaaatggtgcagtgccaacaccgactcgccattcatgcgcaatttgtcgccaaccaaagtgccaaattgtgagatttctgtcgatgagtcatccgccgaaatcaattggccaagtggcgaattttggacaatgagtgacaattcgttaaaggaatatccgtcggatgcgatgggcggggacaataagtgaaagttgcgcgaatg

SEQ ID NO: 112358 - DNA, 962 bp, Heterodera glycines
gctaaaaatgtaatttaaccaaacgaaaatcaattaatggtttgtttttgtttttttacttccattagcacaattctgaggatggtgaaaacaggagaatgtcagagttgtggtcaaattcaaaatctggccaaagaccatttagggctcggcttattcagtttagcaatcatacagaattgcagttttaaataattacaaataagtgctgcttaagtgatgcgttgagtttgttttgccatttaattcaaagtgagtcatttcgacctccaagtaaattactttcctcaagcgaatggtctgaggggagagatgtgctgatgagaggagaaatttatccgccgccccaagagatgatctcccacttccatcccatggaataccaccgccgcctccaaccccttttggtcatgcgtcgaccatctccggtcggtcgtccatcgaccattttgcatgccttttgcctcgctccccgccccgccacattcatcatgggaaggggagggggggtcgggtggaccaacacagagagaggattaacaacagcagcgaatggaggcatttgggcaacaaaaattccctgtgttccccccgtttttgtggttctgtccggtttgattgatgtgacggaaaatgaaaggaaatgcgatggtacaaaaggcacaattggcaaagtaaagactttgattgggcgtttggagggacgacatttgcgaattcacccgaataaattcctaaacggacaacacattttcaagagtatttgagcaaaaatcattgtggccttatttgcacttggcattaaatggcaaatatggagtcattgcaaaggcaaaagtgtgagcaaatataacagtagaaaacatatttaagatttaatataacacaaaaaggtgaaaggaatagaaagagtaatttgtaaggaaaatggcataaacgagaaacagaaaataatcagaatg

SEQ ID NO: 112359 - DNA, 289 bp, Heterodera glycines
ggtgaaatagcagacaaaacgccaacaaaatatcgacaagactaaatggtccaattcaaaacgacagccaaaactgtactttttggaaaagtgtgatattttgtcgtttgaaaatgggatttttcaaattcggaaatgccgttttaattcattgttctccctccatttcagtgctgctctccatctcttcgcttctctgtgacccgaatccggacagtgcgctgcggcaggacattgcgactatgtaccgcgacaaccgcgaggagtacaaccgaattgcccgtgaatg

SEQ ID NO: 112360 - DNA, 569 bp, Heterodera glycines
attttgtgaaattaatccatgtcaatttactttttttgtcccggtgtttagatacacccatgttgaattgaacaaagcactggagcttggctataaagttattgatttattttaggtaaaaataacgtatcgtttattgcacataaacttcaaaaaaataaggtatggcattatgaagaatgggataaccaactgtttcgtgactatatgaacacctttgtgggtcttaaagttcaagcaagcggttggccatccggttgtgataccgatgaacagcgcagagcctatgtagatgaatttaggcaggttgaaggcattcagttggaccacaacaaaatttcaaacaaccctggacttcggatggtagcggtaaaaaaaatacagaattacaattttttaaacttaaaaaaaacacacagaaaattcttgcaaactccctctagggaaaacttgcgcaacgagtcggtggaacggaagttcgttatacccgaactccagctgagtttcatgcactgctcgagaatcgcaacatcgacattattgactttcatcacgtctctcaccatatg

SEQ ID NO: 112361 - DNA, 168 bp, Heterodera glycines
attatgaatggaattttaaatgtgttaattgtacgcggtgattattcatttatttctttatttttttgttattttaaatcatatttttttcaatttttggtttctattccctttatttattttattgcttccttggctttttcaaatacaactttttgccagtgaatg

SEQ ID NO: 112362 - DNA, 623 bp, Heterodera glycines
  unsure (1)..(623): unsure at all n locations
cattaaattttttataaaacccaaaattaaattaaaaactttgaattaaagtcaatttaatacataaatgccatggngacactaataaatgataatgaaaagcataattatgcatcccgttacattttatagccccattaaatttttttataaaacccaaatttaaattaaaaataatgttattaaagtctatttaattaaaagcataaaatgccatgggacactaataaatgataatgaaaagcataattatgtatcccattacattttatagccccattaaatttttttataaaacccaaatttaaattaaaaataatgatattaaagtatatttaatgaaaagcataaaaatgccatgtgatattaataaatgataatgaaaagcataaaaaatgccatgtgatattaataaatgataatgaaaagcataaaaaatgccatgtgatattaataaatgataatgaaaagcataaaaaccctgggataatataaaaaggtaacggtacgcgcatataaccgataaaaacccattaattaactaatcgccaaaataatttttggaaacaaattttaaaaattcataaatttaagcattaaaatcggcatggttcaaacttatg

SEQ ID NO: 112363 - DNA, 1003 bp, Heterodera glycines
aaatccctgggtttcctgcctattaataaatgcccgatcaatttcaaataaaatatctgatttagaacatatagcacaaaagtatgatccatcaatattcatcatcaatgagacctggttaaaccccagaaatacaattgaaaatgaactatctataaatggtagatatagagtaatgcttgcgaaccgaaatgagaaaaagggcggtggatcagcaattctaactaaaacaaatattccttatcagacactattctctgggacaaaattccaaagcgaaattttacacattaaattactttttaaaaaaccaatccaaatcataaatatatattgtccaccgaattgtacagttcagaatactaaaaagctactcaaatttatttcggaccagagtaattctgaaaatatcatatattgtggggattttaacatcccaaatattttatgggatgaaaataaggtaaaacatataaatgatcctatgtcaaatatgctgattgagtttatgaaccaaaaacaattgaaacagcatgttaaagaaccgaccagagaaaatacgattttagacttagtaatgactagtgaatcagaattaattaatgaattaattgtattggaacatttttcaacttccgatcataaaatggtcggatttaaaataaaagaaaaattccggcgtaataatcccagtgtttatagaagagattttaaaaatattaatttttcgaaattaagtcgggcgatacttgaaaatcgaattgatttatcaataaaatcagtgtacaccgttgatcaaaaatataaagaattcttaaataaagtactgaaattatatgatacttttatacccaatagacctctaaaatcgataataaaacaatcgtatcctcaaaaaataagagatttattttcagagaaattacggttacataagcttgtaaaaaaattccctgaaaaaagtgatctctttttaaattacaaaattatttctagggaaatg

SEQ ID NO: 112364 - DNA, 349 bp, Heterodera glycines
caacaaacaggcggagcacaaattgaaggtgggtggtggtgtggttatttacattcagaaacttgggagcgttccctccccgaaaattcaaaaaaatattgggcgtccgaatgattcaaacgaatctcacgggaaacctttaattttaatgagatttgttaacagttgttgccctaaaaagttgtaagagttgaaatttaaattttgtgaaaatcctaaatttaaaaaaaaaataaattttttacccaattcaaattcccattttttgcagaaacttgagcagattgtgaagcagaagttggtcatctgattctgtgtgagcagtggagtgaggaggaggaggagaatg

SEQ ID NO: 112365 - DNA, 750 bp, Heterodera glycines
tagcataccgaccccgaccggtgttagacaaaattatcatttcgccaaatagcgtaattgacgtaattttttgcgcactaatttaaaatttacactggtaaatgccttttttgtatttttgattttgatcagccataactcgcttcattcctaacaaaaccgaacaattttagtatctaaaagaagtttttatgcttgctttttttcttgactcgaaaaaatgcttttagtttttctttctgtttattacgatagtaaatgaattgtgatcatgcagaggctgcagaatactcaataaagcagcaaaaaaggaaggatctattcgcagattaatttacgagagcaaattgaaggttttttaattaaaaagggggcaacaatggcaaattgtataagagataatcaagtaacacatgtatttcacttaatttgttattacttatctatattacttttttttgtaatttgcaaaatttttacgattttgaattgcatttcgttaaaatttttcaagaaaaattttaaattagtgcgcaaaaaattacgtcaattacgctatttggcgaaatgataattttgtctaacactgcattggacttgacccatagtgaaaacggaaataatgtatataaaaggagcgcatttgcagtgtttcatcacataattcattgcccacatattattgttattatatattgctcatcgtctgcatctttaatcccacgaagcgacgtgcccggcgcaacaatg

SEQ ID NO: 112366 - DNA, 164 bp, Heterodera glycines
ttatcctttggacacagcgtcgggaaatgagctctgtaccaaaaaagatttgcatgtgtggctcagtgtttttgtaggaaagtcaagggacaaaggcgggaggttcgagtccgttgtgctacatgaatattttcatttatttttgtgcaaaaaattaaaaaatg

SEQ ID NO: 112367 - DNA, 184 bp, Heterodera glycines
aatggctaatcaaaaaattgtaaaacagtcagcgggaagctttttgtccatttcagatacgatggtgagcacaaccctttttgaacgcatttgccaattgttgttaaaccggagcgactcggagcagttcaaaaggaccaaaattgtcttgttgaccgcgattatgatcagagagatacggatg

SEQ ID NO: 112368 - DNA, 574 bp, Heterodera glycines
ttttgaccctttgtttcatttgtatttcccttctcccttcgttatgtcacgcccacttttccgcccataaatacccgcgatgttgacccttccccatcattcttttgcttcttctccatttatttgttccctttgctcccaatcgatatttgaccccgttcgccctgtcccttctttttaaataaatatttattttattcctattcggactttggggcgtaacaattggcgacgcccgtgcagacttttgactgtgggcttattgatctgattgtggaggaagaggtttgacagcaaccgagttttgctgtgtcatcgctgaagactgcctgcatttgctattatctaggcgataataacaactttttgttggacctgctaacagtttgacactgttagtagtgagaaattttgcgccgctgattttgtgtcttggcgacacatttcagttcatccacgcgcacccactctgtctagtagcttggcgctgctaacaattgagtggtgaacgacacgtcatttaaaacgagtactctcgagctgaggggaaagtccacgagctgtggttaagatg

SEQ ID NO: 112369 - DNA, 915 bp, Heterodera glycines
tctcgctctcaattctcgagctgaaattgctcggcttttgaagaaaattaaattgacatgaaatcttaaaaaatataaaagcactctctaaaaaaattttgctggccacaattttcatttggaactttattatacgattatttaattgatagataaaacgtgtccccagacaaacaatttttcttttatgtttttgatcttaacattttctgttgcgtattttattatttaatataaatattattttattacaatttagaaatgtattctttttatacaaaaaaaattattaattaatcatactgaaattttataatttaaaataaatttaaattttataatttaattagaaacatatgataaaaaggtattttaaggttttaagataaccccaaaaatactcttcattattttcatttttgttaattttttttttatttgaggcgccaaagattactctaaaatttctttgtaattttccattgatttattatgctagagaattttaatattatagctttctattaatttatgctattgcgaaatttataaatttttagtcttttcttggtcttataatttttacggcattgtttatacataaaaaaccataacaacttactaatatcattatattggttcacggatttttaatctgattgtggaattgggaattttacaaaaaaaaagaaaaaacaaatttcaaatctgatgccaattaaaggctgaccgagattctcgaaatctctggattaattctcgctctcgattctcgagccgaaaatggctcggatttactttctcgttagcatgttcggaaaattttaactctcaagcagccttattaaatttagtaaattttctaaaattaaaatttgttttgtaagtttatttcttatttaagcgattcaaatg

SEQ ID NO: 112370 - DNA, 113 bp, Heterodera glycines
tccggcaaagtttgctccgatttcgacccacaaaaaagggtgccgttggcggtaccgtctctccggtcggctcttcctcctcctcgtccggctcgtcctctttgcttatgatg

SEQ ID NO: 112371 - DNA, 134 bp, Heterodera glycines
tgataaattgaaatatttgctaaattatgacagataagatgatgttaaatatgtcaagtgtctcctcatgagataatacaaaataatatagtaaaaaaaaaacttaaatccattttcagagaaaagaaaacatg

SEQ ID NO: 112372 - DNA, 1003 bp, Heterodera glycines
gctgttctaactatgtcatttttcactgttctttgaaatgccgtttaataaatatggcccttccaagatatcattaggaaatttaaataattagaagcaattagcaaggattcattcgaataaacttattcgaattcattaaaaatgacattgtaaaaacataggtgctaagtgaaccgaaaaaaagtatcattgcttaaatggattaaccagggaacattaactgatggaagtttccgagaagcgctttatgctcgtcaattcgcggattggatgtaattagagcaaaggggccaagtgggagagggaggccaattaagggcaatttgaggacagcagaacttaattagcctgtattaagaagacgaagacatatcggcatttaaagcctcaggcgcaaaagcgcggataaaattaatttttcttttaatttatccatttttttttttgatcatctgcctttttgaaatttatatgcaattttttttataaatgcaaataaattttgtctcaataataaaagcaaaaaattttggggacaaactacagaattacccaaaattcattaaaaagcctaaaaaattgtttattattttttaaatcaaaaaattatttcgctaaattatttatttccctttctccgaatcacaataagtcacccattttaatcagataatgtgaagcaaaaaatcattggtgcatttttacattaacattctttcatattagtagtcagcttgggagtgaatattaattcatttggctctacggaaaaataaaaattctgaccttttgcgttttcccgagttgaagctttttataatttttttttcacttcgtaaaagcttatcaatagcttttcgacatgtgtagctttcgaataacttcaaatttataaatttggacaaccaagaaaaaagttatgatgctttaaatttggctcagacggaatgacctcctactgattccctaatgacctcattaaagcagattatatataatg

SEQ ID NO: 112373 - DNA, 140 bp, Heterodera glycines
cactctatagttagcactaatttaaattaaaacaaaacaccatatttaaattttgtattttttcaaatttccttttcccttacattaatttttcacgaaaaaattcattttctttattaagttttgggacttttatcatg

SEQ ID NO: 112374 - DNA, 378 bp, Heterodera glycines
tttaagagattgccttgtagaaaatgaccagtcaaactgtccgagtgacgtgtgaaagtccggaaaaattgcacaaaatgcaaagggcgaagaacggaattcagacgaaaatgacaaaaatgaaattatttggaagggattacaggggaattgatttggagaaataacgaaaaatggggaaatgtacgccaaattgaaatgggtgggggagggaatgccaaaatgaatgagggggggggggcatttgccgaaatgaccgctgtcacagtcactttttacgatcacatttctgctgctaatgttgcctttctgctcccatttaaaagccgtgtcgccctccgtttgcccattttccgtgccattctctctctcccgatg

SEQ ID NO: 112375 - DNA, 964 bp, Heterodera glycines
catgttctgtagtaaaggaagtgatgaaacaaaaaaaccctggccaagatgggtcagcataaatcgggagacccaatgaaatggaagaattcaaagaaaccagcccctacttcatctgcaattaaagacaattagggttttgccaattaattattttgggattcccctttgacattattatattgggttggtaaataagtcctgtccgttttttacattttcatttaaattactgttcttacaaatcgaagaattttgctaatattttgatatatagcctcaaatgtgctctacaaaattgcattaaaagattttggccgactttcaaaattgacgagaaaattttttttgaaccggtttggtcaaaaatggccagtaccggtttttccggtcttaaaccgttttaatacaaaaaattgttagttctttaaagcatatcattgttatgaatttaggccgctaaaatatatggatttttccggagttgtagcccccccaaaacggtaaagtacccggggtttggtagattttgtgcaacaccttatttatgctaggggtttaacggcatcgcataatgactactatttatttaaaatagagtcaggtgtaaaactaggtagggtatgtcaaaaaatctttgaaatttcgtcgactcgacctcgattttcgcgtttcggctcaaaaacgaatcgagtaataaaacgaaaggaattggtactttttcattatgctgaaacactccaaagtattgggcttttatgcctcttaaatagttttttgcggcgttttaaacgacgacgacggtccattcgatggtattgcagctcaaattgcggcttttatgcctcctaaataatcgttgcgcgccaaaaccgtttggggtgtatctgcatttccatggccgattttccgcatttgccgaatttttgtttcctccatatgtcctaaatactgtcgcccaatg

SEQ ID NO: 112376 - DNA, 388 bp, Heterodera glycines
ttcacgattcagttaaagtcataaggagggctgggatttatatttacaaaaaatcccaaaataattaaataaattgaattaataatgtttttcgtgtattttctcagcaaaacaaagctgcaggaagaatatttaattacaaattaaatcccagccttagtcataatatttactgtaaagttcgctggcaaatgccaaattatgagtacaaatgattgatggatggatggccttttaatgcgtttactatctgagaaaacgcccccccccctcccctcacaaatttctcttttaatttttcatttaattaaatttatttttgcattccaaatcaaatgatcagaaaaataaataatcatagcaaaaagcaatcattcatctcaaaatg

SEQ ID NO: 112377 - DNA, 187 bp, Heterodera glycines
ttttacaagcctaacaataagcaaaatttcacaatttttttttctttcatttttgagttttcaaattcttttaggaatgctttccaatatcttgtttgttttcccaattctcatttttctaaaagtttttttttcgtatatttttccaccggaataatttcaggattacaagctaaccatcggcatg

SEQ ID NO: 112378 - DNA, 73 bp, Heterodera glycines
tgtgagttttctttttaattttttttgttcaaaaatctgctttgccaaggtgtctctgtacccgttctgcatg

SEQ ID NO: 112379 - DNA, 65 bp, Heterodera glycines
tttaaaatctatgaaaatgaaaaactataaataaaaagaaaattccattaaaaaaaagtaaaatg

SEQ ID NO: 112380 - DNA, 1003 bp, Heterodera glycines
aaaaaagctgaaatttaggcgtgtaaaacagggcttccatcgaaaatttttttaactcaagacatcgggcccaaaaaatcagattttggggtcaaaatcagaaaatttcacgaaattacttcaaaacagttatttttacaatttatcctatcaaaaattgatcaaatattatattttcgcctcccattatcggttttaaaaattttggaagggaaataagcaaatcgtaaatttcactgcattcgagatcatgaaatcagatttttaacattttttgcggcacatttcgaaaaattgtgcaaaattttgtgattctaagacaaatctttaagaaaacaaagaatcggaaaaatttttgtaattttaatgcgatttgttaacagatttttgtccgaaaaatgagtaaatttgccacaaatcttatattttcttataaattaatgccattttgccataaaatttcaaaattatgattttatttaagaaatcagaactaattttggtcgctacctccaaatcaggacaaatctgacatttttattttatcagatttggaccctacaaatcaggacaaatctgataaaacaggacagatggaagccctggtgtaaaatgacaatatttattcaaaaataaaacaaaattaagccaaatcagaattgaattacattatttttttaaatcaaaaatttgtcaagaaataaagaaataaattttggagacgaatttttgagaaaattttcatttcttaggggtgtattttttgaaaaaaaaatttaggtcgatttttaaggggtgtatttttcgtttttattgcattttttaataattttcggaaaaattccaaaaacaggttatttcaaaattttttagtctttttaaactctaataaataaaaacctaaaataacattaaatgaaatagtaaatgaatatggtttatgaaatgacgatgttcctcatttgcactcaatttttaaattcattttagtattcgtgggatg

SEQ ID NO: 112381 - DNA, 196 bp, Heterodera glycines
tttcgcggatagttgtttagatttataaattcaatgacacttaaattcgtaggaaatttatttttgggggcttgcattggacaagtctttggccaaaggattggcgcattcattcgatgccaaggcaagccaaatgattaaatttacctacatttttgaatttgaggtgattccatgctgccgactttctataatg

SEQ ID NO: 112382 - DNA, 67 bp, Heterodera glycines
cgtgacgaaaaatcctgagaaaaatggcgaataaagtggaaagagtgttgggccaaatgatcgaatg

SEQ ID NO: 112383 - DNA, 535 bp, Heterodera glycines
attggcgacggcaccggcaaatgattgaacccaaaaattaatcatgcaaaatatggtcttaatgatgatgaagaagatgaacgcttcaatctcattgaagaccaagaatttccaccacgggatggttttgatttggaccaattaagcgctgttgatcggggtttactcaacattgcctctaaactattcaaatttctgccaagaattgctggcaaaattgggcagcttttttccaaaaatgttcattacatcgtcgactcggcgtccaatcttgtgattttcaaattgaatgaggaacaacaaaaaaagtacaatttgccggaacgattagaagtgccattgacaccgggcaagttttttattgcattattggcgaaatgttcaaaaataaatcaaaaaaagaaaattgaaaaaatagaaaaatatttttcagtgtttcaaaaaaaaggaaatttgattctcttaaggattttgtgttttcaattattcaaaattatgacctaatttgaataaatcattcattttattagaaatg

SEQ ID NO: 112384 - DNA, 86 bp, Heterodera glycines
tcatcccccaccttggctacgagaagcgtgggaagcagagtgccatcgcccgcaagtacctcaagtggcgtgccgaggaagagatg

SEQ ID NO: 112385 - DNA, 61 bp, Heterodera glycines
ttggagcaccgcggatgcgacagggccccttgcgcgtccaacacttccactggcgacaatg

SEQ ID NO: 112386 - DNA, 56 bp, Heterodera glycines
atttgttggtgatccgcacggaaatcaacaaattgtttggaaatttagaaggaatg

SEQ ID NO: 112387 - DNA, 413 bp, Heterodera glycines
aacatggtaagcttttgcgattgattgataccaagctctccctgattttgtccataactaaaaaaaagttatcgtcctacaaccgccggaacgtcggcgccgccaaaacacgacccacactccaatattcacgtcctttttttgtaccaaaaccctcattcaaatgtggttttcttggttccattcaaaagcttagtctcaagaattatttttaaaaaagcaacagacaataagaaaaaacacacacacagtgacaaaactacaaattcaactcttacgaatatactcaagtacgactttttgtctgttgttatgagaacccaaaataagttagacaaaaacttctaaagccaaagccttttcgattgatacccaagatttagataccaaggattaatttttctgtaaatatg

SEQ ID NO: 112388 - DNA, 314 bp, Heterodera glycines
aatttgcgttggagtaccggacgagcaggtcgaaaaccaaaaactaatggcaaaactcaaatcgttttaatcgcaccatttccagggacaaaattctgcaaacgcggaaacgcctgcaggagaagcgagagcggaacaaaacgcgcgggatgatgatcggcgcggcacagaacgcggcggtgcagcggaaacggtccggcggtgtcggacgcggcggcggcggtggcgaagtgccattgacagacaaagaggcaaatcggggcatgaagctatgacaattgggtgttatgccattatagcgtcatcaagaaatg

SEQ ID NO: 112389 - DNA, 67 bp, Heterodera glycines
taacaattaatttattatttttaattgtttattttttaaatttacatgttactttgtgctgtagatg

SEQ ID NO: 112390 - DNA, 181 bp, Heterodera glycines
ggcgaataaatttttactcgttcctcaagaaatttatcgtggtctcacctccgtgtctgacacgggtgacctcaatctggatgctgttcgacacgatttgaaccgagccaggggtgagcgaacaaatccctcaacaaaaaatgtccactacaaccaacagctaaggcgctatttgaaaatg

SEQ ID NO: 112391 - DNA, 59 bp, Heterodera glycines
agaaggacatcgtctgcgtacatcaaaaaggagtttgaccatctgttcaacccgacatg

SEQ ID NO: 112392 - DNA, 128 bp, Heterodera glycines
ttttgcaaaatccaccatctccatatatgtagataccaatattatttgaattattaattctatattacgtttctattactttttttctgaccagattaaaaagaagtgattgaatagaagaaaaaatg

SEQ ID NO: 112393 - DNA, 942 bp, Heterodera glycines
tcaatgggaagtgagaaatcactttttattccaaaaatatattttttttctttttaaaaattgtttggaaaatgttatagcggcccaacgacaaattatcccatggatctaaatcccgtaagtacaggatagagtcatcagcaccgccgaaattcccttaactcaaaagtttttttaagagaatggtaatatgcggacatgaatgttctcatattattggaaactgtctgggctctgatggatttgaatttgatagtgtgcgtttgactttgaataacttacgataaatttttttattttctgccaataagtaagagtgccgagttatgacgtgccaaacttttttagttaataaataaattaaatatttatttgcatttactttgagtgcccagtggtgtagcggtattgcgccagtaggcgtcttttaatccccaggttcggttcccccacatgcattcttttttttttttgctttttggtcaaagtaaattatcaaattagtttataatacaagattttatttttaattttttaattcatttttatacataaaatactcaataaaaatattagacaaaaattttttttcaatcgacatgatatttgtgcatttattgcatctttatgtttaattacattttttaattttaattaacaaaattaaaaaagattttgttttataaaaaatatatttaataatctactttgcataaaaagcaaaaataaaaattgtaaaatgtattagcatgtaaaggattcgaacctgagacccaaaaaaagatttgactaacgcactacccctacaccaataaattcataatgcaaagaaataattatttcttttctttaattataaaaagatgaaaagtttggcatgtcataacttggcactcgtgcttatttggcagaaaataaaaacatttttcttaagaacccatg

SEQ ID NO: 112394 - DNA, 1003 bp, Heterodera glycines
  unsure (1)..(1003): unsure at all n locations
tattcatgttgcacaacggactcgaaccaccacccgttgtccctttactatcttataaaaaccactgagccacgcatgcaaatcttttctggcacaggagctcatttcccggacgctgtgtgtaactaatggtccagcagaagccacaaatattttaaatgaataaaacttcggctctactgcagtttacgcgtcaaatcaatgaccacataggccataacttatttcttacttggtatcaattgaaagcttaaagcctatgttttttataactaattattgtgctcaagactataaacaaaaaattttccaaaatattgttgaaaaaaactgaatttcggatattctcattgtaattctttcttaatgtctttattttctcttttcttgttatagattcccgaaatttcaagcttttgtttgataccaagaatgtaagatttgactaattgtaagttagaaaaaagttgtggactaagaaaataaggatggtcactgattagacgcgtaaactcagtagagccaaaacttctgtgtaggttaataaaatcggtgtgtaagaaaattaatacatttaaattgcattttttaaatttattttttatgctttcttttccagtcaaaattccaaatagtctaaaacaaggcacgcaacctttntaaaatttaaggtaaaagaacaaattacccatccaaaaatattttcaccttaatttgtaatgcttattgttgctttaattttccagtttttagtgacaattatccattcagttaataggggtcaatgatttagtatttacataattttaatttaaaatgtaaagttcaaattatcagagtttacccgtccattggcctcggtcaactgattcggcgccatgcatgttgtgtccaaaggaataatgaacacaaatatctatcgacaaataaataaataataaatctgaggagaaatgaatgaaagagagagaagcaaatcacgaatgaacaaattgtaggaatg

SEQ ID NO: 112395 - DNA, 400 bp, Heterodera glycines
ggtgtggcatttgaaattattaaaaagggaaaaaaataaaataaagcaaataaaaatagacatttgaattgatcaattttgtatattcatatatgctaagaaaatcaattaattttttatttattcattcatttcttttcatttttatattattttttaaatattaaaaattaaatttaattcaaaaagttttatgtaatattttagaaaattgaaaaaaaatatacgaaatgaacttaaaaattgtcaataaattctcaaaaaagggaattatccgaacaattatcaaaaattatattataaatttattttcaattttttcccacttaattaaggcaaagggatttttaattaactaattaagtatctttttttaaacgatgtactacatttttacatg

SEQ ID NO: 112396 - DNA, 123 bp, Heterodera glycines
acctcaattggaagcctcttggcatatatcaatgtgttagtttaagatcaggaacccggacaggcaaaatttctgtctcttctatgcactgcaggcgacaatggttgccaagaccagaggatg

SEQ ID NO: 112397 - DNA, 188 bp, Heterodera glycines
aacgaattttcactgaaactctgggctttttttttagtaaaactgttggcccccccgtgttaaatgttggcggaaaagttgtccaagcgacgaaaccagtgttgatggctacacataataatgcatttgtgcccgcagcacaaggcatggcgtacgtgacgcgaaaaatttgaaatggtaacgaaatg

SEQ ID NO: 112398 - DNA, 174 bp, Heterodera glycines
ttttctgtttgtgtacaccgcattttctggacagaatttcattgagaatcgtctggcagcaaaaattcttttcatttccacgattggactcggtaatatatgtttaaaaaattaaccataataattcaaaaattatattaaaatataaattcaggtgcaatcactccaactatg

SEQ ID NO: 112399 - DNA, 319 bp, Heterodera glycines
tatgatcagctctgtttctgtgatcatttaatgggcgaagcaatttttggtaacagctcaaacaatgcacaaaaaagcatagcaattaaacgaaaaatgccatttaataataattaatcaattatttaagaatcacattccatggcgtaatataatgaattattgcttattaaattattttttttaattaagaagaattacaatttgtgttacccgatgagctcgaggctattaaaacactggagagtcagatacgcaattaattaattaatttaacaactagttaagatgccctaaatgcaattgtgctgttgagatg

SEQ ID NO: 112400 - DNA, 405 bp, Heterodera glycines
attcgaacaatttttaaatttattttttatttaaaaataaattatttttaaaaagtcatcgaaataaaagtctttcctgaggttttcaaggtcgctgatcacgaatcagatacgcagaaaataaatcacaggcagtgttaacagcaaaaataagtcattctatgcggatattttattgtacgggctgatcttgatccaattccccccccccaaggattcgaatagatgcaataattagctggaaatattctgattagcagagtgattgaaattattctgatggaccctaagagcggttatgagacgcgcaagattatgggtaattattctgatgtactataattatcggaattatatctgacgagaacctgaaaaatagtaattattctgacgtgtaccagaatg

SEQ ID NO: 112401 - DNA, 572 bp, Heterodera glycines
ggaacgtactcgggtttttttcgctttccggtccccgtgggaaattccttttccaatttcttcccccgaacaatatttttcagtttattagaattcaaaaatttaatcgaatttatccgaaataatttttaggtttttggctaaactacaattcgttataataaatttgaatattattggtaattcttgtagggataaaaaaggaaatgaaagtgatgatagcgtaaaaaataaggcgaatttgctgttgccggtcgcttaaatagttggcatgaaattttggcaatgcgtgaattgcacaaaactctcgccacctttgggcttcgctaatgcacgcgcgcggtgatctccagtactttcatgggtgggcgtggcacccaaaaatggtctacaaaaaggcagcaattctacgagtttggcacacttcggatttcctgctgaatcttgttgctttctcccacccttttcaacttttcaaaaatctcacttaactatttggtcattattctgctttctcgaatgacttccacccccccccccccttaattttttttttgtaactcagcaaaatg

SEQ ID NO: 112402 - DNA, 191 bp, Heterodera glycines
gttaccatatcacggtgaactgtcatgatgaacatgctactgtagctaagaccattgtacaacacaaaagtctcgcatcagacaattcgatggcctttttaggagaaaaacaacattttgaaaggaatttagttgattttaatgagataaaatgtaggcactattcagtttttatccgaatcagcagaatg

SEQ ID NO: 112403 - DNA, 305 bp, Heterodera glycines
acatttacgcctcggacatttgcgcctatgtccaaaatcgggttcaaacttgtttttcaatcttacataatataaacggcattaaaataattaagaaaaatatagtcttcaagtttattaagggccttaattctgttgttaaaaatttgtgatttaaaaaaaattacttataataaaattatcatacattcaatcagtttctatcacttaagaattaaataattaagctagaaaccattttatgctgtaaatgaccacaaggattgcaaaaattttaaacccgatttttgacattcgcgcaaatg

SEQ ID NO: 112404 - DNA, 482 bp, Heterodera glycines
ttagtctgccctctgccgcgctctttgccgcgcggacccccccacataaaaatgtttttttttggaaacaggcgggcccggggatccttccaaggccataaaaaatttttggacgaaattttgtgcgcaaaagacagatcaacgaacgatcataaaaatttaagccggcccaatttagcctgataatagaagggcacaaatctgatgtttgattcgtcgaattaaaaatatatttagaaagcctaaatttggattttctttaaatttcaaaatttttaatctttgaacccaataaaaaaaagtaaatttctaaatttaattttagttagatcaaattggtctttgatcatttataaaagagcatttaaaatggtatttaaggatgtcactttcctcaaataaatgcataaaagaattaataaatatattctaaatttacttacttcacccttaaaatttaatttgctcttattttaatgatg

SEQ ID NO: 112405 - DNA, 54 bp, Heterodera glycines
cctaaacaatcaaaaaaatgagggtagaaaatatcaacaaaaatttaaaaaatg

SEQ ID NO: 112406 - DNA, 138 bp, Heterodera glycines
ttcgcggaaatttttccactgtttttattggtcattcattttatgatttaccacattttcaattagaaactaatatttttttttgttgttaagcaatcgaaaacaattaattgtactctctccccaactaaagcaatg

SEQ ID NO: 112407 - DNA, 331 bp, Heterodera glycines
cccggtagccccccgagagaattagagtgaacgaaccgcgaaacatttttaattcctcttatttatttgacctatttatattttcatagggaacatgtttcgcgcatttggggcatagccagaaattatcaaataatgatgtaccgaaatgcaaaagactgtgttttttacatctgttacatatctcgtaatgacagggacagtaatgacaacacttaattttatgtgggcagttcatttttcaatttaattttattttgggttgctatttatagaaggggtatataaagggatgaaaggaccatttgattgatacattgtatcaaaaatg

SEQ ID NO: 112408 - DNA, 1003 bp, Heterodera glycines
attattaagggatttattgtactttttggatgagtcaaatcattcaaatttaaaaatctttttttttcaaaaatgggtcccttttcaatgtgttactctttttgcacttttacttcaattttggaataggtaaaataaataaaaactttctgtggtgctattgagcgggaaaaattgcagctaaagaaattaagaaacttgatgtaacatcaagtcaagtcattaagattttaaagtgtttatgacttaaattcccagctctattcatttgccagctgagttgcttttggacctctatttttttaatttacagatgaaacaattaggctgccgagagtttcaattttctgagacagaaaattgcttccgggaacaagaccgagattgattgttcaatttcccctacttgagaactggcagcgagacttattaaaattttttaaaatatagataaattaatcttttttctcaaattttctcattagtccattttttgttaatttaaattgattttttcgaatatattttttgttttatttcaatattatttatgtaaatcccatttttgtacttagacgatcaatttcctcccaattgcatatttaaatttaaaatctagcaagaatgaatgcttctttgctgctgctttgcaatgattactttttatgctcaaaatattttcttggaaaatggcacaacgaaaggcaaaagaaaaaagtaagaacaggtggcccataatttattatgcatttgcgtaattacatgggttgactttttgattaatttgtgcggaatgtctgagactttgcattttttaactttttttcattaattggcagtggcgtcaagcgaaataagtgaaaatcacagctacagaagagtgggtgggcattaatttaggcttctgttagccaacactttctttaaaaagatatttctccctctaatttcgacactttttaattctttttttcttcgtttttccgcttttcttttgccaatg

SEQ ID NO: 112409 - DNA, 121 bp, Heterodera glycines
ttctaaaaaacaacaaaattaaatcactggacgatgctcacaatcagaatgggttttttagtaaaaagtgaaaatagggaaagaatttgtccctcgcctttcagaacctcttctgcagatg

SEQ ID NO: 112410 - DNA, 218 bp, Heterodera glycines
tttttcggggttggtttgaaaattcttatagaaaccaattataagttttaaattaattttattaattttttcagttggaaatttgtttgagagtttttctcatttaaatttgtcgaattttttaatcccggattttttgtgttttctcggccacaatttttagggtcaatttgtaatcccgtaaaaataattctagctaacctctcctctcctaaatg

SEQ ID NO: 112411 - DNA, 632 bp, Heterodera glycines
  unsure (1)..(632): unsure at all n locations
ctgaacttttggaggagtcatttcgggtaattattctccagggaataaaatgattctgnggggaacaaccctttaaggncgacaaatatttgagtgtgcaaaagcgagtgcaattggccaacgaattggcactgaccgaaacccaagtgaagacatggtttcagaacagaaggtgagttgatgagtgtgccaaaagcggacaaaatgatgccttattttgagaatcaaaaggaatttggaaaaaaaagggttttgtcgattaattaaggctttaattttgcgttcattttttatttttaaagttaaactttctgtgcattgataaaacggggtcattcggaattcgattcaaaaaaaaaatctcgaggataagaaattttgaactttaaaaaatatatatttggggtacaatgaaaagagggggtcattcaaaaaccatttgaattttggaaatttatagccaatttactaattaataactagggctgggctttttaggcacaaaaaatcgcgaaatagcacctaaataggcactaaaataggcatttaggcattaagcacaaaaactccgaaataggcaaagttaggcattataaaagtcatcgtagacaccccaaaccaagcggaaaatg

SEQ ID NO: 112412 - DNA, 75 bp, Heterodera glycines
tccctggtgaaaagtgcagcacaatcgctggtagaactgttcaagcgcaatgccggaggtgaaaaggccaggatg

SEQ ID NO: 112413 - DNA, 529 bp, Heterodera glycines
tgtattttttgaaactcattttaaaaatcaaaaaatatttcaaaaaaatcaataattgcttgggaacaaataaatatattatttacaataataatttgtttttaatatatttaatcattttttgaaaacttgaaaaaaagatcggtcatttgaaataataaattctaaaattttacccaggaaatccatgtatttttgtgttttgcctggacctggattttttttcacatttgacctggacctggatttcatgacaaaaacccaggaaatccaggtttcgaaaaatggcctggacctggatacaaaaaaatccaggcctggacccaggtccaggtcgagctctagctaattcttatttaaatttgccctttagctgcaaaatgtgaatgtgagcacaattcggagcatcgaagatgctttggtgccgttgatcaagttcactttccaatttgatcaaaacactccgatcgatttcgacattggtctcgtcacttttgatccgaatgagcaaatattcaaatcaaaaatg

SEQ ID NO: 112414 - DNA, 312 bp, Heterodera glycines
atcagtcagtcgacttgcactgacgaaggcattacgacgagagaaagtgttgggctgagagtcagaaaagcatcggaaatactgaaaggagcggtgaaacatttggcaaaaggtgccaaaacggaaaagacagaaggaaaagcgggagaaaaaggtaaaatggagagagaaaagaaaaaacggaggaggaaaaggaaaagcggaggggaaaaaaaaggaaaaaccaacagaaaaaaaagaaaaagcgggaaaaaatcatagcattgtaaaaggttgataataaatgatcaaatcccaaaaggtgacgaaatg

SEQ ID NO: 112415 - DNA, 127 bp, Heterodera glycines
  unsure (1)..(127): unsure at all n locations
aaattcccaaattttttagtcaggcttcgatttcacgnactaatcgtttctcctctaacgatgcttttggggcgtggaaanagtcgcnaaagaaaagaccgtttagaatgtatttgtgaataggatg

SEQ ID NO: 112416 - DNA, 289 bp, Heterodera glycines
tattcattacttctccttcagtgagataaaaatttaccctttacgtgaaaaatgcaaaagtgatggcacaacacaaaaaatgataaatttactggcattatgtaaaaaacacagataaaatgtcaaactttggtaaaccttttgaattcaaatgtttcttttttaattttaatttatccttcttattttattttaattttattaaactgattgatattttctctgatttgtttttgctatagcaattattttcgtttttattccttaaattatttattgcataaaaatg

SEQ ID NO: 112417 - DNA, 68 bp, Heterodera glycines
ttgttagccacactcataaattttcgcctaattaggtaaagcgtggtcttctcgctgagggaacgatg

SEQ ID NO: 112418 - DNA, 1003 bp, Heterodera glycines
aaatttaaatgtgttataataactaataaacaccgaaaaccaaaaattcattttcacaaaaaatttttgtggagcctagattgtcaagtataaaactacattttctaacttttgctaagtaaaataggaaaaacaaaacattaaacctttttataataaaaatgaacatataaactgacctttatcgttaattgtaaatccacttcgtaaaagtaattccttttgtcaatataacaataatcgctatcccttactatataataagcgagccgaagctccgcccatttttttggttgagttaaattggcggacttggcgggaaataatttattttttggcgaattgtcttttcgagaagaaaataaaaatttgtttacctatgtgttgtttttttgtgtgaagaataatatcaatcgatcttttttgttattatttcataatttcatctgtttttagttaaataacttcattgtatttgtttcttattaataattgaatgaaatttttttatcttacacagtttttcagagcgtttcataaattcgacaaaaggtaagaaaagaaaatgtttaaattacttttaatatgctaaatagttttttaactttgttacaataatgaatttttttcaatttatttagtatttacaataatgaattaaaaaataaaaaattcatttagctttgtttttatttgcaagaaaaacggaaatttagcgttttgagcttaaaaccggttttttaagaattttaaggaatgctgattatgaatttgataatacctaattcaagacctcataaccgatttcgaataaaactcgaataagatttagctcattttgatacatttttaaacactggcgaatttatgaaacgcaaaaaattgaaatttcaaaaaatctaatacaaataaatagttaatctcttttatttttggattttttattttatatttttgttgttatttaatttaaaattttttagattcaaaatatttttctatg

SEQ ID NO: 112419 - DNA, 74 bp, Heterodera glycines
atttggcacaacaaacagaaaaaataaaaaataaataaaacttttccccttttttcaggtgttattcggacatg

SEQ ID NO: 112420 - DNA, 174 bp, Heterodera glycines
ttttcttttctgtcgtttttttcttaaatcattttccattttcggtttctctttttctgtcattttttattttctttattttccattttaaagaataaactttaataaataaaataagtccgcaagaaacgaataaaatataataaataaaaaatagatgacagagaataaatg

SEQ ID NO: 112421 - DNA, 819 bp, Heterodera glycines
  unsure (1)..(819): unsure at all n locations
attatcatttttaaagaatttgaattatttttggctctccgtccccaacaaaacgtttctcgagatcaattttcggtctcagttctctagtcttggaaaattttgactctcgagcagccttatcacatcaacagtcccccttaattatctctaataaaattttgatgaatttaaaaaatgttctttccatttaccgtacttcttcgattatagcccccgggggctctattgttcaacccccctcaaaaggggggctttattcgagagggggttctaatcgaggggggggggatataatcgaagaaatacggtattctttccatcttttgctaagttatatgacagtaattctaattaataccaattccnaaattttggtttaattaatccaagaataattagtcgtacataattttttgcgaactaatcacatcacggaaagcatttgagcattgacatgagaccgaccgacntggttttggcatatccaaaatggatggaaagagacggacgagaacgaattggatcaaaagaacggatttaataaatttatccgatcagaaaaagaaaacgcgaagggatggaagggaaaatgatcaaaggatgaccctgtcgaggataaaggatgaacatgttgtgaaggatcaccatgttttatgagaaatgcccccggagacagcggaaaaattagcgaaaggaaatttaaaaaaaaatgaaagcgaaagcaaacgaaagaaaggcattaattcggagtataaaagcctaatgagcatcaacaaaaatcacatttgtccgatttcttctgctatcctcccaatg

SEQ ID NO: 112422 - DNA, 1003 bp, Heterodera glycines
aatgaatgaaaaattatttgccggtttttaccgaattttggactgagtaccggggactcaattgtccaaggctcatttgtcctttgcggaaagaggaaaagcgacaaaggccaaatgaaaagtgttggcgaaattggccaaattaaaatgccaacactccgcgggagatttgctgttttacgccttcgttgtgaatatggttttccaacattatttatttttatgcggggcttctgcaaattaattttaccacttattttgttccaatattttctttgaaataattttaatgaaattctatcgcattctttcacaatttttttttgaataagtataaattgggcaattgtgtggcaattaaatgccggaaatgattttgcccaatttgtctcgactcttttttccccatcgtctctcatccctcgttcatcttctgctgtttgtgccgttcgtacattcccccccccccgtctcattccgtttcatttccgcttttccgatggccaagtgccctttccctcccctccccaattgccccccgagggcactcatttttttcccgcattgttttcatcccccgaggcgaacaaaaatccatttcaatgcatcaaaagccggagcccacttttgcaaattttgcggaaattgtgccaattttggacagacaaagaaaaatggatgggagagaaaatcggggcaaaacaaccaaagattatgtggcaaaaggccagagtaacacaaatcctatggattcactgttttacattttactttttctattttaaaattcattttttaaatttaattgcttccccccttttttttgccaaagtcaagtcaaataaatgccaaattttgactttgtccttttgtgtcatcaaaaattgtgaaaggatttccatttttaattgttctgtatttatagctaaatgtaagcatttatttttaaaaatttctttgaataaaattattattttacttcgaataaattctcagaaaaatg

SEQ ID NO: 112423 - DNA, 1003 bp, Heterodera glycines
cgacattacttagtgtcgaaaatactcagtgtcgaatttacatagcgccataataattttatgaatttaataaatagaataattaaatttaattatttaatcatcactaagttttttgttttcgcatttgtctcagcacgtaaaattcttcattattttgttttccttggcaccaaatttgcctttgctgctgatgcacacgcatttacaaaaaaacaaaaattatgtccatttttactggacggcgcaagtgtcggtacatctctcaaacagcactaatacacagcaattaaccatttattatgcctgtatcttaagtcgattacaagcaagttgggtgaaattttcttaatctgcttgagagttgaaaaatttccaagcctcggaagccaaattcgagaagagcagagagaatcgagccccacaaaaaaaaaaaatgaaaattctctgaatttgaagaccgaactctcgagcagcaataaaattttgttaatagattttttacaatattaattaaaattactgattatttttcttaattaattcgtaataaattctcatttttacatccataaaaaaacgttgttttgacatcttcaatgtttgtttgttgggaatattaatgattgtcacaatccccccgatcagctctggaattttttttcaccatttatttcatgaaagtcttgaggatggacaaaattgattaatataatcaaagcatcatcaacagatcgcttcataaatgaaaaaacaaaaaatttccaatgtcaaattaatttttgttgcatttcagcaaaattatggcaatttgccgttaaatggcaatgccaaaagaatttacaagaaagaagaccaatcacctaaattaactcaatctatttttaaatttggtttttatgttcctaatttaattttgttttttcgagtttttcagttttaaattgaatttcctcatcccagtgctgctctctaattcgtctctcgccctaactaattaatg

SEQ ID NO: 112424 - DNA, 368 bp, Heterodera glycines
cgtgcgtcgtattcattatcgatactataaacatggatcagagtgccagttatagcaacatttatgattctcacaatgtttccgtgtttttaaacaaagtttgaaccaaaaacgtgaaaatcgaaaatttgagttttccgctttttgtccggaattcggaattggtcgaaatgaatgccggattcgtgatcagcgaccccgaaaacccacagaaacgtgttttcatgacttttgaaaacaaaaaatttttctttaaaagggagggacaaactttactattaccgaaatgagcttaaatttaaagttttaattgataccaagaaagtaggcattgataagtgagagaaaagcagtagaaactggggatg

SEQ ID NO: 112425 - DNA, 372 bp, Heterodera glycines
ttttcatctgacaatgaaaagatacaaagttcaaataatataatgaaattaaaaattatttaaagcaataattgcatatttgagcaagaaatcatttttttgaaaaatttgaatgataatttgccatcggtgaatgacacaggcacataatcctcgtcatttaattatgacaacacccaaatgaaatgaatttcttcattttcctttcccaaatcaatgtttctcttttattatatgcgaaccattttttggtcaattcaaattaattagtttgcgataataatctttattattaaaaaattgctccaatctgttctttttttagtaaatttatttaattttcattaaaaaaaacttctaaattacaaaatg

SEQ ID NO: 112426 - DNA, 61 bp, Heterodera glycines
ggtgagcacttagcggatgacaattaaatatcttaaaaaattatttatagacaatggcatg

SEQ ID NO: 112427 - DNA, 86 bp, Heterodera glycines
aggattcattgaggaattggtggacgaaagtgctccaaaacaatgagaagacgataccacagaagcaactcgagtgtgtgctgatg

SEQ ID NO: 112428 - DNA, 891 bp, Heterodera glycines
catattttggtcatttttggacaaaaatctgtaaacaactcgcattaaaaattacaaatttttccggacccccctatcctcaaaaaaattttttaaaaagcgcgccgtaaaaaaacccattttataaacaaaaaaagtcgtcgcatggcttaaaatcgcaaaaattaggcagtttttggtgaaaatctgttaacaaattgcattcaaattttcaaaatttttccccggcggcgcctgtcggcaccgccggaccccccccccctgtcccacaaaatttttggaaaaagcgcgccgcaaaaaaagcgtttttaaagcagaaaaaagtcgtcgtaaatgaagaaaatgataagtgaaaacaaaaaaatgttggaaaaaaacaattccggtgaaaaatacaagccatttgaataaatattaaccattttgcattgcatataataaaaattttaaatgtccttgaatttcatgaattttccccactatgtccttgcaaatcggcatacccgtccttggaaaccgagcattgggcgataccaaccctgttttcttttattttttttcatgtaaggttaacaaaagcatgcattttgtggttttcgaggtcgtcgatcagtgatcacgaatgtaatatacctaaccaaagttttggccaatcccggatccgaattcagacaaaaagtctgaatttcaaatttttggttttaaaattatgttcgaatctgttcacaaccattttaggatattacattggtttcttattattactcatttttaatcaattttaaaataaaatgtcaattttgaactttcgactttttgttcgaattcgggtccgggattaaaaatgccctaattttggatttttagattggcttaataaacaattaaatg

SEQ ID NO: 112429 - DNA, 651 bp, Heterodera glycines
gcttgatttaaaaatttgtaaaaaaaatttcttaggagccaaaattgttgaagatttccatcgtaagagtgtctacttttaattaaattaatcaaatttatttagaaaaacaaaatcagtgacacaccagaatgccgaaaaatgattgaagaaatgaggaattgtatatgcccaagccaagtggataaacgggatgaatactaccgtgacgtattcctaattgattttaaaacttttaatagtaaactgtttttaattcgattaaattaggcaaaaccagttgattttctgccacactcgtgcgtggaagaagaaggttggccgcaaactgattgctgtcccgaaaacacccgcgttgaatgttgcgcattccatgaaacggtttatcagactagcaaaattgctttggatatttcaaattattattttaaataaatattataataatattttaggaagcagatgacgtccgaaaaaacgtggttttggtaaatgcgctaatatacaaaaattgaaatccaaaaacaattattagatttatgaatattcacaattactattttgatcaaaaacaagtagattagcaaattacagaattaaaaatttcttattaatttgtgttaatttagaaagctcgcatgcgcaattatg

SEQ ID NO: 112430 - DNA, 210 bp, Heterodera glycines
gaaaaataaaattattaattacataaaatggtaaaataatagaaaaactgtatttttttttaatttaaagcacaaaatccttaattaacaaattaagcatgaaaaaatgcaataacatagaggaatttatttttgttaatttttaattttattgctttccaatgaaattggatataattgagaatttcttccatttttagttgtgggatg

SEQ ID NO: 112431 - DNA, 1003 bp, Heterodera glycines
ctggcgagaatgaatttgtgcgttctcgtgccatttcgcttatttcgaacaaataaaaagaaacatgtcaaagtctacctaattaaggaaaatgaacgcacattaatgttccataataatcgaataaaaataaaaccaaaatgtaaattggatttcacacctttcctctttcaaattcatgactatgccaaaacgcattttcgttcctttttcaaaagaaatatgttcgatattttttcgtataatttttttgataactatcaaatttatccgaaacttcatcggcaaaattggcactttgaatgccattccttttattgccatattttcctttatatctgcactaatttgcatatcattcacaataatttgtccattagattttggtttcattctcatagaaatttcatttaattattgtttaaatgtcaacaaatctcataccgatgcttccctttttgtttttatttggacttctttcctggttttgctttgctttttttattggcattgtgaccttccctcacttttcattttcttggcactccccggagaagacccccgcccacccccgccgaatggacaaatgcggggaggggagacaaaatgaatttattccgcttcttgtccaacttatcgctctgcacacacacacacagagccattctgatgcttctgctcggaagaaggcttttttgccctcgggggacggattcatttctcagcagaaaagacaatcaaaaaaagggaggggggaaacatttttgggttgttgtgttttttttttcgtacaaaacttcagcaaaatttgaatgtaaaagtttattttatttattttgcttaaacacattccgattccaattgattcatctttattttggcacttaattttacataaattttcattttttgacttctgtaacaaattttctcatcattttgaagtctaatttcatgctaatcggctaacaatttttgcaaatgcgcccatttttgcgaaatg

SEQ ID NO: 112432 - DNA, 192 bp, Heterodera glycines
tttcttttttctcttcagctgaataaattttcttccctatgaaaaaaaaaaattaaatttaattggcacattaaaatgtaataattaaatttatttatttttattttatttggtttttcgtcagaggcattgaattgagatggacacaggaaactgagaaaatttaaaagatttttcagtagttggccgatg

SEQ ID NO: 112433 - DNA, 95 bp, Heterodera glycines
cgtgagtaaggcgtgatgagtacccgttgaatatcccccccccctcgccgtcctcagctgctcgccacggtcgccaccgacttggctacggaatg

SEQ ID NO: 112434 - DNA, 58 bp, Heterodera glycines
tggtcgattaaatttctgccgtttatctgttcatttcaaaatttaatggtactcaatg

SEQ ID NO: 112435 - DNA, 341 bp, Heterodera glycines
gagattctaaaggatcgggaagaaattgaggagttgttctcggcgatcacgaacaatttacaagcatggtcgcagaaaaaaatggtaatttacattgcactaaagctactataattaagaaaaggagaaatgttaagttgtgcaaataaaaatgatagataagataggatttcgcttttctgtgattagatttgtttttccgtttttaaacatattttctgtcattttttagtttttgttcggttttttccgttaaaaaccgagtaaaaatcgcaaaaaatcctgcaaataacggaagataaattgtgaggttttataaaaaattgctttttcaggaaatg

SEQ ID NO: 112436 - DNA, 421 bp, Heterodera glycines
tcagagagagctgtaaaaaatattttacaattttcaataaaaaaaaatttagttggatacgaaaattaacgtgactcttggaattgggactagattttttgaatcgttatgttttaaaaagaaagaatatattttccgacattgctagcaggcaccgccggtggaattttgaatattttttgggaaatttgtatacaaaagcacggatatatctcgaaaattgagcgagaaaaaacccaggtctcgaaaagattggggtttcctggtcctgttatgtcaagaaaatacaggcccagaccaagatgggtccaggctttttcaaaatctcatgcttataagttcaatttatttaattttttatattatttgtcctcctgacccgattgattccttttttaaattttattaatttgtcaagatg

SEQ ID NO: 112437 - DNA, 155 bp, Heterodera glycines
tttttatattattctttttaaatttatatttaaaatacccacccgtattattaaattcattgaatatataataaattaattattttatcaatcattgagtttttttcgcatcgtctcagcacatttaaaaaacaaaaataatattgtttaagatg

SEQ ID NO: 112438 - DNA, 669 bp, Heterodera glycines
aagataaatagatgaaaatatttcaaattttatggtttaggtgacgaacaatgatacgacagttaattggaaagctataaaaatgctacgtacactattatacctaatggacaatacagaatatttgtagctgttgggccatacggtaattcgaaatgaaattttttatatataatatttactatttacttttccattttccattatgcaacccattttagcgctatgaagaatttggcgttttttttttgcatgattttaccaaaaagaaattttttgaaaaattcagaaaaatttctataactttttgaaatccagaaaaaccccctaagattggtggatctcttaaaatttgttgatgaaaattatgggaggcggtataactgaaatatggcataagcagtaactgaatattttgataatgttaaagaatgtgacttgaaaactttaagttttttttaagatggcccaaaacaatttggattttcaactgacaaatatggcaaaattaatcgaaattttttgaaaaacattgtaaatgcagatgctacccgagaatggtttttaagcaatgaaacagcagagaaaatcaccattctagtggagaagggctctgataaacgtattattagcgaatatacgaattatgccaaattaaacaaagcaatg

SEQ ID NO: 112439 - DNA, 515 bp, Heterodera glycines
ttggaaatcaaaaagaattgccgtggataaacaaaccgaaaaagaattgataaaattaaaataaaataaattaaaataaattgtgggggctttttgctgtcattttcttcttcgctttcctttctttgcccacattttgcttttctcttcttcctattgactttttccaattgacgcgaaactacgcaaatcgaaggaaacgaaacgaaacattcgcatttattgtcatttacttaattaactaattataattaatcaatccaattagaggtagaaacccaaaataataagagaatactttctgtaattaattaatttatcaacaaaatattaataatttaattatgtgattaatgccgaggatatttaaagattaattacataattaattgagtaaatcgatgccaatcttttgactgccttttttcacatgtcccaccatcagcagcactttcctcccgccatgtttaaatccgaccggcgtttgctcagtgcgccgtaccaaagtcgaaatg

SEQ ID NO: 112440 - DNA, 696 bp, Heterodera glycines
ttgttgaacaacaccaacagcacaacggcgccgactcgactttgctgtgcacacaatcgcccacggggaagaacaacgtcaacaaaatggcatcaccaaatgtaaaaaaaggggcaggggggtcgagagtctcggggtcagtttgggcaccgagtttgtttaattttaattgccaaaattctgtaaatttgtatcattcgttttttttatgtttaagcaagcatagttattccatggctaatttgaaatggaatttacaaaaataaatttgaaattcattctaatctaaaaatataatcttagttaaattataccgatttccagcagaaaaatgtgacatattttaaagggaatttatggagaaatgtgccgcaattttttgctgtaaaaattcgcggatatctttgactgatatctgtcgataagtgcgaatggataatcaacaaaagcgatgcatttattttttacatttactgggattttttaaattatacaattgaattggatttatttgcttttgattttaattaatcaattaatttaattttttatttaatttttcgaattcttttattttttgcccgcttttctcctcaggcaaattttggcgttcggtccgcccggcgttctctgtccatggacgcctccggcacttgggaggaggaattggcacgccaagtggcggaacggaaaatg

SEQ ID NO: 112441 - DNA, 311 bp, Heterodera glycines
  unsure (1)..(311): unsure at all n locations
ttaatttcaaggtcaaactattcggngttcaagatttcttgaaagttttgacaaaaaaatttttttaatttttcgtaccccttggcttagacttttgaccntaaaccccatctctaatgggggaaaccatgaccaaaattttattttttttctcatatttcagaaggccttaaaaaccaaattgtaattgaagaatgaagggttgtgcggaaaattatgcccaaaaatagcccattttttccatttttaaagcaccataaattccggcttttctggaaattttgtcaaaatctaggtttctggccaaaatg

SEQ ID NO: 112442 - DNA, 80 bp, Heterodera glycines
cgtggtgagtcaaaacttttgttgttttagtaactaatttcgctctgttcccacaggtaaaaatctcggacttcggcatg

SEQ ID NO: 112443 - DNA, 203 bp, Heterodera glycines
atttctaaggctgcttgagagagaagatgctaggcatgagcgctacaaattaaggaatattaattagtttattggtacataattaatgctcattggtttgaaaaatctaaaatagcttaaattaagttattaaaggcaaaagaattagttaattaacattcattaacaaattagtttttaaatcgaattcagtttcagaaatg

SEQ ID NO: 112444 - DNA, 387 bp, Heterodera glycines
atggtcaatagttatgtttagcaaaattttaaacttcctcccccgcgagtcacaaaatgttaaatattttctgttaaaagaattataaaaaaggttttttgcccaaaatcctcaaaattatttaaaaaagagaacacaccattgattcgctgtaatttttttcaaaaaataactcttgaaaataaataagttaattatttcttaggcaaagaatttttcaatatatttaataatttaggcagagcagaaaggcgaatttacggaggacgaactgccgccgccatcagttaaactgagtcagtgtttgaaaaattttcttttaaatttattttttattttattttttcaattaaatttacaattatatataataaattttaaggtatg

SEQ ID NO: 112445 - DNA, 1003 bp, Heterodera glycines
tttgatgcgctgagcacgaatttgaccttcttttgacttaatggtatcctccagccccatttccgtgaccttttcaacaaggccttcgatgttgcccatggcaagctgttcagaaaaaactttgttttttcaaaaaaatatggcatgtgatggatttcgtggtgaatccgtcaatggtataccaagaaaattggaaattatgcccaaaattgtgcaaaaatgcatgtcaaaaagctacacataatggaaattcaagcgcctaaatccatagcgaaataacggcattttttgccaatccaaagccggcagcgaacgccacacattttggagcgtgcgcgacggcggcccacaacgagtcgaggactttgatgccgttgtcctcgaagatgttgtcactggttttggtggttccaccgctattttggatgaagaaaattgaagacgaaagctggacaaaaggcacagtcagtggaaagtaaaaaagaaaggctaaaaaggaagaaaaattgaaattatttagaggttttttttttatcactaatttgggtattttattagtgcatttgttgacgtatcttttaacgtaaataagatttttttgtcgccattaatttttgagaaaatcgcttaaaagaatttgttttgtttgtttttttttttgctccaatactttcgaccgtgactgttgtacttctataaataaataaaaaaaacaaatttgtgtttattcatctcactaccagcagaacccttgatgagccgcaacagcgcagaatttcccttccccctttatcaccaaaattactaaattttcacagtttggctcttttacaatttacgtatcctaatgttagcacaaaatttcgagtccatacatttttcaaaacttacaaaatcaaatacgcaattagtgcgtgaataaataatctaaaggcgtaaagtaaattggaggcgtaatgtaatagagccaaattttctgaaaatacagagcaattttataatg

SEQ ID NO: 112446 - DNA, 332 bp, Heterodera glycines
ttttgacgggcgagcgattcagctaatgagcaaaaaaaaaggagataaaaagtcaatttgaccaaagggttttttaagacatacgagaaattgcattttagaaatcaaacagacttagagcaacaaaaaaaagaaaatgttataatgccctaaatgtttttgaagccgcaaaaatggcagtgccaaaaatgactcaaaaatataagaattcgtttaagaatttatgagcgatttcgaaaatttattttattttttacattttagaacctactaaaatttatgatgtattaaattcaaaaattatttattacgatttgaataaaaattgaatg

SEQ ID NO: 112447 - DNA, 1003 bp, Heterodera glycines
ttttgatttatttacaaaaaattaacaaattattataattcattttaaatatatgaccaaaatttaaaaaaaaaattagcaataatcaaaaattcaattcgtatttgtaaaaataaaaaaagatcaataattcactttaatatacacgtaaaattataaaaaaatatcaacaaaacaataatcaataattcaccatgcaacatcagaaagtaatttgtataaattaagaaaattcaatggtcctaaaatgactaattttttttttgttgtaatttttatgtaaaagaaatgctctggaacccggcatttacgaccccgagttttccgctccccgtcccccgaccctttttaacatattttttaaaaaccaaaaaaagcctcagggcaagaattttttgcttttaaaaattatttagagcacaatactgagctggctttatttttgggtcggggtcacttcggcgcggaccatttcggcgccgcaaattttgaaatgctataacttttttatttgtcagttagctttagccaatctagcatcatttgaaagctctatgtgtgctctatatttacatgtaaaaatagaaatgaatgattcaaaaataaaaaaagttatgccacgtggcgcctaaaaagccaagaaaaagtcaatttttgaggttttttggccataacttttttggaaactgacgaaatttttttaaattttacaggctaatagagaatctgaagagctatagattgataacaaaaatttttaatttggttgatcaggaaaaaagttgttagcaacggcgccgaaaggccggcgccgaagtgggcggttcccttattttttacacttttgaataaatattgtcacacccctaaatgtgaaactttttagcacctatttttttaggttttttagaacctaaaaactaaattttttggcagtttttagcaactataaatcgtagccatattaagaaaatatattatattaatgaattattttagcatg

SEQ ID NO: 112448 - DNA, 58 bp, Heterodera glycines
caccaatatcaaaagcccacttaagcatcccaacgctttctcacacagcgttgcgatg

SEQ ID NO: 112449 - DNA, 289 bp, Heterodera glycines
tttaattttatttattttttatttatgtattttgttaattttttttattaaacaatttttccttttccatcgatttgaattttcattaaagtaaacgcaaaattatttgttcaattatgtattaggtgtttacaataaatttccgtttgcttttagcaaaagaaagaatttgataatgatgcattccagccaaaattcagcctctaattcctaccagccgcagcagaacggcaacaacattcaccaaatctccgaggggacgacggccacggcactgcccgaggcgatg

SEQ ID NO: 112450 - DNA, 691 bp, Heterodera glycines
tttgtcatctgtatgcaaatcgatggctgctcatttttcctctgctgctgctggttactcactcttctgaactccttgtaaatgaggaggccctaactgccttaaattacccaataaaattttctagtttgagaagcattcccaaattaattttaggaaaagctaaactataaaaatacataaaaaacaaaagttggattcatttctctgtcctattcaaaacgaagaagtgaaagagagcgagagagatagagaacgcagagatagacaacggaaggaaaggcgagaaacgcagagagtgttgcgctagaagagaaaaagcgagaacagagaagcaaagacaaaagtgtgcacgttagaagtggaagcagaaaagcgagacagttctacgcaaaacccctcgggcgaggacgaaaagcggccgaatcattgtgaaaggacgaacgcaacgcaaggcatagagaaaaataaaaagagagagagggagagagaaaaggaaaaggcagacaaagcagaagagataaagcaaacggaaaagagagactaacggccattgcttctgctgctattgcgacgaaacgggccaaaccaagttcaaagtgccagtgcgacggttccgttcaatgctaatcagctaattgctcactaattaccccaaataacaaaactgtgcctgcttctcccaacaatg

SEQ ID NO: 112451 - DNA, 278 bp, Heterodera glycines; identical to SEQ ID NO: 109672

SEQ ID NO: 112452 - DNA, 951 bp, Heterodera glycines
aacgacaataacacaatggtaattatcctagctcgctttgcatcgaaattaaatatgcccggggcacactttttgttgtttttaatgactaatcactgccccgctgatcagtcaaagtcagaaggggcgctttgttttggtaagcccccgccccccgcttctgctggtcgtatcccattattctttctttgggttttaagctgcaggtttttacacatccaatttaaaacaaaattattattttttacacgatttagcaaataaaataaaataattatttcttttgttctgtgtttttattttattttggatattagtaaagtaaacaaaaaaagataaatgatttgtaatcactttatcattgcaagatttttagtgctgataaccaagaatgtcaacaacggatggaataggtacttacaaatgttaaaaaggcattattaaagaagacaccaataaataaaaattacctattatacctctaaattaaatactttaatattttgaaagaaatattcttaatcgaatccgagagtaattatcagaaatagatgactaattaacctttaaaaatttagcagaaatttattaaataatatattaaatttaaaaaaatctgttgaattggggcgatatgtaattttgatgattttaaattaccaaatatttttttagttaattatgatagaaaataggcgaaaattttttcagcaaaattcatttaatggttaaaagttttctctgtttatcagattgagttaattaattaattaattataaaatatgcttctaattttattatttttgtgtgtaaggattagcaaagtttactatttcaacaagaaaatgaaaaatttacttttgaaagccatgaaaaacattttttaaattcttcgtatttcatgattttttcaatatgaatgctgaaaaaattttgagcaataaaatatg

SEQ ID NO: 112453 - DNA, 614 bp, Heterodera glycines
  unsure (1)..(614): unsure at all n locations
tgatctanaataataaaataaattatttaattttttgaatatttcaaaataatatttgtgaaaaagcgcagcggaaaattaagtgttttttagtgctaaagtcatttataaataaatgttcagagaagtgttttttgttcctctcatataataaaataatgcaaaaatatataaaaattcaaataaattgttcgaatttgaattttagaagttttcttatgaaatttttacttttctttttggacaaagcgaaaggaccgacgaaaatggcactgccgaggccccaccatcccccaaatggcactgacgatttttttttatttttacattgaaaatccacgcactaccagccaacatttattaacgtgtcactatgtgtaagcataaattgccaataaatataaagccatatttccgtttgcttccctaatatggtattagttgccttaagaaaatattaacaaaatttaatagacaaacggaagcaataaaaattaataattaaataattaaacgcgtttaaaagcataaattaattttattgccaattttcctttcaaagcgaacatttatttccaattgcttaattcttttaattgctgaattgccaaatg

SEQ ID NO: 112454 - DNA, 61 bp, Heterodera glycines
tattcgtaaacactgctgggcttcgtagcaacgatttgcatcggtacaaaagcacaaaatg

SEQ ID NO: 112455 - DNA, 301 bp, Heterodera glycines
ggtgattatcacggggcatttaattcgttttctgcgttttttttgtcccatttttaggcattttctaacgcttattctccggttactttttgcattcactttcggctgtcttctccaattgacttcgctgtgccatttgatcggatcaatgaactgactggagagaaattgatacttggacaattagcaaatgattgttgcctcttccgttgtccaattgcatgggacaggagaaagtggaaaaatgtgtgggaagaaatgattgctcgaacgaacccaattgacattgtgatcagcgatg

SEQ ID NO: 112456 - DNA, 815 bp, Heterodera glycines
tgaaaatcggcgcgagagtgaaagaatcgggagggaagaaggggatctattactctttgattgatattgtcagcctttaaatctataaataaacttgttaattttttcaaataaaaaatgttttacttaaaattatttctagtttggttcttgttggtcggaacggaaagttgttgcctttcaaaagaagaaaaagagcaatttaccagtgcccgaagaactgtagaaggcgtatttagagacataattaggttagataacgaagcaaaagaattttctttttctgcacataataccatggttgaagcccaaaatataaaaaataaaaaccctgataaacctggtgtaaatttttggcatagcaaattattagatggagttttaaaaattcatgccctatttgacaaaataaaaaaagaagaaaaaaatatgaaaaatattaaaaaaggtatggaaaaatgtctagacagaaaagatttaactatgtgtcaagaattagcagaagaggccaaacaatcaatcgaaatagccaaaaattatcggcaagaaattgggcatatttatcggaccgcttactcgcagccagatttaggtattggagatttggcaaataaactaaaagaaacaatgcgcgaaaaccaaatacggtttgaaaggcaaagacctcaggaagaatttagggatgaatgggtgacaacaagaaatcgttgatgatgctaagaaaaatccgagactccaaactgaatttagagatgaatttattgtttgtaaactataaataggatcaagaaaaaaataccaattaaataaaaatg

SEQ ID NO: 112457 - DNA, 83 bp, Heterodera glycines
  unsure (1)..(83): unsure at all n locations
gagaggttaaggatggatntagtgaaatattgttaaaagcgaattagtaaattaagcatttggagcccatttctgcagcaatg

SEQ ID NO: 112458 - DNA, 600 bp, Heterodera glycines
ttttcaaataatgccctaaaagggagaaaaatcattgaaaaagccaaagaaaataaaggaaaagcccagaggggaagcgagcggataaaaggcaaagtgatcggattaaaagaaatagcaaaatgatcagaggaaaaacgagcgggtaaataggcaaagtgatcggaggaaaagcgagcgaataaataggcaaagtgattggaggaaaatagacgggtgaacggagacgacggcgtaattcgttcccgccattagcaaaaacggaagtgatcgctgggaaagagagtgatcagcagagccaaagggacaaaagtgaactccgaacgattctcatcattcgaagcacataaattggcctttacacttcgcttttcccacgccatcgccgacattcccccgacgattggcgagattagccattttcacagcaaagccgagaaaaagtgttcgctcaccgccgccccattcgcaatttctttttaaataaacgcccattcggccgatcgaagggacttttgtttcgccattcgtttcattttaattgaaatttaatttaataaaaatttaattttatttaatttcagtcatttgcccggcatg

SEQ ID NO: 112459 - DNA, 222 bp, Heterodera glycines
atttcggtttttttgctaattttaattggggacattttgactgattttagcttgggggacattatgacgtggggacattataaaagtatatataagacaattgtgagcttttatcactttattttcattagatttgtattcgttcaatctttttcaaaatattagtctatgccaatttttcatagcatatatactttaggagcaaacctatttatcaaaatg

SEQ ID NO: 112460 - DNA, 267 bp, Heterodera glycines
tttttgcaaattaatctagaattaattaatataaaattttaaaacgaataagtccttttctagaaaaaaaaactgcaaaataattttgcgaagatgattaatgaaaaaaaaagaaattcaagcgctatttataacagtcatgaatataggttaagtaaataataacaagtataaaatcagattttcattcattttaagtcactttaatattaataaaataaaattgcattttcaattcctgatttttaaaataattttttgataatg

SEQ ID NO: 112461 - DNA, 163 bp, Heterodera glycines
  unsure (1)..(163): unsure at all n locations
gagggtaaacgatccccttactacacaccctnagggtcaaagttttaatcgaattttgggtgtttttttatgtgcattctgctgattacatacccctgaaatttggtagtttcagcgtaactcgaactcgacccgcccttcctcgtcccatcatgcacaaatg

SEQ ID NO: 112462 - DNA, 712 bp, Heterodera glycines
agtgtgcagcaacagttgctgttaatgaccgttaattaattaattaattatcaaccgggcacagcgcctaatctgtttggcgtgtcacagctatagccctaggaattggacggaaaacaattgccgtgagttatatttggttcctcaccatgccataaacgcaaaaatttaatcattaaggataagaggaaaattaattttaaaaaagtttggcaaaaaataaattaatttaaattgactggaaaactatatggttataaaaagtggtttcgatcacttattactcaaactcatagctaaattttggtacattaaaaagaaaataaaaatattttttaaatcattaaaaaatgaatgagtcaagcatattgtatttataatttataatttatttattttaacttaaaattttaatatgaatattaagtattttgaccaattttaagtaatcaattttttaaagaatttgttttttaatctttaacaatattccatactgtactttagctggctggccattttcctgtgacttgtcgctaattaattaattaattaaaggtaaacatatccaagggatctgcccttcacttttctctaacattttcagaacaaatttgtaatctttttttttctccggaggtcatttggtctttatatcccactcattaatgagtcattcattaatggtcgaccgttgtacaaattcgacatg

SEQ ID NO: 112463 - DNA, 91 bp, Heterodera glycines
tttcgaccaattccgaataccggatccgaaatcgaacaaaaaaaaatagaaaatttaacttttagaattttatatctttagtctaaaaatg

SEQ ID NO: 112464 - DNA, 1003 bp, Heterodera glycines
ttttttgtggttctttgggccaatgattctgaatttgaagttgattgcgtccattacgaattccaggccctaattcgaaccaaaaccaatttttaccaaaacgattgcacttttttcttcatttttatgataattttctgatttaacccacatcgttgtaatcacttttttcttgaaaaaatttatataaatttttaaattttgttcgaattagggagagtttgtaatggactaatggacttcaattcctgatcattgtcccaaaaccccaaaaaatttttagaaaaatccgagaacctcgagcataataatttatttgaattcccgaaaaaaagtctttatttaatgaatcgaattttctaataataaatatacatatcacaaaaaatggatctcttcgcattgaggtattttatacaattatttgaatctttgaaaagaagctgaaaattttaaaaatgcaacaccagagcgctttaaaaataatgaatacaaagcaaaaaaaattattacagacataaattagttgataatattaaattaaaaaataaattaaaaagaaagtacaataaatttctttttccgttgtcaatcaattgtttgagtgttgcatttatagttttaataaaattattaaagaaagaacgaaaaagccttaaaaactttaaagatttcgttactttaataaaaacctatgtgaacaattcaaacaaattaaaaataaattgcaactaatgtttataagttgggcgcgcacggttgggcgctcacggttgggtgcgcacggttgggcgccagcacgtttggacgccggcacatttgggcgccaatattccaacaatttttttaaatttgtttttttttatttaaaaatgttttaaagcgaccataaattccaatttttatgttttaaaatttattaaaaggatataagtaaatattattccgtacggatgcagcagcaaattgaccaaaagaaataggccaaagctagagcacgatg

SEQ ID NO: 112465 - DNA, 236 bp, Heterodera glycines
gatgctcataattttctagtatttacttttaaaacataggcatttttggtttaaaatggttccatctaaggcgcagaaaatgaatgttaggaatttgacgattttcatatacattcccgagacccggaaaaaacatttttttcgatttcgaattttgatttaaatgcatttcgtaatttttggttgtttttagtgtcaccgaatcaaaaatttagataatcatgttcagtgtgatg

SEQ ID NO: 112466 - DNA, 379 bp, Heterodera glycines
ttattaagaccaaaaaatacaaaaatttaattattttaattttgtcatattttatttaatatttttttaaatttcccttgttattttttattacattctttgattcattgttttcgaatatttgcagacattgcaaattaaaataaggaaaaggctaatatgacgaacccctctactcactccaatgaaatcgacacaacaattagcagaaacaacaatgattttgtagtggatgattgcttcgcggacgacgatttgcttacaccgacagagggtcttttacaattagtcttaatgacggaatttacttttacaattttcatttttaaattaagctgatggttctttttccttcaaaaatattccttctactgaaatg

SEQ ID NO: 112467 - DNA, 332 bp, Heterodera glycines
ttaaaattatatacgctataagccaaattttgtagcattttttgacagaaagacaaaattttgtgcatttttgggggactgaaaaataaattttatgcatttttgggtctgaaaattttgcgggaattatgtcgtccgtggtaacgataggcgttgtcggtggcaattttgcaaaatttaacgaaatttggtaagaaattgaaccaaaaaatgctatttccaatgtttctccctcaaaaattttaacaaattgcgtaaaacctaacctataaaaaagtttcactacggtgctgtcaaagaaattttttaattagattttcccctgaaaaatg

SEQ ID NO: 112468 - DNA, 162 bp, Heterodera glycines
tattattcatcaacagctgtgtcttctcctcgactaagtgcctttgccaaacgaaagaaagtatttgcaagggtttgaggcaaaagtttgagggatacggaggaaatgtgtttaattggtggaggggggggggggaaggggagggggaagtgtaggacgatg

SEQ ID NO: 112469 - DNA, 129 bp, Heterodera glycines
ttaatgaattgatggaaccgaacaatggattttatgccttctatggggacaaaataccagtgacaatcaattttgctgtgggcgaagcaaaagtggataaatccatttctgattcaagcaaatcctatg

SEQ ID NO: 112470 - DNA, 342 bp, Heterodera glycines
ttaattgtcaaattggatcagaaagaaaaattgccttcaagtcctttgccgaaatatttaggagaaaaatggcaagccttccaagacgaaaaacgaaatgaactcaaaaaaagagaaataattggaaaatattataaaataaaagagaaaataaagcaaaaaggaagaaaatactcaacaaaagaatggcataaaatcaatgcgaatatagcgaaaaaattgggcacaaatcgaagtaaaatttatgaatggatcaaagaatttggtcttcaaaaaaataaatgtcataaatcaaaaagtgatgaagaaaaatttaaaattgtgcagaaatttattgaaatg

SEQ ID NO: 112471 - DNA, 67 bp, Heterodera glycines
aattccttttgcaaagcgttaatttcacaattaaagaatttggaccttcgggtgatatgtgaaaatg

SEQ ID NO: 112472 - DNA, 719 bp, Heterodera glycines
  unsure (1)..(719): unsure at all n locations
aaaaaaaaagatcaattttattattntggcaaaattccttggtaacatttttctatttcattaaaatggttttcattacaaatatattttttaaaagtgttagtgtttaattataattataatataagatttatttcatttaaaaattattatagtaatcatcgcttttagtgcgtatgataattccccaaaaatagcattgatcagcttttatagtatttaattaatgtgcgcaaaatacaaatgtataaaagttatgaatatgtgataagcagaagggattcccagtttggtctcggatttattacacatttaaaagcgaactttgattatttttcattccgaaaatgtcagagttaatgaggaaaaattgggtttttgaaaaaatttgcttaataaaaaactatacaaattgctaaatttgaaaaaaagcattgatttttttaaaacactggataacattaatttttttaaagcattataagcagtaaacattgattttttaaaattctaattttcattcatttttctgggctttccttattcccgataaattattaattttattttctatataatcaatgttatgtttaaatatatattaaatatttttcagtctctttctctttattaaaataataacataatgtctttttcatggtttactcagcgcttcccatttttatcaaataataattttataaaaattttagagcatg

SEQ ID NO: 112473 - DNA, 776 bp, Heterodera glycines
agcggtgaaagccccggcgggtgccaatcgcaaaaccccaaaaatccggcattttttggaaaatttatcaataaaaatgcactaaaacgaaaatttctcctctaagaatcgactttaaaaatatttaaaaagacacccttaaaaatcggcccaaaaattttcacaatatactcctatgaaatgaaaaaattttctcaaaattcactttcttggcaaatttttaattttaaaaattattttttaggtaaattattttgggttttttgaccttaaaatcccagtcctactcatttgcatctgcaacaagtgaataaaaattatttttgctcaatttttggctaaaaattatgtcactattcgtcactatttcgcactttttgccactattttgtcactattttggaagtagtcactattttagttaactattttgagatttctcgtcactaataaaagtcgcggccctacttatcacattatccgctgtaatcggcacactgagaaaaagccggctaaatgattttttggaaatgaatttaattagggaatgaattttattacacaaaaaattaaaaacatattcacaaaaagagttgactattttagaaatttttaatttttcttctctctgatattttgacaaaataaaaaattataaatttttgtttttaaataaatttattaattctgataaaatttagtaccctaattttttaaataatttccccccccccctcccctcagtttacatttgctttttgctctgtgccgagatg

SEQ ID NO: 112474 - DNA, 741 bp, Heterodera glycines
gctgaataaaaaaaaatttttttttgcgttcaaaatttttttgttaaaagggagggatccggcggtagcacgagagacgaggtgctcctgcccacccccgccccctccctcctcgttcgtcgtagggggccggtttaaaagaggggggagtcgccggtgaagggggggggggggaagtagaaatttaacagattttcaccaaaaatggttattttttcaatttcgaaaaaatgcatgcatttttaaggaaagtttaagcaaaaaaattctatttcagtgataaaccgtctcggctattcgcttccagtcatccctgtcagagccatcgccgacgcatttcgaaaaaaaagtaattccgccgctttgccgcctatgcacatccggagttttgccttcaattgtcttcgtgtgtagctgggcgcttcggtgtagtgcaccgcgccctcatttccctcggcatctttgacaatggtaatctgtttaattataataattaatcctcaaaaaataaatccactttttttgaaaccccaatttatggcgccaatggcatgcccgggcggggccgagaccttcgataatttttcaaaaaatcgagtttaattttgaaaaaaattttcagacagtttatagttttggtaaactctcaaaaaaaacatttcttttccttcccatttaaaaaaaagaaaccttgataaatttgtcgatgcattccatcagcttccacaagaaccaaagatg

SEQ ID NO: 112475 - DNA, 220 bp, Heterodera glycines
gaagaggatcagaaaggggaacagaaagtggaagagaaagtggaagaggaacagaaagagaaagcggaaaaggaacagaaaggggaagaggaagtggaagaggaccagaaagtggatgaggaccagaaagtggaagagaaagtggaagagaaatggaagaggaacagaaagagaaagcggaagaggaacagaaaggggaacagaaagtggaagagaaatg

SEQ ID NO: 112476 - DNA, 1003 bp, Heterodera glycines
tcattaaaaaacgaaaaaaaaataatggaaataaaagcgctaattaatatttaatattttaaaacaattttgctacaattttcagaaatagaatcatttaaaaattatttttttggcatattccgttatcccctaaaaacttttttcaaattttgctggactaatttaatgcgctgaaaatgaacccggctttgtttttttgattcgatccagcttcattcgcctgagatgcattaactcttaagtggaaacttaaaactggtttttgagcgcatgattaaaataagcttaatgtaggtctaattaccaacgagaaatgtgaattttgaaaatatttaaaaggttttcagttaatttatgtatttaagtgtgccattaattgagtctcaaaaatccttaaatttatggcacagttgagagaaaagacgagaattggatgactctttcttgaacattttgcatcaaagttggtaatagattttccagatctattctagtaaatttgaggtgtggtcaagaaaaaagagagtttttggcaaaatcattttaaaaatttttacattttaggatcgttattctttttttttataaatttgatgcatattcctcgaaataattttctttatttcaaaatttaagctgaataaacattaaaattaaaaacgttttgatcactaaactgaaaaaatgccaaatcttcggtataaatttttttaaattgtcatattcgaaaatcaatggttaataaaaattcatttgttttaggaatttgatgacttccacaatttcactatttacctgaacaaataataaaattcaaatttttgatgattaaactgaaaaagtgccaaattttcggtgattctgtttgctcatctgctgtcatactttcttttttgtactggtctcacaaactacagtcaaaagttggcatatttaagtcagaatttgccaatcccttcaccaattcctctgtttaaagcccttttacaaatcggaaatg

SEQ ID NO: 112477 - DNA, 553 bp, Heterodera glycines
atttattggtaaattattattttttcgttttttattaaatatttatttttgcgttatcattccttttcttttccctccctccccaatttgtctttggcctatcgatcccatcgcccctccctctctcctctctctccccctcccgtggctgacaaatgagaaataataaaatatgactgacattttttgtctgtccgatgttaaggccattctttcgattcttttttcaatttgactatgccatcgaagctcaagaattgttcttttgcatctcattaaaaagcgaatggctgaagaaaaaagaattgaaaggacaaagaaaattaaaacaaagcgttaattaaaaatggcaaattggtaattcaattcagagagaataatttgcgaagtcggaggaataaaggccttaattaaacacgaaagagcaaaaggacattaaaattcattccgctgacttttcttaggctctgatgaagggataatcgtttttttggtcattaattaattgttggttcggtctgtcgtcacaattaactcacccaaagaagcgatg

SEQ ID NO: 112478 - DNA, 117 bp, Heterodera glycines
tcaaaatagatgtatgattcgtgatcaaggaccttaaaatcaaaagggtcaacgcaataaaatttcgtttgccacaatatagtgatcattgtcagatcgttttttaggtgtttaatg

SEQ ID NO: 112479 - DNA, 1003 bp, Heterodera glycines
aggtcataactttttttaaacttaaagaattttttaaaaattttgcaggataatagaaaacatttagggctatcgaaaaatatcaatattataaaatttgatccattttagacgaaattatgaataattttctgtcaaaaattattcatttgatggtttttgactaacgtcccagcaccttttgtttgttcatgaaaattgaatgcaccaaaaaaaattcccccacacaaatgaattaatgatttcatcaaattttgtttttcttttttttcaaaagcaaatgcgagaatgaagaaaatatatgtaaagccaaaaataatagaaaaatgaatggggctgatgaattgggcttccaacgaatcggaaattgttgaaaaatcagaccaggattagcactaaaccgaaacgaaaaatttaacgaaacccaaagcaaaatcactgaatttttaatcgcactttaatttattccttttccctcagatgtaaatttgggttgttttacgaaaaaatgcatggcattccaaaattccctttttataaacaggagaaataatcaatttagtctttttagagcaaattttggaactttttcatctaaccatgttttattacattattactagggttataaattatatggactaaaaacggtgaaatgtgatttcgacagttccgagaaatttaaaaaaaacttacatgaatatgaaaagtatacttgaaattttttaatttaagaactgaaaaattctgcattgaataattttgttattatatttttaatatatttttaatttcttttgtttggaaaaaaatgtgcaatattgccataaagtttgattttgccaatacatttcttttattttaaaatctgttgtttaataacacttttatttctgcaaatttttttcatacataggtaaaattgaaaaatggctttaatgcgcttttactagaccaaatcttcgcgggtaaaattttactttctcgttgcgggttgattatg

SEQ ID NO: 112480 - DNA, 113 bp, Heterodera glycines
agccaaagatcattaaatcaagactagtcaaagttggtattaaaacattaaaaggtgaaatagagtacataacactacaaacagtagaaaaaattactgatgtcacaaaaatg

SEQ ID NO: 112481 - DNA, 584 bp, Heterodera glycines
tagaatttttttaggattttttttggaaaatactgaatttctattaaattgatcagccttaaaatataaatggttttttattattattgatgctgtttggacatggctagacgtaagtattaaaaaggattgtggattatgactctttttgactccacataatgaaggatctcaagaattttaagataaaatcttatcttacgatgccaaaggttccataatttagtggatttaagaaatgttatggcaatattcgattgaaaaagcctagtgtttagagatatttcctgccaatattgagaaatataaatttttttaatttcttttccataaaaatatgatggttttgggcagcaatttctttttatgctattaatttgccatctttttacaacgcagcatattgattacgtaatgacaaggcattaaatttgcagttttcgaaaggtttttagcccgcttttcatgcgttatacgaaaagtgtttttgtttttgctgaatgagtacgagtgccgagttacatcgtgccaacttttttttagtgaataaataaataaatatttatttccacttaattcgaatg

SEQ ID NO: 112482 - DNA, 682 bp, Heterodera glycines
aaaaaatataaatatgaagcgtgcccccaaatcacaatgttcatctccctcccccaaaaaatctcaaacaattaaatgcattcgtaaaattgaccaatttcttccaaaagtcttaaacatcattttatccgttccaaatctaaatttgttattgatcaaattgaaaaatgtgcagatccacaggctgaattacgttcatgcgtgcacaaggtggtcgaggaggctattcaagacgcacagaacacacttggaggagcaaataaggtaggtgtcataatttcttcggaacttttagaccagggagacatcatcatgcctataactccaattacatcaaatgtcgtggacaccatttttaaccagttttgtaaagtggagcagagcaagtccaaacacgtcaacttatatggggccccttttgttgtcaccgtaactgttctaaacactgaaggcctaccacgacgacgaacaaccaaaggaagtgcccctccaattcactcttcccaatcacacattttcaaaattaacaacaacgacaactattgccttttttatgcactggaactgatgcgctactactcattatatatcaggggagtaatttcaaggaaacaatttagatggctcaaagataatcaaacaactgttcttcgtcaaaaagtactacttttactccgcgatg

SEQ ID NO: 112483 - DNA, 155 bp, Heterodera glycines
tgtgagaagcagaaaatgggaaataattaaatgaattttaatttgacaaaaattttaaaaaattcaattttttataaagattcaagcaatttaattaccatttttcaagttctggcaaaaagaaaaaggacaaaaaagccaacaaaaatgtgatg

SEQ ID NO: 112484 - DNA, 377 bp, Heterodera glycines
acaaaaataaataaattatttgattagccaaaaagtacaatatcccctctctggtcggctcatcttcgcaaattccaatttccgaattgcgcaatgttttcttcgcttttgcccaggcccgtcttctcgacttgaaagtgggtaggaaaaattgaaaaatgcgaaagaattaaaaatttgctatttttaactattttgtcggtttacattttccagttaaataaaatacataataaactgtttagagtggtttttttgaatgattaaactcaatctcgtgaatttttccgtcttgaatttcgctattatttgcatttctttgcaaatattttcctacactaaaatttttacaaaaattttttcgtttatttagaatg

SEQ ID NO: 112485 - DNA, 1003 bp, Heterodera glycines
ttccgtttttgtcaatgatttttcgtttcccatttaaacattgtccaaccccattgaaggcaaaaaacttcaaaaattgttttaataaaatgtgattttcgtgtttctttcatcaagtacaatccgtaaaaaataggaaaaatctaaaaaaatcagggctctctctattcatttcgtcttagtggtctgtgcgttagtcaccaaaaggggggtctcaggttcgagtcctccttatgttgtgtgttaatttcaatttcttcttttacagaagaaggcagaattattttttcattaataaaagttttcgtgtcaataaaaaatcatattcaaaaagcgttggttacgtacaacatcgacaattttatgaaattttcttagcttataacttggtgaatactagagcaaataaaaccattttatgctcattttgaagggaaaattctggagaatattgtaaattttatttgggttggccttaaattgtggacttggctaaaaaagaattaaaattattgaaatttttactagggtcaaaaaaattttcctcgggtcagattttcttgaaattttgtataggcctatattttgacctcctctagcgattccaagtttattttatggaacttaagtttttaactctagatcggctcttctatttttacaagggaaaatccccaaaaaattttaagttttgcaaagttttggcgttctgattactaaataaataataaacttatttgtacttggagcccaaaattgaatcgccgtgtatacaaaaaatattcaccaattcaaaaaacgcaaaaaaatcaaaaaaaaatcagggctctctctattcatatacaaaaaatattcaccaattcccttttcatgactataaaaatcttttgttttccgctttgactcattaaaaaaataaagcttccaacgaattattattctgctcttttgtgtgacatcattcggaactcgtccaaaattgtgctaattgctgccaaaaatg

SEQ ID NO: 112486 - DNA, 99 bp, Heterodera glycines
ggtaaggggagcattttctaattagatgattagcaaaatgaaacggaaaaaattatattcggcgtttttaccggagtgtgattttaaaatagcgatatg

SEQ ID NO: 112487 - DNA, 713 bp, Heterodera glycines
tttggcgggccgttttgatgtaatggcaaggcacacgggcgagagacgtgtcgacggcatcttccgatgagggagagcgaaactgaaggggaaaagacatgcaaaataaacaaaaatagaccttaaattgggaaagtaaaaataataaacaaaattaaaaattggactttagatttggagacaacggctaattgaggatgagacggtgaaggacaatcggacgaaaaataagaagaaagcattaagtgcttgggagaacattggcaaaacaaagaaggaatggcattgaatcgcaaaaaagttgggcgtctcattaactaaagatttttaaaggaaaagggacaattttggtgcctgagcttaaatttgcaaattaacgaattttattaacgaataaaatgaaatgccaataataataattaaaattcaaatttaactttccaaaagcacaaactttaattagtttctgacgatagcagaaatccttttaaattttaaatgatgttaattgctactaataactaaattttagctttttctctgtatgttaatcgacaaaaatcgcctgcggagtgccttttggcgagtgggctttttcaaacgcatttctcgggacgtggccaaatgtttgctgtgccatcagaaaatttcgacaacgaatgggaacaccaccggactgaaaaaccatttgaagagacggcacgcggaatatg

SEQ ID NO: 112488 - DNA, 110 bp, Heterodera glycines; identical to SEQ ID NO: 98226

SEQ ID NO: 112489 - DNA, 672 bp, Heterodera glycines
ttgatataattttaataaaaattaaatgtttaaaaatcatattcaaaataaaatttaaaaaaatatccatcatttctcggcatgctaattcattttaggagaaataatttaaaaataaataaatatatgtatttttttgttgcatagctgaaagccgcccctccattttaagcatttggttttttgtaaaaagaaaaaatcaattaaaattactcaaaaaatatatccaaatccgtcgcggtttcacgggggggggggggtcaaaatttggaacacggacccatcataaatttgctcatttgtcaaatgtccttgatcttcggaatggaaaaagggtcgaccgcgaagcgatgacccaaaaaacagaaaaagcaattagaacgctgaaaacggcgataattaagcgattataatgcgccaaatccctaaggctgtccccccggtgggtgcctatttaagcggaacgatttgtcagcaataatcagtttcaaaaggaagaaaaattcggatttaatcctttcgctctttcttttgtcaaatttaaatgatcagacttattttacctgctgtcgaaattacttttccaagatttgcttttaggattaaaaaaacacaaaatgaaccgtctgtctgtctgcaccctcctctgtctgctcattctctccgccaatg

SEQ ID NO: 112490 - DNA, 145 bp, Heterodera glycines
  unsure (1)..(145): unsure at all n locations
gcaattataaaataaatacttaataaaaaagtaaattggtctataaaatgncagaaagcacttatcaaatggagtattattttcgcaaatacacttttgaattcggcaaagtgccagaaacaatgcgaacaatccggggattatg

SEQ ID NO: 112491 - DNA, 308 bp, Heterodera glycines
ttttgatcattattgctgatcaaaacagataaataatagatcattgatcattgatcagaaacgaataaaccgatcactaaccaactgatacaatggcatcaaaatcattatctatgatcactgatgatgacgagacaatcaaaatgattactttgttcagcaatctctaatttgatagactctgctgaagacctgatccactagggaaatctctgatcgatcactcactgatcaatcccatgatttgaatgaacaattgtttttgatcagatctggtacagtgcacgtgcctaatgattttcaaaatg

SEQ ID NO: 112492 - DNA, 136 bp, Heterodera glycines
taataataaaaaattttttttaattttttttgaaccccaattaaaaaagggaaaaaaaattccagtcaaaaaatttaattggaatttctccaattttgtttcccataatttcagagggtgggtgggtatcataatg

SEQ ID NO: 112493 - DNA, 1003 bp, Heterodera glycines
cggcaggttcgaatccggccggtgtaacattatttttctgtgcatttttacattattttcaatgattttaattaatttaaaatattttgttgagttaataaataaaaaaatttttacattaaagaatttaattatttattttttgaatttgtaaatttcatcttaaattattaaatattcaattgttaattttcaacgttattttcaattaataaatggaggatttaaaaatactacaaaagtccgcaattttttgctctataagataaattttaattcatatttttgtcaccttcttacaaattgctataaaaataaaagtgattttgtgctttgggtccaaaggggggtgcacatggtttttaagtggaaattttttttcaccaaaaatcctccaaaaatatgtctttaggggttatttgggccgctgatcacgaatacgtgatcagattttacttctgacatggttaagacctcaagaatccctgtgtgattggggattctgagacatcatttttggggagggtggcgaagttcgagtccggacggtgtaaattattttctttgtattttttgctgtttctacatattttaattaattgaaaatattttgtgttttattcgttaataatttataaatgttttacatttaaaatagttatatatatatatatctttttaaattaagttagtaccaattttttgaaaatttcaaacaaaatgacaaaaatcttctgattaagaatatttttttggatttttcgaatccggaattggtcgaaatagattcagaatgcggggggggggggagaaatttaatacatccaccaaaaacaaaatagtaataaatcgaaatttttgccgaggtttcaaaaaaaaattttttttttgtagttgaatttttcgtctggcactgacaacagctccaccggcgccgccactgcctcttcactgaacagttcaaattcatcaacaacaacaacaaaaacaagcgccaatgatg

SEQ ID NO: 112494 - DNA, 115 bp, Heterodera glycines
tcatactatttgaaatttatgccccattttttgttcccccctgaattgtttgttttgccagcgcggttttaattaaatttgtatctgaaagccgacggacggatctcttctcatg

SEQ ID NO: 112495 - DNA, 828 bp, Heterodera glycines
tttcgccgacagcgcttcacagcaccgtcggaccaatttttaaatttgaataatgtttcaaaacggaatttttcaacactaagaaatgatctgaaaaaattttcagaaaatgcgccaccacctatgaattgaaaaatcttctcaaaaattgtcgacaaaatttcatttttcttgataaaaagttttatgtttgaaaattgtcattgttagaaaaacattatataaaaatatttataatatttatttaaatgatcaaaattgtttttttttggtagagtttttctcgtatagccctaaaaacccttaataacaagctgtaaatgcttttttcacgtatttttcggaatttagttccttttcatgctttttttcaattttttttgccaactaattgtaccactttcgcgatttggggcctttttgtttgcgagtcctaataataaacaatgattaattttactcaaaatttattttcgatcagcgatatgctatctcatgggcgtggctttacaaaaaaaaatggcatttaaaagaaagccacgcatttattttcatttcattattcttaaattttatgcatatctaatttcactagttttaatttttaattttgtcaaccgctaaattaattaaatacatatctaatttcactattttaaaattttcaaccgctaaaattaattaattaatttaagtttcaaatttatttgtttttcagataacccttcctattcaatttgtttaattttctatgatgtctttatcgcgtttccagtttgaaacgtctgccattggccaaaaacgtacgagcgagggggttccaaaatg

SEQ ID NO: 112496 - DNA, 58 bp, Heterodera glycines
ggtgggctgagggcatcggaccgtgggaataaacttttgccattttcaggtcgaaatg

SEQ ID NO: 112497 - DNA, 285 bp, Heterodera glycines
ggttgttgcctcgtgtaattgttgtcgtttttcctaaacattatacctatgtggatagaatccgatctaccaaaatcttatggtgcctttgttgattttcgtttccatataatgtcttacaatgagttgaattcattgttttttggaattaagacaaaacgacaataataatagtgaaacaacccattatgttttgcttaaatgggaaaatttttattaaataaaatcttccaaatttaatatggaacattgtttttaatacgttttccagcggttctttggatg

SEQ ID NO: 112498 - DNA, 124 bp, Heterodera glycines
tttccgtcgcttcgcatttttcctctaaaatcgccgccgtccatcccccgtggaatttggcgcagctgaacttgtaaaagcgttcatttccgtcaaaggcggagctgaagcgcgagaggaaatg

SEQ ID NO: 112499 - DNA, 477 bp, Heterodera glycines
taataaataatattccaattttaaaaaatgaagaaggcgatcagttagagaccttggcatttatttttcaaataacttaaaatgggaaaaacatatagaatttattactaaaaaagcaataagaacatcttttgctttactcaagtcacttaaaactaaaagcccaaaaattctcataaatatattcaatgttattgtcgatccattttggaatttggttctccgatttttaatccatatatgaaaaaagacattgatgctcttgaaaatgttcaaaaaacatttttacgtattgtttttagacgtaataataataaggatccgggtataacgaactcctccaactctttaaacaagaatccctcttaaaacgcagaataaaaatagatttaaaactcttccatgatataattttggaaaagatccatattcagcataatgattccttttcaaaaacatattcagaactgaaaaatg

SEQ ID NO: 112500 - DNA, 163 bp, Heterodera glycines
ggggggggggggttgccagcaaaaataatttcagggggtagaaattgttaccttcgcaagttactgcgatcattcatttttacaataaaaataaactcaattctgctgctcacagatcacacgaccgactgatatcaaatcgttgcgcgttgctgaaattatg

SEQ ID NO: 112501 - DNA, 1003 bp, Heterodera glycines
cataaaaccgactagaaccaataaaaattcaaattctttcaaatgtctttttcaaaatcaggcatagcaaagttaataatttgtcatgattagagaccgcattttgaggcaaatgccttttttttctgcgcactactttcgatatattaagcataaataacgcattttccacttggtttgaggcttctacgttgacttttattatgccttttttttgcctttttcgggattttcgtgctttaaatgccttttttggcattttgccgttttcatgccttttttagcgttttttccgaaaaattccataaaaaatgcaataaaatcgggaaaatacacccctaagaaatgacttggaataattttagaaaatacacccctaagaattgaaaaaatttcagaaaatacacccctaagaattaaaaattttcttaaaaattgatcgccaaaattttatcttttttctttaaaaaatttttgatttaaaatttgttcttttggaaaaacattataaaacattaataatctttaaaaatgaccaaaattaagttcttttgttaagttttacgtgtttttgctcactaaaaaccttagaaaaattttttttatgccttttttcatgcctttttcgggattttcgtgccttttcatgcctttttttcaattttttggtgcctattatagtgcctttttcgggatttttgttgcctttttttgcggtctctagtcatgatacattctttgtatgtgtgtggtatatacagcaaaatgaatgaccgtaaaaattacagggaggcatactcaagaaaatgtggaagatcagttttttggacgcagtgtttggtgggggaacgaagtgtttgttgacttgggaatggcagtgctttttttggggggggggagagactcatttcatcacaactgttgctgctgctgttgttgtggtgcttgttgctgctgctgttgctgacagtgactcatcagatgggcgaacaccgcgcgaatg

SEQ ID NO: 112502 - DNA, 350 bp, Heterodera glycines
tttttattttcatttttcgcccatttgtttgcccctccggcgaatttccaacggccgaactttttttgtgtcatcgccgcgtacctttataaaggggaggagaagtgggagaaggacaacaatttagttgcaattcaatcaacgcagcagcagaagaaaaaacaaaagtgagtgagacaaatctttgaaattcaaatggaataatttaaaatattttttaaattttaatttcaatcccaatttttttgattttttgagctagacaaaaaaaacattcgaaatgcaattattaaatataattatttatattcaaatttcaattccagtctaaatttctgtctatgtagatg

SEQ ID NO: 112503 - DNA, 287 bp, Heterodera glycines
cttctcggatagcttagaatgttcagtccacccgctctttcccatctaagcccgccattctcctctcaacaaaagcctctcatttcaatttcgtaaacggaaaagggagggaagtgagaaaggggggggggggggaggacaaagtggataaatgctccgatgataaagaaatgaacagtttcaccgcccaccgcctgaaatggcattttatggccaattatttgcatttgtttactcaattgacccgaacagattgaaaagtgcaaatgcatcatcattagaagatg

SEQ ID NO: 112504 - DNA, 666 bp, Heterodera glycines
aaaagaaaacatattattaaggagttttgaggttgctgaacacggttatgacatccatttgaccaaattcgaacaccgaaccctgactcgaacaaaaagccgaaatttaattttcgacaaaattcaaaattggatggaccagcggacggctggcggacgggcgacttttctctgattgcttcttgcgcttagatggggtgggaaacgacggctaatggctattcactttttgcgttgagggaaggggattttggatgggagtggacgatgattacgtgatgcgatgagaggaggagagacgaggcgggagggggggggggggatcgttcgtcattagtcaaaatggatgtcagcttcgtgatcaaagaccccccagaaccccaacaaaaacgcttgacgacttttttaaactttggggaacaaactgcactattaccaaaattacaatggggttttccgaatttcagtacttttcgagaatattctggaacaatttacttacataaaacttagactttaagctttcgattaataccaagaatgtatgtcttgagtaagaaaaaagttatggcttaagaaactaagtgtggtcattgattggacgtgtaactgtcgatttagcaaacaactcatcgcacagaacaatttgcaaataaatttctgatg

SEQ ID NO: 112505 - DNA, 613 bp, Heterodera glycines
accaattgccttcgccggccaccctacagtatcctgcggcactcattgtgaaccgtgacccccatcacaaagggggctcccattggtgtgccatttatgcccgggacttggacgtgcctgtgatttactttgatagccttgcccttcccataccaccaagtatttcatcatcctttttaaataattttcccaaaggtttacacaaaaacattgaagcctaccagtccccattgacatcaacatgtgccccccattgtattgtctttgtttaccacatgtcccatggaaaatcattcgataaatttatacatattctcaaaacttgttcaaaccctgacatgtattcattattaatgctaaataaaatgttgaacagttaaattatattttcaatttcttaattttttcaaaattgtgtcttccacctactaattatgcattattctacctaaaagttacatcttccaacgtttaattattttcgtactttatttcccattcattaattatgcatgcaataaaataaaaaggggcggagcttatccatttgagttggaacaccggtataaaagccgctcgaatttcttcattcaggcataaaaaatctgaaatg

SEQ ID NO: 112506 - DNA, 76 bp, Heterodera glycines
cgtaacgaacggataaaaggcacaaataaacggccaatgctttcctttccccttcagtttgatttcactgcacatg

SEQ ID NO: 112507 - DNA, 706 bp, Heterodera glycines
tgttggagagggaaaagcacgagtgcgtttttgggggaattgcgaaggcgacggcacaaagaattgttgaaaatgccgaaaatttgatttgggctttaagggctttgttggatcgccaactgaaaatggaggtgatcctcagcaacatcgccaacgacccgacctttgatgacgagtcgcgcactcagcaggtagaaacaaagaccaaaatgaaatgccattcagtgttgggcgctgggcaaagtgaactaattactagtaattgctcaaattcgtgccgttttttggggggtttttagactctgctatggttagttgtaacttgttgtttttgatggtctatcgatgctacacccgaaatttttatggaaaattttgtatttttgctgagattttcgattttccttgttcgtacccacccacgccaagacctcccttgtatacggtagtgatgttttggtgggctgatcgcattactgtattaacatttttccaacacgaatttgtcccctacgattgtctctgacccgttattagagcgagctgttgttcaacaacaatgggatatggtgctattgtttatcaattagaccgtaattagtctacggtataatgacgtttgatgagggattgccttactgtacatcatttccaacacgaatttgtgtcccatcattcgtttgccaaaatcaaaaccccaaagatg

SEQ ID NO: 112508 - DNA, 171 bp, Heterodera glycines
attaaaatccggtccctattgatcacacatgtctcttctttttaccgtagtatatccgttcgatcacacacgtctctctaacagatttatgcacgagaaacaatactttttttccaattaggcgatgttgacacattgcacactttggtgaaggaacatcatgagctgatg

SEQ ID NO: 112509 - DNA, 213 bp, Heterodera glycines
ggtatgttttaacgaattacaaattctgaatgtgcaaataccattaaaaggcaaagagagggaggcttatttgttgccataattacatttctcccctctctccctccattatcaaatcgtcccattttcggcactgacgtcgactttgaaaagcagcggttgtcttccgtcaacataatcatctgtacgcccggccgtcttttacaacacatg

SEQ ID NO: 112510 - DNA, 128 bp, Heterodera glycines
accgcgtcacactgatcaacgttctcggacgttctcagctcgacccatcttcggaactgatcattttcaacgcggcaaaggcaacgaaattcaattttaaaaattgcgtaattaaacatttaggcatg

SEQ ID NO: 112511 - DNA, 154 bp, Heterodera glycines
ttgctgaaagtcgagaccgactcaaaagtgcttgacaattctcaatttcgattctcgagagtcatcatcatttgtatatatttgttaattaaattaataacccaaaacagactttctgtttataattgtgccgcttttccaccgctttattatg

SEQ ID NO: 112512 - DNA, 112 bp, Heterodera glycines
gaagcaaaaattaaactaaggcccgcgttcaagcccaaggccattgtcagcaactccgatcaggcgccatgtgcgtgtccatcaaaaaactgccgacaaagcaacgaacatg

SEQ ID NO: 112513 - DNA, 149 bp, Heterodera glycines
cctttttgaggtggttcgctaataatagccacggggtgtccttatttgaggaaatacagtaaatcgctttttattattttacaccaatattttaaacttaatgccaacgtcttcgtttatacaaaaaatgcgtcctcaacctatagatg

SEQ ID NO: 112514 - DNA, 52 bp, Heterodera glycines
ggcaccatgtccagcccgagcagccaaagtccggcaaaatcggccaaaaatg

SEQ ID NO: 112515 - DNA, 135 bp, Heterodera glycines
ggtggttgtttgtgggacgaagagcacgctgttatccatacagtgagttcactggtcagaattcgaaatccaaacgaccgactgtgtttggcaagagctgttttgattggtctaaaggattatcgttctcgcatg

SEQ ID NO: 112516 - DNA, 127 bp, Heterodera glycines
tttcgatttaatttttttttattcgataatttcctaaaacaaatgttaagcatcattcgtgctaatccaagcaattctaattctaatggtcaaaaaacgttcagcccatcgtcggaacgaaaacatg

SEQ ID NO: 112517 - DNA, 83 bp, Heterodera glycines
ggtaaataaaaatacatatatgttttttaggtttttcggaaaaatcccaaattttagaggaagaatttccgggaggggacatg

SEQ ID NO: 112518 - DNA, 1003 bp, Heterodera glycines
aaattttttcttttcctcttttaaaattaattttattattgccaaatttatctttttcttcatttttcccttgtttttttttcatttttctttgatcacaagtactttgcactgtcctttctctccccattttttcattttgttggtttactcggtactaaacccctttaggatatttgttaagccttttcaaatatcctgggggccatccttaaaccgaggagtcctgccccggtactgggttacttcccagaggggtgggcacgggcgttcactgtccacggggcttattccgctggtatccagggctgcggcagtgactgaccgaaaccatgtttccgtcatagcccgccgggtgtcacagcgatgtttaagcctaaccagatagtcggtctggtgtggatgggggcccttcactcgctggccttgagggtgaaggtgtgcctgttcctagcagcgggggtggcggttcctagccctaatgtgccctgcctacgggctgcattggtacagcgagagaataaccgggactggctggcccggaggaccgcgagtcactgagcagtgtcgaacgcgcagctgctcaaactcaacaccccggattaaaatccgcgttgacggaactcatatgtgctgtgggcgttggcgaaaatgctctgtgaagggagtaattacccgacatagagatgcctacaccatacctccgcactttggtatggtagtgccacacactttgagttccatgagcggttccataatcgcttgctatgatagtcatagttggtgggtatgccctccaatgtgatggctttgggccggaaggttaaaaacacgtgtaggggctgacctatgcgcgtttttggctctccaaaaatggcccaaaacatcgctcaggggacgggtcatgcccgatttttttttgatcggccattttctttgacatttttaactaaactcaatggttgaattttctttttttttaaatttaagaaagaaaacaatg

SEQ ID NO: 112519 - DNA, 1003 bp, Heterodera glycines
aacaaattttggtcaccacctccaaatcaggacaaatcttacaaatcgggacattttcattttatcagatttggaccctccaaatcaggacaactgacaaataggacagaccgacccctggcataaaagttgatctagcaatttccttccagcaaatttgagccaattttagagggcgtgtaaatttacaaaaaaattcatctacacttcccaattttgttttcttcttatatttgtgtgttaggtctatttggcaaaaatttctaagaagatgtgaacaaaaaaattaattaaaccaagttagacagtgcattcattcctcatagtgatctcaaatccaagaatgatggcttgaaggaaatttttagaaaaaaaatttttaaatgaaaatcctaccaattgagcttaataatcgcaaaaaccaacctttttttgttgaaaatctgttaacaaattgcacccaaatttttaaaatttcccccggcggcgcctatcggcaccgccggacccttttcttcccaaaaagttttttggaaaaagcgcgccgaaaaaaagttatgtgaaaagcaaacctgaatttctaataatactcgatcatttagtccaaaattattaattgtttgaaataattgaagaaaatttgtttgaaaattttcattaatttaatttattaaataaaaaaccaaataattttgtattattttcacttgatataaattaaaatttgaatttttttttaaatttttaaaatttttttgaatttttaaaatttcccggttggtcccggttcccggtttttcttgcggtcccggtcccggtcccgaaaaaaaatcgaggtcccggtcccggtcccggcttctcaggtcccggcagactcaaggatgggaggaatgaaaatatcaatgaaaattaatttataaggccaaatagctatgcttacagaagggattgcattttagttacaatatttaacatttttgctgctttgtttcgctgagaaatg

SEQ ID NO: 112520 - DNA, 1003 bp, Heterodera glycines
tcctttttggcttgtccgtcatcagcctaattatctaccaatttcgatcaattctttggctcaaactaaccctgacgcaacagcgcaataggacaaatggacaacaatcaaatcaccaaaattttgacgtcatcaaaaataacgagccccaagtttcttggatgcttcccatgcgatcaattacccaaccctaattcaataaaatttcccgcatcattgattgttaatttggaccctcatcattttccgggctctcattggattgcaatatttgtatacggattagatcagaagaccatttactttgatagtctgtctttgcccattaatgaattggtaattaaatcctttcttaatgcttttcctggaacccattttaaccaaagaccctatcaatcagtttcatcaaattcatgtggacatttttgtatttgttttgtttattttttatcaagcggactaacttttactcaattcctctctaaattgaattcttcgcataatccagaaatgtttgttcaaaattttattcgcaatttcccgataaaatagaaaaaaattcgttttatttgttttatgactcttttttttttttggttccgtcccaaaaaggattgaccataggaaaggaaaggcaaaaattgagtgccgctcagtgccagggaccaatgactgtcgatggggtccctttccttccgaataaatctcggcgagtgttatttgccaaaaaaaaggtaaaaggagcgagcgacctttcccttcaacagcataggcgaatgctgattggctgaaggacaaattcactccagcagaataaaaaataggatgatgatgattggttgaatgaccaatatgaccattcctcttagattaatcgttggaaattagattagtaaatacaatacacaagcaaataaaaatggttttaaaggtttaaaagtgaagaaaaagactaaatattattcatattttggaaaattaatttttaattaaagaaaaaatg

SEQ ID NO: 112521 - DNA, 176 bp, Heterodera glycines
ttcactcgtcggcattttcatcagaaaatctgtttgtacagtccctcagcagcaaacgacgcaattcgcaagcgcaacaatcgaacagtcagctgacggcggtggaaattaacgagaaaaattgtcagcgaatttcctttaccaatggcatttcgacggatggcacgcgattaatg

SEQ ID NO: 112522 - DNA, 174 bp, Heterodera glycines
tttccatttgaatgcattggcgttttgtttataacgccaattattttttggcgttttatttccttttttacagtccatggtcgggaaccacaatcgaaatcacctggtccattttttttacttttaaatccgaagtcgaacttttcgtaaaattatgtcttttttgcctatatg

SEQ ID NO: 112523 - DNA, 146 bp, Heterodera glycines
tttgtggcctgactttgtttgccaaagattttcactgtttgcgcaaattcgtgccgtcatttctctgcgattgtccaccactgcgtgttgtcaatatcttttatgactatctgtttcccgaattcccggccgatgacagtgccatg

SEQ ID NO: 112524 - DNA, 94 bp, Heterodera glycines; identical to SEQ ID NO: 97954

SEQ ID NO: 112525 - DNA, 1003 bp, Heterodera glycines
aacacgtaaaaattttccttggtataaaatcctgaactgacttttatgtgtattaaaatagcgaattttttcgctaatttcactacgtgtagagaagcaagaaaaaaatttccacttgttttgggacttctaagataaaataaaattctccaattgaaacagatcgccttgcatcagcttaccttcactaatttcaattttgggagtatttaatttattgaaaatttaaaaaaaattttttttctttattttgacagttcaatcgggaaatactggtccgcaaatgtcgcactacggtaaaaaatgcttgtaaaatgatcatataattgctattattgctattatggccataaaactctgaaatcacgatttttaaatttaatgattataacaacttgaatatagaacgaatatgcataaagtaactaaatttaatatgttggatagcacacggtagctctaagtattctctatcaaaatttataaatttcaaaaaattttgaaaatttaaaaaagtttattatgggcataaaattcaaaaatcacgatttttggatttatggataataactatacggttagaaaaacaatttaaatcatcaccctatttttattttattaataaaatatatttttaaaattgatttaaaattttttgtattttttcctctgcgattttatcgccttttttaatatttttttcctttttgcattagccaggagtagagatttaaatttataaattgatttacgattttaattatttctggggaccattttaataaaatgtgaattaatggaaaaaaacatttaaaaattaatcattattttacttattattgccaataatttgttcagtagaacaaaatttattaaaatcttaataattttttatttacattaaataatttttttatatttgtaaaagcagaagatttagatttatattatttataaaaataaaaaattaccaaatttatttttagaatttaagaagaaaatg

SEQ ID NO: 112526 - DNA, 123 bp, Heterodera glycines
aatgataacaacagaaatggaagaaaaggtcacgtgtgtggtgagcgctactgcaacctctgcaaaaatttccacaatcccgaacgtggctgcttcatccaactgcttgagccaagggaaatg

SEQ ID NO: 112527 - DNA, 465 bp, Heterodera glycines
tttttctggcaattgcgttgacggctgaaccaaatcgcgaggacgtcttgattggcctcgcacttgattttaaaacactaattccttttaataaacttgacttagtttcgggaaaaatttgtgcgtaattctgatagtgtgtccaacaaaccaactttatctggtgtttgtggttgaatgctctcagtgtaacgcttttattcgtccgtcccagtttacttacaatgagttgcactctgctctgctctgacatcggcttaccctcctgttcaacgattgaatttggaattaaactgccaagtgaattgtattttgaaaataaaagcctatgctgactgcgccaatttgttgtgtcgtttatcaacaagaataaatataatcaataaacaaatgaataaagtcagaggtgaagagagagacaaagtgtgtgtggggtgaaatgcaaatgataaatgagaatgaatg

SEQ ID NO: 112528 - DNA, 311 bp, Heterodera glycines
aaaaaggcgaatgcccttattcgagatgcatccgatgagctcttttgtgccttgtcgaaatctgcctaaacattctaaagggccgagtccctttgcgtccccggcatttgaataagctgaaagctcatgcacaggtgcttcgtcgtctcgtccgcacacgctgctcgcgctctgccaaaaaggttttgctacaacacggagatggcctcccagctattgtggggctcattgcgtcaattgctctcccgcttattgctgatgtcattgaaaaatataaatagtttccaaaaaattaaaaacaagaaaaaatg

SEQ ID NO: 112529 - DNA, 734 bp, Heterodera glycines
ttttggaacgtaaacaacaacgtttttatcatatatatttgttcttaatcttaatatttcttggctctccgggtgcatatctaccaagagatatccaaaattttttgaacacgcgtctcgatatgattccataaagtgggcggtcttagaagggaataaatgtgtagctaatgtcctaatctgaagggcacctgccggattccttaacaaaaccaaataatgagaatttccacgtgcgacacgcaattctttattaaataaattctgcgttaccaaaattacactcatgccccaattgtgtgacccgcgtgtaaatagagaatctaaatatcgactactcaaattcactagcaaatcatctaatattaaaagcaatttttcttttttcgccatggctctaatttgctcttctgacataataccattgtgaacagtgactggcacattgccaattttcccattgcgctgtatatttaaaacatttcgattcagttccccataacaatatatagctctttcaattttaaatgaaatcattttctctaaattttgtaaaagacggattatccactctgacttgccactccctgtgctccccgacacgatcattgtgaatggatgacgaaattgtaattctccatgatcaaatttttgctccatttttaatatttactctaattaattatgatatatatataatatataaattttgaatttagattcatttaaaaatg

SEQ ID NO: 112530 - DNA, 268 bp, Heterodera glycines
cttgggtattgtatttaaaaagaaatgcctattttaattacatttgccaattttaatttaaggagaaaccaacacgcgcaaaaaacggcaaagcggcggattggcacggggagataatgtggtgccgaacaaattcgatctgacactgccaggccagtataaaacactgaaattgttttagccaatcttagaaaatatttaaaaaaatattcagcgttgttaaaaaaattttgagcatattttttagcaatttttacccaaaaatatg

SEQ ID NO: 112531 - DNA, 792 bp, Heterodera glycines
ttctttcacaatctttgctaaacttaaaaggataaatgatagctattggattagagaaagattaaagcagggcatttttaaaaggatgtcataaccattggattagagatagattagtagagccctttcaatgtcagaatcaaaaagcaaaggaagtaagtaaactagctacctagatattatagcaattggattagagaaattagtagagcccggcatttctaatgtcaggttcaaacagtaaaggaatgccgggaaaatgataacataataagttgatcctatccagactcaatttggcaacggccgatgaaaacaaaaaccaatttggaaatggtataacaccaaacgcctaaaaaacatggcaaaaaacggagactaacatttagcgaggaaaaatatgtcgctttgattttactttttttaggtttgcctttgtttggcgtaatgtttattgcgatttataaaaaatcaaaaaatcaatatctacagaaattataaatttgggttcaactttaatgcgattcgtaatactaattttgtgttaagtatgtacataatgttttggtatttcccgaatatcaaacacataaaaacctatttttctaaatatatgttctcatttatcgaattttagattaatctccaattttcaattattttacgttgtcatggttttttcaaattctaaatttttcaccttttgaccatttcaatttcctggcccactgctgatccaccaccaccttcacctgctcaaaaaaatcttctcggcacaactttaacggcatg

SEQ ID NO: 112532 - DNA, 749 bp, Heterodera glycines
ttgcaacacaaaagtgacgaaaagtagcgccaacaaaaatagcaataattaatgcgcagaaagaaaaatgttccattttctgtatgaaaaagtagtgaggaattaaagtgagatttagcaatgaaatatatttttttggaaaaataatttaaaaagcaaaaaaccaaacgccccaaaataaaactttcgaaaaatggttaaaaatttgataaaattcaaaaaaatttcttgacatggaatatccctgttgtatagaaagaaggcaaaaacaataattttgaaagagaatggaatttcaagaaatgaaaatgaataattatctgcatttagctagtcattctgttttatgatggactacccaatgaataaaattctttccatgtaattgtggcattattcaatgagaattaatgaagaaatagtgagacagagaaaaagagaaaaattggccaattttctttccacgtattttggcatatgttggactgagacctggagaaatagagaggctgagaaagaaagaaaatgccaatttctttccacgtattttggcatatgttaatgaaatttttcaaaagaaatagcaaggctgagaaagaaagaaactccaattactttattgaatgcaaatataattatgaaaaatgaaaaaaaattgtcccggttattacgattaaatttatgaaaaatttatttattaaaataataatagaatgtaaaaattagggaccgactttttcagtgtcatg

SEQ ID NO: 112533 - DNA, 1003 bp, Heterodera glycines
taaattaaaattaagagagagcagtgaataaattaatgatcggagtgattggtctgtcaatccaatgccatggcaatgcccaaatgaaagtccggtcaaaaaggtttttgttgaccgccttttttatgctccaaatgacaaatcaaatccatgctgatcatccggcttttgattatcataagtgcaatgcttctcatgggatttacggaaggagtttggcgttatttgggcgccggcggtgttaaaagggtgccgctttagcaggtcgagggcagaaatgcttccacccaccccgcctcgcgaagggagaaatgcttttcaccccctccccaccccctctctttcgtttccgatcattccaatttttgccctttctcattccgccagttcctgcgcttctttttccgttcccacccaagtcgcacactttgataattttctgcttgctaatgggattacgctaatttaaaaacttggaagcgaaaggagaaaaggcggcacttcggatcagccaatcattcattaattcattcacaacgccatccgccggttgagaagagaaagagacagcgaacagcagaaagtgcaatttgcgctggttttcttttgggtgcgaaatgcgatcactttttagaagatttaacttttttgagatatttacaagttgtactcgaaaacaaacttaatgatttatttgaaatgaaaaagaaaaagacacgttaattaagttaattcattaagcatgcggatttagttgctttttaatttgtccatttcttttgctgtgctcatttgtcttcgttcctatgcgtcttacgtcaataaaaaagccatagcagcagaagagtcaattaacaattaattagttcgattgatcactcacattcccattgaccgcctcgacggactgttcaaacattggctccaatgcttctcaaatttgcgttttccattcaaaagtaattaaacattcattaaattaacttattcttcttcaccaatg

SEQ ID NO: 112534 - DNA, 230 bp, Heterodera glycines
ccaacgcttgtcaagcagctgaagtcccgccgattgcccgacattttggtgattcattaatcattgattaattgatcatcgatggattgctccccttttttgcccttcacagatcatttgcttcaagcgcttcatctatgaaccatttgagcgccaatacatcaaacagcacgtgcccgtttcgttcccgttggacaacttcagcctgagcaaatacttttcgcccgatg

SEQ ID NO: 112535 - DNA, 619 bp, Heterodera glycines
ttcctggtacatacaactttagattctaaaaacgggtgatgcttgtcaattcggtaaaaaaaaattcattcgaaaagcaaaaatcaggaaggatcatcttgtatatgtacataccggtattagagaaaataataattgttaattagaaaaaggagacaaaagaagatgagtgcagagaaagagacaaacgaattcgaaagttaagcctggtcagacacttcctcaaataacaaaacacacgcacacaaaacgcgcataatcctttcactgattgtgaagaaaaagctttttttctctggataaaaataacttttttcgcttttcgttactcgaaaatttcacgctaaatattttagaaaaaaaatggatgggactgagtttgccatagaatataaaaggctactcgccgtccctgtacgtgcctcttttcgaatgtcttccccattcccatttaaatttaacttcgcctcgtcccggcaccgccggcggtgccaaaagacatcgccgggaattttatgaaaattcagaaaagattgttaacataacataaatttggtacagaaacaatttttaattttgttcagctcaaattttgatctattttattatttttaaaatg

SEQ ID NO: 112536 - DNA, 962 bp, Heterodera glycines
gctgcaaaaaaatagcgaaattaataatggccctaaaaagcaatgaaattttatattttgcggcaaaatttgccaaatttttttggcacttttccgttttggggcctaaattttcggtttatgacccttttttgggttttggcaattgaaaattaggggaaacagtccgaaaataagagtatactgagaaattcaacgaaaaatgtctaaaaataaaaattaaagggttagaaaatgcaaaaattcctaaacgaaaacttaaatttaattaaaatttaccgtttttaaaaaaatcaatgcttttacctcaagaattgagcagttgagaaagaagccactgagaaaagaaattaagaaaatggaaaatgctaaatatgtgtttggggatgttcaacacattctatcggcgaacatctgtgaaaaagaggaaaaggagaaatttaattaatttaaatggagccaattagggagagcaattagcggcactttccttttttggggacacaaacgcttttaaaattaatttgtaaattaaattttgaattgcctttttatgtaataaaagcgcgcggactttttggcatgaaaaaatgtgcgctctgttaatatattgaattttttgaaataagcccaaaaaattagccaaaatcaattattgaaaaattattagataaagcaaattacataaaaaaaaattcgtttttcgactgatttatttagtgaaaattttttgaatttttttgaacatgtcgccaaaaatgtcatctcgtcaaaaaataattttttattgcattttttgttacagaatttcttaattttacatgaaaaattccatatatttagcaatggaatctttttgctgcgtttgtaaagcaatttatggaggaagccacagctgttccgtcgcctatcgacaccgccggaccccattgaaccattttttttaatttgaccccaaaatg

SEQ ID NO: 112537 - DNA, 359 bp, Heterodera glycines
caatacgactgagtggttttggaccattttgtcaacacgctgacaatacgaaacaaggacggtaactcttatgaggtaaatttggaaaaagaactcaagaatgatcccgaggcgacggcttacattgattttctgaaaactggcaaattccctgatggtttggatgagaaagaaaaggacgaatttgccgtagccacagttaatttccaattggactctggcatcctttatttcaaagaatcgggatgccaaccacgaatttatgtcccaatttcgttgagaggcttaatttttgaatccttccactcttcccttcttggtggtggtcatttgaattaccgtaagactttagccaaatg

SEQ ID NO: 112538 - DNA, 686 bp, Heterodera glycines
tgtttcgcgggtttaagagtcaatttccccaattcaaattcaacgccatttaactgccggataattttcacatcatttagcattaaaattgcttccatcaattgatgccgaaaatatttaattggtcataaaatgggaaaatttaaaataatctagcctaattaatacctttacccacaaataaatattaattcacgctcgctcttttgagtttatccatctctaatctgtgttttgcttgaagctaatcagaaatcctctatttaaagaagacaaaattaaacttaaattcattttggaaaaattaaatgtatatttaatgaagcatttaccgtatttttctcccttccataccgtatccttacataatgccaattttgtcttttataacgcttcactcattttaattttaagcaaaaattgttcaaaaccgatcaatcaaataataaatttaacatagaatttaaaaacaaatattttttgtttttttgttgaaaaaatccaatttaaaattattttgaaattgttaaaaaataaattatttaaactgttaaaaaaaaaagtgtttgttttttctcatcacacaaaagccccatttaaacaatttttaaatattattttaattttcaaatattaattaagcctttctaaattcccaacaaatttgcttaattcgtagagaaatg

SEQ ID NO: 112539 - DNA, 529 bp, Heterodera glycines
  unsure (1)..(529): unsure at all n locations
gggggggggggggcctgggatttcaaaaatagattttaagggggtatattttttntttttagaaattccggattaggcggtgtgtttttgattaattagattaataaaaatatatttttttaaattttaataaaaaaatctttatatttatattagagtagagcgggacccggggaattttgggcaaaaccgggaccgggacttttcaggttggaaaaccgggaaaaacccaagacttttccctgtcccggtcaaaaccggaacttaagtactcatttgtacgttattttcagtaccaggtccaggtccagctctactctaatttatatgtttaaataaatatttacttattacaaaaaccattgtttgctaaaaaaaattttcgtttaatttttttttcattggatttggtataatccataaacaaacttcgaaataaaatgaaaaccatttaagatttaaaaaaaaatgaaaggatgtacaatatttgtgatgaaaaatacttaaaaatgttacagtcaaataaatg

SEQ ID NO: 112540 - DNA, 223 bp, Heterodera glycines
attttataaatttttattcttgaaattaatctaaccttctttaagttttcgtaacatctcaagattttccggaaaatatgtgattatagccaatgttttttccatgtcaatcgctttttatattgtttatttgtcgtttacttttgatctacaacatcccgaaatgtaactaattaattaattaactaattgaaaataatattttttatatttaaatagtatg

SEQ ID NO: 112541 - DNA, 134 bp, Heterodera glycines
acttaaaaaacaaaaatggggattgaaaaaatcgaattaagaaaattttgagagaaaaaatttaaggaatatacacttatttatgtgtcataaaagaaaaatacttccgttataattgccaatatttagtgatg

SEQ ID NO: 112542 - DNA, 1003 bp, Heterodera glycines
aaagcaaatatgtatttaaatagatcaaaaaattttttagtcaccttttacttggttaggaatttaaaatttagcctattaaaatatttagaaaattttttattattttttatgttttttccgacttccgaattccgatttccgacgtttttggggtcggaattccgatttccgacttccgaaaaatttttgggcctcggaattccgatttccgaaaaatttggacccccggaattccgatttccgaaaatttttggggcctcggaatgcaatccctgagctgcacagaactgcttttcatttatggaaacagtaacacgttaattacggataatttttaattatcgaaataccaaattatcgagtttttgccattttattttatttttcataccttttttggttttggttcgggaaataatagaaactatacctcaataaaaaaagttcccgtgaacgggaatttagaaagagcgagacgggaatgggattcccggcttttcccattttaattaaaattctgataaaatcaaaagtagagtaaaaatgaggatgagtatcaaaaaaagggcgcctctatttttggagaaaggtacaaaatagagattctagtgacgaatagtgattttaaaataatgggagtttgaggcgcgattatcatactctttctaagtatagtaacctttcatttagtgtccgcaaccttcgttgtcagattggtggagctacttttgtttttgatgcggatgtattgccttcagatcagtttatgatcttgtaagttaaaataataattggaaattttttttctcaataaaaaaatttataaattattatacatacttgcaatttttcaaatggaatttttttttatttgctccaattcaaaaaagttatggccattgaactataaaactttctcgaacattttgttattttggtgcatcagtgtgataaattcctaaatatctcagtcctcgtcataaaatattgtttaagaatg

SEQ ID NO: 112543 - DNA, 202 bp, Heterodera glycines
ttctccaggcgatgatcgccccgaatctgaagagtaagttgaaggcaaagtcaaattacaccaacgaaatttaagaaggccattattcctcgggtactttttcgttggacggcgagggaccgtccgttttttcgtcggtttgctcttcctccgtatcaacgacaggcgctcagagcaacgctttcggaaggactagcgaatg

SEQ ID NO: 112544 - DNA, 853 bp, Heterodera glycines
ggtcttttttgctctttgccgaattcccaaatcgggcgaagggagaagaattagaaggaagactttttaaatcacttacagccacagcaatccaaatcaattaaatgtaaacaacacaacaattaaaagcacaattaaaattaccacacacaatccgcatcaccaatttaagtccgggccacgagtgaaaaaaacataaaatgaaaatgaaagacacaaaaaaataaaacaaaatgccaaattaattaaaactttaaaagtcaaatgaggtcattatttaattatcacacttcccaaagattggcaatttcaatgtaattattcaaaacggtgattgatcatcagcaggattgtccaaatcaatttttgacttaatagaagttgaatattaccttaagtaatgatgaatttattcacaacaagaatatatcttgatgaggagaagatttgtcaaagcaattgtatacttggtaaaaaagctactggcgtgggaaattttaaattggctattacaattaaacacattctattttcacttttaatagagataaagaaatagtacgctaaaatggggactgggtcgttttggcgcccacgttttggcgccgacgatttggcgcccacgttttggcgcccacgttttggcgccagggtcgttttggcgccgctcgttgcgcgaagccaaaaattaaaaaaggtaaaaatttgatcaaaaattttacaaaaaaagtgaaaaacttttaccttccaatgggtttttcaaattttcaaaaaattcacaaccccctagatttttttttcaaacttcccgattttgactgtgttttatgggtgtagattagagatcaacatg

SEQ ID NO: 112545 - DNA, 301 bp, Heterodera glycines
tcatttgatgaaatattggagaaaaatgggaagaaaaagaagaagaaaaacgaaaatgacttcaaaaaaagagaaataaattggaaaatattataaaataaaagagaaaataaagcaaaaaggaagaaaatattcagcaaaagaatgggataaaattaattgaaaaattgcaaaaaaattggggacaaatcgccaatacatttatgaatggatcaaagaattggggcttcaaaaacaaaaatgtcacaaatcaaaaactgatgaagaaaaaggtgaaattgtacaaaaattcattaaaatg

SEQ ID NO: 112546 - DNA, 322 bp, Heterodera glycines
ttctgatcattggcctttgtcggcgccttaattggaaatttgcattgcaaattaatgggtcataagataaacattttcttcaaaatggtatatatcagtgaaagcgatgaggtcatcaaaaattttggcaatcggattacgagtcaaaaatgtcggaatcggcaatcggcatgccgacacatccctggtatatatatatctctattaaattctatatttagtgtttcccattttttatggctggtcttctttgcatatttagacacgtccgtaattagctaattagtgctcgacacaatcggtccctaatgattgcctaatg

SEQ ID NO: 112547 - DNA, 1003 bp, Heterodera glycines
tgcgaaaacggcgagcgaattgatgtgaagaacggaagaacgaacgaacgatgagaaacggcgatgaggtcgcttttgaagtgttgttgttattgcacaatgaagggatgatgatgataaacgcaaatagttctgttctaaaaaaggaaaaaacataaaaacaatacataatgaaatgaattataaatttaaaaatagggaaattgcagtttttgtaaaaaaattttgataaatttaggttcaaatttggtagtataggccagggaaactctgataaactttcaggtcgatgtcgataatttttggaattcgggttgggtatttactggttaagataagaaatatgtctttttgaaacagtgaagtttatgaaattcacaaactgaaaattgacgaggaatcagaaaaacagagtaaaacacccataaaaaaaagtgtgaatgaaaagggaggaaaaaggggcacaatatttatagtacgacgcaacaggggagggcaaaagttaggtaggtacgtaggtaggtaccattgcccaaattccaaggttttctctctatataaggaggtgttttctcattggactgacattttttgcattacgcctattgctttgcttaattgttccctcctctattcagtccttaatgttctgatttaattttctgtgttacagagtacgcaaaatataattaacccgaatgtttccaattgttttttcaatcaaaattgactgtttctcacagaattttcctgctggacaatctaaacttggaatttaatcaaaaaaacacaaaaaattgcttttccctatttttaaaatttataattcatttcattatgtattgtttttatgttttttccttttttagaacacaactatttgcgtttatcatcatcatcccttcattgtgcaacaacacttcaaaagcgacctcatcgccgtttctcatcgttcgttcgtccgtccgtccttcacatcaattcgctcgccgttttcgcaatg

SEQ ID NO: 112548 - DNA, 296 bp, Heterodera glycines
tttttcagtattctccgcaagcaacagcacaacgcatataaaacgagcagattggccacacaattccatcagcgagcattctctgcaaattgacttgctttgctttctttgcgcattcgtccgcctctcttttctcttttccttccctcggagaatcatttggagctttttgttaatatttatgccctattaagtaaacccagtcttattaacctatttttactctcggaaagttccttttttactcactgacttcagccttttgtcgttttagaggaaaaccgtctcaaaaaatg

SEQ ID NO: 112549 - DNA, 158 bp, Heterodera glycines
ttttgcgtttttacacgtaatacattgattaatcttatataaaaaaatatttccataggaaaatttcattcatcccaatttatttaatatttatgtttaaaaaataattttctataaaattcacagagaataattgttgttcctgcttcttcaacatg

SEQ ID NO: 112550 - DNA, 175 bp, Heterodera glycines
tcgcttaattcgcttaaagacgtaaatgagtaaattcatttaaaaataaaagtttggaaaggaaagcaccgaaaaagcacgagcggaagggcggaggacaatgagcattgagaggagggcggcagagagacagagagagccgaggaaaagtgcggggagagaacgggcagagatg

SEQ ID NO: 112551 - DNA, 136 bp, Heterodera glycines
cgctgcagatcaagattatccatcagatttttcgcatgatcttaatcaccgaccagtgcctgatcaggatcacctatcagacttttcccctgatcaaaatcatcgaccattgtctgatcaccagcaacaaccaatg

SEQ ID NO: 112552 - DNA, 1003 bp, Heterodera glycines
tgaattttgagtcaatttcttaaagtatttagcggaaaattaaaattaaaaattcaataaaagttttcttaaatattctagcaatgttttcaattaaaaacaagcacaaaaatattccatgatgtttttttcgttaaaaagtagtaaaatttgaatgaatcacaaaaatgtttgcgacgatttatcatatgaacatttaaatgaaatttcggaattatttaatttttctttttttataaatggcaaaaaaaaaggaatttttgtgttattttttgtgatgaataaggcaaaaggcatcccatcagccaaaaggtgcccatcttcctgcacaaagcgccattagtcatcgccgacgaacagcgacgacccccgaggggcagggtaaatgatcaatttaatcgtcattaaaaataaaattaaaaaaagacacaaacattggcatggcatcggcaaatcggtgctttcagtcagaaatgttaaattttgaaattattggtccaaaatggactaaattgggggggaggagacgattaaccaatttaatttaggcaaatttgcggatgaagaaaaaggcgacctcatttttggactttctctttttcttttaaaataaattttttttaattttgatattatataattcaaatcatattatgagaaacatatattataatatatcatatttatttgcatgaaaaaataaatcttttctattagtgatcaacagggcttcattttctactctactgctcatcaaaattgcaatgaaattagggaataaaaaaatatttatgatctgtaggggtaaaaatgtttatttaatcgagcaattactttatttttatttcaatatagcttctttcaaattatttattttatatttagtgagaaattttattaaatatatatatttgccatgaataattgctgtcaaattaaataataaatttattttaatgcttttaatataatttgtttttagaaatatttcatcattaaaatg

SEQ ID NO: 112553 - DNA, 402 bp, Heterodera glycines
atatttaatggattattacgaaccgctcaaatatgatatgtacactggcaaaatcagtcccaaatcatttgaaaattttattaaaaatgccaatttatttttaaaaaatagaaaaatttacaaaaaaaaaatgaattttatgttttccaccataaaaaaatcattaacaaacatatcatggcagcaaacttttgtttgaagaaaaataaataaaaaagtggcggagcaaaagccattagggagggggggggggggcaaagttgacattgcatggatgcttaaccgggcccaagttggcggcgccgccggcacacggccccgtgccgttgtcggcggtcgaagccgtgccgtgtgctgtgtgccgtggccaagtgtaattgttgctgggaagccccaaaaatg

SEQ ID NO: 112554 - DNA, 1003 bp, Heterodera glycines
gtgggctaattgtctcattgaccaactgtcatttttaattatcttccttgaaacggtctggtgtaagtttaactaactatcagttcctaacatccaattattaaatttgggaaatttatgaattaattattttttattgggatgattttacataggaagtttatcgtttgggtgagactcttcaaacttatgtgattaattatgacaaattaccaagaatggtttctagtatatgcttgtgaataatgagtcctcgacaaccataaggtctaattagtgtcagtttgtaacgacatgatatatgattcacaactaatcactatctatataccattgtttttagatgagaaggtgtagtaattgatgaatttaatgatgaagcattgaacatattatgagtgggaagtatgaaaaaatcaaagaattttaattattagtgacagttgttaaatcaatttttgggtaatttaattaagaaccaattaatcaactaatcactatctatatgccattgtttttagatgagaaggtgtagtaattgatgaatttaatgatgaagcattgaacatattataagtgggaagtatgaaaaaatcaaagaattttaattattagttacagttgttaaatcaatttttgggtaatttaattaagaaccaattaatcattaaaatgcgggaaaattattaacaaagttttgatcgagatgttttacatatgtgttttggtatggtcgaatcccatgctaaaatactccaattgctaatagggtatgacatctgcattaattataattataaccaattattctttaatttttacaaactgaatatttctggggaaagaagggttatgatggaacttaaattatatgccacatttttgttgtaattcaatgaagcagaaagcttgaagctgagacaaaggaaatgatgaacactaaatgagtatgataattgttgacagattaacttagttatggtattgatggttaggaaatatg

SEQ ID NO: 112555 - DNA, 203 bp, Heterodera glycines
ataagcacacattttcctagaactcagttttgattcccattattttagctacatatatcggcttctactataaatttggatgttttcaaagggaatttcataaaaatagcatttcaaatgacgtcacattttttgagttttcttcccatttcgctttcagttttaatttcttttttttctcctttttatggaggtgattgatg

SEQ ID NO: 112556 - DNA, 153 bp, Heterodera glycines
tcacatgaacattaattgagcaaaccatccctccttttctaggtgtatcatggcaaagataccggttgtttcattaaaaaaatgcgcataccgttggaaaaacagcgctaccgtatcgtctgttgggacacggaaacgcgcctagagccgatg

SEQ ID NO: 112557 - DNA, 162 bp, Heterodera glycines
  unsure (1)..(162): unsure at all n locations
atcaggtgcacctcatccaataggaaaactgatgaatncgagaattaggccaatctgccgctgaaagacactccgttccgcggctttcttttgctcgacgaaacgcggggcggagaagtgcccgccgagtccgtccctgtggtcagtgatgtgcagaaaatg

SEQ ID NO: 112558 - DNA, 255 bp, Heterodera glycines
  unsure (1)..(255): unsure at all n locations
atagacaaatataaaagtcctgaagaataaaagtgatagtgtacaaaaatgnttatttaattaccgtaaatccgttatttgaaggcccgggccttctattgttcaacccctctataagtcaaatgtgaattgcctattttttgtgcctctatttattcattataagcatttttacattcaaatttcatggtaaatttgtaattttgaataaatttagttaaacaaatttgcttataccaatttctctataagatg

SEQ ID NO: 112559 - DNA, 266 bp, Heterodera glycines
  unsure (1)..(266): unsure at all n locations
atttttcaaagaattactatgtaagagcattcgtggagatgtatgaagcgttgggcatggctaattcagaacgttcatttgacgtttcaatgaatcaattcaaaaatggatgggccttttttgtcatctctttgaattcaaccttagacgatagctgtggatttgagctgttgagaagcggtacaaccagtattagggccacatttgattcaccaattccaaagggaggagtggggatgaggggtgtcggagaatnngaccaaatg

SEQ ID NO: 112560 - DNA, 224 bp, Heterodera glycines
aaaaaggagcccaaaaaggcttgcgcattgcgacttctgagcatttggatgacagaaagaacgagtcgggaagaccaaccttaagccaacaaataaatgtacatttgttttgtttttagctggaatgtgtcaatttgtccggacggaaagtgaggaaaattccgccaaagccaattccgacaaaagcagcgaatgtcgaacaaagtcaacagcaggaaaacatg

SEQ ID NO: 112561 - DNA, 263 bp, Heterodera glycines
tcttaatccaatgattagtttgatgcataaagactaactaacattttggattaaaatatataattctataggttttaaaaattatatttttaaagattatgttttttaagaaaaaactgagggaataattgagttttgtaaagaaattgaaattacttgctgttaactatcttaatcgataaatatctctctgctttttgttgtcccaaccgaacaaatcgcataaagtaagtcgggttaattactcaataaaacaaaaaatg

SEQ ID NO: 112562 - DNA, 104 bp, Heterodera glycines
  unsure (1)..(104): unsure at all n locations
aattggttttatttatacaagaaattacattaaaaaatttttaattctaaggacatccgcgcttctttaaccaaatntcgtgcggattggacattgtggcaatg

SEQ ID NO: 112563 - DNA, 54 bp, Heterodera glycines
tcgaattatacagagagccatcaaaaagcaaaaaacaaactaaaaggattgatg

SEQ ID NO: 112564 - DNA, 179 bp, Heterodera glycines
  unsure (1)..(179): unsure at all n locations
ttttttttaatttttgaaanatcattttaggaggcctccgtcgccgcagacgcttccgctgcgcccgaccaaaccccgtcccggcgtcgccgcaagtggcgaaactgcgccaaaatccgtcggtggcacccatccccgccaaaactgtgccggagagcaaatttgcgttcgcccaaatg

SEQ ID NO: 112565 - DNA, 368 bp, Heterodera glycines
aaaagcggacactgatgaatgatgagattaatacatcttttcacggcctatttttccatttattttttgaattttccaaattagccctggccctgaaaagcaagtaaatgtaggcaatgatcattaaacaaatttgtgcagcaagaaaccgtgatttgttctagtgagatgcgagactctcgagctctgctctagaaaatgacgagtttttctcgacctcaaattttggaaacttctcgctctcaaatattactaatgagttgcttatttgttagcatggtacaaaaaaaaattaatcgctttttaattggttcaaaatggttttttagttcatttatctttcaattgcttattaattaataattatg

SEQ ID NO: 112566 - DNA, 181 bp, Heterodera glycines
tgaaggtccatggttcaggtccacattaatccaatgtttttttccatttttaaactatcaaaatgattaaattgaatgcttttttaaacaattaattaatttgttttgccagttttttatcttttcactttcttttttagctttaatccatttattcaaccaagcgtgcaaataaataatg

SEQ ID NO: 112567 - DNA, 68 bp, Heterodera glycines
ggtacaaattaatcaaattaaataaataataatttttcttaatttattttttaagtattacaacaatg

SEQ ID NO: 112568 - DNA, 601 bp, Heterodera glycines
tgcgtacggtaatgggagaaaaagtggggcatacggtaatgtgagaaaaagcggggacatacggtatgggagaaaaagcggggacatacggtagtgggagaaaaagcgtggacatacggtagtgggagaaaaagcgggaacatacggtagtgggagaaaaagcgtgggcatacggtagtggtagaaaaagctgggagatacggtagcgggtgaagcggggacatacggtagtgggagaaaaagcggggcatacggtagtgggagaaaaagcggggcatacggtaatgggagaaaaagcggggacatacggtattaggagaagcgggaacatatggtagtggaagaaaaagcggggacatacggtagtgggaggaataagcagaaaaattttcaaaatttggtagtcaattacgttaccgtactcctaaaatagaaactctcccccacaccccccgagggctttatttttctaccccctcgaacggtgggcattttttattaggcacattttcgtgtaaattttaagagcaatttcgaccaactttatctcattttggaagaaagaatcacatgggaaaacggaaaggagctgctgaaaatg

SEQ ID NO: 112569 - DNA, 237 bp, Heterodera glycines
aaaaaagtaaaccttttgataattcaacacaaaaaaatggattttcagtaattttttttttgaatttgctttgatttaaaaaaatatgtaaaaatggtttcgatcactgtttaaaatgacattttgagtatttgtttctatgaaatttattatgttgaccagcaaaaaataaacatttattaataaaaaaaatttagctccggcaagtggttacaagaaaggtcgacccacagcatg

SEQ ID NO: 112570 - DNA, 734 bp, Heterodera glycines
tacccatttcacttccgtttatttgttgctattactttttttttttttgttaattacataatcattaattaacaaaaatgaaagaaaacaatttttaattactaaattaattttttggattaaatgttttttcgactatttgtattaaatctgaatacgaacgatgaagttcaagagtcttggttttgtacaaaaatttttggccttgaccacgagggtgaagtttttcacaaaaaaatcatgcccaaactaattttttacttttaatttttattaaattggtctttgggaaggaattatatatttaaatttttatgagaatttaaatttgtccggaacccggcgggtttttgttaattaataaggttcttaagttttttcaaatttataaatttttcttcctacaattttattaattattttatcaccaaatgtaattcaaataatatttatttattttttccaatataaaagtaaataaaaaaaaccaaattaacaaatcaaaatgaatcatcaaaaacaaaacaaaaaatgcattttccgtcccattcattccgcggattgagcagcgaataattaattcattcctttcacaaccataaattatttttattataatgttaatcatttatttgtccacataactctcatcagaaaactgctgctttataaatatttaaaataaaaataattatttttgaatttaaaatgaaataaaaatttagccagaaatg

SEQ ID NO: 112571 - DNA, 306 bp, Heterodera glycines
atggaaagagacggacgagaacgaatgggataaaaagaacggatttaataaatttatccgatcagaaaaagagaacgcgaaaggagtgatcaaaggatgaccatgtcgaggataaaggatgaggatgaaggattaccatgttttgtgagaaatgcccacggagacagcgcaaaaattagcgaaaggatatttttttaaaaatgaaagcgaaagcaaacgaaagaaaggcattaattcggagtataaaagccaattagcatcaatataagtcacattcgtgcgatttcttctgctctcttccaaatg

SEQ ID NO: 112572 - DNA, 56 bp, Heterodera glycines
actattaaaattaagggattccgagaaacaatgccattgtacaccttgaacaaatg

SEQ ID NO: 112573 - DNA, 179 bp, Heterodera glycines
tttagattaaagaaataaaatcaaaatttgctcgtcgtttttatgtttattcattgtcgattcttaaaatcatttctgctgctgatggtttccattggttaccattttccattgctacaaaaattgttgcctaattcagaaattagaatttactgatggcttcgaattcggcttctatg

SEQ ID NO: 112574 - DNA, 267 bp, Heterodera glycines
tccaaaatttgaaaataattattctaaatgaaatttaggtcttaaatcacgaaaatctcgaaaaagtcataaaaaaattgcaaaaaattcacgaaaaaagtcaaattttgaatgaagttggcagatttaaaattagatttgttgttggcgcaaaaaagtgaattttgaatatgatttttagtctcgctcggaaagaagcgaattgtctaatgaatgtacattttttaagtgatttacaataagattaaataattttttttaaacatg

SEQ ID NO: 112575 - DNA, 357 bp, Heterodera glycines
tactttggacactatgctgtgcatcaacatccaggacaacgacattgggtagtttttgaggatttttcgttttttattgaaattttaattttcaacagttttttgacgcgcactgctcgccgaactgatggcaaaacgaatgaggagggatgagaaggaagtcatgcgcaatccaagcggaagatgaaaatatattgtggatgaaatatattcattgtaaatttgccgatgaactttaatatttgatcgtatgcatatttctgtattgatggtaccatctgtactattactcaaaacatatatatatatatatatttgtcatcctaatatacctctttttttcattagcaaaaaatg

SEQ ID NO: 112576 - DNA, 103 bp, Heterodera glycines
actaaaactcaaaaaaatgcttgaaaaatcgcatccaaattattctttttattggccatttaaatttccaaatcaaaaacttctcaattttcaggtcaaaatg

SEQ ID NO: 112577 - DNA, 94 bp, Heterodera glycines; identical to SEQ ID NO: 97954

SEQ ID NO: 112578 - DNA, 75 bp, Heterodera glycines
tttttcttattaattaacaaaagagaataattttatatattaaacaacaaaaaagtgcaaatatttagcgaaatg

SEQ ID NO: 112579 - DNA, 118 bp, Heterodera glycines
aacaagaactggcaaaaagactgaagtgatcgccggaaaaattgacaatttcgttctgcgtagtagtggtaaatgaatattatgccatagtatgttctttttttatttaggtatcatg

SEQ ID NO: 112580 - DNA, 565 bp, Heterodera glycines
gttagaggtcagaatagtggattgggaactaataaatgatcaaagagaaaaaataagtgatcacaagttagtgtgaaagggtatgtgagtaagtgattgcgtgatcagaaaaataatcactgtgtgagtgttcacatgtgagagagagtgatcgggatgagtgtgatcataaagactgaatgattagaaaatgatcagagtgagtgaatgtagattagagtatgattaggagtgagaatgagtcattataaagtgaaatagtgattacaagtgagagtatgatcaaagagagatagaagagttatcagtgtgcgagtgagagtgtgattgaagtagtgagggattacaaataaatgattgcagagagagagagagagagtaatcggggtgatcagagtaagaagtgtgtgatattgagtgatcagaagctgccagagtgggagtgagtgatcagaagatgataagtaggattgagtgatcataatatgatcagactaggacaaagagaccaaaagtgatcgggatcaaaaaattatcaaaatgatcagataaccatgtgcaaatg

SEQ ID NO: 112581 - DNA, 279 bp, Heterodera glycines
  unsure (1)..(279): unsure at all n locations
tgtgtcaatatggaagacgaagacgcncctgcttcggaagaggtcaaaatgttccgaagacgcgaatttgcttcgcgtttttgtttccgctcttgaccggtcgttaaatatctctttctaggcataaaatagtaataaatttaatctgaaaaaagaaatgcctaattataacagatttgtttccaagtaaaaccaaaataaaataatttcaaaatttatcgaattaaaaatatgatttatcgtcagttaaggaaaaacggtattgtgaattaacaaatg

SEQ ID NO: 112582 - DNA, 434 bp, Heterodera glycines
tgcccaccgttaaggaaaattcaattttcgtattttactaaaaatacaaaatttgcggaaaaatcacaaaaataaataaaatccggaaaaattggctatattttttttctcttcgacagttggagcccatcgaagttggccttgccgactttctgttggccaccgcgccgaagggcgcttcatttaccaccgcgtgggacgcgctcaaggaggaggggcacgagacggaggagtcgtacgcgctgtccaatgtgcacacattggaaggtgtgcaaacaaaaattattgccattttttaatccagtatggcattttaagttagtttttcaattagtatggcattttaagttagtttttcaattagtatggcatttttaatggcatttatgctagtatgctattttctaatttagtatggcattttttccattatg

SEQ ID NO: 112583 - DNA, 148 bp, Heterodera glycines
tattttgccattttagacgtcaaattttggtccgccctactagttccctcctcctcctcttcttcttctcagggtcactataaaaaattaatttaatttaattaattaaatttaattttgtcttttccaggcttttccgagtgccatg

SEQ ID NO: 112584 - DNA, 1003 bp, Heterodera glycines
ataaaaattaccagctatttgaaatgcagtgggcaagcacagcgagtcgcttaaatgcacaccctttgacacgtaaaatattccaaaaaaagagatagtgattttttctggattaggccggagaaataaaaattaccagctatttgaaatgcagtgggcaagcacagcgagtcgcttaaatgcacaccctttgacacgtaaaatattccaaaaaaagagatagtgattttttctggattaggccggagaaataaaaattaccagctatttgaaatgcagtgggcaagcacagcgagtcgcttaaatgcacaccctttgacacgtaaaatattccaaaaaaagagatagtgattttttctggattaggccggagaaataaaaattaccagctatttgaaatgcagtgggcaagcacagcgagtcgcttaaatgcacaccctttgacacgtaaaatattccaaaaaaagagatagtgattttttctggattaggccggagaaataaaaattaccagctatttgaaatgcagtgggcaagcacagcgaggaaagggggagggaatgtgcgggcaacgtcgcaaagggcgacagcagggaacggcgacccaaatgccttcagcggaaaagcataattataagtaccccgcgggagttttgccacttcaatttccggcctaattaggcatcagtttcacccgccccccttccgttggcacttcgttcggctttttgtccgcctaagctctttcccgcccaattaatacgccattcattctctccccattcgttttgcaattaattcataattgccaattcgaagttgctatttcgacgacgtcaatttatcccaaaagaaataattaaatttaattgccaaaatatttaggagaaaagtaattaacattgtggcaatgaattgtttttaatctgtcaatcaattaataataattagtgatgctttgtccgtcccttcatttggcctaattgctcaaattgtgccgatg

SEQ ID NO: 112585 - DNA, 617 bp, Heterodera glycines
tttctaaggatatattttttcaaaggtaactcaactgatcaatcttcgtcgttaattgttcattaattattgttttatatttatacaaattgttttccttttttggtgatcattttaatttattcttcccattttaaatcgaattcgaaaaattattatttttatttatttatttttatttaatttattaaattgaattgtttcttctctcctccaaatttctcatttttgtttttcaaagggcgaaattcgtgcaaaatgtacagaggccaacatttgtcgcaaatgtttttcttttttttccatttcatttcatttgtttttcttcaggggccgtagcaaaagaaggtggttatttgacgaggtcatttaaccatggttatttgacctggtcatttgaccacgaaatacgagaaaaacggtagcaaaagaagatagtaaattttctgctggagcaaccaccagtcaccgttttttaaccatgaactaacttcttttgctataccaccaactttctaccacgaaatttttatttacatatatatatatattttgcttcttttcatggaaaacaagaagtcaataagttgttttgcaaatttgcagctgaaaggatg

SEQ ID NO: 112586 - DNA, 225 bp, Heterodera glycines
aagcgattcacccaaatccgagaaaggaatcgacatgcgcatttggtccgaaaggccgaggaggagcggcaaaagcgcattgaggagaacaagcaacagagagaggaagcggagaagcggcggaaggacgcggaagaggtggtgggaaagagccaaacaaatgccaaagggggggggggaatcgtgaaacatggatttggcaccaaacaaagacctctaatgatg

SEQ ID NO: 112587 - DNA, 398 bp, Heterodera glycines
aaaataatacgcaaaatatctctcccgtacaaaatctgaagagtaaaatattcgaaaatataacttaaaaataatcggccccataacttcttttatttaaataaaatgggaaattaaaataattagtttatatttctatccccgaattaaataataagaattatcgtttccttcgaataacttatgccatggacaagaatcgaatagcaagtagataaattcgaaagcattaaaaaaagaaaattaacttaaaattaaataaattgcgtgagcaaatattaatttcaatttcattttaagaaacttagatttttatgaagaatttaaatgaaattttatttgaaaatttaccccctaaaaaatatttttttaacaaaagtatataaactaataaaatg

SEQ ID NO: 112588 - DNA, 116 bp, Heterodera glycines
aaatacctattcatttcatataattgcttatttagtatgatatttgtttttcaactattttattgctttaattggacatttctcaatttttgttttcgttttttttggtgaaaatg

SEQ ID NO: 112589 - DNA, 148 bp, Heterodera glycines
tctgcaaaatgggaaatcattgaagaaataattagcaaatggacatttaatgaaatgggaggagaaagatcacccgggggagggggagagaaccccatattttaatgtttaccaattaattaattatcagtcgaaatctgtggggatg

SEQ ID NO: 112590 - DNA, 129 bp, Heterodera glycines
tctaaatcattaaaattgttgaaaagtcattgtcggagcccattttttacttttaaattgttttgctgccctcgggctacacaactccttcacaaggcaaaccgaagctccgatattgatcccgcaatg

SEQ ID NO: 112591 - DNA, 289 bp, Heterodera glycines
ttggatgactttttttaaaattaaaaataaaattaaattaaaactatcaacaaaaatgtgagtgcaaattggtaaagcatgtacaaagcattatttgtgggatataaagcaacaattgttagttaaatcttgtcaaatggaagtccgcttgagaatatgagttgtgtgaatttgcgtgccttttgtaaactttaagtgcgcgacactaaaacgtgaaagtacatgaaaaatgatatccatcacattttgtagtaacagaaacatcatagcaattgtcgtgagaaaaatg

SEQ ID NO: 112592 - DNA, 537 bp, Heterodera glycines
tcaattatcaactaattgtgttaaaagaattgaaaatttcggcccagttttctttgccatcagcagaaatcatattcaattgaccattatgaacagagaaggctacgtatttaaacatttaccatcatcaaaaaatcccaaaacgaattcttcttttttttgtaaaaactgagaaaaaagagattaagaaataattaataaggataacggctgatcagttgatatcagccatttaagacacctgctggccaaccttactattctcaatttttttttcatacttttctagctttacttataatgatttacatatcctttttatatatttacataaaatccaatgttttaaaaaattaaaacattatgaaaataataaaattttctgcctatgatttaataatattttttaattcctttagtcttcccataaaaataaattacatttaaaaaagaatgtaaatttaaaaaatgattttgaaaaattccttatttatttttaataattaaaaatctgaaaaatagatttctttagatatg

SEQ ID NO: 112593 - DNA, 169 bp, Heterodera glycines
acgagacagacgcagagtaaaggccttatttgttaggcaaatttcgaaaataaaccaatgataaaaccccgaaaatgctgaaggcattgccttccaaggccaactcgggcaaattccaaggcgcctttacaaattttccatgggaaatattgcgaaagtgttgaaaatg

SEQ ID NO: 112594 - DNA, 269 bp, Heterodera glycines
gacccattttaatattaacttgacctattaattgatgcagaatttttttctctatcgatatgcaaaatttggtgcaacttgtatgcatagaaaaaaagttatatggagagaagtaaatgttgttctttacattattaagaatgaagagatagtacgtaaaagtgagagaaataaagataaaaagtaaatgtgacagaacgccaattttttcccataattatccataaaaaagatttattgccgcttttttttcttttttaccgtccatg

SEQ ID NO: 112595 - DNA, 80 bp, Heterodera glycines
aaagggaatgtaaagcgtcagaagtttgaatattaaaagggatcatatctgttcggccataaattattttatgagccatg

SEQ ID NO: 112596 - DNA, 270 bp, Heterodera glycines
ttctgtaaatttttcactttgcgtttttcctatcgctcattcctaccatttgtttttttcttcagattttcacatttttttgctcggattttgatgcacagcaacaacagcaaatgttcggcaccaatttcgtcacttttcgcctccgccaatttgtgcaatcaatcgaaaagaaaatgaatggcccgggggcgacagagggtgggcaagacagtgtggaaaatgcggaggtgacagacacacagaaacaaaccaattattacaaatatg

SEQ ID NO: 112597 - DNA, 1003 bp, Heterodera glycines
gtatgcataaatttataacaaatttatatacataaaaaatatatacaaaaattgacattgaaacgaaaaacagaatgcatatttaagaaacaggaagaaaaatttggcaattaatcaatttgtattaaaagaaaactaatatgtaataattagggatgcaacttactgattgcagttgcaaatgagtagggctgggatttttaagagcaaaaaacccaaaatagttacctaaaaaaatttttgccaagaaagtaattttttgagaaaattttttttcatttcataggagtatattttgaaaaattttagctcgattcttaggggtgtattttttgattttattgcatttttattaagagacaaaacgccaaaatagtgaattttcactattttagtgacgaagcgtgaaaatagtgatttctagtgatcgatagtgagatccaaatcgaaaaatttcaacgcagaaatgcgttttttgagctcctttcttcaaaacaatcgagcaaaaaaaatagttaaatcactaaaagttgcatccctagtaataattagggatggcaatggattttattgtttgtctcgtctgatgattaacattcattcattctcgatcaataacatcatcagcagatttcacattttaacacacatagccatgccatgccattgcacacgtccggcaggcaaaaatttaccttttttattttccttttttgttttttcataaatacacatacctattaagcatttatatgtaaaattattttacttaaatttttaaatctaaaagacatcaagcctttttttaacatatatccatgtaatacggatatccaccgatattatctcaagagataaacccatccattttgccccattgttcgattcttcgttattcccctctgttgtacaccacaaaaaaaaaaaattggtttctaacgctgtcaaatgccgagaaatgcccctttctcatttttttaccccaattattttcaacaaaatg

SEQ ID NO: 112598 - DNA, 781 bp, Heterodera glycines
gtggcctgaaacgcaggaaaaacatgtttttttttcatggttgttaagctacttttcgagttattggcaactattttctattttttttatttttagcacctaaaaactaaaagattttgaaaaagctataattattttggcctttttccaaaatttgttaataaaaatgcaataaaaacgaaaaatacactcataagtagggagtccaaaaatatgcacataaaatcgcaaaatatgcgcataaaatatgcaccaaaaatggcaaaatatgcacataaaaaatatgcacataaaatatgcacgaaatgccaaaatatgcacaaatatgcacataaatcgcgaaatatgcacaaatatgcaaaacatgcatatggaaagtcatcctagaagcttcaaaacacgctaaaaacatgtttttcgtgcgtttcaggcctcccacaggccagaaaaaaatatggactccctactcataagaatcgacccgaaaattttcaaaaacacccctacgaaatgaaaaatttatcaaaaattcatctccaaaaattatttacctacctatttactttcttgacgataaactttgattttaaaaattatttatctcatactgatttggttaatttttttgaacaacttttgtaattttacacccctaaatttgaaactttttagcgattattttcccttttttcggtttctttttgaaaatttgccttaatttatttgctctcaatcgttctttttagttcagcatcatcatttgcttctgttcatccatatg

SEQ ID NO: 112599 - DNA, 311 bp, Heterodera glycines
aaagtccagcaaatttgggatgtttttgcgcgtgaaatttggccattgttgcgcccaacattcaccatttggactttcccgatgaccatcatttggacaatttgcatcgtctcatttcgccaacaattctcgccgatctcgatcagttgaattcaatcgactccgatgatttattgcccgattcaccagctgatgatggaccaaatgcaactgttggccaagtgctgtcaaattggttgaacactccgcgaaacgatggaaagccgaagcaattgcgttcttgtgactattgtcatgtgtcagaaaccatg

SEQ ID NO: 112600 - DNA, 353 bp, Heterodera glycines
  unsure (1)..(353): unsure at all n locations
atccgatcattaatattaatanntttccaaacgcctctccacccccggtgacggcaccatggcgctgtgctgcgacacgacctttctcgcccggctcgtccgccagccagcagcaatgcgtcaagcgcgaggacgaaacaacggcggtggaacagcagcgacaaaacaccggcacgagcatgaaagcatcgccgtcgctgtcgctgcggcaacagcagcagcgagcaacggcggtgcccaaggcggaagtgatggcggaagacacatgcgacgaacaagcgccagaccggcatcagcaacacccgggaggcaacggcaccggtggtggcggcgagctcagccccgaagacatg

SEQ ID NO: 112601 - DNA, 71 bp, Heterodera glycines
aatgaatggtaattaattaatgttcagctcagaccactccatgggctgcgctttacttcgtcaccctaatg

SEQ ID NO: 112602 - DNA, 707 bp, Heterodera glycines
gcatattccatttgatttcttcaatttccctcttttcaataatattgggaagatgctttttcttatatatttatattatttaataaatattatatttacaacaaattctgagcctataaaaaattgtaatgcattatcactcagatggactgacggtaataaataaagttctttttgcatagctctgtttttaagattaggattaactttcaaaaattaaaaaatttcgacgaaaaaataaattgaattttgataaaaaaaaataattttatgattattgataattaaatgtaatgacatacaattaaacaaagggtaaaattttttctaatcatttaaccccctaattttaatagtttttaaatgttttatttatcgattagaagtgtgcacattctaacgcttcataattaatttaacactaaatagttaaaatgccgaatatttcgttttgttgttccaaaactcgtattttgttaaattatcaaccggtttagatttaaaaattcaattttctgtttgtttggacaaaacatcgaaaaactttaagtttagtttgctttgtgatgcattaaactgttcccatacaaatttatttgctttctttaattacccaatttatttatttttatcttaaaaaaatgatatttcttgtttttaataaatttatatgacattttttacatcacttttttaaggaagtaatg

SEQ ID NO: 112603 - DNA, 190 bp, Heterodera glycines
cttagaaaccaaaaaattgatataatttatttagatccccacccagcctttgatcaagtcccgcatgatcttttaatatacaaactcaaaaaaaccggaataacgggcaacttattaaattggcttcgggattttcttcttggaagaacctttaaagtaagaataaatcaaattaaactttttgcagatg

SEQ ID NO: 112604 - DNA, 136 bp, Heterodera glycines
  unsure (1)..(136): unsure at all n locations
ctttagcccctcagccccgccccccccccccccctgcccttttaattggaagnctggaggacaacagcccatacattttcctttgcttgttctactcattgtcaaaaagtactaataataattccagtccatgatg

SEQ ID NO: 112605 - DNA, 65 bp, Heterodera glycines
tttgtctctgctgttggacggcagctaatcactccagctgattgcgtcatacatggtccgcgatg

SEQ ID NO: 112606 - DNA, 139 bp, Heterodera glycines
ttttcatgactataaaaatgtttgtttttcgccttgcctctcattattaaaaaaaaaaccatttctaacgcaattgattatcctgctatttgagtgacatcattccaaaaaggcaaattgtgctaattgccacaaaatg

SEQ ID NO: 112607 - DNA, 867 bp, Heterodera glycines
cttttagactatagtacttaaagctaagaactttattcctgatatttgtatcactgacgcatttaccgtatggggtgcagctgggtaaaatttgggacggtaatgggggacagcgcaacttagaatatttggttctgttagaacattttgttccgttctcgactgtcaagtcgagattgatacatttttttggtataagtttatcaattaaaaatttgaacatagaaaggatataaagctccccttcttcatagaatttgaaaaaaaatgtaaatcaaatggacattcgttctctaatcccatattttgtgattccattttccatttcattttcattttaatttttcacttgaatttgcttttgcttgctcagttgacaaatcgcgagctgtgaggtcttttcatttgctcataattttttcctaattagccttaagagaactgaaaattgagtccacaaagccaattaagacataattggaaaaatgacaaggaaaagattgttcagagaataaaaagagagataataaatataaacataaaattaatgtttatttaattacaattttattcaaatagcgatatttttattaaaatttaaaaaagaactttcgattgtctgagactgaattttttcagtgttattttattttaaaaaaagttattaaattttaaatttatgcaaacaaacatttcgaaaagctttttgattagagaaagcttttgaaatgattgtgtttgtttagacagtcaaaagaatcaaaaaatgcctataaaaggaaggcgatgaaaggaaaaagcacccacaggaaaatatcattttattattttaaaaaccaaaattttattttagaaaaccaaaaaatg

SEQ ID NO: 112608 - DNA, 423 bp, Heterodera glycines
tcatttgctgttttatccatattactggatatgagatatgcttgttaaagaagaacaggctcgagaattctaataattttaaccggcttagttttcaagacaattttctacaaattaaattaccgatttacaccgcaaaaaaaaactaagtttctttgagagtttatcattttccgctccactaaaacatcagtattttttgttctagcagttttacgcgtcccatggcaaaatattctagaggaaatgcgtcgaacaaccttcctgtttaaaatttttttcaattttaaatgtttttttgtaataaactaaatttgttgggacatgtaaaatgccatgggacgcataaaccgaccagagccgtatatataatgaaattttaaatttttttttgcaaaattttttttggctttgttgcagatg

SEQ ID NO: 112609 - DNA, 1003 bp, Heterodera glycines
tagtaccgtacccgccgaatacagaaaatgtcaataatgcccttaactgtggactggaaaacagtcatcatttggctttgagtcaaagcagcacacaatgccaaatttgttaataaaattaattaaaattcaaattatatagataacagagatggaacccgtcagttgggccccagcatttttttttgactataacttttttttctatgtcaaccaaatccaactctattgttggtatcattcgaaaactctttacacgctctattagccttacaaaaaccgaaaaagatttaggatagtatataaaaaatttatgaagaaaaacttcaaaaatttcgactttttaaattttcatgtataacttttttggcaattgtttaaccgcgaagcaatagcatagaaccaagttctaaacatattaagctttcgaatgatacctaaaaatattcgatttggttgacaaagaaaaaagttaaagtccagaaacttgctggggcccaactgacatagacccaacagagattgaattgaaaagttacaagaggatcgagaccaagaaatgacatcataaaacagcaagaaatttcttgttctgaaaattctcgctcagcaggtcccctaattgattggccctaattgaagccataattttgattttcacttttttttttgcttctagctatgaaatgaaatcatttttttaacaaaggaaatgaaaaaagcaatataaaaaacagcaacaatttttaattcaattgaaaacaatgtttacggaggttttcgaaagaaaatggcttttgttgtgcttttttaattaaaaaatggaaggctttaaacatagaaacatttgaatggtaacaaatcattataaatttttgaaaaaaaaaaaattatttctcacttttgctctacagtgaaaaagcaaaaataacaaaaaaatttcattttaaatttcctctttttaattttgtttttattctagtgtttttaaaaatttaaaatg

SEQ ID NO: 112610 - DNA, 1003 bp, Heterodera glycines
gagacatgaaaatagtacgccaaagcgagagaaaaagaaatgcaaaattttcatcacactataacttaagcaccgagcgtaaaaaattaaaaatcgagcgttaaaaaagttcgtaatttttttctctatcgatatgcaaaatttggagtggatttaacgtgcaggaaaaaagttaaacgtcacgaagtaaatgttgttctttacattattaagaatgaagagatagtacgtaaaagtgagagaaataaagataaaaagtaaatgtgacagaacgccaattttttcccataattattagggcccggatttttatgtgctaaaaatcctgaaatatgtaataaaatatgtgctaaaaaatgctgaaatatgtgctaaaaacccccaaaaatgccaaaatatgtgctaaaatatgtgttaaaaattgaaaaaataagtgtgtttttgcataaaaattcccaaaaatctcattctttatcatttttagcccatacaacgcaaatcaaatacatttcgaagtgtttggggttaattgtctttttttgataaatcatttctataaattgaaagttccagcagagaacttcgaaatccaatgacgaattaatgaattcgagatttcattagtttctacaatcgaagaaaaaattttttaatttgaaaattatgttaataattaggaaaaaagtcgatttttaggggtgtatttttcaattttcttgtatttttattgcaatttttctcaaaaatgccaaaatatgtgcaaaatatgtgccaaaccccaaaatatgtgctaacatattttatgtgccaaaacgccaaaatatgtgtttttatgtttttataagtcgctctaaaccaaaaattgttcggagaaaatgctatttttgggcttctctcgccataactaagccgcaaaaaaaatatgttaaaacataaaaatcctagccctattcataagacttggcgcacatttcactactaattattttttgcgtcgtagatg

SEQ ID NO: 112611 - DNA, 136 bp, Heterodera glycines
ctttttggttttgttcaactttccatgttagcatatacaatatatggtgaaaattgcaatttttgactcatttgcacattgttcagctgatgaatgggccagaaaataatccatgtacacattgtccagcaaaatg

SEQ ID NO: 112612 - DNA, 83 bp, Heterodera glycines
aaactggtttaaattttttattgaaacatagatgaataatttagtttgtttcctcacatttaaaccatttcagaccaaaaatg

SEQ ID NO: 112613 - DNA, 142 bp, Heterodera glycines
  unsure (1)..(142): unsure at all n locations
aaaaatttcagcaaattntttgaaatttanagcaattttagtaacaaatggcattaaaattctcaaaattttcctcggcggcgcctaacggcaccaccggacccacattttatcatttatttgaaaaatggagaccaaaatg

SEQ ID NO: 112614 - DNA, 515 bp, Heterodera glycines
tttcgactttggtacggcgcactgagcaaacgccggtcggatttaaacatggcgggaggaaagtgctgctgatggtgggacatgtgaaaaaaggcagtcaaaagattggcatcgatttactcaattaattatgtaattaatctttaaatatcctcggcattaatcacataattaaattattaatattttgttgataaattaattaattacagaaagtattctcttattattttgggtttctacctctaattggattgattaattataattagttaattaagtaaatgacaataaatgcgaatgtttcgtttcgtttccttcgatttgcgtagtttcgcgtcaattggaaaaagtcaataggaagaagagaaaagcaaaatgtgggcaaagaaaggaaagcgaagaagaaaatgacagcaaaaagcccccacaatttattttaatttattttattttaattttatcaattctttttcggtttgtttatccacggcaattctttttgatttccaatg

SEQ ID NO: 112615 - DNA, 1003 bp, Heterodera glycines
cccgtgatcatccctgcccgccccttccaacattcgaacccagacattgttttcaatgagttcatgcacaggcatcaatcatttggggaagtgaatttgttagaccagagaatttcaataattattgccacttattctttccctgttaaataaattttttaattttttgatttctttattttttgtttattacaataattatttattcgaccttttttctttaataatttttcagttatgtactcctttaaaaaatattttgaggagactctcgaaaaagaggactttttctggccgaaaaacagagaagacgttgaggcgttgttatttgagtcatcagattataaaattgcaatacatagagactacgaaagcccttattccgattatataaccatatataatcgtacctcgattttttgtttcaccatggttgagagaaatttaagattttttcatgacttaggaagagggacgcctatcggaaggtttacaactgtgctaaatgttacggtacaggcgaattatacgggagaagggtacatggcaccagcgttttacttttggttcttttgggagggcagaagtcaaacaaccaacgcatccttcaggagccgttttttttgtattgcgtttcagcgttgagagtgatgggcagggcatggggcagagaactacttatgaaccctatcgaaattttacttgacatcttcttccaacgcatggataggttagaaaaaaagcaaacataagcttaaaaattttttagagatttggttggaacatgggcactactctatagactcccgccctcactttttgacgcttcacgccgagtcgttgcaaagaaggcaatggaagaatttttaaaattaccatcattttttcgcatgattttttataataaatattaattggaaatgtctttttaaaattcggtttctggccaaactattcattcgatcctaatttgctattttttcgtagaaatttagaaaaaatg

SEQ ID NO: 112616 - DNA, 885 bp, Heterodera glycines
cggtaactaaacgaataaaagaaaaatgcattgcgaaggtcgaggaaaatgaaaatggcagaaaaaaggaacgattccgaaacgaataatttgccaattcctccaaaggaattaatttgctgaatttccatttgccctttcgttttctccttacaattgctttgcttggcgagaattcggattttctcgctgctcaatttgctttggctctttcccatatgtcgtcgatgcgcataattcacaatcgaattaggaggataaataaaggaaaacaaaacaattggagggaagcgaaaggaaagtgaaaatggacaaataaatgcaggaagaactcctgacaacgcaaaaagcgcagaaaagtgactaattgggatgccatccatccattgcgaaagtgaaacattccttcccccccccctctccctccggccaacccacaatatttggtacttaatcccttttaagaccctgctaacagttagtgctttccctgtaattaatctcccatttcagacggctaagcgaaagttcgaacaagttgccatggagatgaaagggagggacgtcggccaacatgaaaggagggagtgggtcaatttgcgattttaattattggaaggtatcagaaagcattgcaattatggtaatatgcatttatgggtaaacaatcaatcaacaataagaaacgctccgtgtttttagtgtcttatgcccacaatttgaccgattcccataaaattgtggtcaaatggttgactttgagttgtcaaaagggcaaaatcgtcctcctcatccatcggttgatttctgtgccgtgtccaagtggacttttgaaaggaaaagcgtttaatggcatccagatgttggagttcggagggaaggatg

SEQ ID NO: 112617 - DNA, 383 bp, Heterodera glycines
tttgtccccgtcatgacagatactgttttagtgatttttcctaattttattatcaactgaatttttaattatatttaaaacgataaaaaacaaaaattcaacgaagttttattcgtttttaaaaactttgagatggtgaatagtttttgcattcattcaattttcatacagaaaaccaacgacaaagacgccggaagaagcgatcagtgggaagcacagttggcgtgctaattgttggcggctttttttgcattttggctatttgggctatcgggaaatattgtaaagattgttcgcccgaaaatcagcaaggagaagacatcgaaaatggcagaagagtagcggcacgagaaattcagccagaatcacctgaaggacgcatg

SEQ ID NO: 112618 - DNA, 818 bp, Heterodera glycines
ccagatgtccacatagaccaagaaattgaatttattaagaaacatgttacgaaaaattggaaatttgccggaaaaatacttaaacgatcaaataatcttgaaatttttgcaaatatgctttttaaacgggtgaaaattttctacatagaggcatttagtgcccctgaaagcgaaaatttatactattcatttttagaagttctcgataaaattcaaaaattacctaaacttattatgcatgagtatggaaaccaagcattagctatgcaaaaattagaaattggactcaaagaaataaatatatttaaatgtcaagaagcagagattatatccgataccaatttatcgaagataaataaattccaaaaacaagtgcaaaattatcgatttgacatgaaaatgttatacaataaaatacgattgacagctattaaacatgtatttaaacccgaaaaaaaattttttttagtccttttcaaatagaaaaaaatagagaaattttttattcattatttcggcatatctaataaaatcgcaactttttttttgcaaaaacgaaacgttttcgttactaaagaatcggatgattttttgtgtaatatttcatggttacttgcgcaaaagaccaaaaagttttgcaagtttgaaggtcgttcactaatttcatttgccgaatttgaactaaattttacaatcgaaatagtttgagtatttaaagagaccaaaattttttattatcctatcaaattttttgacttcaatcattaggttacgctattttattttgatttaacatttcttttccacttttagaaatg

SEQ ID NO: 112619 - DNA, 105 bp, Heterodera glycines
tagagtcaattatgttttcaaactaactaatttgctaaaaatttatttattttctaatttttttattctttttttatttaatttttattttcaaggcttccaatg

SEQ ID NO: 112620 - DNA, 148 bp, Heterodera glycines
tccccacagatttcgactgataattaattaattggtaaacattaaaatatggggttctctccccctcccccgggtgatctttctcctcccatttcattaaatgtccatttgctaattatttcttcaatgatttcccattttgcagatg

SEQ ID NO: 112621 - DNA, 214 bp, Heterodera glycines
atttattgtctttttatttatttatttttagcagtggcagcgaatttcggccgttcgaattgctccattctttcaccaccggtagcaatttggacagcgacctttacttggccatgctcaaaatcataaaagagctttgcaagcgagaggcatcttttttaaaaaattttaaaaatattttgtaaatatttcagcctgccctaaagtcgcaatg

SEQ ID NO: 112622 - DNA, 311 bp, Heterodera glycines
tttttgtcccgttttcccataaatgacgatccgccccataaatttaatttttattcgttcgttaggttaaatttcatagacagcatttttaaaagcattagaatagagaacctaacatattgaaaatgctgtttaaattttaacttgaaaagacagtttctattaggtttaaaattgattctttgaaaaaactcgatctcgagtgagtccttgaaatagctcaatttaaatgtccttgaaaacatttcttaaccgaaaatctatcagtgctaattaaaatattaatattaattaatttaaagaagtttatg

SEQ ID NO: 112623 - DNA, 223 bp, Heterodera glycines
tttatgtatttgacaccagtctgataataattcgccaaaatttatttattatttgtccatttattacgaattattttgcatctatcactccaaattttgttaaaaaaaaaaaaatttttttattgtcccaatttttaccattttgtgttttttcaacaaaataaatatttgttcaaatttaaagaattaatttttaaaattttagacacaaaaacaaatcatg

SEQ ID NO: 112624 - DNA, 405 bp, Heterodera glycines
ggcgtaattccaaattcagaagttctttttactgtgggctgtcctcttttcatcgccgttttactgccccgtgggtgctgtgccggtgtatttttaaaggtggcgctgaagtggcccaaaagttgcgaaattacgaattcgctgttgaactgctcgaatttcttttggaaactgatcgttagtttttatttattggataatttgtcatcatagcatatttttcgcaaagttcttcgcaatttttgcatgagttctcgcggtaaatggtacgaacgcattgcactcaatttggaacgccatctgaagagtttggacaagtcagcacacttttgtcgactcggcatggcggatgagttggtggggaagtcggacaaactcatcctgcagcatcggctgaccaaaatg

SEQ ID NO: 112625 - DNA, 165 bp, Heterodera glycines
ccaatttgggcgttcttttttgattatgattacggccaaaaaatatggacaccagtttgagcgctatgttcaaaagttatgcggaaccgaagttgttcaggcaacctaccgccgattgggcagctaatcaaaaatgcttttcaaaaaattaaaaaatacaacatg

SEQ ID NO: 112626 - DNA, 641 bp, Heterodera glycines
tctctctctatagttttcctcttctctaacttctaattcccaaccactcctatacacccatcacacacacaaaaacgcacgcattcaatcatgtgtgaaaaccgcacgcgttacccactctaccctcccatccgcgccgacagagaaacatacactgcattctcttctctacccagcctttctctattagtccccaattatatttttcaattttatgtttctttttctctatgaaaacaaaacaccactttaggcgcaaattcaaaagggcaaaagtgggcggagcttcgcctcacttaatatatagtaagggatagcccgaaataaggacaaatcttacaaataaggacatttttattttgtaagatttggaccctccaaataaggaaaaatcttataaataaggacagatccgaaccctgcgttacgaatacgtccactaaaacagttcacctaaattaattttaacaaccaatccgtttgcacgacctaacccaagaccaaatggctattctttaagtcaaattcgtgtttaacgaccccgaaaatttatggtcaaaaaatattgcttttgaaaaaacaaattttttgttaaaagaaccgtacgaaggaactacaggacatttgacttcgctataatg

SEQ ID NO: 112627 - DNA, 245 bp, Heterodera glycines
aattagcatattttcatattttttgggacgtttgggtgaaggaggccttggagagggtaccaatgagcaaaagcgaaaattttgatcaaaaacaattcttaaatgcgcatttccaaattttaacactttttgccatttttaaattttaatttgaattgcattttttctctggccaggctgaggaatgggccaagtcgctcgcgggtgcgttcgccaacaccgccccgtcagcaatgcccgacatg

SEQ ID NO: 112628 - DNA, 1003 bp, Heterodera glycines
tcggttgaataattgtaaatcaaacatttcaagcttttcaggcgtaaaaaaatttattgcccgccaaatggccaatattttgctttttgaaaagtcgattctcaggggtgcccttttcggctctattgtcctttatgagttcaattgacttttatgagcccaaaggtattttgagtccaataaaatattttatccgtcggagttttacgggagccccgctcccgtacttttctacccatcaggttttttacgggagcgggagttttacgggtactcccaatcctggaagacatgggtcattcggatcaacgaagtacatccgatgatttacccaacagtagtcgtattgttatttcagatccttcgcgaaaacaaaggatttcttatattttttactgatgtaaaatgaaaattcttcaaaaagttgaatcagaattcaaaatatttgatcggactcataaactctgattggactcataaagtgcactagcgcccattttatttttttttgttgaatatttcataataaattttttgttcacaagcaagcagaaatagttgaaaatagtccggcggtgtcgacaggcgccgccaggggaaattttgaaaaatgtaaaatttctgccaattttcggttacattatgccaaaaatttgaaaattgtttattcataattttttttgtttatatgcaaaaattatgtagttgaaaaatagttttttaaaaatttcacaagcaaaatagtttcataagcgaaaatagttgaaaaatactttctaaattaaatgttttttgcgtttatctcaccatatgttatccgcaaaaaaataagtgaacgcctaaaaatccgggcccttctcttatccaaaattccgatttatcagtccctaatttgtaaggtgttttggcaagttcagccctaggcgtatattcttctattctgattcatgcattacagaccattttgcctacgcctctttcaattattaaattattccaaatg

SEQ ID NO: 112629 - DNA, 205 bp, Heterodera glycines
aaaggaaatgtttctggcattggtactgtgagtgtttttgacatatgcgatgccaattgtcgggaagaacagcgtaatgataatgaggcggcgagttcaaaggttccggagaccgttactatcactaatgatgattagtgaaatttcgtgatagcgtgattaaatcaaaatcacatacaagagctgattcattcctaggaatatg

SEQ ID NO: 112630 - DNA, 187 bp, Heterodera glycines
  unsure (1)..(187): unsure at all n locations
atagtaaagcataatagtaattattaaaaagcaaataaaatntaattgatgaattatttntaaaaatacatataatacatattagaaattaaattcataaataaattatccaattaaaattatttaattaattttgtcaaatccacgctaattttctttcttttcagtttcggctatctcggaaatg

SEQ ID NO: 112631 - DNA, 336 bp, Heterodera glycines
aattatatataaaataatatatttaatttaacgctcgtttggcgtaatgttttaagtttcctttatcaagtaaaattttaaattttattttttaaatatatttgatttaccgctcgtttggcataatgtttatagcttcattccgaaatttatctttttcatatttatattgttatagctttaggaaagctttaaatttttacttttattcaattctctttaatcttttatttaataaatacacattgcttataaaaattgtttacttataatttatattgttttcagtaaaagttgttgtataatattttctaggtaaaatgaaaataacaaatg

SEQ ID NO: 112632 - DNA, 161 bp, Heterodera glycines
  unsure (1)..(161): unsure at all n locations
agagggcgagaaaattncatattatgaattcacgtcccctctaacccgtacgtaaagtgagtttgtgtttcggtcctttacaatttatacttttattttctgtttctccacccacttacccganntgaacatccaaaaggtgctcatcttgaatgaggatg

SEQ ID NO: 112633 - DNA, 205 bp, Heterodera glycines
aaaataaatttatactgttatatataaaaaaagggtggagttacattttttagacattatggatttctttgttcaaaaatatgtttgcttttgaataattattaaaattaagggatgaaaatcgatagaagaaaactcttgcacaaatttaaactcattattgaaattacaattatgcaaaataaattaaaattcagttaaaatg

SEQ ID NO: 112634 - DNA, 678 bp, Heterodera glycines
gctcccatcattctcttgtcgaacaaatagcgcaacaacgagttcaggtcggtcggtcgcttggtttgcctgcatttggctgccctttttgcaatggcgccgcctttaatgattaacccaacaacaacaacaaaaacaattactattctataaaagagacacttcatagggcaaaagctttccatattttaacaattggtctttactaaataacatttaaatggcatttgtttgatcagtgatcgggagcggcaagcagctaacaaaccaaaaattaaagaaaacaatccgattttgaatttccccaaatatttaaaatttcgttttccatttttttttcatttgctttccacttatccaggaagagtccgtgcgtctttgtgtgttctcctcttgaacagtgaacgagaatcgggcaccggcacttcgctttgcggcagcaacaaaagtggagggaaagaacaatcgaagaggaaaaataaaatgggagggaggaattggctatgattttcattagagatctgaattttgaaaaaagcctgtacctgtacctgtacctgtatttcccgattggcctgtacctgtattctgtacctgtatttcctgtagaaaagtacaggaaaatacaggttttttcgtgtttagctgtacctgtacctgtactaaattctaaaaatg

SEQ ID NO: 112635 - DNA, 265 bp, Heterodera glycines
atattcctaaattttataataatatatgcaaattatcctctttaattaatatgcaaaacatttgtaaaatcaatgagtttccttccgctgtttataaatgaacagacaaaatataatataatatataaatataatcaatcatatttgctatagaaataaaaatttatgcagcaaatcatataaccaaacaaaataatcatacttaattaaataataataatataatataataatgaattattaattattcttttagaaaataatg

SEQ ID NO: 112636 - DNA, 284 bp, Heterodera glycines; identical to SEQ ID NO: 98949

SEQ ID NO: 112637 - DNA, 75 bp, Heterodera glycines
tttgaacaaacgtttatcgacaactgttgcatgcaattggtggcccgtcctgaacagtttgacgtcatggtaatg

SEQ ID NO: 112638 - DNA, 147 bp, Heterodera glycines
ctcaaaatttcagctaattatcttctaaatataaactctcacagcgtgcggaaatattgagttaatagctccaataatctccgacttattattttcacgaccatctttgtgaaattttcacattttcagctcattttcctcaaaatg

SEQ ID NO: 112639 - DNA, 61 bp, Heterodera glycines
  unsure (1)..(61): unsure at all n locations
gggcatcaaatccaaacccaaatccaatcccccccaatntccctctttcacttttcagatg

SEQ ID NO: 112640 - DNA, 759 bp, Heterodera glycines
ggaaaaaaaggtaaacaaaataaaaaaaatggtttatgctccccagaattactggaaatatccgaaatccggatttttgcattttgacatttttatgtcgatttcgactaaaacaatttgtctttaaattatattttttgtggcaaaagctttaaacttttttagaaaacattgtccgaaaaaataatttctccgatcagtgatcagaaaaattatcggacccgccaaatggacagaaaaaaaatgtgccaaatttttcaaaatgccaaaaaattgatgcgagttacaatttaataaattttataatttttcgtattcaaatttgaaaatttgtttagattttgaacagctgagtgctcattttttgattaccgatgaatcggtagaagtctacatgaaaaagtatcgagaataaaattaacaaattaattaaaaccaattaaaaaatttagtcaatccaaagaaaatgaaacgtttaatcacgattttgaatttccaaatcaaacttttgaatttgatctgcaaatttggatacaacagtacagctacaaaattacattgcgaagtcaaagcaagcgcggatattttccccagcagtggtggggcggactgaagtttaatgagcataataaattattggtaattgaattattaaaattaaaataacttaaatatttggtagatagataattaaaatgtgttgaaaatattattttgaatttctataaaatttataaataatttttaaattttagcatg

SEQ ID NO: 112641 - DNA, 425 bp, Heterodera glycines
acgtatttttctctggcactatccctttttggttcatctctcgttttttgaaagcgatttttgttaattcagtcgaaaaaattaaattccagaaatttcatttctgcccccaaaattgctcgtaccattctcactgcaagtcgcccttccgcctcgtacttttcggataacaagctgaaaaggaagaaataaaaaagaaagtgccaaaaattgtttaaggaacagaaaatgctttaaaataaaatatttaaatgtatttatacaattcaaatcggtctcgaaaaataataaattcaattagatgattatttataaatacagaaacattgagaagcacaaaatttaacaaaatgaaaaacacgaaatttaatttaatatttcgttaaataaaatgaaaaaatgccatttagttaattggccatatg

SEQ ID NO: 112642 - DNA, 452 bp, Heterodera glycines
atcgaaaagcgcactccgtcgatggtcggggtaagaagaggagaacactgttttgtttttggggcatgccttttcagctatgatttttggttgtttttttgtcgaattcgtttggacaaaaaaatgaattttttttaaactattgtaattaaaattttcccacatttttacaaactctttacagtatgccgcaaaaatagaagagaagaacaatttagaatttgttggtgactacaaatagcaagtaaatttttaccatattttcaattgaatctgattttttcttgaaattatttactaaatttcttttataaatttatgacatttaatatttgccaaattatttaagtgatttttaggaagcgccacgtgacgaaaaattgcacttcattgaccaaaccgtgtgccattgcccgcttggcaaatttgaattaaatgtagtttaaataatg

SEQ ID NO: 112643 - DNA, 170 bp, Heterodera glycines
tacaaccacttccaagtacgatacaaccacttcccctaccagactaccacttccaagtacgacacgacaacttcaaagtacggtacgactactcaaaagtaccgtggcaaacgctttgcggtaaaacttaattttgttttataaaaaaaatatttcttataaacaggatg

SEQ ID NO: 112644 - DNA, 330 bp, Heterodera glycines
agagataaactgctgcaaaaaccaaagcaatctgatcatgatgctgatgataaaccagatgagggtacacaaacgacaacaaaaacgcatggggatgcattaaaggaagagatattgcaaaaacaaaagcatgctgataatgatgacaataaaacagaggatgttccacaaatacaaacaacaacatcaacaaaaacaacaaaaataacaaaaacgcatggggaggcactaagagaaaaagtgttgcaaaagcatactgatgtctctaaaccaactgcgtccgatgcagagcatgaaactagtgatgtcggtggtggtggtgagaaaatg

SEQ ID NO: 112645 - DNA, 284 bp, Heterodera glycines
caagaaacagacactttttataatgtttgcagaaaaatatagaatttttcaccttatctgcgcatatcctgaaatcacttgtcttcctttttagggaagcgattaaaaggaagctcgaaatttatgaagcgcattgtctttcgaatttctataatattttaaggaagtgattaaaggtggctcgagatttatgaagcgcattgtctttataatttttataataaatgattgaattatattaatgtttaattttatgaagaaactattgacggacgcaaaaaatg

SEQ ID NO: 112646 - DNA, 1003 bp, Heterodera glycines
tgatcaaaaataattttcattccataattgaagttgggtgtttttttcgtttttactgcatttttattgagaaattttttccaaaaaaaaaaattgaaatagtgtaaaaatagtgacaaaatgtcaaagtgaattttcactattttagtgaagaagcgccaaaataatgatttctagtgacgaaaaatgtcatcagaatcgaaaatttttaatgcagaaatgcgttttttgaactcctttctttaatcaattgagcaaaaaaatatattttttcactaaaatcacggccccagtaataacttttttatttgaagatatgtagaaaattctaataaaagcaaacagtcgcaccaatgctgcagtgaaaaattcaatttacgaagagaaaaaatttacaaatattttgttttgtgtatttttggattgataatgttcctaattgaaaaaatcataaaaaagactaaaataggttctttttaagcgatttttaagcgatttttagagaataagaaaattttttgaaaaagtctcatgtttttgggtcttggtctcttaaagccagattattctaaatttttaagaacaaaataaaaaaatatattaaaaactgttgatttatttttttaaataaaaatattctattattaatgttttcattgttttccatagtcttaaaagaaaaagttaaaacacaaatttggcacagaattcataaactggtttctatttaataacataattaacttggaaatgtgaatttaaccattaaaaaccaaaattcggctgtgggttgccttaaaaaagtcatacctgaaccccaaaatttttttttaatataacttaatatcctgatcaagtcttttacataacagatcagatcattcctcacttctaatcactaaggcacggatttttagtggcaaaataaaattccaaaatagtgacataattttcagcaaaaattatcaaaaataatttttattcacttacagcagtgcaaatg

SEQ ID NO: 112647 - DNA, 68 bp, Heterodera glycines
ggccgaacacaaacgtggtctcggaattccagccaatattgccatgcgaacatcccagattgaaaatg

SEQ ID NO: 112648 - DNA, 813 bp, Heterodera glycines
aaacagcgccgactgcaattgtggcccgaacagctgacgcgccacagttcgagctcctcgatttctgttaaatcgcttaataacacatgctaaaaatccctttccccctcgcctctcttctctcattttttccttttctctctctctttctcttacaccatttcccaatttatcgtaccttacattcgctatcccatttgaagtgacagccgccccatttttgagcccaaatattgcgaaaatttccccatcgtttccccaaacaaaccctctgacggaaagggcccattcctaagggtggaaataacaaaagcgctcattaattaacaaagggaaacattttgggggagtaattaaatcacatttttgtcccgggacataagcaaaaacacaagacaaggatccgaagattgaagtaagtaaaaagggtcattaattggggtgcttaatccatcagaggaggaaaaacgaatttgacaagcgaaactggggaaattgggaaaccgtaacatttgaggaagagagaaaagaagattaattgaggggaaagacaaaaggcaattgccacatccggggacttttgaaggaacagcggattttcacaattatttaaaatcttttaatcttgtggcgacggcacacgggtggacacccgttcgatgtgcgcagattctaccattatatttgcgcgggtccgctcgggctatttacgatggattgcgagaggatgctaaatcaaattggaaaaccttagtcgacacactcgccaccaatttaaagaaggtttcctccagccttgttgcgcgacagatg

SEQ ID NO: 112649 - DNA, 168 bp, Heterodera glycines
atccttggctcaggagagtccatggagttccaggggcgtggtggcccacacgcacacattgtagcccagactgacctggacgcagttccagaagtcatccaggaatacatatgggctcatattccatctttgccgtgcaaagacgatgactcacccatagcgcaaatg

SEQ ID NO: 112650 - DNA, 686 bp, Heterodera glycines
ggacccaaaaatttttcggctaacgcactacctctacacttacacacttaggaaatcgtgcgaaacaattatttattttctttgattataaaaaactaaaaactttggcacgtcataactcggcactcagactcatttcgcagaaaataaaaaaatttttcttaagaaccatgggtgctctatccacccaccaaatttcatttggaaatcccacggacacctggggaccttcctttgtcagaaaccatgtggtcccccctttggtcccaaatcaattttatttttataatcttttccaaaaaaatagtagaaatatgaaataaatacaattctatagagcaaacaattgcgggttttcccgggcattcaaatagcggatttacggtaatctaatttaaattgaaataatatgcataaagaaaaataaacttaattggaataaataatttacctaatttttttcttaaaaatttctccttctccaccaatttccttctctaatttttcacgcagaactccattcttacaaatgtattttttatttttttggtagtgaagcgctcgcaaaggaaatgaattttgattttttaagaaatagtaattatctcactacttaggtatatatacctaatacaaccccacacattttgcaacgacttaattcattcatttttctgttccaaatg

SEQ ID NO: 112651 - DNA, 877 bp, Heterodera glycines
tttcgcttttcgctttttatttttcaatttaggcccatccctggtgccgacggcaccgccggacctcaagaaatccttattctcttaaaaagtgaccaaagttgcaaattttaacatttttggaccaaaatccgtaataaaatgcactcaaattttcgaaattttttacaggcgttgcctatcggcatcgcaggagaaatagatatcttattattattaataatttgtctgtttgcacaatgaaaacagaaagaagcatcctagaattaaaaaatatgtcaataatagaaaataaaatatatgcatattatcaattaattataaaaatagaggtaaatagaaaatttacattgaataagtaaacctttttaattaaattaaaaaataaaatttatcataagttttgttgttatatttaaaattaaataattaagataaaaataaatataatgattatatttcgttttataacataataaataaattacagactataaaccacaccaaaaatttaaaatgtttttaaaattaaatatctattcgggttttgattacatatcaaattattaccgtattggatgagctgaacaattaatgaccaagcaaagaaagacggtcaatagagaaatggagttcattggataattaattaattattagaatttaatattaatactatttaatttatttactattaaaaatgattttatttattttatgaataaaatttttagttcccaaatgatcaaatgaaatgaatgaaagtggtgaggtacaccactttttcattggacattttggcgtaaaatgtgaaagaatgcataattaactatttattatagaattaataattttacaaatttgtgagtaaaaaatg

SEQ ID NO: 112652 - DNA, 287 bp, Heterodera glycines
aaaaaaagaataaaaaaatgcaaagaaaaaattgacaataattccattcaaaattatgagcagagtaaggaagcggcggccactgctgctttaatgtaatggcattttcattttcacactttgttaaaatgccaaaaaacaattgttttctgttttttcagaaaaaaatacaacgaatcattcccggaggcaaactttcccgaaatggtaattactacctaattaattaattacccttttgtgtgtagtttccgctctcgacgcctcaggcgcaaccattttccatg

SEQ ID NO: 112653 - DNA, 409 bp, Heterodera glycines
ttttatatcatcaaaattataattcaaccttaaaaagtgagggttggataaaaatgcaaattctcgtgtaaaagcaataggtagatcacggtctgcggatgcgtcgactcgatctcgactgaaggagacattatgacaaatttcgcgaaaacataatttttaaattttttgttggcttggtcctcggttgggttaaaactaggaccgaaatgaagaagatgcaagcttaagcttacagatttacctatatgataaataaaccatttacttattagcaaatgctgagacattagacttcttttaaaatgtttttataatgtttatttcttaatttctagtaaaatttgtctaacaatttatttacgcttacgataacaatttttcgcttccttatccgcatatcataatg

SEQ ID NO: 112654 - DNA, 388 bp, Heterodera glycines
ttgaattgtttacggattttttaaaaccgttcaaacaaattattattaatttggatatgcaattcgaaggagaaaaatttgggctttttaaaagcgttattaagatttttatttgaattttttatgatcaaaaaaatgctattttttcaaaatttttgaatgttttttttagtcactatgacagaacttagatctcaccctaattaaattgaaattttttataaatatatttgttcaattttacaataatttgaatttatagaaattaatttttcaaagaattgttgttattaatttagcaattcacttaaaaaataatgaagaatcattattacatatttattagattattaaaaattaattttaaattgctttcctttagaaaatg

SEQ ID NO: 112655 - DNA, 401 bp, Heterodera glycines
tacctcattttatattttttggcattttttagcccaattttgtattcttataaattttttgcgattttagaaaatcaaaatttgagtatagtttctgaattgttttaatttataattttctatttttaatgcaaaaaacttgatgaagaagcctcaagccattgcattttttattcaataggtttaatttttattttggcagttgcaatgccatttttgtatacataattagccattttcacagttttaaaagccctcaggggctctagttgtttggacgtggctataacggagggaataccgtaagcctgaaatccccccccccctcagggctttgtgcgcgcaccgtggagcacaaattcgaatcggacattgcgacgacaccgccgttggcactaatg

SEQ ID NO: 112656 - DNA, 346 bp, Heterodera glycines
ttttacgatttgactgtttgggaatttatgaaaatgtcaactagttttatatattttatttttattattgataaattcgaagtattcttctggaaattaaaggagacatttattgattttttgtgtggattttttgtttattgcgtttaaatgaaaaaatatatttagatataatattatgcataattcataaatttttagtaattaaaatacctaaatggtaatacagacattccatcactaagccaaaaacggacatttcgccaactagtcgaaaatagtcgtacgcggtaatctgtacagcttaaagtctaaaagagaaagattgtatgggtaaggaaaaatg

SEQ ID NO: 112657 - DNA, 319 bp, Heterodera glycines
ggaaaaaaaaattttgaagaatcccaaacgattttttgtaatttttttttttgataaaacaactaaataaaatttgaaaaaatgttagagtaaattgtgtcaatgctgattttgaaaatttcaattgggagccctgcttttaatccaatgaaaaaattgagtcattcttcttgagttatttttgggcctcagttcttatatcattgatgctgattttgattcaaaatttttaaatcaaaaccccaaacgtccatagaaaaatcatcaataaaataaaatttaggtttttcatgcaagtccaattgacgcggtggacatg

SEQ ID NO: 112658 - DNA, 557 bp, Heterodera glycines
tttctagatattttttttatattaaattattttgaaggaattagacgtgccaaattggcatggcatcaacccttaatcagaaggggaaagattttacagccaaatttggcatggcacccaccttaaacagggggacgggggtggcatttgacgtgcaaaaatttggcttggcatcaatgatttggcatatcatgctattgattgaaatggttgtttaaatgtagcgaatgttcacaaaagcaaagcattaattttaggcaaatcaacgaaagacaccccaagaaatattcaaatctttaacaagtattttgcagggagctgagccgttaaaaccatcaaatgaaaaatttcaacaaaaaaatgcctataacttttgtcaaagtcaactaaattaaacattcttgatatcattcgatagctaaaagagttctctaatagccggaaaatttcaaaaaatttcgttaaggttcaaaaaagttatgaccaaaactgtctgaaaacctggttgttttagtacttttggccctaactttgtttcagaagaagaaaataaaatg

SEQ ID NO: 112659 - DNA, 576 bp, Heterodera glycines
aaccctttcattaaagtctgagtacaaagctttttttttgcttagtggattaacccttaaagtgcttgagtttgattacgcggagagagttccttttcgcaatggcacaaccgcgcccggcataaatattttgttggaaaatgaacaacatttgcgtgtacatatttgtgcaagagaggaaagggctacccttctttcaaacactctcttggttggaggcacttaccggttcatgcatttgaatgtgagaccaaagcgcgattttggacaatctgtgaactacactttatctttcgcatttggaagttcagttcacttgattcgggttatcctgttttatttatttgtcattttgaatttgatgagtttaagggaccgacagtagcatttaatccattaactcttcgaagtccgagcgaccgggttcctcaatttgtttgtccaaaaactaaataaaattaaatagtcgatggtcaaaaaaattccataccccctcaacatcagcagcacagtggaacgatttcgcacaatgatcgtccatataatcagcaaccaatgcaaggtagagacacaatg

SEQ ID NO: 112660 - DNA, 1003 bp, Heterodera glycines
tgtgtaaaatatgtcgtctaagcatgattaatcgctttgaaatttgaatcctctcaatttctcagattgggaattgacttaatgatatttcaacatttattgacttaatgggtgtcccgacaattccgagaggcgtctgagtttttggtaagttataaaatataatttagccaaaatttgctttgatgaataaaaaaagaatcataaatttacacacaaacatatctaattattacaagcataagaatattttttcagccttttttaaggctaaatattccaaaaagtgacagaaattagaaaatattattgtggaaagcattgtttaatgcgctcaaaagtcacgaaattggaaatggcattaatttattattaatgaggggccatttgggtacaaaagagaacacacggaaaaaaaagtgtgacagacactttaataatgggagagagaagaagcagattttgttagaagaaaaaaccattaatttgtacatttgacgccaatgttttacgtcataaaaaagttagccaaagaattggaaataaattttaatgccctcaaaaacatcgaatttaaacaggaaatagggaaggaatgatggtatcaatttgttaatgaggggccatttgggtacaaaagcgaacacacggaaagaaaaaaatgagacaaacttaatgatagagacgattattttttattgaaaaaagcaataaaaattaatttgtacaaattacatttcatctatcataaatgctcaaaacaaagcgtcataattttttggttgtatttttgtaaattttatattttgaaaaactaattttttctcttttttgataattcaactcaattaattaatttttttattccaaaatattcagaaaaactaccgtaataattatttaattgaatttttataaagctataaaaaaagattcaaaacaggaggatataaattaacaaattgaaatagaatgttttaatttaagtttaagttggacaatg

SEQ ID NO: 112661 - DNA, 167 bp, Heterodera glycines
cgggatgtcaaatcccgcttggttcttttggattggcaacccgccatgctaattgggtatgttctcaaattctgatcactttggtaatattgtttatacattggccccgttttgttttaaggcgtgttgttgggcttgtcgtgttgtgtggtccgttcaccacgatg

SEQ ID NO: 112662 - DNA, 700 bp, Heterodera glycines
atagtagttacttaccagtcattgtcgcggtggtgattgatggcttttggtctttgatgtttgccgcgtgattaattacctatggggggtgattaattagtgcgcgagcctaagcctatgggtgattaattagtgcgggaatcctatgggggggggggggagtgcgggaatcctatggggggggggggggtgattaattagtggggagcgagcctatggggggggggtacttaattaatgcctatggggcgaagtttttgagtgaaattttcgcgcatttttttttgattttaaatttcgggggggggggggtgaagcctaattttagagggaaattttcgcgcattttgtgggggtgaaaaaaaaaagttttgggggtgccaaattttaaaagtttgttttttttttgggtgatcattggtggggggggggagtatgcagcagtgctgtggtggtggtggtggtggatgagagataaagtgagagacagagagaagaagcaacaagagaaaagagacaggggatgtgagataagagtgccggggggggggtatcggaaatgtgttatttgtttgtcgccgcgccgtgttgctcgcggaaaggagatgagaaaaaggggacacggtgacccactaatctctgccgtgatcaaccggggaccgtttattaatagatttttggcgggggggggaagggtatg

SEQ ID NO: 112663 - DNA, 558 bp, Heterodera glycines
attaatagcacaaagtgccataataaattatataaattcaatagcctcaggacttctaagtcttctgtaattattgttgttgttgttttgtattagcgagttttgctcgttttaatttatctgttaaaatgaatcaaaaaatgcaaatgttcaaataatttgatatttaatgaaatcctccatggtttaggattgatggatatcagaacaattgtccgagtagctttactaatattccgattttcagacaataaatacaaaaataagaattctaattttaaaaaattttttgtacccagtttagatgtccagcggtgtatcccttacgcgtacattcgaaaaattccagatttaattttaaaattttttcattgaatttaaattaaatgcaacaaacattacgccaaaaaataactaaaattaaaatcatcaattttattccgttgcccggtaatcaaaaattttcagttgtacttgcttaaaaattcattgttttgctctgtttttattgttttttttgcttagtatttctgtctgaagtatttttttgttataatg

SEQ ID NO: 112664 - DNA, 199 bp, Heterodera glycines
  unsure (1)..(199): unsure at all n locations
taaataataaagaaaacaaaattaggagagacaagaaanncaaagggatgggagtgcagttgaaaagtttctgtttaaattttattttattcacatggcaaaaacaaaaatgctaaatattgtttttatcgcttttggcaatcgacattttttaaattttggatggaaaaacggtagttgactttaatttggactaatg

SEQ ID NO: 112665 - DNA, 934 bp, Heterodera glycines
attagatttgatggatttcacaacggaattcgaagttttaattatatccattggaatttgttaattgaagcggaaatttgttgttttttccaattttttagtgcctatttgaaaatttttcgtgcctaaatgtttggacccaaaaaacaaaaaaacataactgagaacattttaacgacattttaaatcaatgaaaaagtcaaaaattaaaaacataaaaaaacaatgaacaaaaaaatgtgcgtcagagagtggccaaattgaattcaaatttcggtccaaaattggcctcaattttgtcatcatagctccacaaagtgacgaatgggatcagcggaagatcattagaaggaagaaccaaatcgaaggattctttaaaaaaatcataaattacttttataaatcgagctttattcagtgtcccgaaaaccccaaagcaattctcgggccaaaaaaataccaaaaatttatcactgagaaacggcgctccgaaatttcaagaccccttctaaaaaggcagagaaattctcgactcttgaccgatataaaacctaattaattccgataaattttttgagcactcggaattccgatttccgaaaatttttgaggcatcggaatgccatccatgatccgtacaatcgtaaaattccgatctctaatctcaaccagacagggtccaaaaagggcagggttttaaactctaaaacccggtcgaggcgtgcaattaccaaattctggctggccctaaatgtttcaaaatacgtctcacgaatattttacgaacccaaaaatgtgccattttttgtgagaaaaatgcgtcggctggccaaatcgacgccacatcccaccgtatcaccagcaccgtatgcatattttgcataactgagtttcaacacattgttaatgcaaaaagcgccactgtttgagtatg

SEQ ID NO: 112666 - DNA, 764 bp, Heterodera glycines
  unsure (1)..(764): unsure at all n locations
cttactccaattttcttgcacntttcgacataattttggcaccattctttggttgaatattttcttttttgcttatattcatttgccatttcaatgaatttttgtacaatttcacgtttttcttcatcagttttcaatttatagcttttttgtagccccaattctttaatccatttataaatataattattatttgttcccaattttttcgttatttttccatcaattttattccattcttttcttgaatattttcttcctttttgcttaattttctctttaattttataatattttcttattatttcccgtttcttctgttcattttgcgctttttcttctttttcttcccatttttctccaaatatttcgtcaaatgatttttcttgtagttttttttcttttgatccaatagggctaattagggcaattagaattaaaatcaaaaagaataataacaataatttcatttctccgggattatcttccaaatatgaatctatattatgtttttttttttcttaaataaattcacattattaagttaagtcaattaagagccttttattcacatgaaaaaatcacaactctctaatggtcttcggcaaaaaattgtttgaaaaatgaaaaaaagataatatattctttcctccttaccatttgtttaaaagaatttcttttctattaaataatttctttttttctattttattgattaaaaaaaggaaaataattaattatttttttggaaaatatgtaaaatg

SEQ ID NO: 112667 - DNA, 516 bp, Heterodera glycines
ggattgtgttgtcatttagataatttgacctcaatcaatgggctaaatttatgaaaattgtttgcgaaatgttatgtcaactatttgaaattttctggaaaaaaattttaattctaaaattcttttagacatctaaaaaattccagaaattttcaaagggccctagaaagattttagcgctaacttaaaaagtgtggcgtcaatgtttgcaaaattacttgtcgtaaatcgtgtaaacttatccccggcggggcttttcggggttgttgatcacggagtttatatcaatttagaccaattcctaatccaaattcgaaaactcaaattttccgaattttgatttttttttttgtgcaaagttagattaggggcttcagaattggtcaatcaaaaatgatgtcagatacgtgatcagcgatccaaaaaattccttaaacaatttttcatagtagacatcatttaaaaaaattattttgggtgccattttttaaagccatttctgccgagccaacgatg

SEQ ID NO: 112668 - DNA, 103 bp, Heterodera glycines
ggtattgaaatcattttggctaattaattaaaatttatggcgaggatatttcattttatccactctccttgttctttatttattgtttaagataagtgcaatg

SEQ ID NO: 112669 - DNA, 125 bp, Heterodera glycines
ccaatttttataaaaaatagagttgaagagatacaacaacttcactcttggaattacacatcacttttcattatgtaaaatcagctgataatccggctgatttggcttcacgaggagcaactatg

SEQ ID NO: 112670 - DNA, 905 bp, Heterodera glycines
aaaatttgggtgcaatttgttaacagattttcaacaaaaaaaggttggtttttgcgattattaagctcaattggtaggattttcatttaaaaaatgataaaatatgtatcaatttaaaaaaaaaactatgaggaatcatattttctttataggaaacccacgagtatacaaaaaaaaaattgaaaataatctaatttctgtagagggattgaaccaggggaaagaagaagggaaagtcaaggagactagccattaggccatttgcacacttgcgcagtgttacttttaaagaatatattaattattattttttatttttctctttgactccaattttcttcactaatttttcactcagaccccattcttaccagtgcttgtttttcccggttcccggttgccctaccgggaccgtgaccgggacctgagattttcaaaacccgggaccgggaaccgggacctcggatgaccgggaattcccggcccggtcccggtccctgtcccgtggcactctacttagaaatattttttgcggagaatcaacctcaatgttgatatttatttaaatcaacaaacattacgccatcaacttaaatatcaacgtaatttttaaaaatttaaaaatgaattccattatttagtatatctcattagctataaaaggaattgaaggaaataaaaataaatatgaaagcaaaaaattatgttgtcaatcaatttgttgtctttcaattgaaacattgactcatctcctattttccgatcgcctacagccgtctctccgtccgttgacaatcatttcgatcgtttacagcgatttcttcgagaatgcttcttcttgttgcttttcctctcttaatttttctacggatttgccttgttaacataataatttagaatttatg

SEQ ID NO: 112671 - DNA, 194 bp, Heterodera glycines
tgaaaatacaaaaaataaaataaatctagaaatatttttaaaatggaaattatggaagaatttcatgaaaaattgtttaattaaaatgagttttgaaaagtggattagcaattaaaaattaataaaacaaagtgcaaaagtgaaaaaaaagagacgaaactatggtaaaaaaattggcttttttattaaggatg

SEQ ID NO: 112672 - DNA, 601 bp, Heterodera glycines
tcttcaaaggaaaacaccccttcaataggcttgggattttggaggagtcgttccggtaccagcgccgttttggagccttatactactgataggctatcaaccgacagcagaaaattatgctctagtcgtagatgcattaaaaagacttttcggaaacgagaaattgataaaagaagcacttcaaaatgaacttttaaatttgccacaagcaaatgagtcggttatatcacttcgtatctgtttagaagaaatagaaagagtcgaatggcagctaaacaatttttgtctatattttcctagattttttccataactgccttttgtgtcatcgaaaagagaaaaaaaattgtttaagaaaatgccattgatgcatttggtagtgccaattcttccgctgactctcttttgagaaccccacaagttctaaggaaaacaacatcgtaatttcacgaaatggtaatctgtgatggatgctttttgctttagctcatggaatcccagcctttaaaagccacagatataaaagtacaaaaaaaggaattcaaaattaatgaaaataaaataaaaaattttatttttttagtcgcctccctccccaatg

SEQ ID NO: 112673 - DNA, 532 bp, Heterodera glycines
ttcttgtacgatggaatggcaacaaaaagtgcttatgaattcaacaaatgtgcagccatcgcttaaaaatagcaaaccaaactaatttgcatcataataatttttagactgcatccacattttttaatgatgcccacaggcaaatcaaatgctataaaatagtaattactgcatagaaaactatcataatattttaaagcattatgctggcgcgtttcttacaaatgcaaattatgcccatttttcgattttaaacaaaaattggcatggttttgcttaaagaatgcaattttaaacttttcgtattattcgacagtcctgcgttttttaatttgccttcaaaaatttcaaaaaaaaaaataaggaattcgaaaaatcgtaatcgagagacagtttaaaatttggttgcttttgagcaaaggtatacgatttttaaaacaaatggaaaagattattgcaaaatgttatgttcaccctaaaacagattttttatttttcaaatgtaataataattataattttacagaaaatg

SEQ ID NO: 112674 - DNA, 572 bp, Heterodera glycines
ataccgtattttcacgattatgtgcccgtctccaattatctccccctttctgaggaggttgaaaaataatatatccggacatataattagagaaaatacggtatgtatacagtagaagatcgaaaggtgacgttaaaaaatctagcctgatatgtttccacggtttttaggggcacattagtgatcagtgataactatagaacatccattactgataatgaagaaaatttaaaaatttaattcgaaacttaaaaaagaaaagaaagcttcggtgcgttgcattaatgtaagacataaaaaattctcgcccggtgtgactcgaacccagcccgggagtgtcgctttcagctcgataggttcacagaagtggtaaaacctaacgaaaaatgtggtgtctttattgttgtaatgcatttatgtacatacattgctcttgcagtttaggccccacgtaatttcataacaataaaaaaaagtcaatcatttgaaattagtttaatcaatttttaaaatttcatccatttgacatctatttttgaaaatcagcagtttcttctttctgtttaataatg

SEQ ID NO: 112675 - DNA, 417 bp, Heterodera glycines
tgccaatttctgaataaaaggaatttattaatcaaatctaattgtaagctataaaaccgacatctggttcgagacgcccttcaaaatatccattttgctaaaagaaaaataatgatctgaagcaaaaaaataaataaatttaatggttcaaattatgatgtgatcataaggcagaaggaataagggtcaatatttatgaaaaaatggaaaattttccaatcaagtacttgcttttttgaaaatttttgatttataaaatttgttttcggtttcgtcatatagcataaatggcgaaatttttgcgcgcgaattcaaaattacactgataaatgccttttttgtattttttttttttttggtctgccaaaactcgcttcattcccaattaaaccgagcaaatttcaaatttaaaaaatg

SEQ ID NO: 112676 - DNA, 514 bp, Heterodera glycines
tctgatttatgtgatgggaattgtggccacatgtaaaataatattgcaaaacaattccttctttcttttattcgctattttattttatagccatttggatggccgaaagcactgctgatctggtaataaattaattaattagccaaatgattaatcaatcaactaatttcctgtgattgaattttttggcaaaaatggcgaaaaattttgtaaaatacaccgcataattcgggatttcaaaaaaccaaaaatacacccctaaaaagcgaaagaaaaaagaaaaatacactcctaaaaattgaattttggacttcagccccccccaaaagccaagggtctggctacgcccttgttctttggccatttttgacagattcttttcaaacccaaggtgttggcattcaatcgctgtctcgagctcacctcgccacatttctcgcgcgttttctttgaagggtaccgtacctccctttggatcgtcggctgctccctctacgccctctattgggccatg

SEQ ID NO: 112677 - DNA, 112 bp, Heterodera glycines
tgtgtgatttaaagatttgaacaaaaataactttgagaggggaggaaggggagaggataaaaaaggaccactaaatatggacaggtaaaaaaattaaattaagattaaaatg

SEQ ID NO: 112678 - DNA, 560 bp, Heterodera glycines
cctgcaaaatttattatttttgttatttgtttatgctattctgataaatcgttaatgaattatgtgttacgaagccttaaaaatgtaattttccgactttttcactaattttttagcttgggcgacatttcgacgcggcgacattatgacgcggtgacattttgacgcggcgacattatgatgcgacgacattttgacgcggcgacattatgacgcggcgacattttgacgggcagcgaaaaaaagaaagaaaaaaattgccaaaaaataaatggcgtaaaaaaacaaaatgccagtaaattcaaataaaaaacaaagagtctttatgcttgatcaaatgcctaatcaacgtcaaagcttccaacccacttcaaataagtcaatagatgttttttagagataatattttaaatttagttagtatttactattttcagtgccttatttgcgttgtttagttttgatcacacttgatcagccataactcgcttcattccctataaaatcgaataattttggtatcattcgaaagatactgaaaagaaatagcataggtaatg

SEQ ID NO: 112679 - DNA, 163 bp, Heterodera glycines
gaaagaaacatttttttactctttttgattgacaataatcttcaaaataattatgaaaatagtcaggtaatcttacctttgaacctatctatgaaaacaattatattcaaagtgactatcataaatgacaataacaaaagtgataaaaaatatatccagaatg

SEQ ID NO: 112680 - DNA, 525 bp, Heterodera glycines
tttttaaaaaataaaaatttttagaaatttgggggggtagggcagaattcgtgctccagtaccggggaaaaaaacaaaaaagaattttgggctttacccgggaccttttcgggttgaaaaaccgggaatttttggctggaaaaacggggaaaaaaccccccgggactggtcccggtcaaaaccgggacctcggtactcagttgtccgtgttttagtcccggtcccgctctactctagtttaaactcaaaattaaaaaagattcacccatcatttaaatttttcccaatgtgtttaatgattattttttgatgactttggcggccaaaattttttgttctgttgtttttggcgatatgcacccctggtgaaatttttcgggtttcttgcattttcttaaggtttttaggaaaattaaggaaaactaaaaaagagcagctgaacaaccgaaacaggtttttaggcgccaaactaataaaaagtaaaacctaaaaacataatccttgtaaattataattaaaacaatg

SEQ ID NO: 112681 - DNA, 307 bp, Heterodera glycines
atttggaccgtcaaacagcagcagccgaggtttaaattacaaattaaatcagaaataacttttatttgtttaggtgcttgggcatatcacaccgcgcagcatgctcaaagttttaaatcggccaattgtgtgtctgatttgttgtcaaaaatttttcctgattcaaaaattgcggcaaattacggatccaaaagagacaaatccgcagcaattattacaagttttcataaaattaaaggataaataaatcgagaataatttaggagtacttgctccgcattctgtctccattacgttgcaggaaatg

SEQ ID NO: 112682 - DNA, 508 bp, Heterodera glycines
  unsure (1)..(508): unsure at all n locations
aaaataattcnaaaaattaaaagtttttntagtaatctcaagatatgttaaatgagcattattactattttcaatataaaatatattaaaatttgtttgtaaaatatagccagcaaaaaaaaaattatatgcaaacaaaaaatattaaacatatctttatgttaatcgatatggatttttttattacgtcaaacaaaaaaaaatgtacattattaaatataattattaatttgaaaatttttttattcacaaagaaatttctaaatatgaatttattttttttattaataataatcgagatattaacaaaaaatttttgtttttctgtggatgaaaaaggtatgaaaaagaaacgcataatttttttttatttaattaaattatacaaatatttgaatttatcataaaaacatttattaatattaaaatataatttatcaaatataacttttatcaagaaagaaatgatcgaccagccgtgaaatacctattcgaccttaatgaaatg

SEQ ID NO: 112683 - DNA, 110 bp, Heterodera glycines; identical to SEQ ID NO: 99093

SEQ ID NO: 112684 - DNA, 118 bp, Heterodera glycines
gcccaccaatgtgtcggtgtcgcgttccttcttccgtgagctgttgccgctgtccaccatcagtcaggagggaccgtatctgttccgcatgttcaatgacaacctgtgggccgacatg

SEQ ID NO: 112685 - DNA, 772 bp, Heterodera glycines
agaattatgacaccttttacattatgtcttaacaagttgatcgatctcactttttacattttatctcgcgcatataaaataataaaaagggctttggatttaaaactgctgattatgttttcatgctttgtttgagcagaggttttaattagagtgcagcgggaccgggacctgaacacggacaattgggtacaactgagtaccaaggtcccggttttgaccgggacttggaaatttcaggttttcccagccaaaaagtcccgggttttcaacccaaaaagtcccggtcttgcccaaatttctcggtcccgctgcactctacttttaatccataaaattttttaaaatagtggcgacgtgttttacggaaaatgaattgacgttttgttttttcttgtccttgctgatttggctgtttgctttttcttttgaattgcttcagcaattactcaattcatatttccaatttattaattcttcccttgagaaactatgaaatataaaaattctaaaaatataaaaaagtgcatatttttattatgtaggtatggattagctttctttgttttaagtaactttgttgctttcttttgtccttttcctttttggtcctttggtttttcttttgttgtattttttccttttatttacataatttccattccttcaattactttctttggtcagtcttcattaaccagttaattcctcctcaacttgcatatttcttcgtccaattacacttgcattttctacaaagtttctgaagatg

SEQ ID NO: 112686 - DNA, 76 bp, Heterodera glycines
acacaaagagcgtcttcggagggcccattcggctgcccttactgtgattctgttgaacacgctgactagcgcgatg

SEQ ID NO: 112687 - DNA, 74 bp, Heterodera glycines
ggtaaaccccagtcggagttgcgttccctacgtcaaagactgtttcgatttttttagacgacgcgtccggcatg

SEQ ID NO: 112688 - DNA, 52 bp, Heterodera glycines
ggtaaatttatatttgaatttgcatatttttccattcgtattttcaagtatg

SEQ ID NO: 112689 - DNA, 338 bp, Heterodera glycines
cttagaaaatgcattataaatatcttctaacacatatacagctttctaatgataccaagtttgtttgatttggccaataaagaaaaaagttatggcttcataaagttgtctcagacgcagttgaaccctaccgtgcctatgcaccaatttttcactgcaaaattgacacgaaaattcctatttaaacttggcaaattgcattcttcgcctcattccttcgatcattcattcagctcgtttcacttttcccttcaattcttaaatcgccatgcttttccaatattaattttttttctaataaattttataacatccttccttccttttaagcctaaatg

SEQ ID NO: 112690 - DNA, 201 bp, Heterodera glycines
gaaggagtgccgggctatgtgctgccaaaagttgaagtgtgtattgatgggctgggggatgtactgatggtcttacaattaagcattttattcgatttcttggcgggggagtgggcaaatggaattttttgaaaaaagttttaaaaaaaacacaatttaaaaacgaaaaaacaactaatttccttatgttaggcaaatatg

SEQ ID NO: 112691 - DNA, 363 bp, Heterodera glycines
agaagcaaatggttggacagcgggtgttggacaactacgagtatctgaagtcccttgggaggacgacatctcacaagaagaggcgtcatttgttgagcagtgcaggttgtgaagagctgttgaccctggtggagatttgcttaaacctacttaacggatccttctgtttgacgcggaaacagaaacaaaaattgttgccttttgctaacaccattcgacggttggcacgcgtgagaagtgagcagagtgcgagaaagctgatcttacaacaacaacaaccacagcaggagggaggttcactgtttgcccctttgttggcacccatactgttagaggcggctcgttatctgctgcacaaagatg

SEQ ID NO: 112692 - DNA, 312 bp, Heterodera glycines
ttatttcaatttgcatcacagaaaaaggccgctctgttttggaaattttccgttttggggatcatttcaacaaatatttggtcacggatgacggtaaaatgcgcaatccggggtgcaaaatccttaaagcttggattttttcccaatcgtcattccccggagacattgagctgagtgtgcgcacgctcaagtcagcggtaggagtcccttcgagagatcaggccgatcctcgttcggacacgaccacagctgttccgagagaccgggtcggtcctcgtcgagaccaaaatccgtcgttccgaattctccatg

SEQ ID NO: 112693 - DNA, 110 bp, Heterodera glycines; identical to SEQ ID NO: 98226

SEQ ID NO: 112694 - DNA, 70 bp, Heterodera glycines
caatgatttaactaaaagttttataaataaatgatttttaacgtttttcaaacaagcaaattaaaaaatg

SEQ ID NO: 112695 - DNA, 463 bp, Heterodera glycines
ccggtggcgcctatccggcacacgccggacctacattttccactatttttacaagttttttgccttaaaacggccaaaatttggtcatttttagtgaaaaagtccagttgttacccagccagggaaaaaaaattattggataaatttgcaaaaaaaaaaaaaaaggtcttcggaccggacccctccctttccccccccccccgaaaatttttcctggctacgggcttgccatctgttaacagtggaaaatagaaatgagagctttatacttaaattactttaacatttgtgtttttcccattcactgagccatgcgaaatcatcaattaaaggtcaaattaattgataaattaatttttctctttttattaattttccctcaaattcattcctcctttttaacaatttttttcctcaattttttgttgtttttagctttgtgtcgaagcccaatgtcgcaatg

SEQ ID NO: 112696 - DNA, 82 bp, Heterodera glycines
attaattaataataaagaatatttttaaggcaataaattacggtatttatttgcgctgccaatttgttatggctttgcaatg

SEQ ID NO: 112697 - DNA, 895 bp, Heterodera glycines
ctttaagcatacattttttaactgaaaaatgagaatttaaaataaggactgccatctaatttttgaatttacacatttgctaaaagagaaattactggcaataattttaatcgaaaaatttggagtgacttactgcgaatttcccgattaattattgcagttaattaataacggtaataattttcaaagtatgacaaattcaaaatatatttccaatacataaactagaaagcataaatgtaacgaataaataaataaatacatttgtccttgtcaataccaattaatttaatctttcgtcgccaactctcatcactcacttttcgttttgtgtataaaaagggagacaaataaataacatcatccagtttttattgcaaaattttctgctcactaaatgcaataattgatttaatttacgaaaagattagctaaaataatgcaacttttgtgagcatagaaattagagtgccacgggaccgggaattttgggcaaacccgggaccttttcgggttgaaaaaccgggaatttttggctgggaaacccaggaaaaaaccgggactagtcccggtgccggtcaaaaccgggaccttggtactcagttgtactcagttgtccgctaccaggtcccggtcccgtggcactctaatagaaatacataaaattttttagccaatgttttcatattttaatgaaataaacaagaggaattttcaattttcttgcaaacactttttgaaaatattatctctaattttcatcaattttgacatttactcggaattcccgaaaattctattcacgcatttttgagtgtttctaagcatcgatcactttataaatttgttggattagccatattattacagcttttaatacgcccgtcaaaaaatg

SEQ ID NO: 112698 - DNA, 53 bp, Heterodera glycines
tctttaaattttatttttattcaatttttattatttgtgtcgtcccgacaatg

SEQ ID NO: 112699 - DNA, 117 bp, Heterodera glycines; identical to SEQ ID NO: 111031

SEQ ID NO: 112700 - DNA, 322 bp, Heterodera glycines
  unsure (1)..(322): unsure at all n locations
ttttggagaaaatgccgccaatttcaccgccaagaatgccaaatttcgtttctggccaatcatttcgtgtactntcagcaagttgtccaatccgtcgccgtccaatcactgctcgagcttaaccaattgccgtccccgtcggatgccattcttgacgaggtgcagcagttgtgccaatcggaaacagtggcgggcagccaagcgctgaaacagagctgctggttggcattcggagcatggtcaacgaagtatgccagcatacgacggcacagaatgcgaaggaatgtgccggggagggcggcgccggtgccacggcaaaatg

SEQ ID NO: 112701 - DNA, 62 bp, Heterodera glycines
ctattttggcattttagcagaacaccaatgcggggactgtgggcatttttgtccgtttgatg

SEQ ID NO: 112702 - DNA, 289 bp, Heterodera glycines
atcgcttcccaaaacaattgcaacaaattcggacggaaaagagaataattgatcaaattgtggaattgtaatttcaaatttttaacaatgtatctttattttgataccacaaataattttttgctcgtcattctcaagtttaattgactttatctcattgtctaaataattgcttattaaaaaaaatgttttttttcgtctttatcatttctctattatgttcaatgtacatatttctcttttttcggctgttttttaattttcaattattacaataaaattagaaatg

SEQ ID NO: 112703 - DNA, 535 bp, Heterodera glycines
tattacgtatataaaatataaaaattgattgatgcaaatatatttatttgataatatcaattaaagattaatttccggcatctatttctaccaatcaccgagccccagacccgaattcgaacaaaaattcgaaaagtcaaattttatgaattttgagttttatatcaattaaagattaatttccggcatttatttctaccaatcatcgaacctcagacccgaattcgaacaaaaattcgaaaagtaaaattacacacacacttattgggctttactaattgtatgtactttgtctaatattcctttggtaatttatttaattaaaaatatattttattgaaaatatttttctattaaatttaatttctcataatttagaaattgccagttgtggagatttgattgcattactcaaaacctaacgatacgatgtgtttttcaagagaaagtttgtactcacaatcagcaaaatctatgcttttaaaatgcttattttaatccattaacttttgatttttccaactctctagaaatg

SEQ ID NO: 112704 - DNA, 239 bp, Heterodera glycines
ctggaaaaagcggattttcttaaaaatctctgagtgccctcctaattctaaaatttggcaaggtgctagaccttataccacagtattttaatgcaaaatttcaaactcttctgaaatcaatgagctgagttagaaaattacgcttggcgatttgtgcaagtttttcttcactaaaattcacgtccctaattattatattcgaacaattctttatcaacattatattaattagagaaatg

SEQ ID NO: 112705 - DNA, 445 bp, Heterodera glycines
gcaaaatggcatggactgatgggtgggggcaaggggaggagggcatctcaattaaaaaaatatatcctcaccagcagcacataatttatgtttcgattgtttctttcttttttacatttctttgtgtgtgtaatgccatgaaagttggcacgcgaatgaatcggaaaaggacaattaaatgcccagatgaggcaaaagcggaggaaaagcataacaaattcaaaaaactaaatgagacgagagcaatggagttgtaataaatgctaatgaaaagaagggaacaaatgaataagggcagaagaatgggggaagttttggcatgacttcaatttattttaataaaaaaaggaaaataaaaaaattatgcacttttaagggggacagagagaattcggcttaacaaaacaaattttatgggaataattcaaaatgaaaaagtgaaatg

SEQ ID NO: 112706 - DNA, 1003 bp, Heterodera glycines
  unsure (1)..(1003): unsure at all n locations
agtcaatttcgcttatgtcttcagtcangtttttgtgttccactgctcacttccacatttccattcattcattttctccttctgcttaataaatatatatttgtgaagagagtccgggggatttggtcgggacggtttcccccgcccccttctgctgctcagcgtctgcgtcgtcgtccgcccagcgtcggtcttccccgcaggagtctctcactcctgcgggccttcgcttccaccggctcgtccgtcccttcccccacatttgggaaggcacggccgagaaagggaaagggggaagcaaacagctgattttgcccttggcaaagtcggctctcgcctccctcgctccccacaaaagtttttgtcgcctccttggctgcgacaaaattggagccccgtaggggtcagttgttccttgccgaaaggacctgacctccatcaatcggccgtagccgccgatcaaaaagtcttcgcccgccaaggggtgaagaacatcggctacagtcgccgatttactttctccctaccgaaagggaggaaggctcactcggccatcagcagccgactcttcgtcttgcccaaccagtggcaaggcactcggccatcagcagccgactcttcgtcttgcccaaccagtggcaagacactcggccatcgccgccgctcattcgcctaacccatcaaagggtaggcacattcggccaccagtcgccgacttcttcgtcttgcccaaccagtggcaagactcattcggccatcagcagccgactcatttagccgaacccatcaaagggttggcacattcggcctccagtcgccgacttcttcgtcttgcccaacaagaggcaagacacattcggccatcaccgccgacccaagtctcacccaacaaagggagacacaaccggccaccagcagccgaatcttcgagtcttcaccaacaagggttaaaggactccggccaccagcagccgaaaactcccaaagcaggagaatcaaaatg

SEQ ID NO: 112707 - DNA, 78 bp, Heterodera glycines
tctagagtcaaataaaatattttcaaaattatttatttcctccccccattaatgtttatatcagctgccaaactgatg

SEQ ID NO: 112708 - DNA, 52 bp, Heterodera glycines
tgaatttgttcgttccaaaaagcaaatttgggacagaaatggcaccaagatg

SEQ ID NO: 112709 - DNA, 141 bp, Heterodera glycines
tcctcgaaatttgcacgccccccccccccaaaaatttctgtttaaaagccaataaaaaaatatgtattttcatttttatttattatagaattttattgtgaccaccatatttttaatgaataatttttctttccaggcatg

SEQ ID NO: 112710 - DNA, 113 bp, Heterodera glycines
aagcagtacctgaagctgaactcagaaaagcggcaacgactcggagaaaccgggcaatttggtccccggagcggtatgaaccacgaaagcgaggcgcaattcgaccaagaatg

SEQ ID NO: 112711 - DNA, 100 bp, Heterodera glycines
gttgccacgacacaaaataggcgcggctcatcatccacattcacgacacacccgtgagtggcctgagttcaaggagaacatttacaaaaacggtcaaatg

SEQ ID NO: 112712 - DNA, 704 bp, Heterodera glycines
ttttacagaaatttcgcaattactatgtataatattcattcaaaaatttcaaaaaaattgcatttttgtaagttgattttataaaattatcaaaatatatagacccataataaaaatctgtaataaggcttattaaaaagcccaaaattttctttgcataataatggtttatcaaaatgaacaatattagttgccgattttttaaaaatacataaacaaaatgattctcaactatgcaaagagcctcatattctgtgtttttttcagaggatgacgtggctaaattttaaaacacttttttggacaaaacagtaaaaattcaacataaatccaaaattcaacgcgaaccaacaattcctttgatttttcaaattaagtcaaagattttaactagaatttttgtattcattttataaaattattttttatttgatttaattctgattacagctgtatgattttctaccatttaatttattcaatataataaaatcctctgttccaaatgaatcatcataatcattacgctcctcaccaaacattcacattctctcattttttcatttttaattttcataaaaaggaattttagttcgattaatttttttacaaaatattttatgtatttatgaattaaaataaataattttttgtccgtcagatattccaaaaataaaaataaacaattaaataccctcaaaatg

SEQ ID NO: 112713 - DNA, 189 bp, Heterodera glycines
tatattttcactatttttccaaattttgttggattttaccaaaaatgcctgtcgatgctaattagtgcccgggtttttgcggtaaaaaaagtcgggaacatgagtttgaagatggaccttgaacggggaacgcattttacttatcatcggtttggctgggcctccgtacttcgtattcctccaaaaatg

SEQ ID NO: 112714 - DNA, 1003 bp, Heterodera glycines
aagcaatcaataattgatttccgacatttatgcgttctgattcggttttccaattgattatttttttgagcagccgtcggaatgccgatttccaatttgcagcgcgcttttttcaaaaattcgcactcagacaaaaatgaacgcaaatatgactttccagatccatactgcaatccccgaggtttatagatgccgttttggatttggaaaatgaagaaaaataatatggctcataaaaaaatttggcagacgcaattgactccgtaaaaacccaatcgtactgcctcgactcactctgttttacgtgggagcgataaacacatgaaacaaaattgggaaagaaaatggtcggtgcccaagttgacaaaaataagactccgccccctctcccccccccccacattttcaaatcattcatttgttgtcattttttgaagggagggattagtgaccgttcgttcaccttttcctctctcattttttgttttaattatttgttggtcagacaacagcacatttgcaagaaaatgttaatgataagtgtaacagatatgcgtactaacaaatatctgccatatttattagataggattggtcaaaaatatgttgtcaaatcatcccaaacccccccccccctcccccagcaagagcaagctttaactagttaagcatggtttcattcattgtattgttcgccaaatttatttaccaaaatatacatatatttaactgacaaaactattttaggtatatatttattaacaataacataattttattctccgaaccctaacttcatgtcagccgaccaagtaatttggaatttaatttaaaaagcacttgagtaattttcataaatgttggcattatgtttaatatcaaaatgaacaaataggtatccctaaataatttaaatttgtgacacatcctaaagtcgattccatcaaaactgccccctcaccgaaacccggaaaagtatccctaactcctataaaaacaaatg

SEQ ID NO: 112715 - DNA, 390 bp, Heterodera glycines
ggtaaaaaatgggcaaattttttgaaatttaaggtaattcccaaaaaaaaaagtcggtgcggtacggcactaccggacctttattttaaccatatttttggaaaatggaccccaaaatggcaaataggtagtcattttttggcgaataacggctacaaattcctgctttctccccggcgctgaacttccatttcttttttaaactcaaaagtggagggtgtacgtttttaattcgaattttataaatatttttgcagtgtctgcgctctgaacggtcattgttattgcgtcggccattgcatcaacgcgaccaatgcctccggggagaacggcgcgacgacactgatccccgcccgagtgctgctcaatggcgactttcggccacgaatg

SEQ ID NO: 112716 - DNA, 183 bp, Heterodera glycines
ctttggcgtcagcgggaattggaccatttgaattggtgaacgaacggaccaacgaaaagctgactttggagaaagaaacgaaatattgtgcctgggcttctggtttccgatgggtgttgaagcgatgcccaattggacaaatcgttcagtgggaggttgaaaattcgaaccatttgaacaatg

SEQ ID NO: 112717 - DNA, 82 bp, Heterodera glycines
tccttaaaatactgaagaatggcagacaaattttaaataaaaattaaaacataaaagaaaaaaatataaccattccacaatg

SEQ ID NO: 112718 - DNA, 539 bp, Heterodera glycines
taatcacttaaatgaataatttatctttgttattaattaatgttttaatggttacctatcatttcgtcactgatccgtcacgttcatttcgtcactgagatataattttaaaaaatattggctaatttcaataaaattatcttattaaagtattacctaattggtttaaatttctcaaaaattatttctgggtaggagtaggagtaccaccggtggtagcccctttttcgaaaagatttttagattttaaaaaggcgaaaaatgaatttataagggttttgaggtcgcagatcacgaatttgagtgttatcctttcgatgtggattttctgctgctgctttctgtataaattccagcaaaaatgtgacgcaaattattgtcttgatcaacatagagggaattgcgctacgactttccctctaatgctattttctgacgcattttcataatcagcaacgaatgttactgtaatgactgatcgaaaatagctgtgggagctcaaagtgctgtgggagcaaaaagcaaccggggccaaaatg

SEQ ID NO: 112719 - DNA, 66 bp, Heterodera glycines
ggtgaatttttgaatttgaatttttaaattttttaaaaaattttttattttgtcaggtttttaatg

SEQ ID NO: 112720 - DNA, 835 bp, Heterodera glycines
tcgccaattcccccgagggcaatttcattgcttttgggccatccccgcagggcaaatggaaaatgtttttttttggcgttttcctgctgaagttcatccatttttatttgagtgatgagacatcgaaattcccacttctccatttttgtattcatttttaaaataaatcatattttagctcagaaattgaaataaattttaaattttcattaattaaccaaaaacttcgatcgaatgatggaacaaatttcatcggaggaaaggtgtcagttttaaatgcaaattttgtattcttttttggatttgtttgaaatatttttttatgattttacatattgaaaggaagtgtccaatttcctccattccgccaattcaaattggcctttttgattttgataattaattcttaatgtgtgtcttttttttaatttggtgtctccattagcacaaattaaccgtgaataataaacaaaaagctttgattaggcggtcttttttttgtttgttttgatatcaatgaatatgatgtgacagacattaattggttatgcagtttcggagagtgcacttcgtccgccgaccctccctttgccgtggctgtcgaagaggcggacgagggcggcatttccattgaagtgccgacgcttcagggcaatgcctcgggcgatgtccacgggacgagcggctgttgccggcacattttcgtcgatgttcgtttaataattccctttttccaatttttctaatcgcttaaattcatttgttcaaaccaaatattttaatcccttcatttccactaattacccttccccttaatcagcttttgatcaatatg

SEQ ID NO: 112721 - DNA, 232 bp, Heterodera glycines
accgaccgttcttttttttcaacatcctgagctaaccatttactgtctaatgtctatttttataatttgacgttgttttgctagagccccgccgggattttgccagggtttccggtcccggtttcaattagttagtacacaaatctgaaagtattgaatgatttactttatgtacctatgtgccaacaacttttcatgaatgaaattatctgtgcgctacttgccaacaatg

SEQ ID NO: 112722 - DNA, 238 bp, Heterodera glycines
ggtggggtgacattttttgctgctgataatgaattttttttcccacgctttgttaaggttgaagcaatccgtcgcgaggatgttttacagatggtcgaggacttttctcagtcggaaatgcctttttcatcaaaacattccccgctgtcgtttcattcattgcatcaacaatttttgactgaacttggtccaaatcgcatttgatttaattcaatcccccttttcagaagaaccaatg

SEQ ID NO: 112723 - DNA, 954 bp, Heterodera glycines
ttttttttatcaaaatctatttaaaatttcaaataaacttttaaaggaatacattgatgaataaatttgataccaaattcgtaataaagcagtttaatataaatgaattaattataataaaaatcttaccagacgtgacaatttttgcgttttggaaaactagcaactttttgtttttttcaatgaaaaaatgggggtggattatcagtagaattatggccaattggggtggatgatcagtagaattatggccaattggggtggatgatcagtaaaattatggccaatgggtggcggccgttaggagaggataatttttttgcctctttctctcgcttttatacaattttcacctctcctctgttactactgcttctttaaaccctgacttttcccgtaggataaatagtgatttatccttttatttattatttttcatgacgattgttttagcgtaatttccctatttaaatattctttgttgtcaattttaccttttttatgtttgtctcttcattcgaaaattgtattcgaattatatatcaatgtttttatgttttcattttatattgaaatattgaattcattatttatgttttatgaaattctcctttaatttcctgataaattccccaactttgattacccttaactttaaagctgccgttacaaaaacgagcagctaatatttgactaaaactaaagtggtgctgaattggaattatcccctcaaatccaatccccaactctgatttccaattccctccccacaataaattccgcttttctccaacgttccaaattgagctgattttctacttttttaaatgcgtatagaaaggcctatatacaactgtagcgatttatatattcatcatcagtcagtcattcatttcatttctttacattttaaaaatattttttccaactctcaaaactcattcggataaaatg

SEQ ID NO: 112724 - DNA, 158 bp, Heterodera glycines
attttgaatttgtttggcattttgtttctttggactgctgcctaagctttgaaaagtcttgaaaaagttcatttaaaggcttgcataaaatatgacttggtttttcttattaattaccttctagtctgctgccattcaactattttccagctcacatg

SEQ ID NO: 112725 - DNA, 264 bp, Heterodera glycines
tctctgaacaatacagaatttttgcaggcggcgggtctattagttccttgtaatttctcaacaatttcatcaaccattgcgttttgccactaccagtagctccagacaaaattagagtgaatggtgcaataaacatttttatgcatatgttaatgcaacttcctgtttatttatatagagatgttgcacacatttgacccattttatccctccccgatttaatcatataattttcttttttttagcacggaaaaataatcaatg

SEQ ID NO: 112726 - DNA, 1003 bp, Heterodera glycines
aattttgacggaaaacgaaatgccctgaagcgcttttcatcccctccccttcccacatccattttcccaaccggcaaaaatggttaattgctggcggcagaaagcacacacaaaaaagaaattttttttaaaggatccatatgaatggaaacattggaaatttgggcactttggctgttgggggcccccgaaaaaattccaaaaaggggaatttttttcagggatttggaattgattaaaatagatgtcagattcgtgaatattgaccccgaaaacccccgtgacaaacaagttttcacgaattatgacaacaacaataatttgcaaaacaaaagggctcccttttttggaatttttttctggggtcccaacagcaaaagtgccgaaatttataaagaagattaaaactacaaataaactcttgaaaatctaaattttggtaagcctgcataaaataagggaattcatttaaaatttgatcattgaaacgaaagaatcgattgtttactgtaatctcactcatttccattcccattttcatttctccttagttcattctgctaaaatttggcttttttaattcgtcaatcaattcacgttcacttacaacaaaagtgtctatgtttttttccttttgtaattttcataacaatttccaaagatttgttaacccttaggttttttaatcgaaaatcagatgtatagcagcaatcttttgagtaatttttttaagaaaacattcgcttatgtcttttagaaacgagtacagttttggttgtgcttcgtttttggatcctaaagccatttaacacgcaaaaacttccttttctcaaaacagcgaattgtttaattccacgttgcatcaacaccaagataatacatataatttcaaacgttcattctttcttttttctttgttcctccaagtttcaaactgcacacaaaatttacctaaatttatttttagccaaagcatttcattgactttctgtttaaaaaaatg

SEQ ID NO: 112727 - DNA, 163 bp, Heterodera glycines
ggtgagtgtttctttatgaattgttcgaccctttgcaaatcctaaaacttttaaattacccgacaattcgtttttatgtgtttttcgttcgcttcgcaacaatagccaaccgcagcactgttcacaatcagtggcacaaaatgtgaagaattggaaaggaatg

SEQ ID NO: 112728 - DNA, 845 bp, Heterodera glycines
gaactgatgatgtaataaaggatgttattctaaagcctgttataatgtcggtgtaagggcaaggaatgagtcgtattgtatccaaatcaagcggtaggtcaccttaaaaaaaatcacaaaaatgaagtattttgctagcaccatcaatcgcagcgttttcattcgtttctgtcggctcttccatcaattttcatatgtggctttggcaatttctaaattctgctaaatgagtttaccaattactttcagtttcggttaatcaggtggtttcaaaaacataatcattcaggtccacaggccatttttcggcaacgtgggttctgttttcagcttttttatggaaaactgctcgttaatttttatggagatttttgttgttaattttgatttaaattaaggatctgggatcggcgatgcggaaaggagcacgcccagagaaagtttttgaaaatttactttaacagattttcaatatttccattccaagttactcttttaaatttgattttatccgagccggaattccatcaaaatttttcggcgtgattttttgatatgcaaagtaagtttgttgggagttgggactcaaactaatagtaaaggcattctcgaaaaccaaactcaaagtaaagacagtctcgaaaatttgaatttatttttcttttgcatttcgtttccataatttttttttgttaacgttgcatctgaaataatgcaattagcattgcacaaaacaaattaggtaggtattttttttaatacaacctttttcatttctcttttttattcacagatatttgacttttttcttctagttcatgtgtctttccaattctgtcagaatg

SEQ ID NO: 112729 - DNA, 1003 bp, Heterodera glycines
  unsure (1)..(1003): unsure at all n locations
gggggggggggggggggggggggggggggggggggggagagaaaaaaaaagaaaaaaaaaaaaaaaaaagaaaaaaaaagaaagaaaaaaggagtagaagacgaggagaaaaagaacccgcttttaaaaaaaaaaaaaaaaaaaaaaaaaaaaaaaaaaaaaaaaaaaaaaaaaaagaaaaaaaaaaaaaaaaaaaaaaaaaattatttttttttttttttttcttttttcttttttccccccacccccccctcttttttctttataaataaaaaaaaaaaaataaaaaaaataaaaaaacaaaaacccaactatattttttttaggaagagagggttgttttttgttttcccccccccacaacaaaaaaaaaaaaaaacaaaaatatatttatttttttttttgtttgtttggtttaataaaaaaaaaaaaccccccccccccacgagggggggggggacccccaaaaaaaaaaaagagaaaaaaaaattttttggggggtttaaaaaaaataaaaaaaaaaaaatttctttttttttttgtgggagaaaagagggggtttttaaaaaaaaaaaaaatataaaaaaaaaaagggggaaaggcggggggggttttttccccccccggttttttttgaaatttttttacccccaaaataagccctaaatttgaaatttttttttttttttttttttttacaaaattttttttttaaatcccccaaaatggttcaagaagtaagggctttggaaagggggtttttggccagggaaacggggaaaattgttaaaattttcaaattaaagcttcaaaatttttatttccatttgttttaagggaatttgaaagcaaaccncaaaaaatcatcaaaaatgcagaaaaaatctgtgacaatgaaaaaatggagaaagcatggagaagtagtgaaaatgttaaggaaatggtctcaacaatgaaaatacaaaactaaatgntcgacaataagctagttgacggaaaaatg

SEQ ID NO: 112730 - DNA, 465 bp, Heterodera glycines
tttttcttttcgcaaatcggtgctaggagaaatcgggagtttcggttttcgaatcactttttcaaagaattgcaacaagtgcaatttatcattttttaaacaaatctggttaacataccataattacgaatcctgggaatcaagagtctcgggttttcgaatcatattgacactaaaaattctttaacatatcaactaaataaaaaaccaatacataatcaataaaccaaattttttttatttgtatgtcatgaaattcctgtctagcttaaacaaaattttattatttttttgttataattaatattaataataatattaaactgttttcgctgtttattatttaaatatgtgaagaattttaatttctgaatatttttctcatgctgaattatttcattgcttataaaattaaaattaaatttaaattaactttttcccattttaataagagaataaagcatg

SEQ ID NO: 112731 - DNA, 254 bp, Heterodera glycines
tctctaacctctcttatctgcgtgctctctcacctaatcgatattgttggcgtacgcgcctgataggccacgccccttttcctctgcttctctgacctaactctctttctttcgtgtactctctcgcctaatcgataatcgtggcgtacgcgtctgataggccacgcccccttttctctgttttctgacccccaccgtaatcctaccgtcattcttacttcagcaatcatttattcctactgtattgaaacatg

SEQ ID NO: 112732 - DNA, 348 bp, Heterodera glycines
ttgatccgtttgtgagagtcctttcactttctgtgagaagcgttagccatcactttgaaatttaaaattgaaatttccatttttctccacccatccaattcgaatggattcgctcaatcgtgaggtgtcttttctcatccgctgcccctcattcgctaattaatagatcaaagatcgggtgcgcgattcgcattggctcggttcgtacggcgacagtccgcacgcgacatttagcgacattgtgatgagaaggtgacgagaattgccggacaggcgaagaccccccccccctctctgatggtcctccaaatttaagttttgatgaggtgaaaaagtctgggagaaatg

SEQ ID NO: 112733 - DNA, 526 bp, Heterodera glycines
aattaattggattttaattaatttactttttggccaaattcaatgatttttgaattaaaaataatttttagaccaaacattgtttaacgaattgaccaaagaagcgaatttgattgaaatggttgaggaaaaagaacgtgagaaattccgattgacgaaattggcacaatttccggaaggatggcaagaaataaaatacggagaaaattcaaaaataaatgaggaaaaaacaaagcaggttttgctgttttattgcataatattgagtaaagcattagccaaatttaagattttaaaagagacgcaaaaaataaatcattcaaaagaaacgcttaaaaatttgacggaaaaattggagaaaatcattcaaaattgggtgagagagaaagggaagggccaaatttggaaaaacaattagtaattaatttgccaatttagtcggcggaggtgcgaattcaattctcaagtttaatgcatttgcaaatgcaattggaccaaatcgacgccattggcattttgccgcatg

SEQ ID NO: 112734 - DNA, 371 bp, Heterodera glycines
tgttttacattttttcctttattttttctttattatcattttttctttttcattttctttatttatgctgatttttgtcaaccctttttataaattaattgaatgcattttttaagtttttattactagcttttttaattggataaatatttgttgttttataattttctattaactttttcatttattccatggtaaaggcgctgaatttttctcccccttcactggctcctgtattctatacgatgattattttttaataatattttgtatttatttttattatttataaatgctattttaatttataataagtttatttcattcggttatatataattatgtaattacagttaattggattaaatatg

SEQ ID NO: 112735 - DNA, 1003 bp, Heterodera glycines
aatcatgggttttctatcgacaaaatatgattcttcataatttttaattgtctcatattttgtcattttttaaagaaaactcgtacaaattgagcctagtaatcccaaaaaccagcctttttgttgaaaatctgttaacaaatcacaaaagtgataagaaaagcaaactgaattctaatattattcgatcatttagtccgaaaatgattatttgtttgaaataattgaaatatatttggtttgaaatattgattaaatatattataattaattttgctttaactttggattttaaaaataaaaaaccaaataaaaaattaattatttatattttcgcttgaaataaattaaaaattaaggcttgcgcaaaatttggtaatttttttgacaaaaacctgttaacaaatcgcattaaaaattttcccgggacacccctccccccgtcccccaaaatttcctagaaaaagcacgccggaaaaaaacgtttttaatgcaaaaaaatcaatgcttgtctattaattgcaaaaattggcctttttggtgaaaatctattaacaaaccagaaccaaaataaaaaaatttttccgacggcgccatcggcaacgccggaccccctccccccgcccactcaccaaaacttgtttggaaagatgcgccgcaaaaagaatgttaaaaatcttgttcttctgatcccgaatgcactgaaatttacgatttgctaatttcctccccaaaattattgaattcgataatgagagacgaaaaaatataatatttaatacttttttgatcgaatcattttaaaaataactgatttgaaacaattttgcaaaatattcttataagcagaaactattaccacgtctaaccttaaattagacagttgttgccaggtttccatatttacattttttaattttaagtgcatttgggttttttaaggatggaatcacagctcgtgatttagtatttttttaaaatttttttattatagttcacgatg

SEQ ID NO: 112736 - DNA, 389 bp, Heterodera glycines
gaaattaaatataattaaaatttattaatttgtatttgttagggtttccttcccaactccaattgcagcggttattggcaccaatacaagtgagttccctaatttatgtatgaaaatttttttttatccagttaaattactttaaaattttgggaatcatttattttatggtatcatccgatggtattagcctcgaaattttcaaaaaatttgttaccaaaatttattttttcgcagtctttggccatatgcttttgcaactattaaaatgaatatttttcggaaactataagtaaaatattattcctttccattaccgtaacatcgaccatattgttacagaaatccctgctgtttaatctaccaaattttcgaaccccttttttatg

SEQ ID NO: 112737 - DNA, 209 bp, Heterodera glycines
agaggaagaagcaaagaataataatttgatgggttttcggattggttcatttttgaaacggcacagcttcaaagacccatcagttgcaattctctcctctctctctaagatttgaccattccgtcgaagatgtgacggagctccgctttccgctggatacagtaatcacgcaaattgaagacgacgcaaacgatttccacgttcaaatg

SEQ ID NO: 112738 - DNA, 163 bp, Heterodera glycines
aaaatatatgattgactattggtaaaatttttgaaaaaaatttcgcattttcgcatattttggcttttcgcatttcgcttttttttcattctgcattttcagtttggcaaatttcgcttttggcatttggcttgttatttttcaatcttgcgcatccctgatg

SEQ ID NO: 112739 - DNA, 384 bp, Heterodera glycines
atttaaatataatttaatttacaattatatatgttcacgtcacttttattaatcactttttaaagacaattaaaattgcatttttcgtttctgagcgaccttttaattttttaattaactaatttatgacacttcgttttaattagttgtcgtccggacgaaattgcgtcacttttatcagcgagccgactaaagatgttgtcaaaagttttctttatgatcatacttcaacaaatattttaacacttcaaagtgtaagcgcttttttcagatttattatttactttaattattttaattaaaatcaaaataaaaattttccaatatttaaaattttatttaataaaattaattaataacaattaatttcagtcgcttccaatg

SEQ ID NO: 112740 - DNA, 335 bp, Heterodera glycines
tggtggggggagggggaggagagaagcatgtagagggaattcccccctcccccgccccacattcccttccaatacccctatgtccccatgcccctttctctccccctttctcccctgtacccccccccccccctttttccctatgccccgtactttctccccatatctctctcccttgtccatttgcataaatcagtattccgctctttcccattcgttgctccctatcactgatttgaagtttcgtttgttctgatttggccaagcgttgctttcccttctctctttggcctttcctttgccattaatccactgatcactttcttttttagatg

SEQ ID NO: 112741 - DNA, 178 bp, Heterodera glycines
tgttccccggaaattttttagaaaaagcgcgccgcaaaaaagtgcatatgcggtgaaatgaggaaaattaccaacagaaacaaaaaactattcgttaaaatttcatttcggcgaaaaatacaagtcatttgaataaatattaaccatttttcattgcatataataaaaattttaaatg

SEQ ID NO: 112742 - DNA, 187 bp, Heterodera glycines
ggaaaaaagctcgtaaaaatgatatcaatgaagcctcaattcgtggaatggaatggcttaaatgggaggaccaagagagaattcgggcgcgaattacggagctcaaaggttacactggtttttacaggaactacaatattattcagagtccgatgattctgcttacacacccaaagccgccgtaatg

SEQ ID NO: 112743 - DNA, 79 bp, Heterodera glycines
gggggaatttgggggcggaataatggggttggggcggaataatgtgtctgatactactaacataatatttttgcagatg

SEQ ID NO: 112744 - DNA, 218 bp, Heterodera glycines
tttcgagatgagtttgaacttgttggatgtgaatttcgaagattgggtggcctttttatattcaaattggccggggattggcgaagtgatttgatgaaatatttgtttgttcactttaatgatcagaaccattcccggcggaacacaaccacaaaagtatttgttcacctttttaacattgaattcgcatagaaaattcgtcaaatttcagtacaatg

SEQ ID NO: 112745 - DNA, 109 bp, Heterodera glycines
  unsure (1)..(109): unsure at all n locations
ttntgattgttattttggttcgtcaatatttcaaactttgaatttccatccacggaaacttaagggtattttattgaaaaaatgcaatttaattacaaatattaaaatg

SEQ ID NO: 112746 - DNA, 478 bp, Heterodera glycines
gttttccgattttgatcaatttctgttttctattcttattttttgtttattttcctttgagattttagagaaaattagctcgcgtaattacaatatttttttcatctaattcgttaatttttgtgccctcgtattttttacttttttaaatgtttttcaattttattaataagctattcattttatttgatttttatgtcgatataatgacgattttttggctctgagaatcgcccaacaaaacacggtacaaaaaattattcgttctcccattgcaaaattttttgtcttgccaattttggttgtgccatcattgttcatcaacagtttggcacaagacgttaattttgaacttcgaattgtaacggtggccactgaaaatacggacggattgtgtcggctgaatcggtcggcaaatgcatttgggcaccaattgtttgtggttgggatgggcgaaccgtggaatggcggggacatg

SEQ ID NO: 112747 - DNA, 1003 bp, Heterodera glycines
gaattttgactgaaaccgaaactgagtttactgtggaagttacagtaacgatgataaaactgaaaagaattgatcgagccattaaagaaaaagcactgataatctgactccaccgtaatggctccccagtaatccgacactggcggaatttttaaataatattaaaacttttaatttaaatctataaatttttaattaaaaataatttaatgaaacctggatgaaattttcgtaattgttgaaagaatcacttattcattcctattttaggtaccttttataaaattaagtgcttaaaaatcctactctatttattaaatgttattctataaaaattgtttaaaatgggatttttttaacttttgcctaattttttcagattttttttgcattttttcttgcttttttggatttttatgactattttttcaggacttttttccatttcgtgatttttgcgtttttatgacttttttagaaactttttgaagatttttagtgacttaaattcccaaccctatttataaaaagcatattagtgtcctatttttccggtgtctcattttttcattttttaaacttttctcacggtatcggattcttcgtaattggcggttttttcccccgttttctcctaacttcgttcgttcacctgtttaacacgcgctattatgagcccctcttggcgcataaagaaccttttgcttttgaacattcgtggataaattaggcgcaaatcagtgtcattaaacggcggattaacggagtggcggagaatggcaaattggaaaatgtacgaacgatggtcagaggaacagccctttaattggggggggggagggaagcatttaagcgagttgtggcaattagtgccaaataatttgacagaaatgagaccttgcggagaaagagaacgctggcctaaaagaaagtctcagacttaacgatcagtcgtaaaagaggacaatttgggcaaccaaatgatggcccaggacaaaaaatg

SEQ ID NO: 112748 - DNA, 379 bp, Heterodera glycines
atttttttttatgtgtgttgaatagagtgcagcgggaccgtgaaatttgagcaagaccgggaccgggactttttggccgggaaaaagccgggaatttcccggtcaaaaccgggaccttggtactcagttgtccgtgttcaggtcccggtcccgctgcactctagtgttgaattatcatttagttttttcgggccatatgtttaggggacactattttccttccactgaaacttttaaaactgaattttagttttctaaatttcttatagggtttttttctagtaaaaaaaaaaaaaattttttttttgattttttattgtacttcaatacccaatttttctttataaaatttattcgaaaatttgtgagtaagaccatg

SEQ ID NO: 112749 - DNA, 1003 bp, Heterodera glycines
  unsure (1)..(1003): unsure at all n locations
ttttatttatttgtgcttgtataatccgattcttttggacgattaatgtatgtatatgtcacaaagtaagtggattatccccttttgtggacttttcttttctttataaataaataaataaataaagtacagaaaaatgaaaaatcacagtaaaaacaactttttaaatttcagcataaaaatgtaaaataaacatnntaaaaataaattcaacaataattttaacaataaaaaatgtaaaaattaacagaaattcgcgggttcataaggtaatttggacaataaaacaaaaaatcacgggttcattcgatagttgcgagaaattccccggagaaactccaaaataaatgtgaaattgattttttgaactcgcatctccaaaattttgtcatcccatcagaactcattttagcgaaggtgtaaaggtggccttcgtaagacaattttactttttgttttttggttgcaattgggtaagccatttctgaaaaatatccaaatcagaatgtacatcaaattggttaactattaaaaaataataggatttggaataagtaaaattgtaaaaaatgagcgagtgttaattaaacctaacttatgccaagtggcgagggatccctcaggcttagtttttagattcttaatttttaaaaaagcacattttccgatttttgggttggggcccaaacgaccccggggcccaaaaacgggggcccaaacgaccccggggcccaaaaacgggggcccaaacgcgggggcccaaaaacggaggcccaaacgctctggtcccctaccctgtacgtttcattcggaagtcacaccgtcacttgggtacctctcctttgttagtaattttttccccaattttttcgtttttcgtgactataaaaatgtttgctttttccatttctctctcattatgaaaaaatatttctaacgcaattatttccctctttgtgacatccttcgaaatactgcgcattgtgctaattgacacaaaatg

SEQ ID NO: 112750 - DNA, 435 bp, Heterodera glycines
ggtattaactttgttcccaaagaaacgtctcaaaaaatcctattatataaattttttttcaaattaataataatttataatgaatgactgatataaagccggcacattcgtcatcaaatttacctctggaataacacacagacatttacatttaagcttaaatatttttttaattatttttgtaaattggttcacctatttttattttttacgtaggaattaatgcccgtgttatttctctaattgggccgaaccccctcccccatatttgtaattaattctctctttggataagtcgttggttaaaatagaattttaaattaaattgaataatgaaaaggataattaagcactaaataatttttgaaataaattaggataattttttattcaaagcgatttaaatgaaaaatggcataggcaaaatgtaaaatg

SEQ ID NO: 112751 - DNA, 1003 bp, Heterodera glycines
atggattctgatacttttgggcccgataaagaacccgcggtcttaaacactttcaaaataggctaaaattggcataaactgaaaaatttggcgtcttgcagcctgttaagttttagtgtatgcacaaaaaacgagaaatgaaccaataaatagagagtgcagagaaaaatacatctctcattttggggtactatttctttatctctattattagagaataactgaatttacttttatatgtaaaaaagcttaatatttgcttaaaaaagcttcttttcgactgataccaagttgtccaatttgattggcaaaaactttcaaaaataatttttgaaaaccgtgattttttaactgtttggtcaaaaaataaataaaaatacatgtttcacaacggactctaaccgccgccctttatccctttgctatcttacaaaaacaaattcgtcacacatgcaaatctcttttgaactgggagcctagaattaattcggtgtgtgcaggagctttttttataaaatagtttggaaattaagcgactttttaaattttgcaacttaaagaggtccaatctaaatatttttgtgccaattttctgccaattttgaaagggttggaaaccggtttcttgaaacggagccaaaagcgtcaagttggaaccgaaccgacctgccctattaaaaatgatcagctcaattttatttttatggtttaattttcagcatttttatttccagaaaatttcttttgaagaaattgcaaaattcaaaattatttattttaaaccctttaatttgcctaatcaattaaattgtaatcaattaaatattttcattgtcttgtctagtttttactttgcttcaacataaattcattctctgcaagtagtcaataaggtgaggaaaagataaagatcattttcccagcattaattgattttttattcccaattttgttggacaaatattatttaaataaatattattgtgcttttcgagcttcgatg

SEQ ID NO: 112752 - DNA, 377 bp, Heterodera glycines
ccgaccctggagcggctgatcccgtgcatttggatttcgcccattgactgcttttttgagggcgcgaaaccactgtattaattttgaaattacttcagaaaattcttgcaagaacccaaacgctttcaaaaattgagaaaatttttgatttcctgctggcaaatcctcttggaattttgaaaatcatacaaaatattgtttttttttaaatattggggggggggggtaagaaagattcacgctctttaaaacccaaaaaaatccgataaattttgaatttttgcaataaattttttaacccctcccttttttaaagcggtccgtcgcccccaattgacatacaaaacattccgttgggccccctgctgcaactgatg

SEQ ID NO: 112753 - DNA, 285 bp, Heterodera glycines
aaatttcgttttgaattgacgacgttatttttaattctaaactttaattaataaatcgcgctgggatttttatgtgctaaagatcctgaaatatgtaataaaataagtgctaaaaagtattaaaaaatgtgctaaaaacaaaaaaaaagccaaaatatgtacgaaaatatgtgctcaattggaaaaaccaagcctatctgtgcataaaaatcctcagaaaacctcatttatcatttcccctcaaatacatatttatatttttgcaaaatttaaatttcaataatg

SEQ ID NO: 112754 - DNA, 1003 bp, Heterodera glycines
ttcgtaacactggtgctcttcatggccacaggatttacaaattgtaacggcaaagcactgatgcagaaatatgtatgtttaaaattgagattaaaagcatgagaaggcaataaaaaagatattgttgattttttacagaagtgaataaaaattatagataaacattcgcaatttataaaatttgcgtcagccatttttgctgaaaggaaatttgaagcaaaaggaattgacggaccttcaaaaacaaaaacaaagtccgcttcaattttttgtaaaagcacagaaatatatttgctggattcgaataccgtaaaacccgggaacattttccctggtatgattgtctcttgtacggttttatgtaatttgggtttgggtcttcatccaactcgtaattcgcattggtgaggctattttaagagacagaaatttcaacgggtaggaaagagagggttgagaaatgtttataattcttcaaaacattacagcaaaagaaaaatgatgaacgaatgagtgaaagaggagaagcataaagacttttatatgaatgatgttctgaaagtgatggaaaaattacctaatgcatattctacaaccaaaagtttttacctcaacagtctgggtggtatataaataggcaaaatgttaaggcaccttccatttgacttttttccaacggcagaatttgcctcgtcgctcatcactccgtcccatttccctttgcaataatgcagcggaagcaacccaataatgtaataatcattattcaaaattgtttgttttttaaatttggtcttgttacaggatttgctgaacgtcagagacaaccattggagtgccggtggagaaggaacgcgccacacacagaaccacgggagtgccggcggagaaggaacgcgccacacacagaaccaggggagtgccggcggagaaggaacgcggcgccacacacagaaccacgggagtgccggcggagaaggaacgcgccacacacagaaccatg

SEQ ID NO: 112755 - DNA, 394 bp, Heterodera glycines
ccttggggaaaaaggaaagatatttttaataaaattttaaaaattgaagaacaaaatcggcgctagtattaaaatgataaatatttgaaattttttccagttttttttataatatatcattaatatttattattttttttataaatttgaattacattttaatttcttaatagggatccatttcaagacatatttcaatggatttacaagcaaaatttgacacattataaaattggaaaaaaattccaaattttaacactttgacactagcgccacaaaacttatttaagtgaaaaattttcatatgtgaattttgatgaatttttttaattattaatgaaatatttagggaattacatttttaaatttatattttattttaggaatttgaatg

SEQ ID NO: 112756 - DNA, 91 bp, Heterodera glycines
cgtcagttaaatattttaaaattaaaaaaaaatgaaattaaatcaaagatttcaatggcattacggcaattgcaacgaggcgtcggcaatg

SEQ ID NO: 112757 - DNA, 179 bp, Heterodera glycines
aaaatatttatttaaaacaaataaataaaaagttaatcaaaaaaagaaaaaattgaaatttctttcatattgttaaatatgtaaataccaaatgtaatagaaaataaattaatcctttaaatatttattaataataaaacaattcttttctccgtttgaataaaattatttaaggcatg

SEQ ID NO: 112758 - DNA, 472 bp, Heterodera glycines
agagcacacacaaataaagcaaggacagacagaccattacggattacggatttgatggaatattttgggggcgcgaaatgcattccaaatttgttggcaatggttgaagaacattggtctcggtattttttttattttaggaaattgtttctatgggtagaatctgaggcgcgaggcaagaatcaatgccttcttttggctcaatttcgaactcggacacggatgaactcggattcggacatttttcgaattaaaattttcattttttttgcaaaatattgccaagaattttaaatttttccgaaaaatgttcgaaaccgggttcggggttcgaaaatgggcaaaatgaatgcagctgcttagttggattacccctaaaatagttttcttgaaattaaaataaaatttgggaccagtctttgcctccatttgcccattttattttttttttgcgacatttttcgtaaaaatg

SEQ ID NO: 112759 - DNA, 124 bp, Heterodera glycines
cttctacgacatactgacagcgccactgccggcggcgacgaaagagttgcagttgcgaaaccatccaacaccagctgaactgcttcaaattgcggacgagcacatcggagacttaaggacgatg

SEQ ID NO: 112760 - DNA, 364 bp, Heterodera glycines
cgtttttatagttaaaaaaaattcaggcgggcaatggcatttcctatctgatggaccgcggcttttttcatcgtcggctccacgcccgcgcctgtatcgttgacagtgccggcaaaacgttgcgcatcactgacttttggacgggtacggtctcaacactcctgttttattcaaatttcatttgaacagagaatgaccccggggacattcatttgttccaaagagacgcctatttgcccaacactgtgcttccgtccgctgttatgtaccgggacggatggaggtcatcatcttttatccaattgaatattcacatttaactttggcattttgttaatagtttagatgcagcaaagcatagatg

SEQ ID NO: 112761 - DNA, 385 bp, Heterodera glycines
tcctttgccaccagaattgcctcataaacagaaatccctctagaccaaatatccgctttcacagacaacttaattttcctattaataaaatagcttttaaaatatgggcttattgtaaaaaaaaaatttaaaataataatattaatttactttaacagaaaaatttgccattttttctatttgtttttatttaattttttactattgagcaagaattttttaaattttttccaaacattaaaaacatcattttagacttttcgtttgtggtttcttgtgcccacagcctaattattaatattaattatgaattcttttatttgttcccatttaattaacttgtttattgccaacaaatatttcaggactactgtatttcccgatg

SEQ ID NO: 112762 - DNA, 491 bp, Heterodera glycines
ttatgtttgcatatgtatttacgtctatcctgcctttttgattgtttttggtgcacttcataaataaagagaatcagagcctaccattcactttgacgggcaaaacagaatatcgaattttctaaagaaatcatccaaaactttgagtattgtcaaggggtagtgtttatcttccgggtatttaactcgacttattcattcagcacatgtacattggtttaccaatcgagtagtgtgtagtaaaattaacgaaggagtagagagaaatgaagtcacatagaaattttttcattccgtcttcaaatccactcatttatttgttgctcattaacattttagcgatctcgtagcctaatacacttacaactggatggacaacttgacttcgtataaattcataacgttttacattcctctcccgcactttagcatttatttttttcaattagacattaatatacatcttctaggtggcgctaattgcaggcatg

SEQ ID NO: 112763 - DNA, 229 bp, Heterodera glycines
attgcccgtcgattggcctgctgtcaagacgatgttgttgttgtttgctagttttagacatccaaaatgttcactttcattaattggaagcgaaatttgttgaaaaatggtataataatgcttccgctttcattttttgtcaaacgcttgaaccgatatggtattgctaatattgcattgcattatttattaaaatgcgcatttatgaacagtttgaattgacagtatg

SEQ ID NO: 112764 - DNA, 546 bp, Heterodera glycines
aatggccccaaaatgccttccgcccgaacttttgttcgaacttgtgcctttattccctgtcgaggaaactcttccgaatgtgttttatcctgtcggctgcttcacaattttttgcttccacgtgttgacaaatggaaagaggtatgccgtgccatttttgggccaaggaatttgatttaaacttttaaattgaaagggtaattctgtcaatggtccgcccttttttggaagaaaatttatttatttattttacaaagtcgtgaaaatatgtttatgggcttttcagggcagttgatcattaatctaataacattcattttgactaattatgaacccgggcccgaaatcgaaccaaaagtcgagaacttcaaaatctttcaactagtggaaacttattctaatggtttttagggtcgctgatcacgaatatctgatatatttagaccaagtccggcttcctaacttattaataaaaaacataaatcgaaaaatttgaatttttgacctttgttcgagttgggtttgagaaattggtcaaaatagatg

SEQ ID NO: 112765 - DNA, 75 bp, Heterodera glycines
gggagcaaaacaagggaaaatagggaaaaataaaggcactttttgacagtcgaaaggcgttaccaaaaaaaaatg

SEQ ID NO: 112766 - DNA, 214 bp, Heterodera glycines
aaactgtttgattatatacttttgcaccatactgtatgtaagtaatttaggtattgacaattctgaaattggcatttcgttatttgtttttcatatgaatttccatttttcatttgattcagtttcactttcaagtactctgttctgtatttcttttatattgtgtatttaccatttttctctttattttcagtactagtagttattaataatg

SEQ ID NO: 112767 - DNA, 232 bp, Heterodera glycines
ttttctatcgctcattttacttttttttaacctgcaagataattatgtagataaaagagataaattagagataatgaaaatcacttctctggagataaattaaactatttgaacaaaatatattccttcccaaattaccgattttattttcttcctttttttctctcttttggccttatgtatgtatatcaatttttaaattttccgtttctgtttagcaaaaaaaaaaatg

SEQ ID NO: 112768 - DNA, 611 bp, Heterodera glycines
aagccatgaaaattgaaggcggacgaaagaatgatgaatgctaattgaccccatttgcttgttgttgttgttgtttcttttccgtcgggtcaattgtttgtccgcacttttttgggattagatatgtagattaaactttttgctatccattttcataaatattttttcagaaactgctctaaaacgcgccaaattttatttacaagataaataaggctctctgatgcttcttctatcaaaaagggagatgaataaaaatttaaaaaattttttaattgttttttaaatatgcgcaaaagtttaggctaaactttttagtgaaatttcaatcactcatagttttacgagaagtgatcagaaaaatcccagattttgcagggtaacaactcagaagaagcagatattagctttaaatttcctttccattttgttgcatttgaaatttttcgagattcctattttacgcactttttcaatttttgcaaaattaattcataaatcttttttcagaaactgctcaaaaacgcgccaaaaaggggagatttaagctttttcggctgaacaaattttgagaaatttcaagggttattgattttttgattgaaaaaatg

SEQ ID NO: 112769 - DNA, 133 bp, Heterodera glycines
ggtgtttctcctttgctttttgtttacttatttgacttgttcaggtacaattccccccgtgggctttgcgccccattggggcgggccgacgatgtgtttgagttgcttccaatttttccaattgcctgagatg

SEQ ID NO: 112770 - DNA, 377 bp, Heterodera glycines
tttgaaacaaatgtatgtacgttaattcacttggcactgttcacaattcaacccttttgtgttgtgtttgcattcgtaaatgtcatggacaacctcataagaacggctttaaatcaacaaaataataataattaatcaaattgaaaattgtggcacattgccgcgcctggcatggtggccgtactcatattttgtgtatcatcgtgctgaattaagatttaatttgaaaaatattcaaaataggaaactctcgcacattttggcgcactgcaactgcacacaatgcaaaaaaaacgtccaaaattgtgtataaaagtcgctgttgtgatgcatttttctcatattttactaaaggggcgtaacacaacgagaagatg

SEQ ID NO: 112771 - DNA, 777 bp, Heterodera glycines
gctaaaaatgataaagaatgagatttttgggaatttttatgcaaaaacacacttattttttcaatttttaacacatattttagcacatattttggcatttttgggggtttttagcacatatttcagcattttttagcacatattttattacatatttcaggatttttagcacataaaaatccgagccctggtcataacaccgataagagacaatggccaatgaattaattgttgcacgttttgtttttctctttaaatctggggccggttccgtcttagtagtaaaagagccggttccgtctcaaatatttttggacccaaatttttttaaatttcagaatgtgaacagaaagttgagatataattaacagtgctgccaaaaatatgcacgaaaagtagccaaaatatgcacaaaaatctcgaaatatgcaaaatatgcaaataaaaataccgatttttctacgcaaacacaaaaaaagaacgtgtttttcctattatttatagcatggaaaaggcaggaaaaaaaatacatttgcatgtttttggcagccctgatatttaatatgcctaatatttttgggtgttaaaaactaaaaactgccaaaatatttaggttttcggttctaaaaacctcaaaataggtgttaaagtttcaatttagggatataaaataacaaaatttttgaggaaatttttcatttctcaggggtgtatttttgaaaattagacgaaatttatgtaaattaatctttatattcgggttcggggtccaaaatg

SEQ ID NO: 112772 - DNA, 315 bp, Heterodera glycines
tgattttgtggtatatgaaaggccccatatatcggggtaaaataaatatacataaacaaaaaataatcagctaaatttccagtcgaaatttaaaattttacaaattttatcatcttgagtcaagacttttttccgccactgtatcactctccccagtttatttttccgccaaatcattgaaaaaaaattgctttaaaatttcaaaaattaccgaaatatcgatattaaataaacgcctcgcctcgattcttcaactcaacgattcgtcaactcgacgattcgtcaactcgacgattcgtcaactcagccaaaatg

SEQ ID NO: 112773 - DNA, 92 bp, Heterodera glycines
ggtaaaatcgcacccctggatattgaataatttaatattgtattacaataatttaataaataaatgtaatatcatttgatatttccaggatg

SEQ ID NO: 112774 - DNA, 237 bp, Heterodera glycines
cgatcaaattgaaaggactgccgtggggccccgtccaattcgctgaatggcggccgccgtcttcgaccattgcctaagctttgtaagttttcatttgcaacattttttgttcatttcgtctctaccccccccattccgttcactatatttcatcaatttaaaatttattgctaatttgattttctaattgctaaatttcctaattttattcctccttccaggtctttgtcgaaaatg

SEQ ID NO: 112775 - DNA, 246 bp, Heterodera glycines
tataaaaatattttaatacaaagaaataaagaaacgccgtgatagtattaggcttttctctgcacagtggagttgacccatagtgtctcatgtctatttaaatgctgtctttccctcttccccggcagtcttcattcaatcatattcttttgttttcttcatcatctccacctttgacccctccgtatttattttgtttaaatttcactaaatgatgactaaaactcagaattaggtttaagaatg

SEQ ID NO: 112776 - DNA, 152 bp, Heterodera glycines
  unsure (1)..(152): unsure at all n locations
atgaaaaattgcatttgtgaaagatacaaaanatcatttgggataaagcgcatttacnnagaaatgatttaaagaaagaactccaagaaaagttaaagctccagcaactgatggtccagcttaatacactgcagtcgaaagtagacaaaatg

SEQ ID NO: 112777 - DNA, 75 bp, Heterodera glycines
cctaaaaggaacaaaaaattattaactacaacggaatttattgctgttttttctccgaatgacctcgtataaatg

SEQ ID NO: 112778 - DNA, 136 bp, Heterodera glycines
ttctttgttaactaaaaaacagaatatatttataatgatgaaaataaaataaagtatttggaaataaattcaggtgaaaattttaacatgtacctctctctccattggtgatttttttcaataataataattaatg

SEQ ID NO: 112779 - DNA, 57 bp, Heterodera glycines
ggtctgtctctgctccctttttagctatctctgctgctttcagtgtctgtgacaatg

SEQ ID NO: 112780 - DNA, 152 bp, Heterodera glycines
ggtcagtcgattaatatggcaaaatagaattaaaaatttttttttaaatttcatttatgtcggggacctttcttttttttaattttcaagaaattaatattttttgcgcttctgtttcgtttaggtggttgtgtccaaattcattgaaaatg

SEQ ID NO: 112781 - DNA, 343 bp, Heterodera glycines
  unsure (1)..(343): unsure at all n locations
tgggacggacgtttctcaaacccatcaaatagaaaatttgccaaacattattttgctaaagagaagagtaactaaatttttaatttttgaaatcattcaattgcactaacaaataaatgttctctattagctgtaactttttctaaagtcgccaaccttaacataccgtataccatacctttttgcctcacgaccctacggttacggtagggacaaactgtgctttgattgggtgcctcagttccaagttattcggatattatatcaattaaatccatcaatgttttgagtcaaaatttatttaccccnccccccccgtttttgtaggcatttcgtagaaatg

SEQ ID NO: 112782 - DNA, 495 bp, Heterodera glycines
ttacgccactactgcatatgaattggtaaaagcaaattactttattttataaaaatttggcaaaatggttaaaaaattcaaaatttgtatatattttttgctttttctcccacaaaaatgccattcttaggggtgtatatttaaccccgaccccgagtcggggttaagggtcggggtcggggtgcgtcggggttgggagcgtcggggtcggggtcggggttaaccccgaaaaatgggcaaaaaagtcggggttcggggtcggggcggggtcggggacgcaaccctaaattaaaatattgataaaaccattaaggaattcttgtacttttggacggttgcattacgggagcaatcaaaaattgtcgtaccataaatgtgaaagttgaatatagagaaaatttttattatggaacaattgcctacaattgtaaaggcgaaatgaaacaagtgttcgagagcaggcaaataaaaaaaaaatgaaataattaaaaaatg

SEQ ID NO: 112783 - DNA, 146 bp, Heterodera glycines
agtcggcggggcccagatggcggggcccagtcgacccccaccgtagggaattaggcagcttaaaaaaaaacaaaatacagtatcgttctcccctcgggatttttttcgaaaatttccaaagccatttgagttttcagatcaccatg

SEQ ID NO: 112784 - DNA, 145 bp, Heterodera glycines
ttgtagcagaacaaatgagacatagctgacaaattgccggggcttttatactcccagaaaattaggccacgcccacttttgaaagctatttaagcagagattttctcgcacaatcaaatcattcttgcaaaatcatcctcaaatg

SEQ ID NO: 112785 - DNA, 1003 bp, Heterodera glycines
tgctggtggcagctttcattcatccattcaattcattcactcatccgcacaatcgattcgatctgccgcgctttgtgctgcgactgcgtcccgcgccatgcataaaacaaaaaagaaaatgacgcgagttatggtggtggtgatgatgaacttttttgtttcacagacttccggggaaaggaagagattaaaaagaaaaggaagcgcaaatttgggaagggaaaagccgaaaatgaaagaaagggcaacaaaaaaagagactttgaatgcgacgtaatttcatagcctttctcattgtcagaagtgatcaaattaatttgttattattctgtgtcatgacaactcgtacaatgttgaacaaaggcaaattgcttaggttaggcctaggcttaggcctaagctttaagctaggccgcttaggcttgcttgggcctaggcttaagcttttactctactttgtaaaatacgagttgccttttgtcaagttgccattgacccctattattcaacagccctatgggtttgttattagcgtgcaaaacacagaaaaattatatttttaaaaatttatttttgtgaaaaaacaaaatttactctaatatattttttttacaacgattcccttcttaaagcaaatttctttcattttgtttaattttaatgagaatcagagaaaaactttaaagagttagacagtgccatcaaacaaaaaagaaaagcgccacgagcacatttctgcacatcgctaatcgattaaaaatttggacattgcctttgcctctgcctcctccgttctcttttctctcaagctttcgctttttcctttcgctggtcggccatgctcacattctgtcgattcttttccttcttttcgtgtttttagaattactttatcacagaaagacgtcgagactcgcgcttaattttcctcattattttttgctatttcagctcaaattttgaagttttattccaacaagacttattgtaagacaaaacaatg

SEQ ID NO: 112786 - DNA, 102 bp, Heterodera glycines
gctaaatttaaatttttaattcgatcgttaactttgaagatggataattatttttcagtcatttttttatttgaattttattaaccaattcaaaaaacaatg

SEQ ID NO: 112787 - DNA, 269 bp, Heterodera glycines
ttgctaaattaagaaaaaaaggtagaaaagagaggaaaaacaaataagaataacgctggagtgatatcatcccaaaatgttttccgttctcgagcgatgacctactttctcgttggcttggtccatcactcaagaacgacaaacatgagggaccattttataatatggagaaaatatctgtagtgaataaagacggggtaatgggcatggggtgggggaaggtatataaaagtcgaaatttatggtcaaactcattcatctaaaaaatg

SEQ ID NO: 112788 - DNA, 207 bp, Heterodera glycines
attaatttaaaattattttttattttaatttttgtgtttgaagcgtttcatcttcttctgaaatagccaaaaagatgattgatgtgaataaacaagtttctcgaaatctcatttttcaggttaattgagcacttttattgtactatttaaatataaattattcaatattttgttatttaatttacatttattatttaggcttctatg

SEQ ID NO: 112789 - DNA, 885 bp, Heterodera glycines
tgggttcttaagaaaaatggttttattttctgccaaatgagcacgagtgccgagttatgacgtgccaaagtttttagttttttataattaaagaaaataattaattatttacatattttcaatgtgttgtttggtgtagaggtaatgtgttagtcaaaatttttattggtcacaagttcgaatcccctttgtgtaaatccattttttaatttttaattttcctttttatgagcacttcaattagcaaattttatttctttatcaaaatctttattttaattttattccattaaaaattgcattaaacataaagatgtaataaaaaacctgtcgaattaaaaaaatatatttttgtctaatatttttattgagtattttatgcactaaataatttcaaaaaaattaaaaataaagtttttttaataaaaaatattttgataattgacttggcataatagacaaaaatttaaaaaattaatttacatgtaggggatccgaaccctgggttgcctgatgctgactagtgcactaccgctataccactggacactgtgccgaggcacaaataagtatttcttttatttcatcattaaaaagtttggcatttttttatctcggcacaggggtccatttggcagaaattgaaaacatttttcttaagaacccaggtgtgctctatctacccaaaaaatctcattccgaaatcccacggacacttggccacctccctttgtgagcaacatgcttttcctttgtcgtctgcctgaaaatcactcaccactcaaaggggagccggacgaagtgctcctgcgtgtttatttaaacaccgaagcggatgtggtggccgattcagttctttttggtattttgtcggaactacacatg

SEQ ID NO: 112790 - DNA, 160 bp, Heterodera glycines
agtttttaaagaattttgccataataagttcgaccgccgacctctccaaccctcggtcgaccggttaaaggcgaattcaggaccctaaattaatttatttggctcttttttcacagtcaggctttttgattatttttgtgactttattcccatcctaatg

SEQ ID NO: 112791 - DNA, 449 bp, Heterodera glycines
ggtaagcggagggtggcggacactcacttagggggaaggaattgtgacgcataaaaatggcataaatacccttcgggattgggttttcagggtcagctaggtcggggtttggatttttcggagtcagctaggtcggggtcggggtaaaccctgaaattgcctaaattttcggggtcggagggccggccgtaaattgacatcaatcaatgaattttaatcaaagcctcgtgaacaaaaggatagttttagtctgagaatgggacaaaaaaatggctccaggcttagatttttaaaaacccgacaaatttttctcggttcggtgccaacaatctctacaattaatgcattcgttatccacaggcccgtcattgtcgcgccgggcacggcctcagcccttggacctgacttcgtgcgttaatcccgccgtcaaccaactgaccggacaaatg

SEQ ID NO: 112792 - DNA, 85 bp, Heterodera glycines
ccaacaaagcgcagcgaatcgcaaactgaacatcagcagcagaacaactgaacagcgcaaagcccacggcaaacaacccacaatg

SEQ ID NO: 112793 - DNA, 122 bp, Heterodera glycines
tttttgagaaaatcgtatttttcaaaaaaaaaaaaaatttttttggtgcaatacttttgaccatgactgtatgtacatattttagggttaaaaagaatctcaaacaaaaatattcacaaatg

SEQ ID NO: 112794 - DNA, 119 bp, Heterodera glycines
cttttcctttaatccttgccgagtagaccggggggacggggggggggggtgagccattcattcgtccctttggcccctttccgccgctttctctctgctttcaaattaactttgagatg

SEQ ID NO: 112795 - DNA, 285 bp, Heterodera glycines
ttttttgccaaaatggaaagaaagttgaacagcagaagaagaaattggcctaaatatatggtaatattgcatctctaaatacattcatttaatgggttcccgggtgatttcgtcagtaagtcatgtcgtcagtgagtgatttcgtcagtgaaaattaattaataaaaacagcgtacacctagctaaaaaaattaaaaattcgagccataagaacagaccccgtaaatatttaaacgagtcacgatttgcaaagtcctctataagattgctcaaattgttgcaatg

SEQ ID NO: 112796 - DNA, 207 bp, Heterodera glycines
aattccctttccaacaattttgttgcggctgtttttcccgcaaaagattcacgaacgaatttgaagaatttctgcggatcgttgtgggaacaaattgagcacctcaatgaaattgacgggcgcgaagtgaaatggtgaaaataaattttgttttttgaaaattttccaggtttcttggcggtgatctgaacaatttgcaaaacaatg

SEQ ID NO: 112797 - DNA, 72 bp, Heterodera glycines
gcttaaacataaatttaaaaaaaaaatcattttaaaattaaaatgaaaaaaacttacctgtggggccacatg

SEQ ID NO: 112798 - DNA, 166 bp, Heterodera glycines
ctccgtatgccatcaattggtgctccgttcggctaattggcaaatttcgcccaaattggagcagagcatttactggaacgttgaccgaatttttgtggacctcaattggagccagaacagatcctgcccaaaccccgaagtgatccaagtgcaacacacgccaatg

SEQ ID NO: 112799 - DNA, 325 bp, Heterodera glycines
attattgggacgaagtgcgcgaaaaaattattttaataaactttcattaatattccaattttaaataagtaaatctttttttaattttaggatcaattgaattcacaaaataaagagaagacaaaaattggaattgcaaaagaaaaagaaagcacaaataatctcgacgaaaaaagttacaaatttaaaaataaattataaaaatttaaaggcatgacgaaaccgccaataaaattgaaaataattgaaatattaaagctaattaattaattagttaatcaattgttgtgggtataattaattaattgctttttcagtaaaaatg

SEQ ID NO: 112800 - DNA, 118 bp, Heterodera glycines
ggtcattcggagaaaaaacagcaataaattccgttgtagttaataattttttgttccttttagggtcggagctggcgacttccaatgtaagggtatctcgacatttatggcggaaatg

SEQ ID NO: 112801 - DNA, 57 bp, Heterodera glycines
tgaaaaaaatgtaactaaaagtgagctgatcagaaggattattgagttggaataatg

SEQ ID NO: 112802 - DNA, 441 bp, Heterodera glycines
tgtatattctctctttttattttctctttggcattatgtatttccaataggcgaaatgaatgtttttggcttagtaggcgaaatgaatgtttctggcttagtaggcgaaatgaatgtttttggtttggtaggcgaaatgaatagtaggcgaaatgtcagtaggcgaaatgaatagtaggtgaaatgacagtaggcgaaatgtccggttttgggttagtaggcgaaatgaatgtttttggcttagtaggcgaaatgtcatcgtgccgatttggacgagttggtagtttttttgacactaagatcttatttttggcctcaaggtttcttttcttggaaagttttccaaaccctacttttaatgcaaaaaaagtttaacaaaaaccccgtcctgtttaatagaatttaaaaactaagtttctctttcctttcaggcaaactatg

SEQ ID NO: 112803 - DNA, 70 bp, Heterodera glycines
ggtgaaggaggaaaggggagggggagggggacggatggcaaaacgaatcccaaaatggtagcgaaaaatg

SEQ ID NO: 112804 - DNA, 626 bp, Heterodera glycines
taattaatgcgcttattttataatatttttaaatctcaataaaactaacatttatagttttctgattttattttaggtacaaaaaatcgcgaaatatgcacctaaaaaggcagaaaaataagcaaaataggcacaaaaataggaaataaattctttattaacattttttaggtagtaaaacacgtaaaaaatttaatcaaacgaaatcagttaaatatttattaaatattttaaacactttttcgaataaggacaaatttttaaaccaataatttttatcaaaaaaaaataattttggggaccaatttttgggattaaactatgaaaaaactaacacaaccggtgatcatcaaattactgtgacattaagcgcattaaaacagacaaagtagcatttattttcatgacaaaaattttgattttacaaattatctatcgcaatactgattttactgatttgggcgcttaattttgttggtttttggataaaatttgtcattttacacgctaaatttgaaagttttgagcaacttttcccatttttagcacctattttttgggggtttttagaacataaaaactaactattttggcagttttagcaacataaaaatccctattttatg

SEQ ID NO: 112805 - DNA, 517 bp, Heterodera glycines
agtgattagaagaggtgcaacagtgattagaagagtgatcagaagaggtacaacagtgattagaagaggtgcaacttgattaagaaaggtaaaacagtgattagaagagatacaacagtgattagaagaggtacaacagagattaagaaaggtaaaacagtgattagaagagatacaacagtgattagaagaggtacaacagtgatagaagaggtataactgtgattagaagaggtacaatagtgattagaagaggtacaacagagatcagaagaggtacaacagtgattagaagaggtacaccagagatcagaataggtacaactgtgattggaagaggtacaacagtgatagaagaggtataactgtgattagaagaggtacaatagtgattagaagaggtacaacagagatcagaagaggtacaacagtgattagaagaggtacaccagagatcagaataggtacaactgtgattggaagaggtacaacagtgattagaagtggtacaacaatg

SEQ ID NO: 112806 - DNA, 92 bp, Heterodera glycines
agtgcagcagtcaggcggatcacttttggcccctttgttggcccccattctgatgagggctgcccgatacctgctttcgcgcagcaataatg

SEQ ID NO: 112807 - DNA, 57 bp, Heterodera glycines
aaatttgattgcctttaggcaaagttatgccatgttttgtcgaaaaatcgcacaatg

SEQ ID NO: 112808 - DNA, 140 bp, Heterodera glycines
tccaaggtcgaggaggcccacacgctcacattgttgcccatactgacctggacgcagtaccacatgtcattcaggaatacatatgggcgcacattccatctttgcccgataaagatgacgacacgcccattgcgaaaatg

SEQ ID NO: 112809 - DNA, 99 bp, Heterodera glycines
  unsure (1)..(99): unsure at all n locations
gaacaaaaagcagtgtcaacaaagcgcagtgaaacgcaaattgaaggcagcagcagaacaacttancagcgcaaagcccacgacaaacaactcacaatg

SEQ ID NO: 112810 - DNA, 140 bp, Heterodera glycines
ggccaattttgcaaggctggcccagcagttgtgtctctctgaattcggccagcttttcaaggtattaaaaattccaactattttaaattttaaatttaaattatttaaaattaaaaaattaaggagtaggttggagcatg

SEQ ID NO: 112811 - DNA, 244 bp, Heterodera glycines
aacagaaatgggaggagaatgagtttgggataatttgatggaagacagtcattgggccgggggggggagaatcatcgtggaaattgtttaaaatgacatttaaatacctattaattttgaaaaaacgaatatttgcatgtcaacaaataagttctctgtttatcagctgtctgaacacattactttttaaaaattctcttggcactgttatggaatttataacttaaaagttttgaccaaaatg

SEQ ID NO: 112812 - DNA, 634 bp, Heterodera glycines
atcaaatagtttcttgtgttttgccaagcaacgtacctgcctacccagacacccagcccaataaatttagggtccgcttaccaaaacaatttattttaacggttcctggggtgtgtgggctgcacagcatcagctatccgtattcatggcactccacgattgggactttggatgatcaatggattaacattcactttgaggacacagaaagtgatactgttgagagacagcgagtgatcagggttccggtgcccaagggttcccataaaaaggtggaacagctgagagactttattgttgcaacattacgccatcagagcagcaccattgaacagctaaaaaacgacacccaaacaagcagcagcagcaacaccaataatcagcaacacttaaagtaacacagtcgcaacaagcaatagcagcaataaatcccaaagtaacacagtcgcaacaagcagcaacaacttcagcaactataacagtaaaaaaaggaacagcaacggcaaaaccgacaccttcaccatcgccaccggttgcaccagcaacagcaacaactaaagctgctaaagcctccccagttgtgcataaagaatttaatgaaaatgcagcaggagtcgatgtccttgacattatg

SEQ ID NO: 112813 - DNA, 191 bp, Heterodera glycines
atcgggatcacacaactttcccttattaataaaaaaaatgtccttgttttgaaataatcattaatatttatacccaatacatactattttctcatttttgcaccattttgtgcgtttttagtactgaaaagccaaacattttgcagttttttttaccaatcatacgattttttgtttctcagctttcaatg

SEQ ID NO: 112814 - DNA, 145 bp, Heterodera glycines
aactttttatcttttgtcaacttaaatttgatttgcaaaatttttgatgaattacgtttagttaaatttttccttaattaaaatgaaatgtgttaaatatttttggtctattaaagatctttaatccatttcctggttgaaaatg

SEQ ID NO: 112815 - DNA, 213 bp, Heterodera glycines
  unsure (1)..(213): unsure at all n locations
ttttgacccgaaaaatctatctttatttcagaaaaattttactttatacattttttattcaaattntcgtccatattttgtttgtttttcgtggattaaaggaataatcgaattattatttcttctcaaacaaattatcttttctccaaatttttcaaaaatattttctcttaaccgcccatcccctcccattcttaattagagcacaatatg

SEQ ID NO: 112816 - DNA, 278 bp, Heterodera glycines
tctgataatcatacaaataataaaaaattattaatttagatattttggtacacattttagggtttgtatattcttatatatttcgaatttaattttttttatgtatttcgcatccctatatttacgaattaatgtttttctatattgaacttcaaataaaatattcctgtttagaatttattttaaaaaataataaaatataaaagaaaaaatgcgtttaaacaattataaataaatttctagtaagtattaagataatttttatagaattgaccatg

SEQ ID NO: 112817 - DNA, 95 bp, Heterodera glycines
tggccaggagctcggctcctgttgccgacgcatcctctgcgaggggcggcttaccgcagcataccacgccaattgagcacacggcaaagcgcatg

SEQ ID NO: 112818 - DNA, 98 bp, Heterodera glycines
aataattactctgaaaattagcgattaattgattgacactctttgaggagctgatggatgtggcgaatggtttttatgatgcgaaagacgacgcaatg

SEQ ID NO: 112819 - DNA, 159 bp, Heterodera glycines
tttggtgataatataagaatgatttggaaaaagatcccaccccggaaaatgtgctggttttatacttttgaaatcgcttctgctccgcccacttttcagctcgacaagttcatccgctcaaaaccaaaaatcattttaataatttcttaaataaaaatg

SEQ ID NO: 112820 - DNA, 176 bp, Heterodera glycines
tggttttcgtgcgtttcaggcctcccacagtccagccctcccagatgcatgtgcatatttttgccagccctactaatcctattcatcaatcatccaaaattaaattttatattgagtttacctttatttattttaaacgtaggtactttaaaattgcactttttaaaaacccaatg

SEQ ID NO: 112821 - DNA, 956 bp, Heterodera glycines
  unsure (1)..(956): unsure at all n locations
tttcgcctcgcgtttatacgggagatttgtaccacttttgtgccctaattagcaaagaaaaaattgcgtgggatttttcacatgaaaattaataaaaaagtaattaaataaaccatggcgcaaaaaaacagagcaatgaaattgggtaatattctcttcccatcaaaattagcacaatttcaaccgatgcaaagagaacaaaacgatttttgatggtcattttgattaattgctgcaatgcaatgtcattaacacagattcattttgcaaattgtcattatcattagatcaaaaatgaccaaaaaaaataattaaaagaagcgagagaatgcgaaaaggtgaaaataaccactttttgggacccattgggcgaaattctggcgattcggcgcacttttcaggcacaacaaatttcaatgaattttgtgaaattttttgttgagactatgtgcccctcaaaatgctttgaaccaattttaaggggcgaaaattctaattccttcaaataaatacgcacaaaaaatccaatggacttaaatttttgaaacagttagtggatgcattttgcttgtttttgtttatttgggntgttggttttctgtgccattgacatttatttttgtaatttgtcgggtgccgcgcttctgctgcttcgctgcttcggcttgtcacgaaaaatgcgggtgatgaaggttaagcacttttaactcattcctaaattaattttggttttaaatttcgagcatatagcaattaatttcttatccacttttactacaaattctgcaaattgtttttttttttacttggttctttttttttggaaattgaccaaaataacagttatatgtactgttaaagcgaattatttttgttggtaattataatacataatntattgaatcagtcagtgtttattattctctaaaaaaataaaatcccatataacagtcatg

SEQ ID NO: 112822 - DNA, 555 bp, Heterodera glycines
atcactcactgctgaaatgcaggctaatgaaacaaaatgcttttacaataatgaatggatacgccatcctcctacactttaattgcaatgagtgcgtgatttcgtcggtcccatctctcctcctccccactctctttggccccgctctcttctcactctcttccccactctcctcctcccctctcctcgttggccccactctcttccccactctcctcctccccactctctttggccccgctctcttctcactctcttccccactctcctcctccccactctctttggccccgctctcttctcactctcttccccactctcctcctccccactctctttggccccgctctcttcatccacctactctctcctcatattcactcactttattaatttaatttcactttttttttgtttaccttatgttgctcacaatcagctgaatcaactttaaaatgctaaaatccttttctacccgtccaaactcaaattacccccattaaattggattcatccaatcatttggcaattaattttgaagcgcttctgaaaatg

SEQ ID NO: 112823 - DNA, 296 bp, Heterodera glycines
  unsure (1)..(296): unsure at all n locations
ggataatggggtttcaacgatttgaaacggttgcttttgcccattatgctgggaggttcgattcnccactttgtcttgtccgagctaacgaagaaggaaatcgcaaaggggagcagcttagggtgtattgcgaaaacgacgtggaaattctgatggcggcaattttgaagtttcggcagttatttttggggataacaggagatttggatgtgatgaaggacagcgtgacaatcgctggtgttgtgatgaagatattcagggcaaaatttttgaaggacaggcatattccaatcatg

SEQ ID NO: 112824 - DNA, 1003 bp, Heterodera glycines
actactgcgttccgaaaaaatgacatcaaaagctgaacaaattttacaactttttaaacaactttacaactcctgcacaacttttgcatcaaatctctaacaactttggtacaaatttaaaaaactattcagagcaatgataatttaattgagtaattttctatattctttttcgatagaaagtcttaaaataatgagttaagacgccctacgttcattccaataatataaatacatgttgaaccaaactactactatgcacttttgtcagaaccccggattctgggggtgaaatttttttgaatttttttaacaaatttttcctgatagaaatgcttaaaataaggtgttattacgccctacgtgcattccggcattataaattcatccctgaccaaactactgtgttccgaaaaaaatgacaacaaaagctgaacaaattttacaactttttgaacaactttacaactcctgcacaacttttgtatcaaattcctaacaactttggcacaaaattaaaaaaactattctaatttttgtttaatcaagataaaacttgcaatttatgtatgattaaataattcaattatttttgattgatggaattttgtacatgttatccaagcaattcaattttaccatctggatacattttgaattctctctttcgttagaggtccctgcgtgcctgtaaacttccattgcctatagaagtccctgcgtgcatgtatcttagcggtccagtcccagcataatgcatgaaagaggtccctgcgtgcctacacttccactggcgtaccttttgcacaaaaatagtttaaaagcacactcctttgcttcgctttttagtaccgtctgtcctaacaaaagtaatgtgttcttttaattttgagttccagtgcttaaataaatgttattttatatttttactgttatctaaaactaaatatgttttttagtttaatattttattgatttattttgccattattttaaattaatg

SEQ ID NO: 112825 - DNA, 213 bp, Heterodera glycines
atgggtagaggaggggacagaaatgaaaatttcaaatattttccatcaactgaattttaaaaaataattaaagaaactttttgttaaatgggaaggatgaaattgatgaaccctggggaaaaggataaaatttgcataatttagttatttatttttttaataaaaacattttttgacggtttaaaaaagtctgacttataattttctaaaatg

SEQ ID NO: 112826 - DNA, 260 bp, Heterodera glycines
ttttggacacttgagaacctcgaaatgcatcccacgttcagttggccgagttgcgcttctcctccgaacttcgcctcgatgagtcagagacgcggcgggcgacgatcgaacgcacacaaagccaaatttggacaattttgggagtgccggtactggattgcctgcaattcttttcctaattcagcgctttaggcaatttctgcgccggaaagtcttccgtccgccgtacgaaaagccattgacgcggaaaagcaccgatg

SEQ ID NO: 112827 - DNA, 99 bp, Heterodera glycines
ggaaactctccaggaatcctatcgtctgttcccgaggggcgctccgcaagagaatcctcaggcctcagcgatcatgtcgatcatgttactctctctatg

SEQ ID NO: 112828 - DNA, 431 bp, Heterodera glycines
  unsure (1)..(431): unsure at all n locations
aaaattttgaaaattttcgaaattttaaattttgaaaaatcgagctcatnnaactctacaataagttcgctggcaccncctcgctcagaccaaaccctgacgtggtattcacctggtactgaagtggaaaaaaanaattaactgagtctccgtgtctgtacaggtccgggatttggtcaaatcaaaaaataaaaaataccagcatatagaggacacttctgcggagtgccctcacagcgggaattttttgatccgagtttcagaaaaaaagttatgggccgtcaaacgcaagaaaaaatgagaaatccgtccctgggactcagtcgtccgcgctgaatttttctctatagttttcccggatgctcctcaaaaagttgtaagacccttccaccactttcagggcgctcccggccttcggccgggagaaaatg

SEQ ID NO: 112829 - DNA, 147 bp, Heterodera glycines
atatttatcaaacacactgttcctggtagaaccaatcaaacgcacgcactaataaccaggagctcgcctgatcagctggagtacaaaggaatttaccgcgttcgtgtgattccgccacgagggctacgcatccctgtgctgcccatg

SEQ ID NO: 112830 - DNA, 799 bp, Heterodera glycines
caaatatactaaaattgtattgttcttgaaatatttgaatatcttcttgattatttttagttctgcaccatttaaaattgatagatatttggattaaattcgttcttctttttgatggattaacaatcgcgagagttgtgcgttgtatggatttacatattttctttgctcatacgctttttgatggattaacaatcgcgagagttgtgcgttgcatggatttacatattttctttgctcatacgctattgagaaaggagcctaaaaattctttttgcgtcaaaaaattttttttgatttggattaacttttaagcccgtataaatatatttagggggtttttagtttaacacccatattttgctatttttcggcgtcttccaacccggtgagggctggtggggtcaggggtctgctggcgggcagatgcccgtggggctgggggctggtgggggcaggggtctgctggcgggcaggtgcccgtggggctgggggctggtggggtcaggggtctgctggcgggcaggtgcccgtggggctgggggctggtggggtcaggggtctgctggcgggcagaagcccttggggctaggggctggtggggttaggggtctgctggcgggcaggtgcccgtggggctgggggctggtggggtcaggggtctgctggcgggcagaagcccttggggttgggggctggtggggttaggggttctgtgtgttcatttatgttcctttttgtctggtaaaatttattgtttgcttttttttgtatttttttcgcctagaatctcgaaatg

SEQ ID NO: 112831 - DNA, 547 bp, Heterodera glycines
catatccgctctttcttttatggatcttattaaaccccctttccgcgttttaaccgcccaaccagcttattcttggcttataaatttctgatagctcgtaaacgtccttttttataaaaaaaagtccttaaaaacttcgattactctgtaaatttctatctacaaacttcgacatttaaaaatgtatacttctatacgctcggccaaatttctaggctaatttaaagcaatttaacatttaaatgctattgacaccaaacaattaattcgtgtgaaaaaattaaaaagtgccaaagtcacgctttgaaacattttctgactacaaattgttttcaagattgtttgactttttaacaacatttaaaaattgcgtgctgtaagcatttcatttggacaaccacagattaacaatttatgcgaggcgcaaatgagcggtcggggtcgttttcgcgtggccattttcgcgtggccgttttcgcgtggggacgttttcgcgtgagtacctgtttaggactgaaattggtcggatttgtgcaaaacatccatg

SEQ ID NO: 112832 - DNA, 183 bp, Heterodera glycines
tttttccctatccctaccgtattttgtgatgtacagtatgcctattctcactaatctcacaaaaatttaatgcattatttatattattttattgccttttaatttgttatttttcatttccaattaaaatgcaatcctatgtatatggcgataaactaaatttagaattaatttttaaatatg

SEQ ID NO: 112833 - DNA, 236 bp, Heterodera glycines
aaaccctcgtgttgggtttatcgatattttcaataccctcgtgttgggttcgtcaactgctcgtcaaattttaataccctcgtgttgggtttttcttcatccgccttcgtccacgtttacaaattcgtctaaagcactcgtgttgtgctcgccaaacaatcttttataaaaagctcgtgttgctttatacatttggatttttttgttttatctcgtgttgataagacaaaattatg

SEQ ID NO: 112834 - DNA, 982 bp, Heterodera glycines
aagaaattttaagctcagaatagaaaagccctttagtcctcccaaagaaaaggaaaagccatgaaaaacaaaaaagaaaagaaaatcaggaaaaaaaaaaaacgaaaagccaagctataaaacgaaaagccatgaaaaaaaaaaaaaaaatcaggaaaaaaaaaaaaacgaaaagccaagctataaaacgaaaaggcatgaaaacccaaaaagaaattttaagctcagaatagaaatgccctttagttttaaaaagtaaaggaaaagccatgaaaaacaaaaaagaaaagaaaatcaggaaaaaaaacgaaaagccaagctataaaacgaaaaggcatgaaaacccaaaaagaaattttaagctcagaatagaaaagccctttagttttaaaaagaaaaggaaaagccatgaaaaacaaaaaagaaaagaaaatcaggaaaaaaacgaaaagccaagctataaaacgaaaaggcatgaaaaaaaaaagaaattttaagctaagaaaagaaaagccctcgagttttaaaaagaaaacgaaaagtcatgaaaatcaaaaagaacttttataagctaataaacgaaaagcaaacgaaaaatcatgaaaatgaaaaataaattttaagctaagaaaagaaaagcccccacccgagttttaaaaagaaaacgaaaagccaagcaataaaaaaaaataaaataaaaatagattttatagaataaaaaaaaaaaaaaggaaagcagtgcgagtatggaaaaaaggaaatgaaaaacattgaaaaataaattttaaagctaagaaaagaaaagaaaaagccgatgaaacgaaaagcgaaaagccatggaaaaataaatagcaggcgaaaaaaaagtaaacgaaaagccaaacaatgaaaaaactttgttccgcaattattctattatattgatttttttttttttttttttacagcgaaaaaaataaataaattgtattttattgtaatg

SEQ ID NO: 112835 - DNA, 427 bp, Heterodera glycines
attgggagcagtgttactccaagaaaatggcccggtggcccccccggcgagagcgttaaataaacatgagacaaattacccctctatagagagagaagcactaggattggtctattccgtcaaggaattttccccttacatcgttggatcggggacaacaaaattgataaccgattgcagtgctttgacgggaatgatgaaaacaaaagaattaaaagggaggttagaaaaatatcagataactctgcaaagctttgatttggaaattatttatcgccctggcagaaaaaacaaggtggccgattttttatcacggtacaatgtgccaggaattgattgttcaattgaaaatgaggaggaaaataaaaaccaaataattttatcggcagtagaccgaagcggggaagcaaaataaaatgaaaaaatg

SEQ ID NO: 112836 - DNA, 149 bp, Heterodera glycines
ttttctgccattttcgtcagattggtccatctctgtggcgaggtggtcacttgcgcattgctcgaccgtttcttccgccattttccccgcgttcactgtgccaatctctactcaatttccgagacccatggcaaattaattccaaaatg

SEQ ID NO: 112837 - DNA, 197 bp, Heterodera glycines
ttataatagtaaaactcccgctcatgattaaaaaaaatggaaactaataaaaaggaaaatgatctcaggcaaaaagtgaagaagatggggaagttaatgcaccaagacatcctacattctttaagacgaattaaaaatgtaaaattatatttttattttattttttcaacgatttttcaaattaatttttcactatg

SEQ ID NO: 112838 - DNA, 87 bp, Heterodera glycines
ttctcgctgcacacgtgcactatttgaaccgtggtcgcttccagcttgagctgcatccgaaagctctatcacggacgctgaaaaatg

SEQ ID NO: 112839 - DNA, 1003 bp, Heterodera glycines
tcaatgtttgccttttcttttattatttttgccgctttttcggcactttttgaacattcaattcgccgtttcatttgcttctgatcagtttctttctgagagttcgtcggaagcgaaccaatgcgaattttcacttcaaaaggtcccaggactgagcccactggtgaaaactgatcggaacggacgtttgtgccgaggagaagtcaaattgccattctgtcggggattgtgcaaaagcaaagaggtgggcaaaggacggggagggagcttaaggagcttaattcctttcccaacactttgtccacaaattgcttttctgtggcactgtgtatttgaatatttctcacttcgtttctttgtttttagtccggtacccatgcttttcctcaccgcgaacaagaaggtgcggtgcgttcgtcttccttttttgattatcattttatttcaacatttttggaccaaattcagcatatttttgtggcattgttactgacaatgcgcaaatgaaaaatgtgactttggacgaatgtgaggagggcgcggacgaagaagcgcgcctcgtgcaaatatccaccgcaacggaatgcaaatgcatcaaaatgacataatttcccgtacatttaataaagtagtttattttaattgattgaattctcaattaaatgcttttgccctttgtcgtcgcattttttcaatttaaaaataaatgacaaatgcaccttttaatctcgaaatggcaccttaatttccaaatgactgataaatacaatgaaacataaagcaatgcattttaattgcattgagtaatcgacgctcaattcagagcgaatgaatttctgacattttggtgattgttggccgaggagaagcatttaaatgaacattcaaaagcacctttcaagtcattaccataacaaatgggattgattaattgttctttgttgaatgcctaaattattcatttttattttttaattttttttattcattttaattaaagatg

SEQ ID NO: 112840 - DNA, 978 bp, Heterodera glycines
  unsure (1)..(978): unsure at all n locations
gccagggaacggatttatatgtggccaaaaaagctccaaaaatatgtgctaaaaagctcaaaaaaggccaacantatgtgccaaaaattgaaaaaaaactgtcaaaaaataagttactttctcaaaaatcacattttttatcaatttcgctagtacaattctaatcaaaaacatttcaattctttgtgacgtaaatatttttctcgcttcaaagatttatttatttttctgttttcattgataaaatttaaattttgccttaaaaatgaaaaaagtcataaaaaggtcaattcaaaaagtgcaaaaagagaaaaaactaaaatttttgtacatttttgtacatttttacaagaatttgagtgcaaaaaaagctacttttgtaaaaaaaattaaaaaaaaaatccccaaatatgtgctaaaactactgaaaaccaaaatatggtttcattttaatgaatatgcttgatgccattttcaaaaaagccgaaagacagccatattaatttataaattgaaacccactcgtaataattaagttaattttaaacaaaaaaaaatgaaaactgaaaattttcaaacaaaaaaaataaaaatatatcccaaaaatgacattttataaattaaaattatttatgacgcactatgaatttctttgatgaggatatatatatataagacaaagatgtaaaggttgcaatcattaatgctgtcaaaatggcatcggcatttggcatagatatgcttttagctgtccaattgcaacaacaaaggcaataagtgcgattgatgctctatgtccgaaacacacccattttcggaccaattaactcaccatttcccaaaccaggagaagttggacgacaaagccaatctcaacttggcggagggaagagatcggcgaatttggcacaaggcagtcaacgagggcgacacggttggacgagttgagcgagtgcaaacgagaacgaaagaagaatg

SEQ ID NO: 112841 - DNA, 132 bp, Heterodera glycines
ttgccaatccaaaagtgaattaattagagatttacaaatgctaatccgattaacctcgagattggcctatccccgagagcaatggaccaaaaaaaaaaaagatattctatttgctgacaccaattcccaatg

SEQ ID NO: 112842 - DNA, 307 bp, Heterodera glycines
acgcatgcttggatatcaatttttgacaagaaaattcgttgaaaatattttagaaattaaaatttttatatttttgatgcggtggaagcgtgggacatcgtttatccgttttagttttacaatttgtcaaacaaaaagttgggatggcttttaattgcataatcataattcagccacttcacggccaccaacactgcaacaacaacaaaatacgccttccacaagcggaacaacaacttcttgcattgtcaaaaatccgtcatcctttcacccgaaatctgcaccgcctgctgagagaaagcgcatg

SEQ ID NO: 112843 - DNA, 886 bp, Heterodera glycines
  unsure (1)..(886): unsure at all n locations
tggtgccaatagccgtcccagactttttcaactttccgagcttgcacagttgtaggattccggttgctgctgttgcagttcattggacttaaaaatgtttctggactcataaagtgcaattgcgaaatacgatttggccaaaaaaaaaacgagtccaagtttgtccgtcctccggaccttgggataatcatgtatatgttcctcgtctgtccaggatcttgttcaataaaattatggtgcataaagtcaaggatgagtgaggatggctaattgattggactcataaaagtcaattagactcacaaaatgcaattgaagcgtccttaggcctattagcccacttgggcccaaatatgccggtttacaatgaattgcctttaattatgtgccattctcttgccaacatttcttttgtttcagttcgttcatttggcacagaggacagacccgcgcctgtgcccgtgccggtaaaaattaatttttttttttaatgggcttgaaaatttaaacgaatttccgtntaaaaaatgccaggcacgcgctgaagtgtatgatttcatcatcttcaaggccagcgacatcaaggatttgatcggtttgttacttgggttgtgttgttttgcttcaaaatgttcgatggttttgcaaatttgacatttatttcaaccaattccgaatgtttaacctaaattttcaataattgcctaatctttgaatgtgccaaaaaaaaaatttagttaatcaaatgggagacccgacaatggcgctgcacattgttgcccaattattaaattaattaggaaccacaattagttaccattgccaggaacacgaaaaaaagccgagattttctggtcccgtctcttaaatgtatgtcttaaaaatg

SEQ ID NO: 112844 - DNA, 235 bp, Heterodera glycines
  unsure (1)..(235): unsure at all n locations
aaaaaaagatctaaaaaataanttggacaaatggtcaaaatcttttatcatcaggacaaaaggtcgaaaataaaaatgagggtcttaaaaaattaaattgggaaaaatgataaataatttgggacatattgccgacaaatagtaaaaatccaggaattagcgccaaaaattagtcattaagacaaatgataaaaaaaacaaccaccgacaattactaaataaaccctttcagatg

SEQ ID NO: 112845 - DNA, 67 bp, Heterodera glycines
tttaactaacaaaacgattttaagagtcataaatcattttttatccaaatacctaactccattcatg

SEQ ID NO: 112846 - DNA, 79 bp, Heterodera glycines
agtgggaccaattaacaattaattaactaattagtcaatcatttaaaatataattttttagactttgacgggacaaatg

SEQ ID NO: 112847 - DNA, 214 bp, Heterodera glycines
cctgaatttgaaaaacaataaacaaaacgccaaaaaagtttatattattactaaaatgcttaattcatttaagcagggattaattgtttatggcatttgaagcaacaatttcattttgttaataattaattacattttaaagcatttagcacaacagaaaatggcaaaaaaagttgtttatttttaaaaaaatagaaaaatccagcgccacatg

SEQ ID NO: 112848 - DNA, 643 bp, Heterodera glycines
tttatacgaggttgccgtttaaaacattggcatttgcccgcaaaaccgaggcttttcttttttaaatgaaagtgagattttaaatttgcggaaatctttcctcaaatactgtaacatttcattctgtttttcatcaataaaatgaaccaactttttaaattttagtgtgcgaaggtgggcagtgggcgagggcgtatgaaagtccagaaaataggtacaggttccggatgctttttaacttgtcattttttcagctggactaagccccggccaataagacccgaataaaaaaaaacaattattttgctgtcaatttttcaaataaattccatataaattaaatgatattattttatgaaacaaaaagataaaaaagtgatatttttgccaaatcattttattttaattttccatttttaagtttatttttttatttatttgtttttcttttttttgcgactgactttttgctcacttgaacagaaataggaattaattcaacgagaatcgaaataaaaatctccgattcgcaagtaattttccttttctttcaaatgattatttgacgcatggcggccatttaaaaagttttgtctgattttttaaaagaattaaaatcggattaatttattttattcaaatg

SEQ ID NO: 112849 - DNA, 1003 bp, Heterodera glycines
  unsure (1)..(1003): unsure at all n locations
gagaattgatttgggctattgaatgataccaagaatgtnnctaatttggttgactttgacataaggttatagccagttctttgttgaaaatttcaatttggtgttttttaaataacgacatagcaccgacccatttcatggtctaagtacgggacggagttttttacgctcatgtaaatgcgtcagtggaaaatgcgccataaaaatgcgtctgtaataagttattttaaataaacttatgtagcataaagtattgttgtacaaaaggttaaaattttgtacaacctcgttttaagtgtaattcaataaataaattttgaaaattatcaaaacccaaaggcgacaaacatactgtaactggattattgtcaatttgtaaccatatcaattaacattaccgtatcttatttcaaaattttgtttacggaagagtaaattgtaaaaaaaaattttttctttaaatccacaaatttattttgcacaaaaataaagcccttactggaaagaaattcacatgtttttaatatgaaaaattgccaacattcataaatccacacacagtttttgaagacgagacggtgcatatgccggaaacagaaaaaaatcatcaatattcatttatggatatattttttaaaaataatttataaaaaaatatcctattccacaaaatgaaaaaaaaaattgagaaaatgtgaaattattttcactataatcataagaataaaaattgtttttttttaaatttaattatcataatagaaaaatatttttagttattacatctatatttcgaatatgaaatttgaaaaattaattctattacataaggcattgtatttgagtaagtgaattaaaaaaaatatatatatatataaatattaaaaatatataaatatataaataaaataaatatatttttaaataaaagtaaatttaattattttttacattaattaattgtttgcttttaaataaagtgacgagaatcatcagcacaatg

SEQ ID NO: 112850 - DNA, 312 bp, Heterodera glycines
  unsure (1)..(312): unsure at all n locations
ttaaatttaaatntctgaattataattaattacatatttaaaatttataaatactatttttcatgaatatgattttgaaaaaatttaacaattttttttccttataatttcacagacctctggtcaactcaatagagtctgagcaagcgctatatttgaattatttgtattcgtgccaaaaaatctttccttttttggacatttcgctttttattttactaagtaaagcagccttgcaaaatgaatgtatgttttatataaatcactaaattctatttgtttttcacagttccctccggcgttctgacaatg

SEQ ID NO: 112851 - DNA, 51 bp, Heterodera glycines
  unsure (1)..(51): unsure at all n locations
ggggggcgtcaatcggtcnggtcggttgtatttcccaaagcggcgctcatg

SEQ ID NO: 112852 - DNA, 100 bp, Heterodera glycines
ggtaaaaccaaaaaaaagtaacaaatttcggaaagtgaaaattgtgccgaaatcatcagaaaaggaagtaacatgagaacataaacatagcaaaagaatg

SEQ ID NO: 112853 - DNA, 454 bp, Heterodera glycines
aggtcagaggcacaaatgaatttttattcgaagcactcttacagagagtctttaaaaacccgaaaatgtaaaacaaaaatcttaaagttaatcataattattgcttaaaaattcggtaagttaattttaaatgaatgtaaataatataaaaataaaaaaggttaaaaataaaatattacttcataaatgctaataacaagttaattgaaaaagtattcataaacttacataagtaatggcaaatatgtgaaatttagttacatgaaaaatttacttaataggaatatatgcaaaaattaataacatgctcttttataaaaccgaaaataaacaaataaataaaatatcaatctaaatatttgctttctataacaacactgaaaatttattacagcttaaagcagtataaattaaatcattattcataatattactaaagaatttactacaaatg

SEQ ID NO: 112854 - DNA, 508 bp, Heterodera glycines
gcactttcaatgtcgattttgtttgtttttttgaaaaaattgacggcatataattttttaaaatttctgttcacctacaaagaagtgtttgcgttgcgaatttttcggacctaataacaaatgcaaaggtgtatgcaaaaataaaacaaagaatatttttttaaattcagcctacacattgacattaatgctaatctcctcataattattggaagccacacatgcgacatgagcgccgagcagtggagtgtcagcgacgtgtgacccagctaaaacggcgtgcagttgagacgtggaaagcgccggctacaattcgtgtacaagtcttgcagaacacaacaacaccaatgttagctgcttttccgaataaagctgcgacaaaaaggtcaacttttcctaatttttatgccaaaatttgatttgttcatttggattttgattacgtactgccttctcacttcaagtgtgaagcgttgaacacgtatgcctcaagcgattgtcaaagatg

SEQ ID NO: 112855 - DNA, 707 bp, Heterodera glycines
acatgttaattcccgggcatgatttacgtgttaatacactgtcatgattcacgtgttaattcacggtcatgtgcgtttaatttacagtcattattcagtgtcaatttacgggttaaatcacgtatcaattcacgctcataattcaagtgtcaattcagggtcatgatttacttgtaaattcacgggcatgatttacgtgttaatacacggtcatgatttacgttttacttcacgggcatgatttacgtgttaatacacagtcattattcacgtgtcaatttaggggttaattcacgtgacaattcacagtcatgatttacgtgttaattcaaaatcatgatttatgtgttaatttacggtaatgattcaaatgttaattcccgggcatgatttacgtgttaatacacggtcgggattcacgtgttaattcacggtcatgtacgtttaatttacagtcattattcacgtgtcaatttacggcttaaagcacgtgtcaattcagctcattattcacatttcaatttacgggttaaatcacgtgtcaattcagggtcatgatttacttgtaaattcacgatcatgatttacgtgttactttacgggcatgatttacgtgttaatacacattcatgattcacgtgttaattcacggtcatgatttacatgttaattcccgggcatgatttacgtgttaatacacggtcatg

SEQ ID NO: 112856 - DNA, 75 bp, Heterodera glycines
aaaaaaaaatgaatttttgtaatgatttgtgccaatcacaatttcatttaattttcagcttcatcgaccaaaatg

SEQ ID NO: 112857 - DNA, 551 bp, Heterodera glycines
tcatttgcataaagttggtcaacaaccgtctaagcattcaatgaaaagaaagttttcgcaaggcgcacaaaattgggggaagtgtttttgaatgaaaacaaaatttcttgcccttaaaaatgaataatttttggctttttggaatagaagccggtgaaaattttatgcaaaactattgaagcaacgaatcgaaatttttaaatttacaagaaatataatgccaagttctcttgattttttttgctttcaaggacgtccttgttattcaaggacgaaccagagccggccgattttacacgtactttcattcatcatttctgttgtctttggacaatgaaaatttaagagaccaagatagacaagaaaaagctagatattttcatttgtccaataattttgattttttcatttttttttcaaaaattttggaaaaaacctaaattctttaagacacatataaaacgcagagaatgttagcgccatcctcagcctcagcagaacaaaatcacaaaatgttgatgccctccccaacaaaacatcacaaaaaaatg

SEQ ID NO: 112858 - DNA, 398 bp, Heterodera glycines
cattttaaaggttcaggattttctttaattccaatactttcgagtgtaaagaaatcagagggaattatttcagactgggtacaaaaattgatcagatgattttggggtaattgagtattaggatggggtttgccggccacaattggacccaaaagagtttgtacgaggtgatagccgcttgaaattctttgaacgggggtgggttctaactcgtaataataatcagcacctaacaaaatacaccggatgatgtcagtaagtgaatacgcttgggtttaaattgaggttttgttaaccaaaaggattttatcagaatatatccgcaggttcgacttaaagagtgtgtcatcataatctacgataaacacatcagcagaacaatatgctttctcaaaatg

SEQ ID NO: 112859 - DNA, 580 bp, Heterodera glycines
  unsure (1)..(580): unsure at all n locations
taaaatttatttatcgcaaatataatgttttttttattttttttattttntaatatntattctttaatttaaaactttttccaaaatttcctttgtcgacgaatgccatcaaaagaacaaccacaaaaatgcaagaataataaaaacgcatttttttaagaatgtttgtgtttttatatgtgatttatttttgtggaaattttctcattttatatttcccaaaatttatttgatatctttcaaaatatttatgggattttctttcacatttcgtataaaggtttatttggaaatgattacattgaaataagaaataattgcataacaaatatttgaataaattgtgatataatcaaaaattaatgaatgaataaatgaatattttagtggtttaaaaattatacaaatttgcttctttttccgtgaaccaaaaatgtaggaaaagaatcccactgaatatggggaagaagcaaaattaaaaattgaacaaaaaataattggcaaaaacattggaaattttgtcaaaaaagagacgaaaagtgaaaatattcaggaaaataacaggaaaaagataaaaatg

SEQ ID NO: 112860 - DNA, 126 bp, Heterodera glycines; identical to SEQ ID NO: 103918

SEQ ID NO: 112861 - DNA, 90 bp, Heterodera glycines
agtgcgttttcttcgctttgttttgattggcattccgtcttttttttacttttcaccttttgccttttcagtctcaaattgggcggcatg

SEQ ID NO: 112862 - DNA, 216 bp, Heterodera glycines
atttggcaaaagttcatttgtcgtttgtttcctttccccataatgccgttgtattatacgtgctaaataatgtgcctatcctttagcgtattgtctcaaacaaataaattatttttctttgtcgcttgtatcatttcgacattgcttttatttgcatatttaaatgttttttgcattgtttttctattcatttttcatcacattaagccgcaaatg

SEQ ID NO: 112863 - DNA, 562 bp, Heterodera glycines
tatgacagaaacttaacaaaaaggacaaaaattaaataagacatgtaaaaaaatatgcaaaatttcacctctaccaaaaaggggggtaatagtaaagtttatcccccccctttttcaaaaaaaaaattaaaatttttaaaagtgcttaaaaacaggttttagggggttttcggggtcgctgatcacgaatccgacatccatttcaaccaattccgaaccccggacccgaattcgaacaaaaaatcaaaatttcatttttcaccaaaatgcatatttattgcacaaaatcgatccaaacaaagaagaaaatgttctataaattgacaatactgcgcatgtttggaaataaaaataaaattaaaagcgattgaaagcctgtttttacaacggaatttcttgattaaagattaaactgcaaaaaaatgagacctatgtaggaaaaataaaacaaaagttttttttgtttatttggcgaattgttgtttgatgcaaatttcaaatatattactatttactttttatatggtcatctcccaattttggaggaaccgcttttcttatg

SEQ ID NO: 112864 - DNA, 143 bp, Heterodera glycines
accgagtactttcatcgcctacagtcgaaacgaatttccgtttttactattgaaattcacacaccatttggtgaatttgttaaatttcactggggaagttgtattcttacattacattttaagaaaagtatattttaaaaatg

SEQ ID NO: 112865 - DNA, 299 bp, Heterodera glycines
ggtaaatagtttctatttttagcattcgaatcgcaggggctgtccagtcgattgcggattcggtaacaaaggcaaagtttgtcggaactacgaaattgggcatcgatgaatgtgtgctcttccagattctacaggtttttctccctttttctgtttaatgtaatttttcgtttcagtcccttcgttctttggtcctttcgcccggcgggcgccacctaaccaatgaaacattatgcgaaattttgcagtgctgttttcgcattggtctcgagtcttcactacccgaactgcttcgaatg

SEQ ID NO: 112866 - DNA, 569 bp, Heterodera glycines
tatgagattgtagttcatgccaatgcgtttgataagttcggtttttcaattggcgtcaattcaaaaagtttgttcagcagatgctcctaattgacgacataagcgagtcccgaggtaataatcatcacttctaattagcgggggctcaaatttgaattggtaaaaattatttcattcgaaaaagataaattgtgtatgcacaaccgcgcaaatgaaaattttcatgttaaaagtcggaatgatttccaataaacgtcaattattggaagcagggaacggcacttctgtgaaaataaaatttgcaattgggctatgtttttcacctgacaaattggaatatgagactgaccgagaataaaaaaggattaattttgaataaaaattgaaaactttttgtaattttctaattattttttaatttaaaaaattttcattgttaataaaatttaatttttctagcttaagtcccggtcattcattcacctgtttctcacgtgctaattcccttaataatcattttaagattcaaaaaagcattttcttttttcagtttcctatttctcagtatg

SEQ ID NO: 112867 - DNA, 500 bp, Heterodera glycines
catgggctaaactttgacttcgagtttcgaaaactttgggtttttgaaatgcctaaaaatctctcattaaaaactttttttaagaaattattcagggtcggaggtgaccaaaagaaattttttttttcttaaaatcttgataacaaacagcataaatattcatttaaatcaaagaatgtgaacaaatttaaagtcagttaaatcattttttttacaagaaaattcgaaacaaaaaatctgtaattttttcttctttttttcgtactattttttgttaatttaaatgtatttgtttgtttacacttttatgacctttttgcgccaatttttattggacaccattctcaattcaattattttgtgtgaacaattaattgccttatttgtgcacaattttttttcctctaatttcaatggaaaatttatttttatttttcaatttcatctatttttaaattcaaaataaaactttaaatttaatttaattaagttttccaatg

SEQ ID NO: 112868 - DNA, 456 bp, Heterodera glycines
ttttttcaaaataaagaaaatgctttctgttatcgaatatatattataaaaaattgaaattaatttatttatattaaaatgaaaaattggaaataaatttcatcagtgcatataaatgaatgaacatttgctgttttgcattgaaatgttcgccttttatagggggctttggtaaccaaaagtaattaggcaaaattatgtcacccagcaattaaaattttttttcaataaataaattgatattattaaattaacgacaacaggttgaaaaagcctcacactgaataaaggaaacaaaacaacatcagaataataaataaataaataaataaaagtggaatttatttattcgtttttgaagcatttttttgaattttccaccccttcgccctgctccgctttttgcttatataacagtgaatcggcgcggtattcagtgatcaccagcggattatg

SEQ ID NO: 112869 - DNA, 61 bp, Heterodera glycines
gctgaaacagagggggaaattcgaacaacagttcgggatttctgaccaggtcggcaatatg

SEQ ID NO: 112870 - DNA, 76 bp, Heterodera glycines
tgatcagacaaatgtgtcaattccaatagatgtgatcaatgaaagtgccaattcactgatcagtccattagttatg

SEQ ID NO: 112871 - DNA, 71 bp, Heterodera glycines
tcctttcattatgcttattccattccccctccccccccactcttctacagtatgccgagttcaacgcaatg

SEQ ID NO: 112872 - DNA, 164 bp, Heterodera glycines
aatttttgttatacaaataaagaaatttgacgtttcactctttaaaaagttgattttgtaattttttaaggacatttgaaaagcgagcttgaagaattttttgtagtcacaaaactttttttgtacaacatgttcgcttttagaaatgaaattttattataatg

SEQ ID NO: 112873 - DNA, 129 bp, Heterodera glycines
ttaagtttcaaaaaagttatgacctgagaaactcaaaaaaccaatggtttttttgaatatttttggtcacaactttcttgaaacttaacgaaattttctgaaattttacatgattatagaaaacatatg

SEQ ID NO: 112874 - DNA, 349 bp, Heterodera glycines
aaatttttgggaaaaaattatttaaaaaaaatcggaatcgcaattaatcggattttgggccataatcgtaatcggttttaaaaccgtatcggatttttggccataatcggaatcggcgatttaatcggaatcggattttgtctggctcggcacatccctggtgtgcgggttggctgattgtctagcctacactccggtgcgggttagctgtctgactagcctacatgcttcactcaaattgaacaaatgtgagagttaaccaataaaatactgaaattctcctattgtttggtattatttttagtgggggggggggggtgtagttctgattattaatgcttaattaatg

SEQ ID NO: 112875 - DNA, 762 bp, Heterodera glycines
tgctttttaatgggggggggtaatcgtaattttttaattatttttaaattgctttagaaattttttataatttatttttatttgtttcccacttatttgggtctatttttatttactttaattaatataattgttttttaaattattttttattttttcgccaattttccatttaattatttttatgcagcttttataacacaaatcagaaaaattctgattattcggatcacgactgaataattagaagtattgctggtagtttccgcaacgtttcaggattgttccttaaccggatttattcatgtgcaaaacagtaccggaagcataactggagttaaaatttaagaattagtcaaaaaccgaattagcctcctgaaaaaagttgcaaaaacttgaaaatgttaaaactttaaggttcggaaacccatttaaaatttttctttgtcccccgcaacaatattttggtcaactgcataattatatttattgcttaaattttgtaaatttaatttttgtttaaaatttatttttgagaatatttactatttttaaaatattttcgaaattatttttaaagtttaaaatatggaacaaaagtttaatcaaaatgaacctaaaacaacgaatgcagaaaaaataaaggtattttgttaaaaaaaaataaaattgaatcaattatgattttaattttataaaaattaataaatattattaattaatttgtgcttttaaatattttgtaaggttgcaacagaaatg

SEQ ID NO: 112876 - DNA, 85 bp, Heterodera glycines
ttcaaattgccgggttgcggatcgcggtcacgctccacccctggtaagaaatttaaaagcgaaattccgacattaaagcagaatg

SEQ ID NO: 112877 - DNA, 768 bp, Heterodera glycines
ctcacgtaaaaactggattttttcaaagagaacaatttcccttgattttttgtgttatgaaaaaatcccaaaaatttctgggtaaatttaaaattgccaaaatttctatacaaactttgtacatttatttcctagaaaatttttgctcacaaattgcctaataaatgcgattacaatttttgtttgaaaagtattattttgttccctattcatattgtgtgtagtgtttatttgattaaagaaataaataaatttttacttctctatgattgctgagggtaacaaaaacaaattaaaaggaaatacaatatctaattagtgttggcagtcgacataatcaataaatatattttcgcgcaatttatcacttccggtggcatcatccgatgatttatgattaattaataaaatataaatttaaaaaaatattttatgttttagcatgtttaatagtttttcgatcgtatagaaaattgtacacccataataatcgcctgaaaaaattttagaaaattacacccctatgaattgaaaaaaatttttcaaaaattgattcccgaaaattttttttttcttggtaaaaatttgtattcaaaaaattttttaaaatattatttaattttatttacaattaagatataatccaaattaagtgttttagttaactttttacgttgttttgttaccaaaaaagcgttaataaaaaattttatttgcttattttagtgcatatttcgcgattttttcagcagaggatagcgtaaaatg

SEQ ID NO: 112878 - DNA, 154 bp, Heterodera glycines
actgaaaaccctgattttatattaaatgatcattttttcaaaaaagagtaattttggccacttgtaatggacggggggtggattttgtttcgaaatagttaattttcatgattttttgtaattaaatgttccgagaatttcggagtcattaatg

SEQ ID NO: 112879 - DNA, 301 bp, Heterodera glycines
ggtatgccaatggtggcgcatcagattatccgattcccgaattttgaatctgaagcatctctatgaaggcactttggtatcacggcgctgtaggcgaatttcatgggaaggccaatcaacctagtgtgaggcaaccccaatggaaaatttcaaaaaaatatggaaaatgccaatgaaatttgttcccctcggtcccttggttttggcgagaaaagaaacatataatttaaaaaaaaactcatttacataggagctcagctcgaggacacttacaccttggaccattacggcattcagaatg

SEQ ID NO: 112880 - DNA, 514 bp, Heterodera glycines
ttaattttctgtcacagcgttttcaaaacgatcagctgcgcacaaactgaattccatcgtcaaatcggcggagtgcactcgccgacggacatttgccgtaattaaaatttaatttaaaataaaaaatagaacttttttaaattaatgaacttcaattaaaaaaacgaaccaaattttgctgttttttgtaaatatttctttttttcatttcactattcaaatcttttagcaagttcagccaagtgtttaataaatttctcaaaaatcatacaaatttctgtgattggcaaataaaaggtccacaaaaaaatgtgtccacaaaatttgaattaaatgttttttttgaattttcaaataaatttattttttcatttttccaggcaatttttgttgcgattttctgatgaacgtggaaggcccaaccaaagacacagagtgttcccgaaaatgtgccaaagcatcgtttgccattggcacatccatcaaaaaacagctgagggacttgcggaggatg

SEQ ID NO: 112881 - DNA, 73 bp, Heterodera glycines
gttcaccatctttcgggtctcagcgcatacgctctgtctccgccccatcgcatgcgatcgagacgggactatg

SEQ ID NO: 112882 - DNA, 247 bp, Heterodera glycines
  unsure (1)..(247): unsure at all n locations
tttaaagaaaattttaaattcaatgatttatcctatgtctgctaagaatacgggattngaagaatatagtaggaccttatggaagggttgttagtgaaagtgnaagatanaaataggtatatgatggtttgaaattttgtttaaaattttaagtaaaataaaagagattgttttgtgtaaaaagagatttgatattaggtttatgtattaatagagataaagaaatagtatgtnaaaatgagagatg

SEQ ID NO: 112883 - DNA, 1003 bp, Heterodera glycines
aagaaacgcccaaagtggcggttttaagaaacgcccacctggcggttttaagaaacgccctggcggttttaagaaacgccctggcggttttaagaaacgcccaatgtggcggtttttaagaaacgacctagcaccgaattaaattacctcaaaacaaagattctttattttatatattcatccgtttaattcgttgaagacaaattaagaaagataaagaaatatttcaaaatccaagaaagaaatccgaaaattagcgacaaaaataattgataataaattgcaaattggctatggaacgctaagaatttggaaaaagaaattttcttaagttttggagagtaattctcgagggtgttaatttaacttccctggttttcttttagcacctataacttgaacgaaaattacttcagcaaatctcttaaaattaaaagatataacatttaataacaaattttaatttaaaaaaatataaaatattttgaagaattgatttaattgttcggtttacgtggcagattaatatttgtaaagataaataaaatgagatacttttccgttttggggccaaagctgattatttttttttaaatcaacagcaagctaatagaattgcagatccattcgaagagatattaactcaaattatggcatttatgcctcagaaataatttggtgagtagctttagcaattctccgcgccctctgttgattaaaaaaataaataaataaataaaataattttggccccaaaacggaaaagtacctaaaatgaatattaacattaaatatattcatttgaaggaataaattcataaatttttttatatatatattaataaatatcctaagattatgtggcatttaatgatattttttacaattttctttgattttggaattgaatccggcaaaatccgaacaaattttaatgaaatattcggcgaagaatgggacaaaaatgaatgtgaagaaattttgataaaaactgaacgaaatg

SEQ ID NO: 112884 - DNA, 597 bp, Heterodera glycines
ttgttttcatcttcagttttgggtggtcaaattatttaatcggtttttgcttaagcatttaaattgttcaactaaattttcttcaattaaaggcccactcattaaatcaataattaattattatttattaattgctttaattgttttatttattgctcacattttgctcctccgctctgttgaaaatcagctttctcccacttagcaatgcctttggtgcctttttccgctgttttgcgcgttttgcgtccaaaatgaaagtcggactttcgcaatgggacaccggcgaccgcggggatgtcgcagtgcgactgccgaggccattttttggcccgacgaagcgcaaaaaacgccgaaagtgcgcactcgcagcgcgacgcattgagtcgtggaaactgggaataattaaataaattacatcaatttgtaaactaattattaattaatgtcaccaaatggccgccatcggaataaggttaaggccaacggcgagcacaaagtcaaatgcctgtgaatattcgacgttgaaatggtctttgttgtaggcaattcgcagcataacaaaatcgaacagcaaattgctgaagcgaaaaaatg

SEQ ID NO: 112885 - DNA, 354 bp, Heterodera glycines
ttttaatatttcaatgaatttcttttgatgataaatttcaaaaattttatttttcttttcaagaactaacccaattttagaggccaatatttatattgaggaccctgacatttggggcccaacaataattattgttagctcatatttattgctccccaattcgctgagaaaatgaaaatataataaatgaattatataaaaaaatggtgtatcttattgatcatataatgattaaaattgttaagaattgattgaataatttagccaggctataaaattaataattacaaaattcattgcgtaaaatattttttttaataaaaataattcattaaatttttataaaaaatcatg

SEQ ID NO: 112886 - DNA, 789 bp, Heterodera glycines
gcaaatgatggtagctgaaccatttctagtccagtttaggtcccatatttggcttactaaaattttatttcgacataaaacacttgccataggggtttcatgatagtttatcattgataggcactcatggcttcatatcgtttcgctacaagtcgtttcgtctactaatagtaaaatggatacttttaagaccgtccttcgttcaacaactttaagaattgagtctaaaattttattgttcttcgatggagaccatatttaaaaaatgaacaaaagcaatctgtgatcacaagaaaaaattgtgacaataatgaaaaatttgagacgatttttgttaaagatttaatttgggttttgaaagttgaggtaagaaattatcactattcatcgattctttatccttcctatggcaggccttactcacctcaattgggtacaatttcaaagcgaaatgacgcattttcattgagttgtcgagacgacttgtagccaaatgactgaccgattcatttaattccgattctcatgacccgaaactcgaacaaaaagtcgcaaaattccactttttcggtgtcttatgctatcattcatcttgtaaaggtctgtttgttgtaacagttctcccctcccctgcttcacagagaggaagcggaaaaccgggcacagaacgagaaggagcgcaaagaacacctggactgcttggtcaagttgttgcccaccgaaccagatgagagcgagccggaagtgattacaatccgtcttcgcttcccaaacggtcaagccaagatg

SEQ ID NO: 112887 - DNA, 372 bp, Heterodera glycines
agtaagagtaaagattaaataattgaataatctaatttaaatgtaattttttcaactttttcatagtgaaatttgacttttttttttgccggcggtgtcaaaccgccagggaaaattttgaaagtttagttgcgagatttgtaaacagattttcaccaaaaatattaattttggatcaaattttaatttctaaattcggatcgttaaaatcagtgcaaataaaaataagtacacttggaagcatgacgaaatttttcgtatcttaatttaatctcggcaatcgggcaatcgaagtcggcattccgtcacatccttggttaaaaagaaaaataaaattggaaaggaaaacggatggaaaaaggaagagaaatg

SEQ ID NO: 112888 - DNA, 1003 bp, Heterodera glycines
cttttgaagtgttgttgttgttgcacaatgaagggatgatgatgataaacgcaaatagttgtgttctaaaaaatgaaaaagcataaaaacataaataatgaaatgaattataaattttaaaaatagggaaaagcaattttttgggtttttttgattaaattccaagtttagattgtccagcaggaaaattctgtgagaaacagtcaattttgattgaaaaaacaattggaaaaattcgggttaattatattttgcgtactctgtaacacaaaaaattaaatcagaacattaaggactgaatagaggagggaacaagtaagcaaagcatataggcgtaatgcaaaaaatgtcagtccaatgagaaaaacacctccttatatagagagaaaaccttggaatttgggcaatggtacctacctacgttactacctaacttttgccctcccttgttgcgtcgtactataaatattgtgcccccttttcctcccttttcattcactcatttttcttttatgagtgttttactatgttttttgtgaatttcataaacttcactgtttcaaaaagacatatttcttatcttaaccagtaaatacccaacccgaattccaaaaattatcgacatcgacctgaaagtttatcagagtttccctggcctatactaccaaatttgaacctaaatttatcaaatttttttttacaaaaactgcaatttccctatttttaaatttataattcatttcattatgtattgtttttatgttttttccttttttagaacagaactatttgcgtttatcatcatcatcccttcattgtgcaataacaacaacacttcaaaagcgacctcatcgccgtttctcatcgttcattcgtccgtccgtccttcacatcaattcgctcgccgttttcgcaatggcacgtcgacgcatccaaaaggtggcaaatgacaactctctgatcaaccaatgctttaaatgttttgatccatttgcaggaaatg

SEQ ID NO: 112889 - DNA, 103 bp, Heterodera glycines
ggtaaccccttaaaatggattaatcgcttcgctaaggctttctctttaattgtttccctgttcagggcccgtttgtcgttctgtggaaatgcttgtccaaatg

SEQ ID NO: 112890 - DNA, 242 bp, Heterodera glycines
  unsure (1)..(242): unsure at all n locations
ttaaagtagattttatatctgctaaattaaaaaccaatcataggagttcaggtaggcaatcaacccttctctattctttaacnaaaaattntnagggatgcgcatttcacggtcgttatttcggaaaaaattttttttataaaatataaattttaggttgcccaaaatgctttaaatcattccatgtttgtcccaatggaaatacggctgaggaaaattttttgaagacgggaaacagaatg

SEQ ID NO: 112891 - DNA, 846 bp, Heterodera glycines
  unsure (1)..(846): unsure at all n locations
agctaactaatcctagtcttttagttataaaataatgattagatatatgaaaaaaacatattatttttgtaaattagatattagatgttcctaagcattattaaaaaacctaggcccaggcctggatccaggcctcaaagagccaggatttttttctggacctcgctttttgtccaggaaatncaggtccaggtctaacatggaattccaggtccaggctcaggcttttttcaataagtcggtctttactaattttttaagccattagattgaggacaaattttgattaatatacatgagaattcaacaggttcttggtccatcaatttaaataaatatttttttttaactttattttttgggataaaaattcttttttgataaaatttccaattttctgtgtttttttttttacatttttatgacttatttcagcgccctggcaacggtgaatttgggaagaaacatgcaatttttttttgcgttaattcataggttatcatcataaaaaacacacattttttgaacttccttcctttatctttttaattcaaaaaacttaaaaacattaaaatgaattttcttttaaaaattaaattaattaaaataatcaaataataacaattaaattttcttttctttttatttcatttaaatagtttttaatattacaaaattttaaataaccaattaaattaaatgaacccaaataaaatgaaatgtctttttcattatttaacaatttttcacttgccttaattaaaaatattaactatcattttatagaaaaattttttttttattttgattttagtttctctagctccattccctagcatgaaaatg

SEQ ID NO: 112892 - DNA, 396 bp, Heterodera glycines; identical to SEQ ID NO: 109417

SEQ ID NO: 112893 - DNA, 117 bp, Heterodera glycines
tttatattattattcatcattttttcatgcacatttcaaaggcaataacatcagtgagttaaataatcaaggtaattaatttgtctaatcatttttaattagggagaagacaaaatg

SEQ ID NO: 112894 - DNA, 1003 bp, Heterodera glycines
gcacgaaaacattcattttcttcatcaaactttagtttttcatgacgaatttcggtttcgattttttattttgttttatttcggacggtaattgcctatttttgagtccgaatttaacaaaagaaaaagtcgtagagttttcagtccgctgactggccagcagggctaaaaatttaattcatagaaatggagagcctgtattacgattcttcaaattaattaaatgaattttgtttttgtttatttttctcaagaatccttcccttttcttcactttctcgaggctttaatcgcggctttttcatcaattttctcataagtcctggtttttctttaccattgcatttcacatacagtacatacctggcaaatttcgttttatttgaattgaatttcttaattttccttttttttgccattttcataaattcggaggaactaaatttttccaagggtttgtctgtgtttgaatgattcattgaattgggcggattctgctgcagtttcccaatttgctttttcttcttaactgttttcattaattaaatttataattaattaattaattatttttccattttctaattagtgtcaattaaatgattgcctctttctttctttgtcattcattacaaaaattcattttctttactgcacaaattttgtgccctttttttttacttcgtttccattcgctaattaagccaaaaaatgatatttttgctaaaccgtgcgatgcgacgtgaaaactgctcaaaaactggtccgtccgtcccccgaccgtccgattgacctccaaaacttcgacaattaattggccgagccccccccccccccccctccccaaatttcgtcccgcccaatggtccattaaaacatataaaatgtgcgagaatcagttcctttgcacatcatttactaattattttctaattaattgtttaatttaattatttttaaatcattgagttaattttcagttccatttttaggtcagaaaatg

SEQ ID NO: 112895 - DNA, 818 bp, Heterodera glycines
  unsure (1)..(818): unsure at all n locations
ataggacagacaattaaaaatttggcactagtacagttggtacgccaaaaaatggttttaaaatcatataaaaaatgtttctagagtttccgggggcgttgattatgaatccgatctcaatttctactaattcagagttcctgactcaaattcgaacatttggtcgaaaatcaaaaaaattttcatgaaagttgaagcagtgaaattattaanatggtccatttcagtggaatagctgttctttaaattttntagctaatcaattgacgtaaaaaaaccctataanatatttttatacgagtttaaaacaattttttgtgggcgtaccaactgcaactagtaccaaaattttccatcctttggcactttaagagtcaaattttgactttttaactgaaaaatttttaccacaaaatttcggtttcaaaatttaagacgcagaaaaagtaatgcctcaatttcttgtgtacacttcgctaaattcaactcattagtcatgagattgcaaattcataatttgggttctttttagacctccccatcacgatgtgacattttgggcaatgattgtgagccggtcagagatttgttgcgaaaggcggaggccttggttcgctgctgttctccatgcgtatgccggcacccatccgaacttgtaaaaataactttatttactaaattataacatttttagtcccggaaaatagagaccgaatctttatatgatacaaatcctgaaatatttaacagaatatgtgccaaaaatgatgcaatttgtgctaaaaccaaaaaatgtgcgaaaatatatgctcaaaatg

SEQ ID NO: 112896 - DNA, 175 bp, Heterodera glycines
agttgagagtgacgcgaactgttcaattttggttggaaatgaccaattgctttgttacgatatccaaattgggtggaaattcttttggttacgttttgccattggtctcaaaaagatttgtttgtgcttttcttcgttcaattccccttcctttctcatcagagtttatcggatg

SEQ ID NO: 112897 - DNA, 379 bp, Heterodera glycines
ttgtcatgaaataatttaagatcttaaaggcagtaaaaataaagagaaaatgagtcattagcagtcaaccaatctaatcgaatttaaagcatatgaaaaagacacgaaaagcattaattaagaaagaaaccgtgatggttttaggtcaagagctaacaaataaatgaataagccgaacgaaaaccggaatttttaaaatttattttgttggcattatgtttatattttattttggcatcacctagccacagttttccgacaaagtttgagcaaaatcgtttaggtacctaattactgaattgcttttctcttttatattaccgccgctatgagttcaaaatttatttttaggtataagagaacaacagtattaattatg

SEQ ID NO: 112898 - DNA, 199 bp, Heterodera glycines
aaattttaaaattattttcgaaaaaattaatagagactacgaatcaaatatcctagagttgaaaaatttttaaaaattttcttaattaaatttttgtaataaaatggcgctggaacaaaaaccgaatggtttgattcatttaaaaaattttaaaaattattaaaattaaatttaaaaattggaaattttacagcaaatg

SEQ ID NO: 112899 - DNA, 1003 bp, Heterodera glycines
gtggtttttctgattttattttaattttatagctgttctctgtacatttcattgtgtgttcattttcttaatttttccgctcattttgtcacttaattaggtaattaggtgggctgactgattcttcaaatacaaatatatttaataaaaaatattcaaaaataattaattaattatttataatttaatgcttttttgcctttttatatttgtattgttaatcataaacaattcaacggacaaaacattgtcagttaatctttgtaaaaaacttcggccaacttttactgaaatatttggcgaaaaatgggcaaatgaaataattggagaaaatgaaaaaaaatttttcttttccgtcaccgtataaatatttcgatgtgacagaacattgaccaaaaaacatgcttgagtaattaaacgcaatcaaaataaatattattagtgttttttgcttgtcttcgtgtctgtcgcgcctaattaccctccccccccccggcgattgttttgtgactgacaaataattgtaaaaattttatgatttatataaatttaaattttttaggctttaggctctaaaaagaaaaacctagaaaataggccctaataactcgaaaagtaccttaacaaccaccaaaaaacaacaacaacttgtttttcgtgtatttcagaccatagggagctcagcaaataaaaattgaagccctagtgatgaagtgtgaaaacatccaatgggacgtaattacgaaatggcatttgaaattatgatgaaattcatggctttaattattttaatattatttattaatattttattattaagaaaatctattgatgatcagtttcacttattgatcgcatttttggcaatgcttctccacattcattaaaaattaaataaaaaattattttccgaagaaattagcttaattttaatacaaatatatatatattaaaaatattaaaaacttattaattaattaattatttattttttttagtgatg

SEQ ID NO: 112900 - DNA, 144 bp, Heterodera glycines
  unsure (1)..(144): unsure at all n locations
tcttaaaaataacaaaatttattcgcaaatttttaaaaaaacgataaattgtaagacaaatggacaaattccgggtttattgtacgttttatatggttttattttattttaaaaatttccaattanagaggcatgaaaaaaatg

SEQ ID NO: 112901 - DNA, 328 bp, Heterodera glycines
agagaaaagaccgaaggtggaagagagagaaggtggagggaagagagagagagagaagagagagagatggaggagagagagaggagagagatagagagagatggagaggagagagagaggaagtgagtagagtggaacgagaggagagataaaggagagagagggagagagcgagaaagagaaaccgcgatttttcttgagaaacttcactctcgaataaaaaccatgcctaattaagcagtttctgcctgccgtttcggccgccggcttattccaaacccaaacggctggcggcaacgctttgttcaatgcgggcgcaaccgcgatg

SEQ ID NO: 112902 - DNA, 510 bp, Heterodera glycines
aaatgcgcattttcggtaactaaatacaattgtaaaagtcaattaaaaatgcgcattttcggtaactaaatacaattgtaaaatgtcaaatgaaaaggcgcattttcggtaactaaatacaattgtaaaatgtcaaatgaaaaggcgcattttcggtaaccaaatacaattgtaaaatatcaaatgaaaaggcgcattttcggtaactaaatacaattgtaaaatgtcaaatgaaaaggcgcattttcacgtcactaaatacaattgtaaaatatcaaatggaaaggcgtatttttcgataacaaattacaattgtaaaagtcaattaaaaatgcacattttcggtaactaaatacaattgtaaaatgtcaaatgaaaaggcgcattttcacgtcactaaatacaattgtaaaatatcaaatggaaaggcgtatttttcgataacaaattacaattgtaaaagtcaattaaaaatgcgcattttcggtaactaaatacaattgtaaaatg

SEQ ID NO: 112903 - DNA, 141 bp, Heterodera glycines
tggtgatagcagttgattcggcagtatatgattcaaatggagatacattcgacccaggaagagcagctgaagatcggtccctcctggcagctttgaagtttcctctatcaattcaaaattgtccaattgttttgctgaatg

SEQ ID NO: 112904 - DNA, 422 bp, Heterodera glycines
  unsure (1)..(422): unsure at all n locations
ggaaaaaaataaattttagagagaaaatctggtgacaaaatatgaaaattnagctcgattttcctaaacagaccttgtcaaggtttcaccgggcgacacttctcggaaccgtcgaacaattctcttaaataaaaaagacactttcgggccaaaattgaggaaaaaacgcaatttgtgctccgacgtggcctaatttagcaaaataaccacaaaaaaaaatgtctgggacgaaaatcagaaaaagtccgtcgtgcccccaccccccgttttttaaatttacggtgctaacatttgttgtacatcctttttgtttgcgtaatttcagtctcattttctccgaccttcgccttttgttgccgggcgacgagcaaaacttggcggaatatcccatcagactgtacgactcggtccaccaaaaaatg

SEQ ID NO: 112905 - DNA, 392 bp, Heterodera glycines
  unsure (1)..(392): unsure at all n locations
ctgaggcccgtggagcatatgcaactcagagtacngagcagtacttctggacacnccgaaggaacgtcgtttggaggtgttttttattgacaaataaattcaattcaanaggggtgatatgattaatatttttataaattaaagcatttcgatgctctgaaaactccgcaggaatgctttcacattattttttcgttcagggcgattggtcacccgtcgggtcgacttgtactttatgtgctcctccgtcagctccacaaaacctacggctgtcatcagaattcgacattgctgtggggagcggggaaagcagttcaaaggcaacgacagcattccacgaagacggccaatggcactccgttggcatttgttgggaagccccggcgcaaatg

SEQ ID NO: 112906 - DNA, 783 bp, Heterodera glycines
  unsure (1)..(783): unsure at all n locations
atagccgacgccacaacgccgctaccctgatcgccgacagcaaccacctgtgcgatactcgccccgttgagatcatttaaaaggggaggtgtttgggtggtcaaccccgagagataaaagtacacaaatgcattcattctccctttgcatgtgtctatttcttttcctctccattttccncactctctaattagtgtgtcttcctttttttatgtacgaccctattgatttattatgtccattgcatgtcctttcccctcattcattcagttgctttttatgcacttatttcacttcgcctaaatatttgttctcctccaatttatttattccgcttccgacttcgcatatttatttaaattgcttaatttatttgttctacaaataaacttttattgagtcggttcaaagggtgtaccgacatttcgccaacttgacatctcgccaactgacatctcgccaacttgacatctcgccaactgacatctcgccaactgacatttcgccaactcagccaaaaacattcatttcgccaactcaaccaaaaacattcataaaaaaattaaagaaaaaaagtaaaaagagtaaaaaaatgctgtgttaatatcaaatacagccctattccagtttacacgtccaatcagtgaccatcatcatttcttatgtactaacttttttcatatttgttcattccaaccatttttggatcaatcaaagcttaagaattcctttcacttttttataatttcgtttctagcgtaattcagattctagcaagaaatg

SEQ ID NO: 112907 - DNA, 1003 bp, Heterodera glycines
attgaatttataattatcaaattgaatttataattattcaaattgaatttataattatcaaattgaatttataattattcaaattgaatttataattatcaaattgaatttataattattcaaattgaatttataattatcaaattgaatttataattattcaaattgaatttataattatcaaattgaatttataattattcaaattgaatttataattatcaaattgaatttataattattcaaattgaatttataattatcaaattgaatttataattattcaaattgaatttataattatcaaattgaatttataattattcaaattgaatttataattattttcaaaattgcgtcaggaccaatcaactcaactaggtgatgatgaaatccatttttcaataaaaattttttattttcgttgaaagctttttttgataatttaaaaaagggtttttaaagtttgtcttttaaaaggtagattttttaaaatacttatttgtattttcttttgaattgcgaaaaacttagatttttgaaaaagctagcgtttttttttaaatttttgaccattttccatattgagagtcccaatttattattttttttaaagtagaatttttgattttttcccattgtgagttgtcggtcctaaaagcctatttgtccctggagccgagttggcctcagatttgtcaaaattatttttaattttttagagaatttctatcgatgcagtccgaaagcaattagccgcaattgaaaagagttcgttttgcttaatttttggctgaaaatatgtcactcactattcgtcactatttcggaatttttgccactatttcttcactattttggcatttttactcactattttagttaactattttgggatttttcgtcactaaaagttgcttcactagtaattacctagttcgaattctgtactttaccaataatttttctattttaagcattttttttgttgttgcagaaaatg

SEQ ID NO: 112908 - DNA, 137 bp, Heterodera glycines
ttccaaaaccatgcacatcaccttcatcggtggtgactggtgctgtgtgtcgatggacagctgggccgaaggcagtttccggttggtgacaagctcacgcgctctgctgatctcctccagtgtacggcttggaaatg

SEQ ID NO: 112909 - DNA, 1003 bp, Heterodera glycines
ttaatgaaataaataaatgaattagtgatgatgatgagcataattaggttgttggacaattaattgcccgcccattattaattgatttgcgggatacgaggaacaacggcagcagcaggtggttattgggtcactcagtcataataactattattatattatttattttttgaaaaatgcaagattataaaagtttttttccttagagaactttgcagattaatttcgttatattctacgatactgtatttcttaagatggtgataatgctttacagtacacgcactaccatatttgattggtataacttattaaaaagagtaaatatctaaatttaggacggcttcttatgacgcaaaaataaaagctggaccgttttctttattatttattgaacacagaatttatattataattattattataattcaatagggttggtcgggaccgggaatttttggcaaaacagggacttcggtactcagttgcccgtgtccaggtcccggtcccgtacaattctataattcaataaccaatcaatgttaatttaggaaacctttattaaatttgcaacaaataaaatttgaaatgacaaaattttggcattgtgatggcaaagtggtgaaagaatttgaaatggcaaaatgttggcattgtgttcgcaaaactggaaaaagatttgaaatgacaaatttggcattgtgttggaaaagtggggaaagaatttgaaatgacaaaatgttggcattgtgttcgaaaaactggaaaaagatttgaaatgacaaatttggcattgtgttggcaaagtggggaaagaatttgaaatggcaaaatgttagcattgtgttcgcaaactggaaaaagatttgaaatgacaaatttggcattgtgttggcattgtggtgaaagaatttgaaatggcaaattgttggcattgtgctcgcaaaactggaaaaagatttgaaatgacaaatttggcattgtgatgaaagaattttaaatg

SEQ ID NO: 112910 - DNA, 90 bp, Heterodera glycines
ttttcaattcaaattaaattttataaacaaaaagatggacaaaacaatgtcgaaaaagatgcgaaactggtgaacattgtctgtgaaatg

SEQ ID NO: 112911 - DNA, 864 bp, Heterodera glycines
aaaatttttaggtcgattcttaggggtgtattttttggttttattgcatttttgttaaagaattttccaaaaaatgtcgaaatagtgacaaaacgccaaaatagtgatttttaactattttagtgccgactcgtcgccaaaatagtgatttctagtgaccgataatgacatcagaatcgaaaatttttaatgcagaaatgcgttttttgagctcctttcttcaaatcaatcgagcaaaaaatttagttaaaacctaaaattcacagccctaattatgtcttcccttcattcatttgcattttatatttgttccccaagttatttgtgactttctttccttctccaagaaattaaatatttaattggacacaccgtttcataaaacgagatgtgtaccaataaatagagagtgccagagaaaaacattatcttttttctctaattttttgtctccttttggcgtactatctaatatttttattattaggaaaaacaacatttacttcgaacagcataacttttttttcctcaggcagaatttcttttaattttgtataccgatagagaaaaaaatatagaattgttcaatcgcttttttaaagaaaacaatcgcttttatttaacttaaattttaattttaaagcaaaatttaattaaatggcaaaaagaaaaattgtgtgcaagcttaatgcaattaaatcggcacaaaaacgggtgaaaaatcgagagcagcgacaggccaatattgcgagggccagagaaacccgatggactaagaaaagcgagttttttcagcaatttaaactcaaaaaatcatttctttgagtttcagccactccacagtcgaaccccaatgccgaaatg

SEQ ID NO: 112912 - DNA, 761 bp, Heterodera glycines
gaaaaacctatcatgaatttttacaactaaaatttccataaaattttccctcaaaaattcacccgctaaaaactcccaatttatttaattggctcaatttgcattccgtcaaatgatgaagcaaagcaaaaaataatcataatgatatgttactaaaaataatttccgatttctctccgtctcatttctaattagcctaattaattcttaaaccgtacaaaattcagacagcaaacacttctcattaagacaaacacacaaattatttgtaaataaacattattttgagtaaatatttttttgattttattgctctgctgtcaaataataaattaactcgtcgataataaatcattacatttcattgagaattgtctttctttttaggtcgtttttttcaaaaatttattttttaatttaaacccattttttaagagataatccctcggataacacatattattgatagttttttttatatatgccaaagaatattaaacgccattttacaacggtcgccgtttgcgacttaaacaccaattctaattcaaatgaatttaaagaggccgatttggaaacgtcgaattggcttgtcaacctatttgaacgcttgtaatattttaaaaatgagttcaaattccaatttttttttcgttttggggtaaaattttcaaaattacaaaaaaaaaaaaattaggcctgatttcgcctttcaaagaggttattatattgcttacaaaggcctcaatctgctttcaatg

SEQ ID NO: 112913 - DNA, 279 bp, Heterodera glycines
agctgcctcaggcgggcggcgacgcttcctcttgctcaattctcaacggcattcttctcggattggaagcattttccgagcagacggcgctgcagcggaaagctgcggacaaaatgtgtgtggactttgagtggtcgcttatatattggacagcttgaattgagattgcgaagtgctggaaggactgcttcaagccagaagaatgtcgcggaggccaacaaagggaccgaatcgacggagactgaagggaaatcagagacgacggactccaatcagatg

SEQ ID NO: 112914 - DNA, 82 bp, Heterodera glycines
acttaaaatttaatgagttcaaatattttaattaatttccatttcaaaaaattatattttttaaagatctgataacaaaatg

SEQ ID NO: 112915 - DNA, 102 bp, Heterodera glycines
ttttttatcataaataatttatgcctgtgcaagacactgacaaattttttcagatttttgaccattggcgccaaaaaacactttatagcgtgcgccaaaatg

SEQ ID NO: 112916 - DNA, 131 bp, Heterodera glycines
ggtaatgatggactaatggatcaaatccattgccaaattagccaattaacttattttatttagtttagttattttatgttttccgccttttagatgagtgtgcccatagcctcggcttcgtccgtgccatg

SEQ ID NO: 112917 - DNA, 356 bp, Heterodera glycines
  unsure (1)..(356): unsure at all n locations
agtatttgtgttattttttaatgattaaagagtgagtttgttttgaattgtttaatttaatttgaaaaaattttaataaaaatgggagttagaaaaaatgattggaggagaaatgggagaaggagaaaagatggangtaatattttatttgttagattttatttaaagttttattgaggtttttgaaaaaaaattttttggggtattttggggtatgaaagaaaaaattttaaaagatttttgtttgaatttagttattttgtagaaaaattagaaaatgttggatttcgatttggagtcgtttttaaatgaatttttcggtgcccattcccctaagctcgatttgtttcaggatg

SEQ ID NO: 112918 - DNA, 179 bp, Heterodera glycines
aggcatattattaaaatgatttgatttttaaatgttgagaaattatcacttaaattaaaaaaatatgtattttttacattttactcgtaggtaaattattttaccgtcacctgttcattactcattttcaaaaacacaaatttattttttgaaaattcattgttcgtggttgcgaaatg

SEQ ID NO: 112919 - DNA, 104 bp, Heterodera glycines
aattagtgcattatttaatggcaaaactcgccaacaacttctattcaaatttttttaatttttaaaattattttctaatcattaatatttaattcctaattatg

SEQ ID NO: 112920 - DNA, 261 bp, Heterodera glycines
ttctgacgactaaaaaattttggcaatcggaattccggtggactcaaaaaatttcggaaatcgtaagtccgagcccaaaaattataggaaatcggcattccgacacatcagtgttactatgaatgtttatacctttttatggttctcaaaagaaaaaaaagttatgatccaaaaactcgcttccggcgattttttgtcctctgttccgaaatagaagcttgctccatatgaaaaagcgcatttgtttaagtgtacaagatg

SEQ ID NO: 112921 - DNA, 53 bp, Heterodera glycines
aaattttgtaaaaccaaaaaaaaaaaaagaaaattttgtccaaattaaagatg

SEQ ID NO: 112922 - DNA, 217 bp, Heterodera glycines
agacctgaccttaaatcggcaaaaatcggatatggaagtttgacctactttctggcccttttcttattatgtccagttcttgaaaacagagatttgacctcgagacccagtctgattatcaaaaccgagaccatagaccaaaaccgtgagaccggagactgcagcaaaaaacacgattcttttaatccacccccccccccccccctctgcacagatg

SEQ ID NO: 112923 - DNA, 390 bp, Heterodera glycines
aatgccgaaatgtcttgtttccgccgattttgacgtctttcttgaagccatttattaaaatagatcaaaaaatttttaccttaaaaacgatttcaactgccatattcgtgatcagtatggattcatttttaggcacaaaaaatcgcgataggcacaataaaaaggcagaaaaaatcgcattctgaatctatttcgaccaattccggattcggaaaatccaatctcgaaaacttattcttattcagaaaatttttgtcattctgtttgttgcaattttcaaaaaatgtaatgcggattcctcttgatcccgctcaaacctacgatattaattttttagatattagatactttttatccattttcacataaatactctcttacttcaaaatg

SEQ ID NO: 112924 - DNA, 729 bp, Heterodera glycines
attggcaatcgcttttgccaaaagtcggcttttatcctactcactaatcccttattccaacattgtccaacttttcccccctcccatttccttttttctttttcccaaagtttgcttttctctctttcaatcgctgcgcttttcttttgccgcttttagacacgaaaagtcattttcggccatcgcttaatctcgcctcacttcttcgcctcatccgtcatcgtcatcattccctttttaaaattgtccttcatttatcgttgttcatccttcgcaacaaacatttggcacttattttaatcattatccatccatcatttatcagtaattatttaaaccgttgcctatcaattggcacttttccatttgtctgatgaactttttttgttgtgctgctgaaatgctgtgcatcttctaattttgggtgtcgtcatttgtcatttttttactccttttgcaattttcgattttccacttaattgggctcattatgtgctttttcatgccaatttatgtggtttttcatgccaattaaattcaaataaagcaacaatccccataattttgctttctctcgcgcacaaatccgcaattagcattctttgagaagaccctcggctaatttgttccccatgctgcgcttaattagtgaagaaattgtgccgcattgtctgaagcaatcattttgacccggacgaaatttggcattggcactcacttttgagtatg

SEQ ID NO: 112925 - DNA, 718 bp, Heterodera glycines
ccaatttgaagtcggtcccttccattccttcgtccgacgactcgccgtttgtttaatcgagaaaatagacggaaattttgtcgatttttgtcgtttatggaccaaatttctacaaattttgcgtcatcattgggagtacaatttgaacttgccaaagtcagtctcgccgattcctcctttaggtatttactttgcttttgagttgtcagttttgacactgatgaaaggccccaattgtcgtgctgtctcctgcaccaaaaactccaaatgattaacttttgcatttcggtgaagaaacgaaagcacaaagaaatggaagcgaacgaaacggagaatttgggcggaagtgccaaagatttgccagcaaatcgaaacactgcgggtaaattcggtgagattagtgggaaaaccgaccgaagacagaccgatttttaattgcatcttgttaaattgggagtgaatttacattatcattttggttcgttgaaattactctcttaagacgacgagtttttcgatgcgattgaatcattcgatcaatttgacgtcgccacttcgtcggagtgccctcgggggagaagccttccactcgattcgaatgaatttttaaagagcaatccaaaccaacgaatttttgttccttttactcaggtggtcattaattgtaagtaaattcgctgaatattaccgcaaagccctttaggaggagggcccaatg

SEQ ID NO: 112926 - DNA, 66 bp, Heterodera glycines
agtaattttagcagctcataaatgaatatgtcttcaaattccaggtacattgaccaaaatgtgatg

SEQ ID NO: 112927 - DNA, 110 bp, Heterodera glycines; identical to SEQ ID NO: 98226

SEQ ID NO: 112928 - DNA, 767 bp, Heterodera glycines
gaaaagcgatgcgcaacaccgaaacgcttgtgttgccaatagtggaaaatgaaccggaggagcaggaactgcttgtaaaagcaacgtcagaaaaaccatttatcttttccccggaattttggtttagcccgcgttggcaaaggctgttgacgatttcccaatgacttgtgccattttggtgcgccggcacggacttttcgtttggggaccgaattggcaaaaaaccaaagtgatgctggaatgtgttgaatatttgttggaaatatgctgggagatgagaagaaatggaatgtgatgttcaattgtttaaacggattacaatttgtttatttgattcacaaaaaaaatcaaaacattaggttttattttattaggtatttctcatttttctttcattttccatagttaataaaatttggtatccgacttgcctatgttggacaccgcgattcaattttgggctcccagtgcaaataagtttattatttatttagtaatcagaacgccaaaactttgcaaaacttaaaattttcttgggattttcccttgtaaaaatggaagagccgatctcgagttaaaaactagacagctaaaaaataaactgtgattcgatagagggtcaaaatatgggcctatgcaaatttcaaagaaaatcacaactgtagaaaaaaaaattcaactggcaaagttttttctttttctctcattttgacgcactatttccattagatttattttctttaattagttagctaaaattctcaatg

SEQ ID NO: 112929 - DNA, 718 bp, Heterodera glycines
  unsure (1)..(718): unsure at all n locations
atttgtatcagttgcagaattgaggcgatggttggcggagaaagttttttccttttgtttggcgggtgccatttagaaaaaatattttgtaatntagtagcctaaataaaggaaattttttaaaaaattaaaacaaaaattgggcgtaaagaataaatgaatcgcaaaattccatnttttctgtcaattatgtattatgatgatttagaattttcggatggaaaggaagtgctctctgttttcaatttatttattcaattagaatccccggcgggggttttgtttcaacctcatttttttccaaaaaatggcgatttttttaaacttttcgtcaaaaaattgtaaattcatctgtcttttagtcattactccttatttttaatcttttacgaatgacggacgagcggaactcatcagcatcattaatgaagtcaggaagcaattcaaattttacgcaaaatcatttaaaattttcgggtgaaaattttctttttttacaaactgaaggccattggtcgattttaatacatttataaagagagagaaacagcaaagatttaaggaaatatatctccattttttcaattccattttcatgactataaaagtgtttgctttttctatttgcctctcattatcaaaaacatttccaacgcaattaatcgtctctttgtgacatccttcataatacgcaaattgtgccaattgccgcaaaatg

SEQ ID NO: 112930 - DNA, 296 bp, Heterodera glycines
ccttgtcaggaagaaagcaaatttgaatttttaagtaaaatttttaattaactttgagggctattaagtaaatgtatttgtaaaaaatttgattttttgttcgaataaagttttggccattcaccgaacggggtcccgattttcgacccctgattaaatatggcttagggatcgaacaaattgggaaatgttatcggagagaaaattcacaaaattttcttaatccaatttgaaatactcgaattttatttttgaaaatttaattccgagagacctggccgttgcgcaacaaaatg

SEQ ID NO: 112931 - DNA, 178 bp, Heterodera glycines
agtatgcaaaaacaactgctgaatgatcattgctctgaattaattgtataaaacgaattatagtttcaaaagctctaaacaaccaaaaaatggggccaaagatgggaagggaatggacggactgtctaaacaattaataagtcagtgatttaattaattgttgcaattaattgaaatg

SEQ ID NO: 112932 - DNA, 195 bp, Heterodera glycines
ggtgaagctgatttatttgcaaatgcaaataaaaaagctatcaaaaaacggtcagaatttataaataaactcaacgactttgccagcatagaaatttggacgcagaaaaaaataaggtgatagataaatttttaaaaaattgctaattgattaattataattttatatgattaggttgccaatgaatgcaaaatg

SEQ ID NO: 112933 - DNA, 1003 bp, Heterodera glycines
gccattttatgagaaagtaaaaataaaaatttctcacttctataaatattattaaaatttgccaaataatcttattttcttttaaacaaaactaaatttaacaaaattattatccaatagaatcaaaaacaatctattcaactgcatcatcatcacttgcaaccgtcatgatcaagtgaattagaaaatcctagcaagtttattggtagaaatgaaaaattatttaatgcaaaatttagaaataacaaaataattgtaatgaataaaactaattctttaattttaaatataaacaacaaataaaagatacagcaatgatttttaaaagatggaaaaacttttgcttttttatttaatagataaaaaagttattttaaaaatttacaaataagatatgaaattatttataaaatatattatacattgaagctataaacataaatgcaaaagaaagtggggggtctgagtgaaaaattagtgatgaaaattggagttaaagggaaaaaattaagaaataatcataaatatattctttcaaagaaacaataccaatgtgcaaatggcctagtggctagtctccttgacttttcccttcttctttcccctggttcaatccctctacacaaattaaaatattttaaattttctttttgtataatcatgtgatttatgtttaatgtaattttttgattttaatggaaaaatatttaaaaagctcatttggcaaaaatggctaaaattttacaatagaaccttggggtgatctacacccacacaccaagcttcatttggaaattccacggtcacttgccgacccttcctttgtcagaattgaacttttaaaaaaatttcaaagattacatttattttaatatcttttttttatcaatatcttcttataattaattttaattaatataatttttgttttaaaaagctcattttatttttaaaaaggagagaatcgaattttgtactttgaattcaaaaaatttatgaaatg

SEQ ID NO: 112934 - DNA, 284 bp, Heterodera glycines
gggaaccgacgaagaaaatcttggaattttcacacaagtctgaaattgtgagttggctgttttctttgctaattgttcattatttgttggattaggatgtgtcggtgctccccggcggttatttaaccaaagttcgcattgcctgctgcattttgcgctttctgaccgatgaacagatgaggacaatgttcaacattagcatagaccaattttagtaagtcatcatcggcactgaattccattataatttacgtaactcttttagcggaaatttcgtcactatg

SEQ ID NO: 112935 - DNA, 1003 bp, Heterodera glycines
gtccagcctctctttgggacttgggtttctactagttttccagcacatcctcccccccccccccgggggaggggggagggcaaatcgttaatccctccctcccccatccacccctcccactcatcaatgaatgtgtttgacacatttttgacctttttgacacgaatatcacaattgataaatactcccctccccctcccctcttttgatggcaaataataattataatttgtttatttgctttctcgacgacccaatctcaaatctcgacgcacagcagttgcaaacaaattttgtccaattcaagacatggcttgatgatggtcatagttcttcctaaccccaactttgacaccagttcattcccatcttagcccccaattctcggcacaaatttttgattttttgacattctcaaggcattttcacggcgatgccattctccccaaggattctctcctccatttatggcattttgtttgagaatggaggactaaaatagtgccgtggatgagattggttggtctttgctctcgtcgtttattttcgctgtccgtccgtccgttcgatgagtgaaaataaagatgaaaatgaatcccatttttaattcctctcccattttccattgccccccagggaattaacggacggatttattattttattattattattagtttgcggtccaccgattttggaaagtccaaaaatggcgcccccccccccggcacggcggacggacaaaagattagccatcggcggaaaagcgacgcgacgccctccgccgccaattgttggccttttttagtgttcccacgggaattcacgcactcacacaaagcacaaatacagcaatttattttgttggggattgaattggatgcgaaacgaacgaaaatggaataaaaaatggggaaaaatattaaaaaattgaaaataaatgtaaaacattaattttcaaaaataatttaaaatggttttaagggggaaaaaactgcaaatg

SEQ ID NO: 112936 - DNA, 89 bp, Heterodera glycines
ggtccgtcggactttgaaaatttggccgaaatgcgttggctttagactcggcccattggcacaacgaatggggccaattgagggaaatg

SEQ ID NO: 112937 - DNA, 513 bp, Heterodera glycines
tgggttactaatcgtggtaattggtgtataattgatggaataaaggtgctaagaatggcttagctaaaatttcgagatgaataaaaattacaattaacgggcacataaatgtcggtgaaatgaggaacaaaaatccaactaaatttgtatggaattataagagtgcaatctaatttaaaattaaagtcttaattaaaaataatcacctgtattaattgcttaacacatacaggccacattaaatcaattattgtaaattaattaattaaatttaaattaattactgaatatattagtaaaaatgaacattagttaatgtgttttttatgacgttgtttgacgcttataaaatgaaaaaattcttagtattaattaagtcaattagctatgagctaaaaaataattatattaaattttgcagccttattggcaacggattaggtcatttttatgccctcattagaggcatttaggtaaatattaaacctttcttacagagaaaaaaaatacatg

SEQ ID NO: 112938 - DNA, 282 bp, Heterodera glycines
tctaaaataaaatcattttttgttctaattttatgatttatttgttttctgttgactaaatagtcgcttcttatagcaaatattaatttatatttgcgtagcttcaaatgagcattctgccttcaatttcgaagggaactgaatttttttataataaattgatagagagcaaaaagcacaattgtataatattcaaaaaatttatctatgcatttgttgaatgttcctaaacccgatcaaattttttaaacctttatatgaaaacatttattgcaggaaatg

SEQ ID NO: 112939 - DNA, 697 bp, Heterodera glycines
tcttaaaaagggggggggaatacgagaaaatcaggaaaattcattgaaaattggaaaactttcataaaaacagtatttttagaagtgccaaatggctcggttgtgcattaatttgcaacaattagggaaaatctgctgaccaatcgcgtcatttttacgatgtgtctttggcaattccgcgcctcctcaaaatttccctaaatttacccggagccccgacatttgtgcctgttggaaatgttaaattggcgttttgacctttttaattattttcatatttgtactttgttctccacgccctttccccccttctcattgtgtttataaggagaccattcccctcctttttggactcttccctcattcattcgtttttattattatttgcatttgtccaccgaccgatcaataaatatttttattctttgtgtgttcaattggaggaacacaacaaattggcgcagtcagcagccatcttctctactgaagacactgcaattcatcgaaaaccaatagcacccaggtggtgtgaggtctgctaatatagcagttcaattcaactaaaaaccaaaagacacaattgtggtgaggttccgcaatacgcggttttatcttcaaatcttcaaaaatccttaacactcagcaagtgtagggagccaccaggtgtggttatttggatttcaacaatttggcaatg

SEQ ID NO: 112940 - DNA, 734 bp, Heterodera glycines
ttgcgctaaacaaaattaattttaaggcaggtggagcaaaaaaagtgtaaattacaaattgacaaattaaatttttcgttaaaaaattcctattccagacggatttccgttaaaattgacaggatcgggaatcctttttccgttcgctttttctttattcccgtttccgtaaattttttaccgggctctattttaataaaaataaattggcattttgtttcatataattctgttggtggttgagctgacactaatgattggatcagcccatttaagttctcaattcgtttcacttcattcactttagcattcacattcgtccttttcaaaatcttcttctctcagtattcttattattaaattttttttgtactgtcggtggtaggctccttttgaattttttttttttgttttcaaaagacatcctagggttttcggggtcgttcgaaaatttgaattttcgaacttttgttcgaattcaggtccggggttcgaaattggtcgaaatagatgccagattcgtgacagcggccccgaaaaccctaggaagcttaacaaaaaaaatttaaaaaaaaggggggggggtaccatcgacagtattaccgaaatgcctattgtaagtttatcaatctttatttggcctcatttgatcagaggcccaggcatacaaaaaaaaatccgatacaaaagtggcatttaatcatagtaatattctagttatattcagatatatg

SEQ ID NO: 112941 - DNA, 147 bp, Heterodera glycines
aaaataaataatatatatttagtccctttttcatagtaatcaaagttgtaaataactgcctaataaaatatagtaaatcttattgtaaaatgctgttaaggtatttatttgctatagaattcgtaattaatgattatttaaattatg

SEQ ID NO: 112942 - DNA, 189 bp, Heterodera glycines
tccataaaccatggtaaaatttgatttaatccattttactttcaaaattaatttatttatacgaatgttttgccattgaccccaaaaatgccgaatttgagcggaacattccccccaaataattaatcattttttgttgttttcagtgaccatttgctgtccaaacatctccaatccgatgtcccaatg

SEQ ID NO: 112943 - DNA, 262 bp, Heterodera glycines
ttttggtttggttttagctttagttatttttaatttacttttttggcttattttttcaattaagctattaaaacacaattaattttatttgcatttttgtttatttgaaaaataatcaataaataatggtttatttttcaaataattatttaaattatatatataatattttctttgcttttaaaaatttcaatttgtaaaataataatttttccaattttttattaccaatttttcggcccaatttcagcacattgccatg

SEQ ID NO: 112944 - DNA, 340 bp, Heterodera glycines
atttttcaccattactgacactgtggccctctcttttgccggtgtgtctcgtgccatgtcattatttcccctttttgctcattgttatgtttacacttatttctttaccaatccgacgtgtcattttgctatccgtttttcatgccctgtgataattttttgtattattgtattttgttcgccttattattgtacacttttttcactttgtgttaataaatccaagtcatttaatgtaaaccttaacaatcaatggttttttcccccttagaatatttaattttttttatgactattatcaacaatactgtgtccatttagggttacatcgctggcaatg

SEQ ID NO: 112945 - DNA, 325 bp, Heterodera glycines
aaatttacttttaattcgatttttttctggtccttttgtggcgattttcactgagactcagtgcggatcacgctcggacttcttccgtagcccgtagtctcgccacacctactggccgccgtagtcgagtgtgcggcggttttctagcgcaattgaaaaatcttttacacatcctataaaattctaaaattctcatcgccatgaacaatcgcaggagcatcaacgacaacgagcggtagtggcaccgacagcaactggagcagtagtacaacaaaaagctgagcgcttgccaaccggtgaagccgagggtggtggtggcacaatg

SEQ ID NO: 112946 - DNA, 945 bp, Heterodera glycines
tctctaaaaaattgagatttttaaaaattaaaaaattcatttggttttattaaaagcataaaagaatcttagtaaatattttaataatccttttttaattacggaagtttttaaaaaatatattttgttaaatcataggcagaagaaatatttattttattttcatttacataataaaaatttggataaacatttctttttatgtaaatatgaaaaaataaatttgccaataatttggcattttatcattgaaaaagaccatcatcagaagagtagaaaaattttaaaaaatcaatttaaagttgatcagtcaaattccttcttcactttataaaaaatattttttccccatttttgttcgttagaaaatcataaaaatcaaaaaaattaaaattggcactgacgaatttaaaaaatgtcattaattgatagttagaaaactattaatgtaatctattgaatgatagcataaagtattattaatttggttgaattttagcaaagttatgaaattatgtgttttacattttttgtttgttttcctaccccttgtccggtttaagaaacgcccttagtgggcggaatttaagaaaaggcctctagcaccatagttctaagccttcaggtgctatgacgttactcaaaaaaccattaaaataaagtattttttgataagtaaatttattgaaaacaaccttcaaactcactggttcttaatttattccggcccaatcctgatgatttcaaatttgatgcctggaggtgtataaaaatacggaaaactcataaatgccgaacagatttatttggatacgaaattgaggaagcccccgaccatattctccttcctacaactttcgaagactgtaatcaaatggcaacttacaaaaaatgtgaatttggtattttttatcaggggaaattggtcaaaaacatacaaatatg

SEQ ID NO: 112947 - DNA, 330 bp, Heterodera glycines
tcacaaaaatacaactgttattggttcaaacgccgcggacgcggcaaacataaaaagcgatcactccaaattctcattctttttataggaatataaaacgccataaagtaaaaaaagaataaaaattgctgaacccatttaggctaactgctaaccaatgtaatgataacgtgaatcattccgctttggtgtcagtattcactgcatataattttgaaatgcctaaagctttgtttttgattttttattacctacctaattgtttttaaaagatatttcatcatttaaattgcagcattttaatttcttccgacaaaaagacaaaaaatg

SEQ ID NO: 112948 - DNA, 1003 bp, Heterodera glycines
tttcctcccttctctctatttctctgcattgcttgtctctttttttctctcttctctttctctatatttctttgtctttctcgtcaatttctctgtcttgctttgctctcgttcttttctttgttttctttctctgagtttctctgtcttattttcctttaaaaatttctttgtttcttttcctctgttctctttcgtctatttctctgtcttgctttgctctctttcttttctctattttctttctctgaatttctctgtcttcttcttgtcaatttctctatcttgcattgctctcttttttttctctgagtttctctgtcttattttccttaaaatttctttgtttcttttcttctgttctctctttcttgtctatttctctgctttgtttctttttcttttccctcttctctttctcctacgccattttataaaatgtgctttggttggtgttttgttgtgaataaaacaaatatcaaactgaaaaagcagtagcagcagaagaactgacagacacatgcacaaaccctttcttttttgacaccgatttttattattttaaaaatatttatttatttttattattatccataaatacactaacccaaagaagtcttgcctcaaacatataaaattgttcaatgcttaatactagggctataattagatagaaatgctattttgagcccctttcttcatagcatatgcgcagaaaaatatgcaaaagcatagaatttatagtcctaattattacataataaaagtcagaattatcgttgtaaatattttagatgtctttttcaaatacccaaaagaagaattcccatattttttttaatgactgagttttggattccgaattgaatgatttgtaaaaagttacgcgcaaaaagtctttcgcaaaattaaaataattcatgcttactttctgtattatatgtatttttttttttgtcattttagcacaattttgtttaacaataaattttttgaaaaaatg

SEQ ID NO: 112949 - DNA, 177 bp, Heterodera glycines
tggcaggagaatgaaattggaatgaggttgaaaaattttacttttatatgcgcaaaagtgtggccacgcctacacacaccatttgaaaacagtcacggttttagacacgcccactaaaagccaaaacattttgcctgccaaaaacccagaatcattttaccaatttttgtcaaaatg

SEQ ID NO: 112950 - DNA, 264 bp, Heterodera glycines
gctaattagtagggatgggtgtaatttatagaaatgtatttttaaaaagaaaatttaaatattttaatttttcataaacataaatctcatcctaagtgattagcatacgaaatggcattttaattatattcacaaaaataaaaattgtattttttatttggatgtcggaatacatacatacatatatttataatttacaaaccataaatttatttaaattattgccattgaattgaaagcaaaatttgaggctgctcaacgatg

SEQ ID NO: 112951 - DNA, 527 bp, Heterodera glycines
ttttatttttgttcatttccgatgtgtttttcgttgctttttgggttttctaaatttactttaaaatttgttaattcacattttggtccaaccaaattttcacgttactttttctgttttagggcccggatttctcgtaggaaatttgcgtcagctaattaatttgatgatttttttgaaacgggttactaaggtttgttaattttaaaatatgtaggaaggatgaatgaggagcaaaaagctaagatgtctgcccattctgcgcttatttattcagaaaaagagagagaattcaaatccgggccctaaaacagataccattttctcaactcagaaatggctatcattatcaattattgaacttggcatccttttgattgtatttttacagttaaataccgtatcccatttctaccctaccatattttctggggccgattttgttgttttttctagacaaaattgattgtgacttcaactagttcaaaaaccgtattttgcttttgccccctcactatacattaatg

SEQ ID NO: 112952 - DNA, 828 bp, Heterodera glycines
aggcttggaaatctcgctaagatttgttcgataattattcctaaaatgggaaaataattttaggaatcaaaggcccaacgctaataaaatattcccatttttttaggggaggcgaaagccaacaaaaatgaatgaatatgtaatgattgttcagattccgttttcccacacaacaattttggatggcaaataaagtaaaatggcaataattaatttgcataaataataaatgtttttgtcggtgctcgagagtcgagattctgtgggtgccgcaagtttatcgccggaagcgaagggtcaggggagaaaatggtgaaaaaattatgtcaagaattacatttggactcaaatttgtgtccattaaattttctaatttaaaaataaaatcttattctatcattatcatcaattttgaaagtttgcgggaaattaatttaaatttgctgggattttgttaataaatttgctcaaatgcggcaaaaaattgccataatttttctcaaaagtaaagcaaattcatcattcgacagctcgggaatggatatgtcaaatgaaaagtgcaaaaaaatagtttcaagaataattttccgtaaattttccaattatttaccttcaaaaacaaaaataattttcaataaattttcaaattttttaccatttcttcttcaaaatttccaaaaatttctcccttggttttttgaaatgctaaattttagtcaattggagacgaaatttccaaaaaaaaaaatagactctacaaaattttacgatttcctccgttttcctttttttgaatccctccattacatttaacttaccatcgccatg

SEQ ID NO: 112953 - DNA, 289 bp, Heterodera glycines
tttgggcttaatccttttcaaataaacaattttcaccggaaaaatttccaaaaattagccaacaaatatgccatggacaaatggcactttgttaatttagtcgctgtgagtgaatccccgcctctgaaaatggctttttcggcttagtcatccgctctttcattctttcgatgctgcgttctcatctcttttctcatggcttttctgatactaataaagcttcatttcttcagcaaaaaaaaaaacttttccaattttccctcaaattttctttcgaattcaaaaaatg

SEQ ID NO: 112954 - DNA, 221 bp, Heterodera glycines
tgttggtcagttgaatgttttcttcattcctaagaaatgtatttagagaaaagaggaagttgaaagcggttgccttcaagcagaacgttttgagtcgtttcttgacactgaagaactttttgcccaagtcgctgaagaagagaatttggcaagcacattttacaataaatgtttgtatttcaattgtaaacattttcagcagcacacggcagttttgcatg

SEQ ID NO: 112955 - DNA, 126 bp, Heterodera glycines; identical to SEQ ID NO: 103918

SEQ ID NO: 112956 - DNA, 72 bp, Heterodera glycines
tttttctctctcggcgctgtcgtcccaacaaattttccctgggaggaaaagcaccgataaaacactgaaatg

SEQ ID NO: 112957 - DNA, 173 bp, Heterodera glycines
tctcaagagtgggcaattttcgtttggacggatggattgagtcagaacaaaaagggctagaaatacatggatgtgtatggcatgcttgctcaaagtgttatccggatgatagtgaagtaatgccttgtggcaaaaccgcagcccgaatccgagagcggaataaactaaggatg

SEQ ID NO: 112958 - DNA, 449 bp, Heterodera glycines
gactgctgcggttttggcgctgctggtgcggctgctgctggtggtgcattctgacaaaagatgttcggatccacacggcccagcgtctcaatacttcggatgatgttctgaaatgggacagaggacacgaattatttggttggaccttctgcaagctgaacctgttgctcttactcggaacgaattgcgatccccccagcctttgcctgctgcggattaggatctgaaaaaatgaatttggttagaatatttgctgaccatgaaccactgggccattttttcgtgcttttttgggttttttgtgactttggcgattttttatgacctttttagtcgattttttgaagatttctagtgacttaaattcaccgccctatcattttccagaaaaccgaccagttgctcacgttcaacaacagcgccattctcaacaacatcgcaccaaaatg

SEQ ID NO: 112959 - DNA, 901 bp, Heterodera glycines
  unsure (1)..(901): unsure at all n locations
caaattgcagcggtcgcgaatcgcggatcgaggaaaaaaatgtcgcgaatcgcggatcacgcatcgcaatcgcggtcgcgtcncagcgctggtgcgcaattgcagcccattctctgccaaactccgcaggaggaaacaccgaaaatcaatggaattgcttcgcttggggacgccaccccaaaaaacgaagccaaaaaatattcttttctaaaaaaatactctcacaacgaaaaaatgtagatttaacacactgttttcgcgacggtctacacctgactgcttaacggttccccctgaactgctaggcccagctgactaaattcggcaccaatccctcagacgcctagttttttaagggtaattttaatagagttttcgcattgtcatatctttatgaacaatagtttatgcctttttaattttcttctttatttgaatacatttttttaattttgaacgattgttttttaaattttagcattttgcttttttgtcctttttattatttacaagtcttttgttaatatattacttaaactaatgcatttttataatcttctcaatttcgtttctttttatgttctacaacctttaacttttccatttattcatgtaaatggagtaaaacttgttgatatttattagaattcgccttgttcgattttttgcctttaatttttattatgcgtttttttctttcgatgttttatctccgtcatttcattgtatcacattttcacggtctttgtgttttttttttcaagttcctctcactccgtttttcggagaatcctctacagataccacataatcctctagattttttttgattatctttttcatcattttgttaatttttgatcattattctccaatataggtggtgctttatgataaaatg

SEQ ID NO: 112960 - DNA, 204 bp, Heterodera glycines
gaacaatccccaaaaaataaatttaattacaagactgggcgtaattacggattacggaaattttcccagtaattacggattacgggttacggatttttgcaatttttgtgtaattttatcccgtaactatgtagaactttggattatttttcgagacgatttccagccctgtttgattaagaatttggacttttggatgaaatg

SEQ ID NO: 112961 - DNA, 1003 bp, Heterodera glycines
tgaactttttctaatgtttttgataaattttccaaaatctttttaacatttttataatgagaaggcaaaattgggtaattaatttcctggctgttataaagcaatacgccgagcagggacatgccctgctctatacctagaaaatttttaaaaaatatataaaaatttgttgaaaaatattttttggccattccccgaccggggccaagcccacgatccccgacaattttgcgatcaccgaatccgatccatgaggattttagtggaaaaattagtgacatacaaaggacatttcaatcaacctatttgaatattggttttttattgttacttaattttaatttttttaatttaattaacaaaattagcaaaatttccaattttctgtcgtcggcagctccgtcagacctatgattcttgataatttttagaattacacaagattttgtaattttaagtctttttttttgcaaaaaatgaatggaaacacaaataaaacgttttctagaataaattttcaaattagagttttcagggtcgctgctcactattataacatttattttggcactgatttcatctgttcataaatttgacttaattccatgcatttcaaaaatatataaaattaaaataatgaaacgaatcagtaagcaggtggacataaatgcaattaattttataaaaccgatcaaattcatttaaatttagttgaatctttgatcagatgacatcaaatagaacaaaaatgaaaaacccccttaattccttaattattgtttatctcgtattaattactccccaattcgttgagaaaagcaaaatataaataaattgaattattattaaaatgttgtagcatattgatgatataatgaataaacgtggttgataattgattgaatatataatttagccagtcttaaaattaataattacaaattcattgggaaataaacattttttatgaaaattattctttatttttttacaaaacatcatg

SEQ ID NO: 112962 - DNA, 114 bp, Heterodera glycines
tttgcccgaattgaaagttggccgagcgcaacagcagcaaagcgcggccggcgcatcggccggcggcgatggtaagggaaaaaagtgggagagagggaggaggacgaggagatg

SEQ ID NO: 112963 - DNA, 557 bp, Heterodera glycines
tttattaatagcaaacaatttgataaaatatttttaaatgattttgttgttttaccctgggcaaaagtaaaaatttggtttttattttcgtttccatggcaatcaaagaatttaaaagtgtttttaaaaagtgaatttgaaaacaaaatgataaaaattgttaaaatgaaaatttttcacaattaaaataattttattagaattttaattaataaatatttttttattctttaaccattcattttctcacattctttttttggagaaaacggaaatcgatatcatgttttgcaacgttttcacatgtcccaggctcaagtaacccgcaaattggtatgctgatcacggaatgcaattcactttatgagtaattacgtaattaaacaagtttatatgtcctaattaattagttaattaatatagaaaacaaatggagaaaaatatttattataactttttattttatgccttttttgctgtgttagaaaatcaataagcttgttatttgttaattgctctaaatttgtcgggaaatgtcgcgcgaagtgaacaaaatg

SEQ ID NO: 112964 - DNA, 242 bp, Heterodera glycines
ttttatcgctcatgaaatcgccagtcccccccccccctttgttgtgcacagcgtcggttgctggcagccgacaacacaatcttttctttgttgggtatacggcgttggttcgcccctcctccaccctccccgctatttgccttttcgtttttaattctgcgcagcgatcatatattgtgattcgatattttttgggatttttacccgttttaaatgcttacaaatattttatttagaatatg

SEQ ID NO: 112965 - DNA, 478 bp, Heterodera glycines
ctgtttgccgtcatggtcctcaaattggatccaggagaaagactttgttggcccggatgttggccaaagcagtgcgggaaatggtggccgaaggcaatcgctaatcaaaaattttgtagaaaaaaattttggtggtttttcaaagaaatggctaaaggaagagcagcagcgaacagagcccaaaaataaatgtttaacaataaaaaatactagcaataataatagcaataaaagtcgccgatcgctgcttcaaatgctccccattaaataattgatcatctgaacccattcattcatcatttgtgcgtatgtgaaatgttagccaaaattaaactttagaaaacccaagaaaggaaactcggaaattcggaaacgaaatcggaaattatataaacacaaaattgttataatttcttcaactggcataaatatgtttttaaattcgaattcaaatgtgtgtgcgtccacattaaaaatg

SEQ ID NO: 112966 - DNA, 147 bp, Heterodera glycines
aatagatattccagaaaaatggctatctcttctttcgagaaattttctatgcagcacacgctctcgaacatgaaacgaagtgcggtgctccatgcccattttatcgttcaaataatttttatatataatagatattccagaaaaatg

SEQ ID NO: 112967 - DNA, 828 bp, Heterodera glycines
tattaatgtgagcaaatttattttgtattaatttataattatttgtatttctcataaatggaaagttattttattttaataattattgtaaataattgagttgcattctttaattaattatttgcaaacaaattaattaatataaattttattttatacaaaaaaattgcatcaaatgtttctaatttttttttaattctcttccttttcgttcttccaaggtcggggacattttaatctttgttcttacaaatttttatcgtatgaaaactttaaattattaataattaaatcaattttataacaaaataatataaattgtacaaatttataatgttcattaaataaattaattaaatatttacatttaatatttaagcattttacaaaatgattttttagtttcttataatttatttatgaaaattttagatacaagtaatttaatttgttttatttaattaattattgcgcataaaaaaaattgattagattgtgagctttaattcaatcgtaggcaatcgttttttattttcataaaaaaatatataataatttttattattttttttatttcaaaattgaaataaactttaatataaaataattgttttattatattgatcttaataaattatttaactttaaataactacatgaataaataattaaatgcggaagaaagatgcacgagtttttacacatctctgcttcgttaaatttttcttcgtcctcgtattcgttgcgagataatatatttcatattatttaatataagaaaaattaagtaaatataattcatctctagcatcattggccacacacatg

SEQ ID NO: 112968 - DNA, 77 bp, Heterodera glycines
tctttgtcaccgattttgcgataaagcacttaattcgtgctcttgaaaaccctgaaatttcggtgggattggaaatg

SEQ ID NO: 112969 - DNA, 221 bp, Heterodera glycines
  unsure (1)..(221): unsure at all n locations
tcaaaaaanagtcttgacatcaaaaattaaaatggaaatacattggcaatttcttaattttattttgaaaaatataaaaattaagacattctttttcttccaccaaaattcatgtccttgaaaacaatgatttccacatgtccttgaaagtcccaaattaacaataatccctttagcaattagaacaaattaattttttcttttttttccaaaaaataatg

SEQ ID NO: 112970 - DNA, 402 bp, Heterodera glycines
ggtaaaaacccacgcgcaaattggcaaaaaaaaaaagaaaacatcatgcgtacccagcaaattgccctacggcattttgtatgccgaatgcatgccaaaaacataaaaaatggggggcgggggaggaaaagccggggccaaaaccaaatccgatccgtctcattttcattgtgcgcgccaatgccttggggcataaaaaagtgcatcatccgcccaccgccccctttaattgcttatgaattcagctggaaaaagcagcaaaaaatggtgggcggagggggcggacaatggtagctaacaataagggaggtgcttcttcttcttctgcgcgggaagtgtgccgttcagcagcaggtggccgccccttcaattgcacaggagtgatgggtttggcacaaaatg

SEQ ID NO: 112971 - DNA, 1003 bp, Heterodera glycines
gtgaaacaattgaatggctgtggaataagagacgattggactttaataggtattgcaattaacttaattaagttagatttgtacgagaaaatttaatgaactcttgtttttaatttgattctcaagaattaaaatgcatggaatgattgcttcctcaaaaaaaaaaaaaaaatttgaaagcaaaaattccgctgaatcttgaattttctcgtcctaaaagtttagtaaattaaaaagtgatagctaatttacaatttttattaaattttgaagagctgaaagtgaccgaaccaatgaaaaaactacccaaaaaaagggagcacaatcaccgaattgcttaacatcaattggttctttcaattaattttccttcatacataaatgtataaatttctaccaaattattatttttttgcatgggattaacagaaatatgagaacggaaaaacgggacaggagataaaaagataggtagtttgaatatggaacgaacttttctctgaagtgatctgtaagtgatctctctcaaaaatggcagttatttaaaatcgtcaaaattgaccaaatccaaataagtaattgtatttttaaatgtggcgcccccacaaagtgtccaagccacgaaatgtccaaaagagtaaaaacccacgaaatgtccaaaatttttcaaaatttataaaaacaaaatgagtctaatttaggatttttagggttttcggggtcgctgaatacgaatataccctttatattaccccttgcctaaccttaggcccatctgaataataaaaaactcaaattcaagatttggacattttgtgggtcagcggttacatttcgtccaacctgaccctatttcaccactcatttttctcatatatttatttgtttactgcttttgacttacctacacttactctttttagcttcaaatttttgtggaatgacctgattttttttgttttgtgtttcgaaattcactaccactttcattcaccagaaaatg

SEQ ID NO: 112972 - DNA, 241 bp, Heterodera glycines
aaacaggataataaaaagttaaaaagatagtttgcaaccggaaattttggctgacagacagatgagtataaagttttaacaattttaataggctctcagaacctttggggcaccctgcatttttactgacataactcttaaaatatatagaaaatgtttacagaagtaaaattttagcgttttttggaatggcgtaacagaagaacaaagaatatttgaatatgccaaagaattgcctatg

SEQ ID NO: 112973 - DNA, 58 bp, Heterodera glycines
tgcttcccaaaaagggaaacacggccaaattggtgcacacgccgctgacggacaaatg

SEQ ID NO: 112974 - DNA, 310 bp, Heterodera glycines
ttttttagggttccaagttttaaatttttgggggttttagccgcattataaattgaaaaaaagagaaagtaatgggatttagttaagaaacaagtttaatttttgcaataatgaaattcgggcggggcatttttaggagccaagaataattaatgcatttttaattcaatttttttttggggggttttccgactgattttgaaatgtctaaaatagtgattttttttagcttcttttgactcctattggaacccatttacacatttaacttcctccaaatccgctttttaatgcaattttttagaaaatg

SEQ ID NO: 112975 - DNA, 237 bp, Heterodera glycines
agaaattttctatgcaacaaacgctctcgaacatgaaacgaagtgcggtgcgccgtggccattttatttttcaaataatttttaaatttaatagatattccagaaaaatggctatctcttttttttgagaaattttctatgcaacaaacgctctcgaacatgaaacgaagtgcggtgcgccgtggccattttatttttcaaataatttttaaatttaatagatattccagaaaaatg

SEQ ID NO: 112976 - DNA, 802 bp, Heterodera glycines
ttccattgcataacgaaaaaggaagaagccacaagcaaatacgaaacaccagtcagcagaatggcaaatggttgttgtgagtagaaatgaatttggcctaatgaatagaacgtttaaatacccaaaaatgtccatttttgacacaaaaattctgtcaacgcaactgaaagtgacggaaattctggacttaaaattcagacggatttgattgttttctctgtgatttgcgtggattttaacaaattcatttttgtccatatttcattatgtttcttccatttttgggcatttgcaaaattcgaaaattgtctctttttccatgtttaaaatattaaaaatttgttatatatctttctcttgatattaaatattttaattttattatttatttttgttttcgtgaaagttactatttttcgcttttagtcacaaaaattaaagaactaaattttttgtccatattgtcaagtttaccaaattcaaacacttctgcctgtatttttaattttttgtccgtgatccgggcctaataataactagggtttcgtttttgggtgcgctacgtttcacccacccccgagaattaaaaaagctcagataagcacgaaaaacgcgttttccgcttgatttaggatgtctatgattttttatttgcctatttttgtgcctattaatgtctattttgcgattttaggcataagtatttcaattctatctaactaattaacaaaggaattttataacgaaagaaaagaaatgtttaacgaaatttgttttaaatgtattttccgcataagtgatg

SEQ ID NO: 112977 - DNA, 173 bp, Heterodera glycines
ttttgacaaaaattgttaaaatgattttgtgtttttggcagacaaactgttttggcttttagtgggcgtgtctaaaaccgtgactcttttcaaatggtgtaggcgtggccacacttttacgcatataaaagtgaaattcttcaacctcatcccactttcattctcctgccatg

SEQ ID NO: 112978 - DNA, 407 bp, Heterodera glycines
cccccccccccccccccccccccccctgtatgatttcccccctccgccggcaatgtgacattattttattttgtcactttacgattatttctcaccgttcactaatgagatcacatttatccttttgcgtcagccttttaattggatttatttatgattaatataattaattaaaaagcaataaatataaaaaatgtgtgcataaatgctttttataaagataaatcctcaatcgatttgttcatagaattatcactcttaacgaacaatgaaaactgataatataaacacttccatttgctattgacaaattattaggaaaatctcaatgaagaattaataaatataaaattgactgaatctaaattttttaaaattttgccaatattctcagataaagtttcatg

SEQ ID NO: 112979 - DNA, 155 bp, Heterodera glycines
tttatgtcccaggccccggttttttcggtgccctttttcatggaattctgggaaaaagttcaaatccaattttttgagacgaagagaaatctttcatcagagtccgatccaaaatcatattagctttcgagaacataatagcctttctcaaaatg

SEQ ID NO: 112980 - DNA, 1003 bp, Heterodera glycines
taaccacacaaaaatacgttttattttggtctatagacccacctcccatgaaaaacaagaagatttcgaaaaattggtcgaacaactctctgttttagtctcggcttctgaaaaatgcattagagggatataaattaagactaatggtcaactcccctacacggggaaacaatttattagatttattatttacaaacaacgaaaatctattgaataatgttatagttgaacccccatttggtaatagtgaccataatgcaattcaattcagcataaatttacaggttaatagtaatgcttcaaaaaaattttataatttcaaaaaagcaaattatttgaaaataaatgccatactctcaatggttgattggaatttatttttttctgattgcccggacatagagcttatttaccaaaaatttatgtttttcctaaataatttgataaggaattatgttcccatacaaacaacgaaaaaagttgaaaaactaccagaacatattttgaaactaatcatctatcgtaaacagctttggaaggatattcacaaagaccatataaaaataaaattcttagaagtttcgaaaaaatcgatgtagaaataaagaaattttataaaaatcgcgaaaataagtttttgcggaccttggactctaaaaaacgtttccaatttataaattctttccttaagactaaaaatactatgatacctgcatttactgataaaaatagtctgattctcttctcagataaggaaaagtcgaatgcattagcgcaacaatttttttccgtttttacagatcaaaatctagaacaatttcaatgcatagaaaatcctgaaaaaaatatcgaatattttaacataactccatatgaaatttatttttctctttccaaactttcaaattctaacaatagtaatggaattcccaatatttttttgaaaaattgtaaagaaaatttagtccgacctcttttccatatttttagtttctcattgatg

SEQ ID NO: 112981 - DNA, 174 bp, Heterodera glycines
ttgtcggataaatcccacctgtaaaattattaaaatttaaattttacaaaaatcaaaacttaaattttaaattttactgtcgaaatgcgaaagttttacggaaaagtaactttttatattacacttaattagtttttaagattaccacttgttgatgaagcaattcaaaaaatg

SEQ ID NO: 112982 - DNA, 930 bp, Heterodera glycines
tctttttggagtaaaaaagattttttcaatcttttactccccatcaatccaacacctaaaacagaaaaccttgccaattgaccattctttcatttacgaaaaaataaattgttccatcgttttttttataaattgtcataaagcatttttactgttgagaaaaatttcgattcccaaatttaaaataaaaaaatgaataaattttcgcatttttgttgattcttttaaatgttggcgtgcaaggaatgcatcggaataaattccaataatttgttaaaaatcaaaatttttgacatttgtcaaatccgggatcgcagccgcacaaaaggcttatgaaaagatggggtaaaaatggtggtacgattgaagattaaaaacgcatggataaaagccgaagttctggggaatgatagtatttcgcgagttgcgatgcggtgcacgctttattttatttgaattaaaaatttttacaacgaatacattttattgaattttcctactgtataattttttatcgtccggtgattcattttcatcagcgtttttggtttcgtaatcacgttaagtggaagtcctatgagcgttatttgcctattttcccctgttattggcttcaataaacctacaaaattagaatttaaacagtttatttagggtatatttctctttcatcttattctatctaaaaaatacaaaaaaaaaatcgacaaaattataaaacaacaaaaaaattgacaaaacaacaaaaaactacctaaaaaacacacatccaactttgttcctcgcgtttctctctgataaaagggtttggtttttctttttgttttaataaagttattcgaattaatccgtcataatcgtttgtttcttccttgttttcgttttcttctctaccaacattttcacactttaagaaaataaaagaaaatg

SEQ ID NO: 112983 - DNA, 334 bp, Heterodera glycines
aataaagggcataggttattttgaagatgtgtcaaagacatgcagcaaataagcctgcataatctaaataagtggaaaatacatgagtatagaatttattttcagaaagtgtcaacagacttttggaaaaatatatttgcaatttatcaacaattttgagaagtgagttagaaatgataatcttcacgattcaaaccaattttcgttgctctaattaaccgcgataaaaacatccgaatcaattaaatagcttctgagataataaggtttatcataaaatttcttttaaaaataaaccctcaattattggtatgaacgctactttccaaacatg

SEQ ID NO: 112984 - DNA, 58 bp, Heterodera glycines
ggttaacaaattggcgttggtttgtaacaaattattctatttgtaataggccattatg

SEQ ID NO: 112985 - DNA, 526 bp, Heterodera glycines
ttttattatatatttttacatatttcattattttattcatatttggtacatattttggacttttttcttacattttttcattttttacatattttgaggatttttttatgaaaaatttttggaaaccctcaaaaaaagccaaaatttcggtaactttttcgttcatatttttatttttttaaatgtaccgctaaaaatcagtaaaaaaagaaatatcgaaaatttatttttaaaaactaaaatgtgattctaagcctatttaggtcaattttatgcaaatttatgcctatttcatcctttacgaggaattttttttccaaaaaataaccatttttaaacttttatttacatattttagtacatatttctgggtttttgcacatgtttatgtacatattttggccagtttttgtacatatttttgacacccattattaattaattttaatttctaattaccaccatatacaataatatcccttttaagctgaaattcagcgtctatgcatttgaaaattctatgatg

SEQ ID NO: 112986 - DNA, 849 bp, Heterodera glycines
tgcaggcctttgttggatttttttttttgcaatggaccatgcattttaacttagtcacattcacatcatttctttcactttttattcgctgaatttttatttttattttttaaatttccatttttgtttctaaataattaattaattaatcattttgccaatttggcttttacttccaaaaatgggttgatttgttacatttgcaatttgttcccaatcacgaacattgttccatcaaatttccaaaattggctgcccaattagtcattcggaacatccatgcaatccccggatttccatgccgggccccgtcacggcatcggctgacttcccctccccccgaggggcccttcccaaatttggccaactcgtcgccccatttgtcctccccatttctcggaatgcctttggccaattcccgcgggaaaaagttctgtggtcgaataaaatgagactaataataggcgcagagcttacaacaaatgcattttggaaacaaatacaaataaaaaattaatattaaaaaataaatttgcactttaaaattcttcgattaatttggacattctaaaaaatattttcctttttaattataaatttcaaaaaagtatttttttttaatttgtcttatttttgttccttttcttcgtcaccttccgctgacaaatctctgccgaatgcgaatagcaaaaaaaagagaagctttctctcgcgcggtataatttggcgcattttgctccatttttcctttccccgccggccccccgggtccaattaatccttcccccccattttccccgtggcacatttttccgtttgttaatcggtttccgctctctgtgacaaatg

SEQ ID NO: 112987 - DNA, 433 bp, Heterodera glycines
atccttttgttgattataagacattctaggcggattttcgttggattacttcaaaaacagagatctatataaagaaaataagtgatttgaccgtggttaatatcatcgtcagtgattttcgacagggactaattataatacaggctcaatgttcttaggttacttttcatagttgagtacttattttctacaaaaattggcttcagcacctataatattagtatgtagattttatttagctcttagcagaagaaacataaatatttaaatggctctttcctttctaagacattctccagtgtgacgacatcgtcagtgaattagtacttatagaaattccacggctccgtctccgcgggagatcggagtgcaatgattcatcagtcccttcgaagacaccgtcaagagtccactgccccacgagttggaaatg

SEQ ID NO: 112988 - DNA, 578 bp, Heterodera glycines
ccgaaattcaagaccgagccaagcccaaggattcaagaccttcaaatgccccgaaattttatttaaaagggtccagagattcaaaacgaagccatatgccccgggatataggtgaatacttagcgcaggtttacattaagaccttgccacgagattcagtgtttcaagactacggtcgacgtacaacaaattgggaataattcatagggttaggtaaacataaaaaatatacgggacgggattctgttcagtgcgggaatcgtgtaagaaatcccgcgtgaaatcgaacccaagaaaattgagacttttctcgcgtcgagaacgggactctcgaagagatggaatgatgctgttgacaatgacgatgataatgatggtaatagtgccaaaatggaagtgatacggtcattaggtaggaaatgtcaatgccaattctctaattgcggacgtcatctaatgagaaaattggttgtgattggttggttaattttggcaaatgaatgggcccatggcatcacaaagaactgggcggcgtgtgaattttgtaaattaataaaataattatgttgaaggtaatg

SEQ ID NO: 112989 - DNA, 175 bp, Heterodera glycines
agtacgaaaataatttatatgaattttaaataattaatttgacgtataattttgagtaattgcaaaataataataatgtcaataataatggacagatacacttttataggcttaaaattccgatttaagaatgggcaattagtcattttaaaacattttttaggcttattaaatg

SEQ ID NO: 112990 - DNA, 317 bp, Heterodera glycines
gcagggaagaggacgatggaggaggcaggagcggaattaatgagagggaaaaggaaggggaggacggaagaggaggaaggagggggatgaatagcagggaagaggaagacggaagaggaagaaggggcggaatgaatagcagggaagaggacgatggaggaagggcgcggaacgtggacaaagcccaaagaagggtcagaaaaagaagtgcggagacggtattggacttggaacagagaacagacgcagaaaagtcaaacaattctctgtaagacaatcacagtattaatttaagctttgaaagttacttaagaatg

SEQ ID NO: 112991 - DNA, 431 bp, Heterodera glycines
gaaacacgaagaccatttacagattttctgacgacgagctttttttctttttttggcctattacactctatgaaatcctatattttcgatattattttcggcatcattcgaaaacactaagaaaaatatataagtttgaacctgaaaaaagtatcgtctaaaaaacgcataatattatagcattgaaattataaattttgagtgaactcataaaatgtaaaataattttttgctgttctcaacaactcatcgagactcggtcgagaaactgtcctattcattcggtgcaaagaaaataattcgagtggttcgaccaacagccacttttctggacttttatccaatcatttggcttacattgtctttttttttattcctattaaatataaatttgttatttttatattagaaaatgcattttctattaaatg

SEQ ID NO: 112992 - DNA, 590 bp, Heterodera glycines
gtctggctctacccaaccactcacacgattatttgaaatgctacggaaaaaaattcttgccgaaaaaatggctatctcttttttctcttggggatttgaccgcaaacttggtaccaacatttgccttctctagtctggctctaccaaacactcacacgatatttgaaatgctaacgaaaaaaattcttgccgaaaaaatggctatctcttttttctcttggggatttgaccgcaaacttggtaccaacatttgccttctctagtctggctctaccaaacactcacacgatatttgaaatgctaacgaaaaaaattcttgccgaaaaaatggctatctcttttttctcttggggatttgaccgcaaacttggtaccaacatttgccttctctagtctggctctaccaaacactcacacgatatttgaaatgctaacgaaaaaaattcttgccgaaaaaatggctatctcttttttctcttggggatttgaccgcaaacttggtaccaacattttccttctctagtctggctctaccaaacactcacacgatatttgaaatgctaacgaaaaaaattcttgcccaaaaaatg

SEQ ID NO: 112993 - DNA, 352 bp, Heterodera glycines
tcagtttcaaaatgcatttacggtaattatttttaaaaaattcaaagttccgggattttatgagtccattttaagaaattcgaattattttagagtaaattaaggtgtaaaaacaaaaaattaaaaaaaatgttttatattttatttgataaaatatttttgggaaaccaagtaaagaaatatacaaaaaattagtacatgtttaaacttttacaaaaattgtcaattattatttaaaaatttatattttaccccttaaaatcataatggtaaaagccagtataaaattaattttaaaaaacttcaatacattttaaaaaaattttaaatatattacagattccatacaatg

SEQ ID NO: 112994 - DNA, 389 bp, Heterodera glycines
  unsure (1)..(389): unsure at all n locations
cctagaaatgtgttataagaattttcagaaatttaaatcaataatttncgggaccaaaatgatctaggcgattgcccaaatttgataaagttatttttattttatatatattttttaatatggccccaatttgccgtgaaaatttgcgttcgaccaatttttttttctcccttttttccgaattgtttgatcagcagatttgcacagatccttctctatcccctgctcaaacatttttccccgatgtagagaccggcggacgggctcgggcaaaattttgaaagaaaaaaaaattacagggtccgactcgcactttttaggcatggatccggccggcatttcctaaaattccaggcctccaatttcacccatttgtatttgcagatatg

SEQ ID NO: 112995 - DNA, 1003 bp, Heterodera glycines
tcaaaaattccaagagtttctcagcctttgacccattggttttcaattctttgcaaaaacattttcgaaagaaaatttttggcgctatattaaagaaaaactcaaaatgttaatatttaatgtgacggaatggaaaattttaattttttggaaaaaatcaattatgctatatttttaaactaaataattttttctaaaattcaaaattgaaaaatttagacactagaatagcgagtttatgaatttttttcggacgtctgaggacatcagcttaaaattggcattgttgtaattctgggttcgtatgattcctcaaaattcttgacatctcaagacatcagttttccgatttccaaatcaaggcaaatctaaaaaatgagtcattactgcaatgccgatttgcatgtcctaattttttattttgtcctgatttagaaatattcaatcgtgtatcctgagatgtccggaatttcgaggaatcattgccaattttggcatgtcccaatattttaaattcgtcctgatttagaaatattcaatcgtgtatcctgagatgtccggaatttcgaggaatcattgccaattttggcatgtcccaatgttttaaacttgtcctgatttggaaatggcattattgggttctaagatgtcctcagttttgatgatcatgagaatttggtccttaaaaatttgtttaaaaggcaaatgaaaactaagacattcattcactctatccataaatttttttattacaaaatatcatcaaataagcagtttttaaatgaatgtttcatattgcaattgcaatcacttaaaaatctcaaattaaaaattgccacgaaaggcctttgaccctctgattttcaattcttttggtatttggtaagacaaacctccgcttaggcctcccaaaatttttggcgcttcctttacatttttttgtcttcttgtccccgattatgctctgatatttataaaacaataatattccaggaaaattatg

SEQ ID NO: 112996 - DNA, 178 bp, Heterodera glycines
ccgaaccgatgcgcccagatttatgggggagaccgaatccttcgggaatagcttccctatagcctgtactttaattctgcgttggatttttgctccccataaatgtttgagtaccccaaacggacacttgaaaaaatcgatttttttgtttcataaatatttttttcagaaagtcatg

SEQ ID NO: 112997 - DNA, 133 bp, Heterodera glycines
ggtttggaattagggataaatttgccagatgccactaatgagtcaaatagcgatgatgaattttgtttagaccctgataaattagaaaatcagttaaatcgcagtggaggaaacaaataaagttttggaaatg

SEQ ID NO: 112998 - DNA, 690 bp, Heterodera glycines
attgaaggctttaaatgcttaagaaaatttcgataatatttagtttatatagatgaaaacatgtatattactggggttataaattgaaatgttacggcaaaataaagaccactgattctgaaagatcaatcataattcattcgaatacttgagtattaaaaatcatttaatacttttaaaatattgagataaataattaaaatatatgaaaattccaaaacccattcttataaaatcttattgatgaattatgtaagattagttctcaatataatttattaaagataaaatatttattatcattttcatatgaattcacaacttaattaatagatattttcgtcaaaacaaaactattataatttttttaattgaattaatataaaaataattgttctattcgttcaaatatttaaatacatgagatcaaatttaaaataattgttttgaaaatttatattttaagcgtttccgaatgaagaatgcaaatcctaatagctaaaagcatatttaaaaaagtggtttgcttgataaaaccctatgttgattaattgaattataaactgttttcgaaataaatataaaacaaaatacatatataaaaaattataggtatgactgtataaagaatctggagaaatatgatataataaaaagtttatttaatgggactcaaagtaaaacaaaatg

SEQ ID NO: 112999 - DNA, 178 bp, Heterodera glycines
tttcaatggcacgcttaaagggttaaaaaccgaataatgaaaagtgaaatggaaacagagaaaaaattggagaattaattaattaacttttacaatttgaaaataaattaagcattaaaaacaaaatttatttgtttaaaaaaataacaattttcagagcaaacgaccactgaaaatg

SEQ ID NO: 113000 - DNA, 199 bp, Heterodera glycines
taattcaaatccgagacacaaatggaaaaatactaaactgaaaaagcttgcttgattctaaaccttttttcaaaaagcaattgcctttttaacttttcataatgaatttaaatcacagaccgatacaccaaaatatagtatccgaatgattaaatttttacatatttaattttgcaggtatcattaatttttccaaatg

SEQ ID NO: 113001 - DNA, 390 bp, Heterodera glycines
tctgcaaacaattataattaacctttaattactctaaaaataaaaatatacaaaaaattcaaatataaaattcaacggttaaaaacataaatttgcatgcgcaatataagtttgttctaaaacaattttattaaagatatgtttggcaccacattcttttagtcgatgtatcgcctcgattcaattcccttttgcataaattgcaacgaacatacattcttcgactgtaaaggttttcaaaaaagctccaacctttagaatttagggtcagggttcgggggttttaaattttccatatttaaaaaaatttatcaagcaaaaaatttaaaaaagtcatttgttaacagaatttcaccaaaaactgccaaatttttgcgatttttagccatg

SEQ ID NO: 113002 - DNA, 266 bp, Heterodera glycines
tatttaagaattaaatctaaaaaataatttttgaggatttttcacttaattttgcagaagaattttttggggtcgattttcaagggtgaattatttttattgcatttttaaataaactttaaaaacgccaaaatatagttttcaaaattttttttaaagtttttaggcttcaaaataaaaatctagaaaacaggcgctaataactgaaaaagtaacattataattttactttgttgcgtttccatcacatattgacacaaaaaatg

SEQ ID NO: 113003 - DNA, 611 bp, Heterodera glycines
agctgaagcattggttatgtgtagggaagcaacttttagtgaagaaaaatcccaaaatagtaaactaaaatagtgacgaaaaagtgccaaaataaagaagaaatagtgacaaaaagtccgaaatagtgatggatagtgacataattcttagccaaaaattaagtaaaaataatttttattcactagttgcagttgcaaatgaggtacatttccattaaactatttccttagcaaatactgaacatttttaaatcaaaatttgtcaagaaaaaaaaaatgtggtaagaatttttgagggaattttcatttcataggagtgtattttttaaaaattttcggtagattcttaggggcgtatttttgaaatttttggggtcaattcttatgggtgtattttccgttgagattgccatcttttgaaatatttgtgctcgcatttttttgtttcgttctgtccgctgagaagtgatttttatgccatatttgcatggggagaaaaatgatttggacatttattacttggcacagcctatttttgttaaataatacattcttaattgacaaactatcttggtatatactattcattcctcacaaaatattcacaaatg

SEQ ID NO: 113004 - DNA, 63 bp, Heterodera glycines
ctggcacaattctcttctcccgtttttgtcatttctttacgaattatgaatatatagaaaatg

SEQ ID NO: 113005 - DNA, 533 bp, Heterodera glycines
tttcactttttgtaaaaatttgcatttttataaaattgaactttttgttccaagtctcatttgtttaattctgacaaaatgacgaatttacataattgccatttggcggtttcccgaaggattcgatctccccaaaaatctgggcgcatcggttcatggggactgcccgaagaaccaaaaaaaataaaaatcatttttttcaattgtctatttggggtactcaaacatttatggggagcaaaaacccataataacgcaaattgaaatttgaaaggtgtaattaattattctcacggcacgcaaagtcaatgagacaagaaaatgtgggaaggaaaattaaaattcacgataagttaaaattttagtcacaaaaaggaaatgtaaattagtttgaatttcaaaagttaaccaattttagcgaaacattacgacagaaaaccctaaacttccaactcaatttgttctttcagcaaattaatttaattttgctttattaaattaccctttttgttgactttaattttgtgccaatg

SEQ ID NO: 113006 - DNA, 75 bp, Heterodera glycines
ttttcagacttaataaacataaaattataataatgaacttttcttaaaccaaaacaatgaaaacatcaaattatg

SEQ ID NO: 113007 - DNA, 64 bp, Heterodera glycines
actctggggggcgcgaaggaagcgccttacggatcaagacaggtgtattaattgcctcattatg

SEQ ID NO: 113008 - DNA, 539 bp, Heterodera glycines
atttatttaataaaaaaaatttgcgttaatcaattcttttgaaatatcaatttttgctttgggtgtagcccacttggcaaagtaggctacaacccgaattcgaacaaaatgtctaaaaatggtggtgaacgcataaacaacagacaattgatgtgaatttgtgtgaaaccgttagcgcgcaaataaattatcaattcactattcattcaaccattatcatatatatgtatttaaattaacgaataaacaagtaaaatttaaatatcctgtgatacctgaaagtgccggtgccattggaaaaatattgagtgtattatatcggtttcttaagtggttgtttatgtgcatttaatttttgatcattttgagtcaattctgtatctgaaaatttcaccaaaatttcaaaaattcccccggcagcgccacaacatttatttcaaaaaattaataaacactagataccggagattttaaatttgcggcatttgaactcaaaattttctgtgggacggaaccgcctaatctcccacttaaaaatg

SEQ ID NO: 113009 - DNA, 299 bp, Heterodera glycines
tccatctattaacattttgttctttactttttaactaatacttagaatcaataataatattatttaatttgatgttaaaggtcagcagcatccatttaaaataaattctcagaataaattaattgaattagcgatggccgacgatgaaatatttgaataaatcggttaattggccccagggtgaccatctcttttgtgagaaaaatggcgcgcagacataaaattacggcaaaaatatgcgcaggcactaaatatggcatttttaaaacccttttaaatgcagccattatacatatatg

SEQ ID NO: 113010 - DNA, 368 bp, Heterodera glycines
tagcagcaaattagactttgctgccctaaatttgggtgatcaatttgtaattgtaatatgctgaaattagtaaaggaagaatccggggagattttcgagttttattttcgtcggagatttggtgaagaaaaattaaattgacaaatgccacaacaaattaaagtcaatttagcaccaaaaagtgccaactgaacaaagtgtgaagcatgacaaagtgttcccttgccattaagaaattgctgggctaaaagtgacagaaaaacgcatcctattccaaacttttcaattggtttaacattttaaaattatcgcaaatttttagtgaaaaaataaaaaatatttttggtcatttcgttttcttagaaatg

SEQ ID NO: 113011 - DNA, 1003 bp, Heterodera glycines
ttcatatatattttcattttttttacatattttgagtattttttacggaaatttttggaaatcctcaaaaaaaaatccaaaatttcggcaaatatttttgtacatattttcgtttttttacatattttgaaaatttataaagaaaaaataagtttgaaaatgttgcctaaaaataccaaaaaaaagtaatttttagtcattttgtgttgtgggggaccctatcttttgtcaatttcatttttttaaattgataaattaatttattatttaaaacggagtaatttgttaagccagaaaaaaaaattcggagttcttctcggtttatttccttttttgttcgggttaaatttggacaaataatgatgatgttgtattttcttttgaagactgaaaattctttcggctttgtgattacatgccgagaagaaggactggtattatatatgtatatgttgctgcccctcttgtatttttacccttggacagttcagtgccaaagatatttggccatttcagtcacggttctgtaattcttcagggattcgttgccgcaaaaattctagggttcttttattacaaaatgagagacaccgattgttatgtattttatcgggtttttggacctgggctatgaatgatattttgcttattatgttagtgtttttccttgtaaaaaatcatttttaacgtccatttaaaattgcttaaagacattaacatgtgaacacaaaatccatattgcattttgcaatagctaaaatgcccgtctttttggtttccatcacccctccaccggccaatcttcggcagcaattagcgctgtcagcaatgaaattttaattccttttctaaacaaccaatttaatttcccaaaaaattcacattttattgccaaaaaatttacccaaaaattcatattttatgccaaaatctccttttttaattgagaagaaattatcggtgtctttttacgctgtcggattttttgaaggtgctcaggatg

SEQ ID NO: 113012 - DNA, 341 bp, Heterodera glycines
gcacggatcgagccggggataagaccattggaaagagcagctcgagctttacaagaaggtatggaaagaaaaaatagttatttctgggactttttcagaaatcagaattaattctccaatgtggcccaaattttaggcccccagccacagccccttgcttctcccagttttaagtcttggatttgtcaaataaattcaagacttcaaattaataatcaaaaattctcttaaaatttttttgaacccaattcaaaaaaggaaaaaaatttgcagtcaaaaaattattcgaatttctccaattttgtttccataatttccgaaagttattcggtatcataatg

SEQ ID NO: 113013 - DNA, 462 bp, Heterodera glycines
aaatccgttccctattgatgaacaagggcacattatttttcggaatgaacaaaaatgtattttattggctgatgtttttcaaaagtcatttttgtacaatgacttactcagccatgaaaaccctaatcagatcacagacattgaatttaatgtctataatatttggaatttattgaaaaaactccctagaagaaattcgacatcgcctgatggcatcccttacttatccctgtcttcaaaaaaggagagacagataatcccataaattatcgccccatttcactaacttgtactttatgcagggtaatggaaaaaataataaagctagaaatacttaaatttttgaataaaaatcaattttttagtccatttcagtttggattcctgagacaaagatatttattctgattgtgtcgccaattaattgtcaaaacggcagtgtgctaattgcagcaaaaaatg

SEQ ID NO: 113014 - DNA, 907 bp, Heterodera glycines
ggaaagtggtatccgtttctctgggaaaaatcgttaaaaaatcctaaaattcaaaaacccgaaaaccgttttttaggcctagctcgaaaaattttcaaaattttcgaaattttaaaacttggttggatagcctttcaaatactacacatttttgctcagaaacaatttttcggtcaaagcaacccctggcgagttattcgcctggtactgaagtgtacattttgagcacacttcaattagccaagcgtgcaggccagggggtggctctaataaaaaaataaaaaataccagcatgtagaggacagttgtggggagtgccctcacagcgggcactttttaattcgggttttagaaaaaaagttaggggccttcaaacgcaagaaaaagtgagaaatcggtccccgggactcagtcgtccgcgctgaatttttttctatagttttcccggattctcctcaaaaagttgtaagacccttccaccagtttcagacccgtcccattagccgttaagctcaaattagtttttgaaacgaaactccttgtcaatataacgtatatactagcgggtgcgtgaaccgtcggctatttagctgggaaaaagcgcttcgcgctttgggagcttcgctacctaggctgtgaagcgattcaaattgattgaatttgttggagagatttttttgaatttttaaaaaattattaggggtttttagtccacatcgaggctcaagacgggcgcttcgcgcccgttttttagcttgttaggccgcttcgcggcctcagtcgggcgcttcgcgcccgtttttcaaaatttgttgaccttacagggattagaagaggtaccactgtgattaggagaggtacaacggtgattagaagaggtacaaaagtgattagtagaggtacaatg

SEQ ID NO: 113015 - DNA, 172 bp, Heterodera glycines
tttattcgattaattgacgttttatttttttatgactattaaaaatatgcaaagaaaaatttattttttatttatgacgtaaatttattatatttttcgtatgcataatattttagctttattattcatttaattttttttttaatttatttttttagtgccataataaatg

SEQ ID NO: 113016 - DNA, 1003 bp, Heterodera glycines
cgtttgtttttaaagaatttttgttgttttttaaggcaatgtgccaaacttttttaaaaaatttttctcagtgacgaaatgatcggccacccttattttaactattttgagattttgattttatgacaaaatttaaccaatcacacgttttatgaacaaaattttaaaccaatcaattcatttaaatttgatttaaaaaaataattttgagttatgtaaagagtgaagtgataaaaatatggagttactcgtttttgtgggacagacgttcaggctgaataataacttcaaatgacccatttgattataaatgaagatagatggtgcttcgcgatcttggatcggattcaaaagctaaaatgataaatttcacggttatgtatctcatccactctgttccgatgattgttttccccattattagttttagagctccaaatttcgttaattgaagccttggtgctacctcaaatgggtctgaagattcagacccatgcgctttttgtcgcttcgcccacacccatatttttgtcgcttcgacatagcaccgaataaatcggagggggagactaattggttgacctttataattgatattgagcccataaaaacgaataaaataaaatgacagaatggccatgaattggatggtcgtcaaaaggcgtcgtccgtccgtcttcccttacgcttttcccttcggtttgcttttcgtcgctttccccttcggtttgcttttcgtcgctttccccttcggtttgcttttcgtcgctttccccttcggtttgcttttcgtcgctttccccttcggtttgcttttcgtcgcttttcccttcgcttttcgtccgttgtcccccccccccccccgcttcttcttcgttccttccccttttcttcttccgttcccttcacaatcggcttattgtccctccgtcttcgctttgctcttccctctccttcctttgctgttcattttttatttgcagaaagcgatcctcgcccaatg

SEQ ID NO: 113017 - DNA, 670 bp, Heterodera glycines
ggggggttccattcgaggggggggggggcgtataatcgaagaaatacggtatttagctatttttcttcacattttgtttgatgagaaatgcacgaaaaatacaattttagctcggaaattcataggtattatcgtcacaattgtcacatggagccacaggtgctaggtcgaaggacaaaaagtgcaaaatttgttaaaattttgactaaataaactcataacttttctcatgcgcaaccatattgcaaaatcttggtaatacgatagcactcgaaatgcgttattagcttgctaaatttcagaaaatttattatgtgatctagccaaaaaactggaaaaattgtcataacttttgaaagacttaaaaattttttttttaaatttagcaagctaatatgcaattcaagagctatcgtatgatgccaagattgtgcactttggttgagtctaagaaaagttatgagtggattttgtcaaaaatttggcaaattttgcactttttgtctttcggcccattagattatttttgttcacaattttaatttaatttttatatttttccataaattagaatcgttaatttttaggcaaaaaatccgaaatttaaaaaaaagaaatcttaaaaatttaacatatttctcaatctcgcattgcaaacggaagaaaaatg

SEQ ID NO: 113018 - DNA, 128 bp, Heterodera glycines
aatagttttttttttaatctttttaggttttatgtcttgtgctaaaataacatgcaactttaaatttcaaatttagaacagagtattttttgtgttttatgaattaaagaagcgctgtttagtaaatg

SEQ ID NO: 113019 - DNA, 1003 bp, Heterodera glycines
cggattgtttggtgctcattttgccaaaatctccaatttatatttgttgtcagtgtttttctcttagtgatctgttgaaaatttggcgaggtcggcccgtcgattagtaactgaaggaatggttgggtggcgaattgggggaagagtctcgccaaatccattcaattcattcaactctctctcacccattctccacaatcgattagtaataaataattaggaaaaacaaagaataatgaatgatattttaattcattttaataatttatagaaaatattgaaacggttttttttataattgtgggctttttcaaaagtaattatgattatctcaccaccataagctacatacgtttgagaacaaatcatttaaaaattttctcatattattaaatttaaacacattatttaatttataaatttaaaatatttaaagattggactgtttcaaaagctcttcagaagtttcccaaggtctcagtcttcatttttttttaaataatgtcaatcctgcggagaataggattgaattcaggagtttttaccgtaaaaatataaatatatgccagcatcagcagtgataggatcttaatccgactctcaaattctgattcccactttctgacatttcagtgtcgggatcatgtcatttcctaaatttcttacaaccctcgggtctgacaaatgagtgtcgattaccgagtcttttgaggaaaaaaaaactgggaatttggtatatgaaatagccgagaataatatattttaaaataaatttcatacattttctaaagtatgatttttggattggtttcccagaaaatttatgtaatataaatcgatcatgtcgaaatgaaaaataaaggataatcgaaaggatctcagataaaagcgaaaatgcacaatttgccattgacttcaaataaatttggattggagtgattcttttcttttgacttggcgcacaatcacttctttgtttcccatttttattccttttcagatg

SEQ ID NO: 113020 - DNA, 315 bp, Heterodera glycines
aggggcgatgatgtatcgtaaatgcattatgttaaaaataattcaaattgataaaccgcattattcaaatgtgttttgagtggtagggaaggggtggttgtacgtgtgggtgtttgtgtgtgtgtgtgtgatcatttgttaactggagcgctcgcgagcggtcacattatgtttgtgtcgcacgcatgtgatcatttggtgactggagtgctcgcgagcgctcaattatgttcagatcacacgcgtgtgatcatttgttgatggccgcccgcatgtgatcatttgttggctgtagccgcgggcggtcacattatg

SEQ ID NO: 113021 - DNA, 224 bp, Heterodera glycines
  unsure (1)..(224): unsure at all n locations
ccctaagaattaaatatnnttgttttgaaaaaaatggtttcaaatagcacccaattgtcctcgcttacaaatacatttttcgttttttattaatttaaaagaaaatttttcaatttttgttgctctaagttgcttaggtatttttgatcaatatttgttacatattttgacattttttctcaaatattatttaaatatttcgagattttttgaaaatataaatg

SEQ ID NO: 113022 - DNA, 969 bp, Heterodera glycines
  unsure (1)..(969): unsure at all n locations
atgaggtcaaacgaatgattcatctaaggaactgatcatgaattagnctagnataacattaacctttaaaaaaangnaatatanannatattataattgttttctttgtatntnagtaatggataaaantttatattatcttcaaagattttataattccctcttacgaagtgtattataaaaaggttaatttgcattaagaaacattaaatgcggaaacattatcagaataattttgaatttgctttaaaatggtgattttacatgcataatttaaaatatggtgtcatttgataaataattaaacgtttcaaacttttgcatttttacaagtttggaaaagtaccggttaaccctggcatcggttgaaaatccaggtccctgtacggtcaccgcggtaccggtcagtaccggtcccagttaattctaaaaattaccggtcccaactactctagtacaattgcttcagatgataaaaaggacctattatatttctacatttttcattagctcggttggtgagaaaaataaaatgaatgaaaaatggtgtgtttggtcatttcgtaaaaatggcaatttacaggttttgcgtgaaaaagtcatcatgactttgttaaaagaatccaaattatataatattctatcataatttcttggattgggcatttattgctatactatatggaaattttaaaaaatttaagttagtttcaaaaaattgtgtccaaaaatgttgaaaaaattgtcgtaactttttgaaaactgaatgaaattttcatcttctaaagtaatacaaaaatcgaataatataaaatattattaatttgctggcatttaatcctctcttctcgggcccacatttatagttagacatgccaatttaaatttatattatccaactcaagggcccgattatgatgtttgtctttatggcacggatcttttaggatggaaagttatataaaaatg

SEQ ID NO: 113023 - DNA, 280 bp, Heterodera glycines
aaaaattattgttgttttttatgtcaaaaaaagtaattttattttaaatttctcataaaaaatcattaaaattaaattttgtttatttaactaataaaaagaggaattagtataaattaaaaattgtaggatagaataaacaattacaaaagtaaaataatgtaattttctttctggacaatatttctcattttcgaaaattcaattttttattggctttaattaggtgttgaaaccttttttcatacaattatactctgtttttctcaaggatattatg

SEQ ID NO: 113024 - DNA, 184 bp, Heterodera glycines
tttaaagaatttttttatgaatataaatttaaaaaaccacaatcatgatccgaaatatctgacattattattgagaatgagtttgctatttatcgggcaagggataaatcccattagaaaagtatttaaggagttagagttgataatgtaaaaatggtcattttcgaggtatgtatttttgatg

SEQ ID NO: 113025 - DNA, 367 bp, Heterodera glycines
taaatttagtaaacaaaaaaaataaaacgaacatcaaacaaaagttagcaaaaaatctactcgaaaaaatgcaaaccttttttcagcaaagaaaaactatcaaacattttttagtataaaaaatggttttttaaaattatttatttatattatacattaattaaaatttatttatttttagttgaatttgaacccgaggtctaaaaagacgaatttattaaacaactgagccaccaattaagtgaaaagacagccttaatttactagaaatttaaagtaaataaaaataaaaacttaataaaccatataaataaccatttaaataaattaattaaattgtttagtataggaaattaataatttgatg

SEQ ID NO: 113026 - DNA, 482 bp, Heterodera glycines
ttttcttggctttttctccaatctctgggactcaacccaccagcatttcaatcactggcactcaacccaccaacatttcaatcactgaaaatcaagccaccagcattccaatctctgagactcaattctcaggctttccaatcgtgggactcaacccatcagtatttcaatctctgagactcaaaatctccggcattccaaacactgggactcaacccaccaactttcaatgacattccaatctctgggactcaacccaccagcatttcaatctctgagactcaattctcaggctttccaatcgctgggactcaacccaccagcatttcaatctctgggactcaattctcctgcatttcaatcactggcactcaacccaccaacatttcaatcactgggactcaaatctccggcattccaaacaatgggactcaaatctccggcattccaaacactggcactcaacccaccaactttcaatg

SEQ ID NO: 113027 - DNA, 635 bp, Heterodera glycines
aaaggaatttaaaaaattacatgtaatttattgtcttgtaagatttcattatgaaaaggtagaagagagggacacatacccccaaaacgttgtctaacatatagtaaatataaatttcacaccgttactaaccctcccgccaatcattagctgcgagttatgaaagttagaaaaaaattaaaaaatatgttttttcgcttaattaatttcattcttaaatatttttaatcggaatttgttcattcgctgtccgttcgctcattttctgtgatgataaacagattttgcacacaaaataaacaaatgttgaagcgaaatgagaattggtggaatgtatttgcttccatttgcctcccactttctttttctctgcttaaaaatgatttttgttcttatttgttcgaagattttccggattcgatcccaatttcagtgaaaatgccattggcgagagttgggatttttgtttcggaatggaaatttgtttgattttgcaaagcgccgccgcataaaaattccttttgccggaaagtccgtccgatcctaattatgaaaatccataacaaattttgactttttaaaattcattcgtttcaatgcctatcataaattttgatcggttgcccgccgcaatg

SEQ ID NO: 113028 - DNA, 662 bp, Heterodera glycines
ctatgcattttccttcccaggttctattccccattatgcaaataagaaaatgattaataattatattttttacatttagaaatgcgacactttttaaacaagaaaaaaaatgaaacaaggaaatgaaggtgaagaaaagacaacattgacatatgtaccatgaaaaatgtcctattttttgttacccatatctaaattaaacagcaattcatttgcatgaaaaaagacagatattttgggatttataacagcaggaaaatcaagaaaattttccaaaataaagatatcgcaagttaaaataagattatggtgtcaaaaataagcacatttttgtaaacttggcaaaaacccggcctttccttgaattataatcattatgcttttcatatgatccagtttctcaaatagtgtaaatgttattgaatgactaattaattaatttcctgtttaaagtgtatgaaaattaattaagaaataattaaattaaattctgcatatatatggttagtttttcaaatgtccttgacaaaaaattcctgttagatacttgaaatccatatcagtccttggacatggtaatcggatgatgttgattaatttttaagttttttttgttgagaaaataatattattttaataattttttagatttggaagtcatg

SEQ ID NO: 113029 - DNA, 1003 bp, Heterodera glycines
gaaaattaataaaaatttattaacagttttcaaggatagaaggacttcgataaatttattaaggcattgaattattagagcgaggcacaggataatcccatgccggattttgcggaatctcaacccgtaatcccgattttttgcgaattgtttgattttgcgtgattaatcccgcaaattcggcctggaaaaagagccaacctaaatgacccgggaaaggatacgagaaccgagaccccaaaaaacccgagaaatttctcgacccgggaatcgagaaccgagaaatgttaaagaaattaatttaaagatattttttaagatcataaacacataaaaaaggggtagctcaaacggaatttttgcgtggagtctcaacatcaaagtgacggccttttttgcttttaaaaacgcttttttcgcactttttccaatgccagggttcggattaaaaatttttgaaaataataacatcaacgccaaaaaataagattttaaggtaaaaccaaataccgcaaaaaattcaccaacgttagaaaaaaaattatgacttctgcttttgtccaatctttaacggtcgagaaaaacagtaaaaaaaaatttaaattatagctttttaaacccgagttgggatcccgcaaaattgggcatggcgtcgtccctgccgggctctaataatccaattccatccttaaaatatctgttaagaatttttattaattttcgtttttattttccatatcaattaattaattaatcaaaattcattatttctctccaattattttctgttactgatctgataattcattttctgcatttaatttacatcggaatttctgctgcttttccatcgcttttccttctttttttgtgatgattcattcattttgtctatcaaattgtgatcagaaaaaactgacttttgaatacgaaaagataaatatgtaaaattaaaaaatataatactcacaaaacaattttatctttaagaaaatggcaaatg

SEQ ID NO: 113030 - DNA, 268 bp, Heterodera glycines
agttggaaggatatgcgggaaaattgagagatttggaaaattacgatgattcaattgtccatgttccgtgatgattttattgaatgtttaataaaattattttttttcaatatgtgaagctgagggtgtgtctatagagagaattcggatcacataggagcattaaaaatttgttcgaattttggtcgccattagattagaaattaaaaatttttcctatttcatggttatatttgtgtttagggttaggcaaggggctatataaatg

SEQ ID NO: 113031 - DNA, 141 bp, Heterodera glycines
ttgcaaaatgagatagtgccgtggagaaaggcattcggcgaactgagacagcggggcgaacagctggccaaaagggggcatgaaagcgtagccgagcgaatggaacgggtggagaaccaagcaaaagcattggagggcatg

SEQ ID NO: 113032 - DNA, 63 bp, Heterodera glycines
ttcatgtgttatgttataccacttgggtacagtatcttatggtacccctagttatacagtatg

SEQ ID NO: 113033 - DNA, 1003 bp, Heterodera glycines
caaatgcttaaatattatattattaactattaccagagagaaacaccagaaaatggctgatgagagcaataaaaaggacaaaactcacagaataattaattcactaatgcataattaattatatatttattatttgcatgttttatccgtccaaaatcacttctttttttaattcaaaatagcattgtgagaatcgctttcgtcccaatttgggtcgttaaataatgtaaggaagaagctggctgggcggttaaaacgcggaaagcgggggttgataagatccataaaagaaagggcggatgtgcctcggtagcttaatggtagagctgcccacggaaagggtgcatgagtgggttcgattcccacccgaggtttaacattttgcccatttcttattataatttcaatttataattcgcaaatgtgcttaatgaggacaactccaaagtcgaacttcgtcgtttttcaaaatccgaatccgtcccctcgacgacaacagaagtgccgctttttaacttaacctcgtcaaatgcaataaacttcccgatttttgtgctgtgaattgactgaactgcttgaactaagcatttaaattctatgccggatgtgaagatgataatattttgccgaaagggtgaaaaaaagaacactaaacaaaaagataattaatgcaataaatgatcaaattttgcgagaagttttcttagtcggttgaaatttgtataatattgttgaaatgaccagccaactttctttttacactcattaaaatttatttgcccaaatacacaaaatacaataattaaataataaacaattaaaaaataacaataattaaaattcgtagtttcaaattcctctctctcccccaaaagattataattattattttcttcgtcctttttttcttatcaatgggccagtctttgattttgggctttgcaaatgaacggagagggaactccgatcatttgaatctgacaaaggccaaacgcagtaaatg

SEQ ID NO: 113034 - DNA, 320 bp, Heterodera glycines
tgttcaattaagccatcgaaaatgccattttgtgctttttaaggagtttgaggactattccttttttaaaacaatttattaattttttgaaatctgctgttattaattcagctcgatttctattttttcagggtagtgccaataacttttctcattaaaattaatttaaaaactcgaaaattaattgttcattatttttccaaatctttgttttttggcatttttttgttgttatccttcatgggttttcgaaaatttggtaagattagaatctctgctagtttcagttggtcaaatcactttattatttattaataatg

SEQ ID NO: 113035 - DNA, 313 bp, Heterodera glycines
cactatgggtcaagcccagtgtcagacaaaattgctcataacgccaaatagcgcatttggcgtaaatttttgcccgctatttcaaaatttacactgaaaatgccttttttgtattttttattttgatctgccataactcgcttcattcccaactaaactgaacaaatttggtatcaacaaaaagtttttgaaaaggagaatctttttctaagcgaatgctaagcaatttgacatcccagaaaaaagttgtgatactttcaaatttttatcacgttataactcaagtcctaaactgctgttttcagcaaaaatg

SEQ ID NO: 113036 - DNA, 671 bp, Heterodera glycines
  unsure (1)..(671): unsure at all n locations
ataacnnttccttgggtccaccactataaatatacntggaaactttcattttttgttcattcaattcttcaattgttacatgttacatgtcacatgtaaattaaaatccatataatattttttcctttgttcattcaagtctaatttgctacataatacatgtcaacagaaattgcctatgaatagattttaatttcatttttgttcattaaagtcaaaattaattatttgttacatgttacatgtaaacataacttccttgggtccaccactataaatatactggaaactttcattttttgttcattcaattcttcaattgttacatgttacatgtcacatgtaaattaaaatccatataatattttttcctttgttcattcaagtctaatttgctacataatacatgtcaacagaaattgcctatgaatagattttaatttcatttttgttcattaaagtcaaaattaattatttgttacatgttacatgtaaacataacttccttgggtccaccactataaatatactggaaactttcattttttgttcattcaattcttcaattgttacatgttacctaaatgtaacatataaacacaaattccctatgaatagactttaatttaattttcacgttttcaatttttaaagattgcttttattatatg

SEQ ID NO: 113037 - DNA, 54 bp, Heterodera glycines
actccgactttttgagaaggccgaattgaaggaaggagaaaagtgcgagcgatg

SEQ ID NO: 113038 - DNA, 69 bp, Heterodera glycines
catactccatccgtgagatcagcgtgcacgccaggcggtcaaatatacccggcggtgccgcaccgcatg

SEQ ID NO: 113039 - DNA, 494 bp, Heterodera glycines
tttcataaaaaaaatcttaggaatttcttagcaagaaaatttgaaaaaaaatttttgaaaaaatttcagcgattttttggaaaatttttcaaaaaacttagtattttatcataaattttcgaacgctgaaaaattttttaaaattttttttggaattttgttactaagaattttcccaagaatttttttatgaaaaatttctaggtttgagattttttttttaaattttccgggggaaacgatgaggtaagggggggggggaacgacccagctccatacattttaatgatgactaaaaatcattcgaggaattactaccattgagattgcaaaaaaaaattagaaattgtataatccaatgtaacagttttagcttatttggaatatgagaattgatttgaactcaaaaatggataaacattaaaatttcttaaaaaaccataacgaaatgctctttatcccaccgggttgttgaatgttgtgcacggacaatg

SEQ ID NO: 113040 - DNA, 437 bp, Heterodera glycines
tttaaaaaaaaaaaaaattacccaattttttttgggaatttaagaaggaaaagaaaatccccctttttattatttttaatattctttttatgatgggaaatgatcaaaattaaacggaaaagaaaaaattccatcacaaatcttttaagtaattttggggggaaaatggaaggaaaagaagaggcaataggaaaggaattaaaaaaaagagaaattattggaaaattttataaaataaaagagaaaatttagcaaaagggaagaaaatattcaacaaaagaatgggataaaattattcgaaaatagcgaaaaaattgggaacaaattgccaatatatttataaatggatcaaagaatttggtcttcaaaaacgcagatctttcaaatcaaaaactgatgaagaaaagttagaaattgtacagaaatttattgaaatg

SEQ ID NO: 113041 - DNA, 1003 bp, Heterodera glycines
tgagaaaaaacatttggtattataaaaattcacaacatctgtgacaaaatcattaaaaaaaagaaagaaaaaatttgtaaggaaaattgtcataattagggggttatcaaaatgtgaactgtggaaggagggaaacgcacgaaaaaccttttacctgcttggtttgttactttaggacgaagtcccatatgcatattttgtgatattttttcgcgatttatatgcatatttaatgtttggatattctggtgggcgttactcaaaaaaccatcaaatgagaaaattttttgatataccgtatttcctcgattataagccccggggcttctattgttcaacccccctccaaagggggcttatattcgagggggggcttttattgttcaacccctttccctatataaattcttaaaattttttgctttctgcataatggtacaatttaaatcttaatctgaaatttttgaattgaaaagatttttcattttttggcccttggaaatttaggcgaatgtttgaaaattcataattcacttctaaatgaatcaattaaagtgcaaaaaagcattaaaaatagagaaaaatctggagcattttatacttttagaattttctatcttcaaaatgaagaagttattacataaattttggaaaaattcgttttttgagaaaaaaaaattaatagcgctgttctgaaaaggttttttgaaaaacacgaaattcttcctctataagcttctgtttattctatatttttataagacttgaaaaaaagtacaaaaataaactgattttggaattcgggatcatagatggaagcaaatggtttttttgtgccatgggttcagatccacttgcctgtaaaaatgttttttagggtttttgagaccactaatcaagaacttggcatccattttgcccaattccaaagccttgatccgaactcgaaaccccaaaaataatttttttttaaatgttgcaggcatgtggatttgaacccatg

SEQ ID NO: 113042 - DNA, 375 bp, Heterodera glycines
atgatgaaatgtgatggaataatgaaataaagagaagaatgaacagcattttggcatgaattttggagagaatgaattggtccgaccaattgaaatgttatttggtaattagagtaataaatttcttgtgggagggtgtgagtgttaatttcagccaataatttaaaacggattattaaaatgagtttttcatagatatcccaaaaaatagcaattttagcagaacaaattttattcaattatttattttaattagatatcactgacaaaagattggcaaatttgtatgtaaaagttttgcaaaaaaaggacgcgaatttagtacgacaaaatgaagcggatttatcaacaaggatatttttttaccaaatgatg

SEQ ID NO: 113043 - DNA, 253 bp, Heterodera glycines
  unsure (1)..(253): unsure at all n locations
agagtcttttataataanagacanaagaataattggggaaaaatntgaaaaaatattcaaaggattttaaaaataaatcattgggccgaaaaaacgaactctttaaacgaactttntggcaatattggagcaaatcaaagcggactatgggcatgctaacagctgcaaattaagcggcagccaaattaatttgacaaatttgggaaaagaaatttccatttttggcaaaattttatacgaaacattgaaaatg

SEQ ID NO: 113044 - DNA, 808 bp, Heterodera glycines
tgaacggcgaagaaccatcgatgaagcgaaataagtttcggaagacagacaagcgaattttgaatcttattgaaaatttgatgcccaaaatattattgagtctctttggggaatttcaaataattgtgttatgaacccgtgattttgttatttaatgactttttgaaataaacatcagaattttataattgaaatattgagatatgactactttttaacgaaaaaaattctggcggcgagatggccaaaaaacaaggcgcgacgagttggccgcggtgagttggacggcggcgagatagcgccgcggcgagttggccccgcggcgagtttctcgcggtgagatggccgcggcgaagtgaccccgatccgttggtcagcggtcactgcataaaaaatgagaatggcatgtgcgagtcacaaggaaaatgagacaatgcagacaggcatttagggcaaagcgaaacatgcggagaaactaacattctagagagtaaaaggaaaacaaccgcgcactggtgagaacgcagaagaagagcatagaagaaaagcacaaaatgaaatagtgtgcacttaaagagtgggagagatatttgagagaagagaataagcgagacagtgcggtagacactacgccaatctctccggccttcgctctgctttaacgagccaaacacaacaaattccaagccgagaagaccaaaaacattctccagtgtctgctgcggctttccatgctaattactcattgctaattaatcctaaacaccgaattgtcctctgttgctgcgttctattttgcttactaatg

SEQ ID NO: 113045 - DNA, 489 bp, Heterodera glycines
gacttagcagtttaggacttgagttatgttgataaaaattgaaaaactcacaattttttcatatgtatcaaattagtttatatttcttagaaaaaaattctccttttcaaaatctttttttagataccaattttgttcagtttagttggagatgaagcgagttatggctgatcatcatcaaaataaacaatgcaaaaaaggcactgatcattgtaaattttgaattagcgcgttaagtcaaaacgctatgacattacaacttttttaaaacaataaaaaacgccataaaaaaaatttaaatcctcacgcctcacaattcagtttagaatcagtagctcatgaaaaaaggaacctaaatacatacatgtagacctaacctctaccgcaattccacacctgaagttataaaaacctattacttccatcacttgactaattcctatttaaagatccaattaattcaaaaaatacttacctatcactagcatg

SEQ ID NO: 113046 - DNA, 524 bp, Heterodera glycines
attatcccccggggtgattattgttcaacttcctcagaaagggggggattattaaatacgggggagaccgggggattattgttcaacctcctcagaaaggggggggggataattggatgcgggggataatggataattagagataatacggtatatctttcattcgaatgtgaaacagtctcgctaatcccacatttgagcaaaaattttgatcataattctgccaatcactttttccgttctcccatcccttcacagcggatcaacaaccaattgttcctcggctctcattcaaagggcacagcaccgtatgcatatttcaatggccaatacattgacggatcgaaggaaatcatcaaaacagttggccaacattttaagcaatatcagccggttgaaggtgaagaggagctgatgggcacgctcctcgacatgtttaagtgggttgggttgcgtaacatttttttgttgataaggctaattatgctaattaatttggtttacacaattacagtattcttatg

SEQ ID NO: 113047 - DNA, 733 bp, Heterodera glycines
aaatcagtcagagaacggcaggtttggtgtaaagagggaagcaattactcaattaggggtcaaacaattatgctaagtcactgctcgcttaggacaaagtcgataattatttagaagaagcttttattaaggcgaacataaattaataatatccaatgcgaatgaatgaatgtcaaaaggaatgtccttatataaaaagtttggtgtctgttgtgtgtgtccagtgtttgaatttgtgtggcgttttgtttaatttttgcgttaaaaatgaatttgaaaagaaatgtttggttttgctttttttcatttttgtttaattagtttttgcaaaaagcacagttaaaataaatttctcttttttttttcgtttttaatgacaaaatagtttttgtatgtttattaatgataatgaaatcgcaatgaatgctttctattgcatttcttaagagaaaaagtttttgtttttgttattatcaaaaagcgtctggaaatgaatgctcttaacacttttgtaaagaaaaagaaaatgtttttgtaaatgaattcctttttattgaattaaaattgatttgattagttatgaataaatttatgttagtattatttgtttttgattatgtcaagctcaatggaaatgttattgtttttgatattgcattgaaaaagttttgattcgagaatttgttttgaactttgaaatggaaattttgtttgtttgtaattaaagcggatg

SEQ ID NO: 113048 - DNA, 338 bp, Heterodera glycines
aagctttcgaatgataccaaaattgtccaatttggttggcaaaaacctcttaaaacaattctcaaaaacggcattttttagttttttggacaaaaataaataaaaatattcatgttgcacaacggactcgaaccttcttcctttgtcccttcactatcttacaaaaaccactgagccacacgcaaaactttttcggtacagtagctcagttttggacgctgtgttcactaattgtctgtgattgaatccctaaccaaaaataaagcatctatctaaatccatttcaaagcacttaaatatattttttagcgtttatttgttagtatcagtggaaaatg

SEQ ID NO: 113049 - DNA, 556 bp, Heterodera glycines
  unsure (1)..(556): unsure at all n locations
gctaactgggatagaaaaactactggtaatattgccttcttagaggttgccaactctatggaacncagaagggaccacctttttaattttcactgagaatcgccaaaatatgggcaaatttgggtcgtacaaatccgaacgaatcattggccatttaagtcatttaaataagtaaattatctttaaattggccaattttgtgactaacaatctgctcgttgtttttcccatcctgcccttagaaatacttggacagtttgcattcattttggactcgctcagttgggccgtcacgtttgaacccccacgttttgtgccctatacatttgtgccccatgtttttttataacttttttctgtcatcccaatcaaacaatgttggtatcactcgtaaagctcttcaatgctttattagccttgcaaaaaaaggattttctagcatattaaattgttatttaaaaatttcaaaaatcttgactcttgcaatttatcatggtgtaactttttaaacaattgccgaattgcgaagcaatagctagaaattcttctaaatatg

SEQ ID NO: 113050 - DNA, 141 bp, Heterodera glycines
ttttttggtttataatttgtctgtcgatgctttaaaatgattgatgatgactgaggcgggattgcctttggatttgtgtagcgctcgttaacttgtttccctataaaaacgggaaattgttattgcctatttaacaaaatg

SEQ ID NO: 113051 - DNA, 684 bp, Heterodera glycines
tagaaattccaaatgaatctcataaaattctcctaatttctttctatttttcaaactacattccactaaatttgatcaaaaacgaagatagttatgaattttcgaaatttgactggattttccggggctcaaatttagacgatttttcaaaaatttgtaaccaccttccaaaaagtctgaaaacaaaaataaagtatatattcgagttcagcaccttaaattaggccataaaaatgcattttggctaatttaggagcaaaaaaatttttcatgaaatgcaaaaccatggggtcccccctttggttttgagtttcaaaatcacaattaattttataactttttttaaattcaagataaaaacatgagataaagcacattagattggacttaaaattctctacaaaaaagctcttagacgattttttgataaaatcaactcctgacgagttattgcgccagaactgaaattgaggcctagcaaccaaaaattttctatttccaaaaaaaattttaaaaatttttctgaaaatgacaccaatcgatagagcatgaaaaacggttgcttgaaagtggtctccgttttccccggaaaaatctgtaaaaaataataaaattaaaaaacggaaaattttcgagggggcctagctcgaaaatttctgaaaatttcagaaatccaaaaacatg

SEQ ID NO: 113052 - DNA, 1003 bp, Heterodera glycines
cgagcaaaataaatttgaaatttgattgaatgtttctttgtcttttttgtccctgccaatttttcgccgttttcattcaatcgccggtgtttcgtctgctaattgtgttcattatcgactcattaatcatttacttaattatgcgcttcacatttcactaattaatctctctcctctcttccatccgcttcttctccttcttcatcatctacttcagtgtccaataaatcattttgtccgtgtgcctttcattttctcatttaaacaccattacttacttatacaaaaggacaaaaagtgtgaattttgtttatttgtgtctgtgttaaattgatttttgttttatttaatttattattattttttttgaaaaaatatttattttattttatttttttctaaatttgaccaacatttctctgaatattgaacataaaaataaatattttctcgcttctttttcatctttttcttcatttttcatttttcaatttcattttttatctgaacctcaaagaccccaaaacacattttgatggtaaaatttgctctttttttttctaatttatcactctctatcaattaatcaattaattaattatcatccatcccttttttaaatttatttcaattattaatttattattattcatttctttctttctctgtcctccttttgctgctgctgatagaccagtgttagacacccctttcccctcattttcatttttttttaaatttatttttatttaaatttaatttaatcctccgatattattcatattaataataaataaatgcttattctttaaaaaactcacacacatgacaaatgtgttgttggccttctgaatctgtgcgttacacagctttttgtctaaagtctttcgcgacgctataaggtgtaaatattattattaattattttattaaaccaccaaagctggcattttctattggcatagttaacacaccaaacgacagagtttttgaagcggaaatg

SEQ ID NO: 113053 - DNA, 353 bp, Heterodera glycines
ttttattttctcgcttttgcacccggttttgtatttcactgaaagcctaaatttgtttgtaaaatttgtttatattttcaggtttgaaacatatttactaatttattatttattcttgcaatatttacataaaatttttattttttcaatttcattattctgattgagtattcatgttcattatttttacaaccaaaaaaactaaattattaaattatatattgttatttaatacaatttcttgtatatacatttttttaattttatttcaaattataaataatattattcttcaagtattttttgattgatatttaattaatcaattaattattatttgctaattacctatg

SEQ ID NO: 113054 - DNA, 755 bp, Heterodera glycines
aaggcttttagggccattagtcaagagaaggaccaacatataaagcaggcaattgcaactttaattgaattccaaaaagacaatttcaaaatttccattgaaacttttacaagtcttatgggcatttcctacaatgggtttttgtcaatgtcacatacgaagatttttttttaatttaaccaagacttggagacacacttaggcaatgtattgaaacgaagataatcatttaaagaatttttatgcttctgaacagcaaggcaatgaaccaaagttgagaaattgtttaataaattggaaaaatatcccttaatccgccaattttttttctcaaagaatgtcaagtcagaactcaagaaattttgaacgaaattagatgaatcaaagcctttgggtaaattagtcatggtaaaataggactgcacatatgatttgcgcagtagcttaattaatttgtcaaagatttaactcagggctgccatccgtccttgaatggcaaggacgtccttgaaattgggccctctttcttgaaaataaaaaatgtccttggatgccaaggacgtccttgaaaatgaacatttagaaaagttttaaaaaaattcaaagaaatttgagaaatctttgtaattttcaacgatattttgattatattatggcattatgtaaataaaatgcaaattttcaaattttctcatgcttgtgaatgaatttgttacgcaatttttcgcgtttgcgacatattatattttagaatg

SEQ ID NO: 113055 - DNA, 365 bp, Heterodera glycines
gcctcaaaaaaagttgggtttttggttattttattggttctaacaattcggaaatgctggactatcgaaggcctgaaacgcacgaaaaacatattaaattttaacttttattttgtattttttttaaaaaccatatttgattattttcaaaatttttagcttattggtccgtaaattttcaaaattttcatttctattcttaggcataaaaattcttaatcaaataggtatgggtgccagcactgatattttaccgagataagttgtctgataatattggaatattataaaatcttttttggaagttgcttcgtaattcattttaagttacgaaggctctgagtcgtttgtctcaatatgaaatg

SEQ ID NO: 113056 - DNA, 219 bp, Heterodera glycines
aattaaaaaattttaaattattttcaaaagggactcaagcttattccttcacaattaattttttaacacatttattgtcttttcgattaaaaaatacataatttgtaatattattaaatatattatttttatttatttatataatgaatagtctataaaatattaatttatttatttatgttaattgttggctatttttgcacatatttcttcaagatg

SEQ ID NO: 113057 - DNA, 385 bp, Heterodera glycines
tttgagagctgaaacatcgtttaagtcaaagcttaaagtgcaaatgctacaccgtccgagattcataataagaaaattattttagttaatgctgataaatttagttttgtgtttttgtatatgaactaatggaaaaaggtaaaagcaaaggaagggaaaacgaattcagctgattaggcacatcataaataggcaattatatgcgttaatctaataattaattgtttaaaaaaataaataattttaatgaataaaaaaattaggtaatttaaaaaatttaaataaaaattattcgccaaagatcactttgacaaaagtcattttacaaattttaattaaatttaaaaaagtacttcgcttatttatgtttttacctgtattaatg

SEQ ID NO: 113058 - DNA, 1003 bp, Heterodera glycines
ctgacagcgcacaattttttggcaaaagcaactgaagtaaagagcttttatctccgttttaaatcaggctaagaaaaaaagttttgcggtaatgaaaataaatgaattacaaaaaaatgaaaaataatgaaaaaagacagggatttttagggggttgagttaactgaaaaacaatttttttgtattcaaaattcaaatttggcgcgctaaatgacccaattatttccccaaatcctgccagtgctgactcagctgtcatttataaaatgattgatggccaaaaatgcgcattttggacctaaaaaatgacacgtgactggtcatgtgaccgaattatttcgaaatacaatgcaccgcgcggaaaatgagtcagctgtcaaggataaatgccccaactgtcaatgaaatatgcaaacaacagctggaccccgtccatcccgtgacaggcgttccgcctatcacatgagccctccggggccactataaaagctgcaattgcgcaaaaaatttttcttttttcgagaaaaaatattgctttggaaaatatttcgcaaattgaattttaattcaaatttaccaataaaatatttattttatatacaaaaaaagtccaataaaaaaaaacaaaaaaaatgtctcaggcgcaaaaaaaattcctgaccgtcccggctgaaaaaagaaaagaaagaaatataaaaaattatttcaaaaaaagtattaatgaaattaaattaaatgaaaataattatgtcgaaatttcttcgactgaaagatcaatgcctgattatgggatacaagaaaatacaataagatttatttttaaaaacccaaaaaaagaaaaccgtaaagaaatgtcagaaaatttcaaaaaaataatagaaaatatgattaaaaaatcaatgcttaaaaaagaatggggtggaaaacccagcggatttcaattgatttgtattgtgaaatattgaccgaccccataattttgccggcccgagacccaaaaatg

SEQ ID NO: 113059 - DNA, 671 bp, Heterodera glycines
atcaggacaagtaagaacattaagaattaattaaattagtatggcataatcaataaattataaaattgtttaattatttgaatctaattaggcacgataaaaataatttaatataattcactaaaccttaaccaacaccaatcattaggatatgattctaatgatcggaaattgacaaaaaaatttttagaaaatttcgattttacggtctctaatcaatatatcctatagctgagcgggaccgggactggtactgaaaaaaacctacaaatgaatgcctagccccggatttgaccgggaccgagactagtcccggtgtttcccagccaaaaagtcacggtttttaacccgaaaaattccctgtaccaatttttttttttacaattaccgctctactctaatataacgaacaaataattttcagattttcattggttacaccggaaaaaaacgtgggcaaaatctgccgaaacagaaatgtgttgccataaaattgtatggcaataataaaagacatttttataatggcacaaatgttttgagaaaattaaaaccatttgattcaaaaaatgagcacattgtcaacatgatggactagtaaaattcaaaatttaattagcattaaaaaataatacctaattaaatttgcaatttttagtggcctaattatg

SEQ ID NO: 113060 - DNA, 289 bp, Heterodera glycines
atacaaaattttttaatttggtttcgtttaaaaaacgttataacgagtttttctcgaaaaatctgtaaaatcttctcatcgacaattcacataaaatatatttgagagcatgactgttatttatgaaattaaattaccttattttaatcaataaattaattgaacaattaatttgttcttttcacaattaactcttcagctccgttccgttggcttttccactgtttatacgctgagccgtgacgcggtcagtgttgtttttgcggattatcctcgagcacgaaaaatg

SEQ ID NO: 113061 - DNA, 337 bp, Heterodera glycines
ttgctcaattgtcgtcgttttcgttgtacacagagaagggatgattgatgaagatgaattgccggtaattaaataatggaaaaatggcaaccaaatgaatttttgtgccttttatatatgaatttatccgaaaaatttgactcttccgactaaaaaatttgctatttaaggcccacacattttgcttttccacgttcattccgttcattcattccatccacttaattattcgtcctcctccaccgccacttaaatcgtcagtttatttaggtaattaattgttttgctatgtgcattttcattgtgctaattgcccccccccatttttcagcgaatg

SEQ ID NO: 113062 - DNA, 205 bp, Heterodera glycines
tgtaagccctttttttaatttgcatcaaaatgcttaaataaatattccgtggaagaaaggtctgaggtgtttgctatttaactaccgaaaccttttcatccgttgtccttttttaaacgtgaaatttttgccgtatgatttttttacaaagagaatatccccttctgtaaaattcagttatggttcgcccgccacggaggatatg

SEQ ID NO: 113063 - DNA, 74 bp, Heterodera glycines
ctaacaatgtttactgttgcttaggaaagctccgaagtggaattgttatgttcaaaagtcagagccgaggaatg

SEQ ID NO: 113064 - DNA, 66 bp, Heterodera glycines
atggagaaacccatttgatactgtagcagtatttgggttatgcaaccaattctaaattaagccatg

SEQ ID NO: 113065 - DNA, 732 bp, Heterodera glycines
ggtgccaaaaagaaaaatgtttaataatacaattttaaaagcattaattcatttataatagaaatttatttaattaaaatttttcattataattaaattggaaatgaattaaaaacaaaaaagagtcagtcaattaaatttattggagggttgggtcaaaatttataaaaatgtaaaacataatcatcatatttaactcgtttttcaataaattctgattcactgaatcattttccggtcacgcccggaaacgggcacatgacaaaaccgggggacggttgtttttcaaaaccgcttttttgcagtgtgctttttccaaaaaacttttggagtattggggggcaggtggtgccaataggcgccgccggtaaaatgtttttataatttttattgcgatttgccaacatatttttccaaaaaatgaccaagtttagcgattttgatttgtcaaaaattgctaattttttgaaaaaaaaaaattcaatagaaattccctatataaaatgccaatcacggatcaaaatcacgaaaaattgaaaaaaaactaataaaacgggggaaaacaatcgggggatcgcccccgcacccctgactggaactgaactcaaaaattggaaaagattttccaattgccagttgatttttttgaattttatttttaataattttttttttcatttttaaaattaatttatttttcaaaattgtcaatattttgtacttttttaaatg

SEQ ID NO: 113066 - DNA, 648 bp, Heterodera glycines
gaatggggatggcacatgtcagcctttacggtgggtgccgaattgcccgcccttttcaagcaaatgcgagggacttagttgcggcacattaactctctctcactcccatataaaaaaagatattttcatttaaaaaccgtcagttcccctttaatataataaattttatcatttttctcctacataaaaatattgttctatttacatacatacatacaagatatattagctatgtattcattaaaaaaaagaaaattgccgcccgaacttctctcggagttggccagtgccttaccctttgactttcgctgggccacaacccgagtttcttcttcttttgattattttgtcaaaaagagacagaaaaaatggatttggaccgaattcattcgggtaaataaacgtttgatgggtttttttagggctcagattggtgaaaagtggaagtaatataatgatcagcggccgctataaaattctcggggatttaaagttattttaaccatttccgacttcattatcattaaatttgaacaaaaaaaacgaggaatttgagttttgacttttttcaagttcgggttagggatagaaattggtcaaaataatgtatgatttgtgttaatctaaaatatattttattaacagatg

SEQ ID NO: 113067 - DNA, 56 bp, Heterodera glycines
ttattcttatcaaataaaatataattttaatttctagaaaaagaaattcagcaatg

SEQ ID NO: 113068 - DNA, 405 bp, Heterodera glycines
gatatgtctaaagcatcacctcaagacctaaaaaacaaatttaaaaaattgtgctgccaggataaacggagctctgtatgtcgaactaccgccccggttaacagcaaaattaaaaaaatagttaaaacatagataggagaataaggaacaaatgaaaaattctgtgtctgtacgcgcttttaaagctgttgtctccgcccatcaatcgataatattcggcgaaacaatgcgcaattccttcgggattgcatatggtaacagatgtttgtaatcaatcgataattttcgacgccttttcaaaatttccttaatagggtatatcattcctttctccgtctataagcaatccctaaaagcattcattcgttcacattcatttcctacacactaaaaattcccaaaatg

SEQ ID NO: 113069 - DNA, 593 bp, Heterodera glycines
atagaaatgggggaaaagagagggcagaagcctaagaaaaagcgccgaacagcaaaaaagtaaatgacaaatggacgaaatgtttacgataagtgaaaggggaggaggaaaagcggaggaaaagtccaaaaagttaatagaagaaatacaaagagttgagagagagtatcaacccaagtgagagagagagaggagagagagagagaggagagagagagaaaggagagagaaagagggagggagagagagagagaaaggagagagaaagagggagggagagagagagagaaaggagagagaaagagggagggagagcgagagagaaagagggagggagagcgagagaaaatgaggaaagatagttgacggagggagaaatatagacaaaaaagagaaagagaaataactttatatatttttactcatttttctataattaaaagtcattaaagtgattttcgcccccaggtgaaaccaacggacaatcagccggaaaacggacaaatgctgaggggggcggatgcgcggaaacggagggtgccgctctgtctgttcgtcagacgggcggaagaatcaccacacaattacgaatg

SEQ ID NO: 113070 - DNA, 110 bp, Heterodera glycines; identical to SEQ ID NO: 98226

SEQ ID NO: 113071 - DNA, 1003 bp, Heterodera glycines
tgttgatgaaaattctttttaaatgttcatagatctttttcatttaaatcatttaaatgattttaatttcttttctagaaatattttaaataaattaatgatttttttaatgagagtaatttaagcctttttcattagatcatttaaattgtgctaaaataaatgtttaattcaattaattagaacttttggattattttaatggagtttttatcagtaaatttttctggaacttttcttttttgtcagattatttcttttatgtgaatttttgtttggaaagaaaattccttgcgattcactgaatgcttggaatttctactcatatttcaacagaattgatcttcattttcttattaatgctttttaaaagacggatttttttttgttttgaaatttttaatttcttttaattaatttccgtttttaatcaaatgttttaaatggaaaaatttatttaaatgaattatatacctaattatttgtaaaaatttatttcatttttatatattatttcccaaaaattttacgccaattttcgtaccaattccccgcccccctcccatgcccatttgggggtattatcttttcggaggcaaatttgggcgaaaatccgcccaaatcggcggagagttagttgattgtcatcggctaagcattttggatggtcatttgtggtcattttctaacttttttcttattccaataactgaaaaagtatagtttaattattttaaatttacgcaattaaattttcaaaatttttggcgttttcaacgagttacgaatttacgtttttaagcaattttaatgaaaacgaaaatctggaaagcctaggagaaattttagattccgaattttgtacaataaaaataattaaaaaaatatttccacttttcattaaattcccatttttaaaaaattataattaaaaatgaaaacgaaaatttttattgtaaaattagatttttttgaaaatttagcatagtaaaaacagaaaatg

SEQ ID NO: 113072 - DNA, 298 bp, Heterodera glycines
ttgcctccaccagatcagaacaaaagaagaacgaattaattgaaaacgctacagctgaccaaattttggcaatcgttgaaatttgtgcaaatatattgagttttagttttaaactaacgaacaaacaaaaaagaaggttggcacaatacgccgatttttatagagaaattgccaaatctcgttcagagaaaacggcaagaaaaaggatacaacaggggagtggtatagccctaggagctgtcttgatacctgtcctgagtgttttagcccaacatttattagaaaaaataacatcatg

SEQ ID NO: 113073 - DNA, 120 bp, Heterodera glycines
gaattgtgtcctctgggaaaaagttttttttttacaacgaacctggttaaaaatgcattgataaataatttggttaattttcagagtgttacggagcaattgaacagattgacgaaaatg

SEQ ID NO: 113074 - DNA, 466 bp, Heterodera glycines
aatttatttatattaaaatgtaaatttatttagcatacctttaaaattaataaattgtggaaattcaatatttttgaaattttctaaaaaacgctctttaaactaagttttggagtttttaaagtcaattctgaatttatacacaatttttggcattttttgagggttaaaaaccatttttggcagttttttaaggcatattttagtgcatatttgagcatttttcgggtttttagggcatatttgggggatttttagtgcatattttatgcgcatatttggagttttttagtgcatacaacttataaccctagttatgaattttgagaaaacaaaaaatatgattgaatgaatcgataatttaaattccaacaaattttattaagggaaattttttttcaaattttttttgcatttagttcattttatcgcgaaatatgaaaacccaaaacagtgaattcaaatg

SEQ ID NO: 113075 - DNA, 1003 bp, Heterodera glycines
gtaatcctgttccagccgggcactaaaagcatgccctctgtttggttgaagtgcgaaatttgaaagtgcggaagtgcctatcgaaaaaaactgtcaaatatttgtgcgctgtttaaataaattggaagtttcggtctaaaggaacttggaaaaatgaccatgactatagtaatttaatgaataaattctatcacattttaattataacatttaacaaagtgcatttatttgttagcatttagctactaattctaattttcgtttctttcaagcggttaaatctattcacttccgccgttccctttgtggcactaattcccaataattttatcgcttaattatttatataaataaaaaatatttattttctttatttatattattatacacgacatcatttttattaattatttgtctgttttttgttgataaatcgtgtgactttgatagataatcaattattttttgagctgtcaccagcaatttttgctgacagcgcacaattccattctttgtcggtcggtcggtcgtatgttttccctatctttcgaatgatgtcattgcattttggagggccaataaaagcagttcccttctcctcctttcggccattgtatcacaaagcaaaatatatttccatctgtcattgcattataatatctcagtgaaatcgcccattttaagcttcattaaaaactaaatgctccttaattcgttagaaaagctcaattaagtgaaattattttaattttcattttattagcatttcatataaaattcatttgattttttaaacatttttaattcccatcgttccttaaaatggcctgtgaatgttgtgagttgaatgaatgtgttgttgcgtcgtaataaattgtaaattccttaagcctgctgcaaaaacaaccaatgttgtaccactaactgctgcggaggttctgctgacaaataaacaaatatttccatgccttttaatgcttttttcagattcttgttcatcatg

SEQ ID NO: 113076 - DNA, 176 bp, Heterodera glycines
gctgaaatttattaattttaaatttactttatttatttttgcttgttaaggaattgaaaacgcgcagcaatttgcacgacatgtgggaaaagtgatcacttcgagggtaatacaatgtttttggggttcccaatggattgacttcaaaggtgccacctaatgctccgtacgcaatg

SEQ ID NO: 113077 - DNA, 294 bp, Heterodera glycines; identical to SEQ ID NO: 99762

SEQ ID NO: 113078 - DNA, 1003 bp, Heterodera glycines
tgtttaagctcaaggccttatcgaaaaaaattgtcaataaaaacaaagtttgtttaatgaatatttacatcaaaaaattaatgacaatttcgaaaaagaaagtcaagtaatttttagaagcttttatttcatgttttgttgctcacttgttgaaccgcacatgagccgttggaaatattttcgccttttcttggcaagttttttcccgaactgtttcacgacagttaattgagtcaattattttcgccagtttcttttatctccaagcgttatttattgcatttcacttaccttggaacaagattacagtaaaataaaatattgttttgtgaatatttacgacaaaaatttatcgacaatttctaaaggggaaggaaaataaatgtttgcctaatatattaatttatattttcaaatgattgaaccgcatctgttgcttatgtttttaatattttttgattttgccatatattttggctttttggaatttttccaatgtccgaaaatttatgtttgcttttacatgataagtaatgatttggttatttttgtatttttcttcttttcatcatgaaagtcatttagccattcatcccctctaatgaaaatagttttctgcagctgatttaacaatatttttctttgcactatacatgtagtatagcactggttgcgccttcaattcccccccccccccccccctccttcctcagtggcggcccttgtttttctgttttcgtcaattcgtctcgactgacttgtttttgttcagccgcaaaaagaaaaaaaaatgagcgaacggttggctgcatcaggtggactagcaatgattagcagaaaagaataaaaagaaatctagtgtttcataattttaattttaaaaggaccacagtaggccccaagtatagtaagaaccaactacggtaatcccaacaataatttttcaacaacgttgttcatcattcaacatacagttaaacgatcttaatgttttgtatatatg

SEQ ID NO: 113079 - DNA, 1003 bp, Heterodera glycines
atggaaggaagaaaacggcactttcttgcagccaaaaattagaaataattttttcggtagaattaccgaaaaaatatttatataataaaataggaaaatgactaaatcaaattaataaattcaattcaacttttaaaaatttttcgccttcggcatcgccggactaaatattgaaattcttttgtttttcatcataatctcaaaatcaaaatttaaagggaagtcaatttcgagtcattattatgtgaaagtttaacgaataaatgagaatttgaaaaagatgttttttacatttttattatttattgcaataaaataatgctctgctttataaaattggtaatttgccaattaatatttaatacatttaattaatcaaataaataaaagaacacccaaatatagattaaaaatggtcgataacttagcatttaataaatgaatttaaattatatttttattttcataatattgatttaaaaatgattttaaaagtttaaatatttgtcgatttaaaaacaatttttatacttataaaatggaatatcgatggcttttcgtcgtcccccccccccgaattattgttgtacttttttttaatcataaaatgctggcctgtcatttttatgttatttttgactaatatacaattttattatttgtttgccaattagtcatatcggagaaaaacatttatttcttcatttttccactttttcagttttttcttccatacagaatttttgttactaatggcccttcaatgcttttatttgtcaatcagtcacattcgtcgaaacatttacgttgccattttcacgcatattaattcgttcaccaaaattaatgtattactaattgcatgggtgtgagagcaaacgccaaaacagccctttaaaaagcgcacaaattggagcaccaaatcattcattccgctcaaaaattaccaatttcctccccacaaaattacccaattctcattaacaaacctacgaaaaaaatg

SEQ ID NO: 113080 - DNA, 131 bp, Heterodera glycines
tgtaaaaaaaaaaattaaaaattttaaaaaatcccaaaaatttccattttaaaggttttactcaccctcttgacctactcaaagtgcatcttcagacacaacaacagggcaaattgtctttgcccggaatg

SEQ ID NO: 113081 - DNA, 1003 bp, Heterodera glycines
cattaacggacattttcggcccagtttttttttggtgcggcctaagccaaaatcggacttttgcggcccgcgacatttgcgtcccggacattggcggaccgtttcttaagggcaattttcgtaccttgtcgacccaatttttttttaaattttgagtcccaagccaaaatcggacatttgcggcccaacatttacggcccgacattggtgtcccggacatttgcggcccatttcttaagatacattttcggaacattttaggccatttttttttttgaattttgcgtcccaagccaaaatcggacatttgcggcccaacatttacggcccgacattggtgtcccggacatttgcggcccatttcttaagatacattatcggaacattttaggcccaattttttttattgaattttgcgtcctaagccaaaatcggacatttgcggcccgatatttacggcttcacccaaatttcaccatcggtagcggcataaattacttagcatgggcacataagggagtaaatttatgagacttttcggtaaaatgttaactcctatctgtgcggatcctttttgcgtgaggactgcaaaatgcccaaattgttacttttttatacctcccaaatagttgaagcgctatttttggatattctgtgggcttttcattgaggttttaaaactcacatgtgactgccccaaaccgtaaggtacctactttgcttcatcatttaaacgcatatagtatcgctttattttttgaacattcatgcttatttttcttgatttaattaatatttctttgattttttcatttcatttgaaatttaaataactgcactaattatatgtgtttttgttgaaatggaatcatttaaccctgatacaaaaattagctttaaaattgaacaaaattgaaccattttctacattttcccaacaacgaactggtactaaaaaacggtgtcccaacactttgaataatgggcaatttgaaataaaatg

SEQ ID NO: 113082 - DNA, 68 bp, Heterodera glycines
gtaaaagaattttttaaattaaattgaattagattacttttattatttttaaaaaattttagcgcatg

SEQ ID NO: 113083 - DNA, 110 bp, Heterodera glycines
tttcactgaaaattagccaatttataggtaaaattttgaaaaattttatagggaatttaatccaattcttaggggtgtaaaagtcgcttttcgcgccaaaaagcgaaatg

SEQ ID NO: 113084 - DNA, 1003 bp, Heterodera glycines
tttaaatgtcattcgtatctaagtgtttgtgttggcctgcttaatgaaaaaatttaattcggtaaaaaaaattgtaacgaaattagtttttaataattacaatttttatgttattttttattttcattcaatgctttcgaatgcggagtaggacaaaacgtcgtcagccgaaacgtcgtcgaacgaatttttcgaccataacttttttctttctcaaccaaattaaacattcttggtattattcgaaagcattcgaaaaatgctattagcctgcaaattttcaaaaatttttatttatacacaaaaaaatcagagcaaaaaaagtttgaattactgggtttttgagttccttctggccataacttttttgaaacttaaccaaaatttttgagattttgcaaattaataataaacacatagagctatcgaacaacaccaacaattcttaatttaattgacagtgaacaaagttatggttcaaaaagtcttccgacgacgtttcggccgacgacgttttggggtgcaccgtttcgaatgatattaataaataaattgaaatttttattgggaaatgctcttttgttttctcctttatttgttaattgtattacgtcaagatcgttcaggcgcgtttcttagatatgccatagggctagaaaaacaaaaattcatttttatataaatataaaagatttggcaaatatttgaattaataaatttgtgtttgaagttttaattttttgaaatgatacaaatttaaaattttaaaggaaaatttttcataaattgtttaacatttttcatttttttccacttggcgcatttacgaaacgcactaacacaaaatttcttaaatgcttacaaaaatgtttattttaaattcaacacttcttttctagatcttttttttattttgaagtataggaataaaacctaaaaccgaaaagtgcattttattttaattaaattcaaaagatttaattttaaattaatcagcgctatg

SEQ ID NO: 113085 - DNA, 1003 bp, Heterodera glycines
gtttttatttattttttgcaaaattaattcttaaatattttttcagaaagggttctgaaacgcaccaaattttatttacatgttagtttaggcactctgatgctttttctatcaaaaagggagatgaataaaatttttaaaaatttttaattcctttttaaacaggccaaaaagtttaggcttaacttttttttcagaaactgatcagaagcgcaccaaactttgcagggatactgaaaggaagagaaataacctattttaaatattatctagtcagttcatttaaataatttttatccaaaaaatttttttttgggttttcggggcagtccccctgaaccgatgcgcccagatttatggggagaccgaatccttcgggaatagcttccctatagtctgtactttaattctgcgttggatttttgctccccataaatgtttgagtaccccaaacggacacttgaaaaaatcgatttttttgttttcggggcagtccccccgaaccgatgcgcccagatttatggggagaccgaatccttcgggaatagcttccctatagtctgtactttaattctgcgttggatttttgctccccataaatgtttgagtaccccaaacggacacttgaaaaaatcgatttttttgttttcggggcagtccccccgaaccgatgcgcccagatttatggggagaccgaatccttccggaatagcttccctatagcctgtactttaattctgcgttggatttttgctccccataattgtttgagtaccccaaacggacacttgaaaaaatcgatttttttgttttcggggcagtccccccgaaccgatgcgcccagatttatggggagaccgaatccttcgggaatagcttccctatagcctgtactttaattctgcgttggatttttgctccccataaatgtttgagtaccccaaacggacacttgaaaaaatcgatttttttgtttcataaatatttttttcagaaagtcatg

SEQ ID NO: 113086 - DNA, 698 bp, Heterodera glycines
  unsure (1)..(698): unsure at all n locations
ttcaaaaaaccaaatattcncaacttttcttggccataaatttgttcaaaattgacgaattttttttaaaattttgcaggctaatagagcatgttaagagcattcgaatgataccaagaatgttgaatttggttgacaaagaaaaaagttatagtgcaaaaacatgctggggccgaaccgtgccggggccaaactgaggttgaccggtttagggggtgcaccaatacaaaaaaatttaaaatttcaataaaattattattatatattagccttttacatatttgcgcattttccattttttttttaaagaaatttttgccaaagaatttgccaagcttcaattgaatggccacgaagctgatgggtgtgcgttggttaacacaattgccaaatgctttcaaataaccaaaaagtcggagcttgcacgcaatttttatcaaattgctgccaaaatgcagtaaacattaatttgaatacaaattaattaccccactaattaatcactaattaggccctcaaatgtcactgttaaaaatttggaccaaacacaattggccttggtcaaaacggaagcaaattacgacgacaattttccagaagaattaaaagcaattgaacacaaattggaaattgccgaattaaagggttattttccataaaaaatttttttataaatttattttttaggcgatgaaatg

SEQ ID NO: 113087 - DNA, 568 bp, Heterodera glycines
ttcttcaaaatcaaaacatttatgtaggggaacctggcaattttattatgtaatcgaattgttacggttgtttaaacgtataattacacgtgtgctagtttctgtttggacttatacctgaataccggcttagtggggtccgaaatatcaagagtcccgtctaattctgtttaagctcataaaattttaagtgtttgcacagatcgagccttgtaatgttataagctataaataatacatatgtatggcattgatattgaattaattgtaatgagtttagcaaaataagcatgcttaatcgaatgaatattcgttaaagaactttctatttcctaacttgattaaattttctatgcttttaaattagatggttgcaattcatagacaattaaaaatatttttattttttaactctttaagttggtgcccaaacttcccggtgcccaaatttctggtgcccaaacttcccggtgcccaaacttccgccccccctaggggcgaacactcaaaatagggattttaagggtcgaataggggcgttaaaaggcaaaatttcgaaaaaaaaatg

SEQ ID NO: 113088 - DNA, 106 bp, Heterodera glycines
aaaaaacagcaaaatttctttggattgtttattcaattccattgccattttttaaattatgccatttttatatgtttttaattttacaaatttttgttttaaaatg

SEQ ID NO: 113089 - DNA, 199 bp, Heterodera glycines
agtaatgcttgaagacagagcaattcatattataatagataaatttgctaaaaggcataaaaataatacacttcttaattcaatttgcaaatagcataagctaattagtcaattaatttccactaattaccccttcccccgcacttaaaaagccattctcttcgatccgctgctccaccctcaaaatcttgccgtgatg

SEQ ID NO: 113090 - DNA, 110 bp, Heterodera glycines; identical to SEQ ID NO: 98226

SEQ ID NO: 113091 - DNA, 850 bp, Heterodera glycines
tttattcggaagcggtgagtcgtctgggggacccacgcgcctccctcactggtagcaccggatggtttgttttgccattccggcaaacggttcatcgacgacgacaatgaggagtgatcgacgacgacagcagctgcagtgcctgcgggcaaagtaatggcgccggaggagagaatgtttagggtacccgcctgcgggcacaatacagtcaagcgcttagtgatcacttttaaatgagactgatcagaatttgaatttaagttgaagataaagaacaatttacaaatactttaaaagtgctaatgatcagaattttaatttgagttaatcagcagaaaatttacataacttatgagcagtgtgccaaagttcaaaatgcgtcattagagaaacatgataattcagaaaattgtgaaataagtgctctatgaattaaatactagcggatgtttattaatttacattacggccaaattaaatttcaatgattttttgagttatttttaatgagttcaatgttcgtccaattagtgcccatttcaaagttcaaagattgcgaaaaattttcttgttattcgccattcattacttggccgtgagaacggaggccgcggcagcgctcttcatttagcggagatgcgatcagttcacataatttacgtgagaacattggcgatgttcattacacattcattaaaatagagcgacattcgcggaaatttttccactgtttttattggccattcattttatgatttaccacattttcaattagaaacgaatatattttttttttgttgttaagcaatcgaaaacaagtaattgtactctcttcccaactaaagcaatg

SEQ ID NO: 113092 - DNA, 110 bp, Heterodera glycines
tgttgatgggatttggcaaattaagctcaggaaaaaaacagggtgtttaaactatagtaattcggaccctatatattataaacttgtaaatttttaagcttgatgctatg

SEQ ID NO: 113093 - DNA, 245 bp, Heterodera glycines
aacatcacaaacaacggcgaaaccggagctagtggaaccttgagtcaaaaagaacacaaccacctcccagcacctcagaaacaacaagtgtataaatttaaaaccaaataattaatgctttgttaaaggcagagtcaaggcgacagaaaatcaaagaaagtgtcctggtcgagccgtgtctgaagcccacacgacttttggctaaagtgaggcgatcagcaacggatgaagcctttgttgccatg

SEQ ID NO: 113094 - DNA, 171 bp, Heterodera glycines
  unsure (1)..(171): unsure at all n locations
atccaagtagggacagcaaaagccncgtttcttcggcaatctcttcccttgtctcacttttaatttctttagttcgctcgtttgactaaatgtcccaataaaattgtgaggcgaatctctctgaacttcaaacatcgtccgtcgccttggcctcgcattttgccggggatg

SEQ ID NO: 113095 - DNA, 1003 bp, Heterodera glycines
accgaaaccgactgaccgaaataatcaaaaaaccgaaacaatcgaccgacttttatgaaaaatctaaaaataaaaccgaatggcgaattgaagagacataactagggctgggatttttaggtttttacctatttttttgcggcttagttatgatgagagaagcccaaaaatagcattttctcctaacaattttcgatttagagcgactttttagcacataaaaacacctaaaacgggggttagcacctattttggcatttgcgaattttagcacctattttggcgttttggcacctaaaatagtttacaacctattttggcatttttcgaatttttagcagctattttggcatttttgagaaaaattcttaaggaaaatacaaaaaattgaaaaatagacccctaaatttcgactttctttccactttttttttgcggcttagttatgatgagagaagcccaaaaatagcattttctccgaacaattttcgatttagagcgactttttagcacctaaaaacacctaaaactggatttcggtcaagcacctattttggcatttttcgagttttagcacgtattttggcctttttccagaaatttcatagcaaaaatgcaataaaattgaaaaacacaccccctaagaacctgcccaaaaaattgtttttaaatatacccctaaatatttaccaaaatttcagaaaatattcccctaagaaacaaaaaatttccccaaaaattcatccacaatatttattatttattttcttgaccaattgcaattgtgtgggcgaaattgataaaaaaattagtcgcttttggaatttttgtacataaagacactggatttttccaatttttaacacctattttcgcacctattttgggatttttagcacctaaaaatcccagccctagacataacccgttaataacaatttttggcatagtatactgtttgaaattctcaggtttttgaaaagattatcactatttcactatg

SEQ ID NO: 113096 - DNA, 56 bp, Heterodera glycines
agttcgttcatccaattcgttaatattttcctaattttattcacttttcaggtatg

SEQ ID NO: 113097 - DNA, 306 bp, Heterodera glycines
tccgctcaaccttacatctaattcattgaaaatatttttttacaaatattttattttttttataaaagaaaaacaaatttggcacatttttgatggtgctgctgaccattggcacccccacaaataaaaatgatgcaaacgaataattcaccttaatcacatttttaagcttaaaagccagcaatgtaaacaaaattccaccttgcaataacacttataagcaaagattgagcaaatgaatttaaaaaaatcattttcataaaatttattctcttcccataaaattttcattttccttcaaaaatg

SEQ ID NO: 113098 - DNA, 191 bp, Heterodera glycines
gagaaaagtagcaaatacctagtttcataagataaaatagttcttacagattctttctacaaatcattcgacaaataatgacttacaaaaacgtggaacgccaatttctgcaatgattcctttgttcagagtgatttgctttgcacttgaagaaggcgatttgaaacatgtaaaaaaggcaattaccgatg

SEQ ID NO: 113099 - DNA, 132 bp, Heterodera glycines
ggcacgaatattttagtccatccttttagttcctgactgggtttacacctaactcattgtcagaatactttggcggaaaaggacctaaacaaggacgggaagatcgacctcggagagtttatgggagacatg

SEQ ID NO: 113100 - DNA, 462 bp, Heterodera glycines
cctggaagaaagagtggaaagatcttgttgatcagccaagtcattaggctgattattattaataatgaatttgacaaaaaaataatgtagatttatttggtaaaatgaaaaattcaagcgatggaacccggcggtgccaataggcgccgggggaaaaattttgaaaattttaatgaaatttgtcaacaagttttaactcaaaaatttcaaaaataataaaaaataaatatgaacatttttttgacattgataattttttttgtgaaagtacattttttaaaaatagactgatttgacccttatttttcgacacattaattattttctaaattttaataatggcatttttcccacttttgggttttcattaggcatttcataacgcaccaatggacgaacacatcgaatcacgcccaaccaatcgtaatagacgagcccaaattgggcgaacagctcggaatg

SEQ ID NO: 113101 - DNA, 904 bp, Heterodera glycines
cctgaaaaatccaattaacatgatttaaatactacttgatgagagaagcacgaaaatcacattttctccgaacaattttcgatttagaacgactttctagcacctaaaacacataaaacgggggctagcacctattttggtattttcgaaaactttaagcacctattttggccttttttcagaaattccataaaaattgtaataagaacgaaaaatacacccctaaaatcgatcctaaaaatttcagaaaaagacaaccttaaaaattgaccagaaattcagaaaatataccctctaagaaattaaaaattttcgcaaaaatgtgtctccaaaatttattatttattttcttgacaaagttgcagttgtgcgggagaaattgataaaaaaaattagttaacttttgggattttttttttgcataaagacattggagtttccaatttttagcacctattttgcacttttttggcttaacaaagtatgaaaatttggcttctcttcagtttctttagcttctttccaatctttttcttgttgttggctccataacaaggcgatgattttatgttttaaaaattctaaattttagttcacaattttatgcaaaatctcacatgctaattattttttatttgtttttttgttacattttgcatgaaattttattgtggtaaacaaaaatagagataagtaatttaaatcaaaacaataataaagattcttcaatttaaaattgatacatttatcaaaaaaaaaccttcccaatcaggcccatcacacaaaaaactgattcaatttcaattaataattcaagaaaggacctatcatttctcaaaatgggggaataacaatttcattctcgtgctccattgaatgaaaaagcaaattttaaggaaaaatg

SEQ ID NO: 113102 - DNA, 137 bp, Heterodera glycines
tttttttacgttcacatttttggttaagctagtgaagcgagtccgccatgaaatcgaattgctgccgccagtgccgctaacgcttcagtcctccattgtttcgtcccgaagaatgaagtgtgcatgagcgcacaatg

SEQ ID NO: 113103 - DNA, 129 bp, Heterodera glycines
ttcatttatcgcattcgttcgattcgttgttaatcctctgattgtgacttttattcagttatttggttcgtattttaatttcttataaattttgactattatttttactcgcagcgaacttttaaaatg

SEQ ID NO: 113104 - DNA, 1003 bp, Heterodera glycines
ccgtgccaatcctccccccacccaatttccgccaaatccctccaatggattcgcccgttcgatacctaaaatgggccaatggcggcacctcggcgtaaaactgtggcaaaatcgtcgcaactgaagaaaaaacaaaatgtggacacattttcgggcaaggatcaaacgaatgttgaaatgtgtcttctgtttttgactctttcgcacatatggcaaacatttaaaaaggcaaattacacattttccttctttctctcgttttatggcatcaaaaattaaaggatttcaaaaatttgagcgtaattggagttattctgctgcgagtccatgcattttgtgccttccatcaacataaggtgccgacgataaaatgttgttgtgtttggagaaagtgtacctctgctgagcggcgtcggcactctcaccgagagagacaaatgttagccccgggggaggcgggggcggttaagtgtgccgagggaaaagctcgggggtaggggaggggggcaagtcgaatgctgggggagggcttctccgagggtcagattgtgtttccagcagcagcagggagcagcaatggcaccgctggcaaaggaaaggcgacactgttttagcctttgggcttcacgccccccaggcaaaaacccacggcacggccgaccctcaaggcacacgaatattaaaaatgccttcctccaattgtcatgtttgcacacccatttgatggaccagcagcaaaagggttaaacggaaaagggcggggaaaaagtgccaaattattcgcgaatttggctacaaattgtgtttatttgggaaaagggtcatcttttctcactgatttgctctgcttctgatttattcctcacatctgttagtgaaatgctccaaattcccttgggcaattttcagtttatgacaaagtacgctttgggagagaaatctttgccccccccaaacgattgaccaaaataaacaaacaattaactaaaattgaccactaatg

SEQ ID NO: 113105 - DNA, 664 bp, Heterodera glycines
ttttcgtaccgccgttttcgtacgagtggatatgcaaaaagaaaaattgcattcaaataatttgttaattttttttaattacttttaatgttttgacagttaagcttttattaactacaaaatgaaccagcagcaagtaattaaaacaaaactaaataatgataaattggtgcatgatggtgcatagaaaaagaagtatcgcgatgccgacgcacggattcttcgtcgcgtcaaacgctataacgatatcaataacaatattgtccctcaaaatgatcacaattatgccaatgccaatgtcaatcccgaaaaccttaacaattttctcgctggtattttccgaaattaatagatgcgacctagtttgtcccggattttgttattattataaagttatgaattttctacaaaattttatgaatgggaaacaaaaaatgataaattttggttttattagttcttaagtttttctatttgaatctgacgcttgtacaagaactcgtacgaaaatgtcccccgtacgaaaacggcggtacgaaaacgacccccctgcggtacgaaaacgtccccgtacgaaaacggcggtacgaaaacgacccccctgcggtacgaaaacgtccccgtacgaaaacggcggtacgaaaacgtccccggtacgaaaatg

SEQ ID NO: 113106 - DNA, 64 bp, Heterodera glycines
aagcgaattgacaacagcgacagataaaaactttctccaagtgccaaaacgaccttcaaaaatg

SEQ ID NO: 113107 - DNA, 443 bp, Heterodera glycines
ctttatacaatttcccattgattctttcaaattacatttgtttctttctgttctcctcctcctttttaggtcatcgttttgccgtaaattgtttaatcctttcataattataatattaagttgaacaatcttttattaggaagtcatttttcaataaatttattttaatcaaaaatattttctataaaaaattgaaattcaatttttactgccataggcattttgttaaaaatgaataaaacaatgcgcatcaattttgtgccattgtcttcccctgaccattttgtgatttcgaattttccaaaaaaaaaaacagaaatgaggggggggggggctttgacattaaattattcattgtttttggcatggaatacgattaattatcttgtagaacaaaggcatttagccgatatttatctacgatttcgactttgcctatcatg

SEQ ID NO: 113108 - DNA, 111 bp, Heterodera glycines
agtttgcttccctgtgattttagcctgttttttttgttgctttgtcagtttttatttgttccgcgcttggggaagagttgggacggtaattggaggaacaaaaacgggatg

SEQ ID NO: 113109 - DNA, 118 bp, Heterodera glycines
ttgccttttcgtttttaattctgcgcagcaatcatatattgtgattcgatatttttttggatttttacccgttttaaatgcttacaaatattttatttagaatatgtcgaaaaaaatg

SEQ ID NO: 113110 - DNA, 293 bp, Heterodera glycines
tgcgctaggttcgatgaaactttttaaaatataagcctcccccgtgtggcctgtttaaaaaggaattaaaaatttttaacatatttattcatctcccttttgatagaaaaaacatcagagagccttaattaacctgtaaataaagttttgtgtgtttcagagcactttctgaaaaaatacttatgaattaattttgcaaaaaataaataagtaatgaaaaagtcagaatttcgaaaaattttaaaaacaacaagcgttggcattttttcaggttaagttagtcctttacaatg

SEQ ID NO: 113111 - DNA, 1003 bp, Heterodera glycines
ttcacattcattactaacttctcttttttttttgctccccttttcccatttttgaattcctaagcgaaattttttttacattcgattagggtatcttaaattcctacataatttgttaaatacatatgtacatacataaacacacaaacaaatataattagctaattaaataattaaatttcatggtacttttctttttagacactccctgatgctttgtcatggacagaaattttgttgaatccatatgtaatcttgatcgtataaatttcgcttttccttaaaggatttggattgggaattttgccctagtcggacctttttaaaatatggggatcatcttcccacctaatccctgcgtttttcccattttttaaatatcttcgtggtcagtacgtagcgtaagccggtccttggtcatcaacaatttgccgaacgcccaactcaacggcccgcccatggatcagcttgtccgacggatggccgtataaaagaaagacgaatgaacgatgctcaccttcttccactaccattttccaaagtccaatttctttccccaaaatttccttctgctatccaattttcaaagatcgtattcaagtgatcattttcatttcacatttaattttcttggtgtgtaataaaggttttgcgttgtaaaaccttcttgcgttcaaagcaattgtgtgccatcccggccactcgaactccctgacattctcagggacggtcttaagccgatccggcaaattataataaaataaaaccaaaacaaaaaaaatatttttccaatcacttcattttcacataaaattttcatttcccaaaacgaatcaaaagttttggattcagccgcctcggttgacgtctgttctttaaaccgggtcagacgaagtcgaaacaaccgcagtcagcggccacagattaagagtctggtgctcttagattcgacagcattttcaaaattccgccaaaaatcataaaaaaggtccaacgatcaatg

SEQ ID NO: 113112 - DNA, 90 bp, Heterodera glycines
cttgctttcattctcatttctcctccgctccttcatttttttcatttttccatttcctttttcaattttcaatttttctttttttagatg

SEQ ID NO: 113113 - DNA, 171 bp, Heterodera glycines
atccatggccattcttctcaaccgcagcaatacgtttcgtcctttttgctgaaaatacaaacgcaatatcatcaacagaaaagagacggaggtcatcaacagcaagaggaagccgaaacagtatcaggagaacaaccgcagcagcaaacgctgacggatgagcacgacatg

SEQ ID NO: 113114 - DNA, 279 bp, Heterodera glycines
aacttatttcttgaagatttcaaatcatttctgtcattaataccgactaaataatccactcgctcctttgttgcctctttgtaaatttagccctgtttgcacataaccgaaaattggtccaactatccataaaatttatggcatataattacaacctataattattcgtttttaattatattttaaaattttgcaatttaaataaatttttaaccaatgataaattaattcattaataaaatgctaaattaataatgttttttaaaatttttagagatg

SEQ ID NO: 113115 - DNA, 154 bp, Heterodera glycines
ggtattaatatgatggaattatctttttttttgtttcgttttcattgcagaagagcacagagtttctctgacgccatccgctgctgcaaatttggtcaaaaagggcatgaaagtgcaggttgagcaaggggctggtgtattggcgtcagtaatg

SEQ ID NO: 113116 - DNA, 200 bp, Heterodera glycines
agtgggttttgattatggcattcagcagctttgatcaaatcagtgctttggtcaattcaacccccccccccccccccccgttttaaggctttttggaggaccgccaatgcgttaattgcggtgtcactagcacacccttgtggaggcgcgacgcccaggggcattatttgtgcaacgcttgtggcctttaccaaaaaatg

SEQ ID NO: 113117 - DNA, 132 bp, Heterodera glycines
aaggataattcaaaatcaataaatatagaaagctcttataattcgtaatttatatattacatgtaataaaattgcccacgcataactaatttacatttgaatttacatattttttagattttttaataaatg

SEQ ID NO: 113118 - DNA, 255 bp, Heterodera glycines
tgcgttggatttttgctccccataattgcgtgagtaccccaaacggacacttgaataaatcgatttttttatttcataaatattttttcagaaagtgctctaaagcgcaccaaattttatttacaagttaattttagcactctgatgctttagtatcaaaaaggaagatggagaaaaatttttttaaaaatttttccttatattttggttatatcgttttgcttttggtggggtgcttggaacagtggaatcatg

SEQ ID NO: 113119 - DNA, 210 bp, Heterodera glycines
gttgaaaattgagttttgggaataaaaattaatttctttatatttttaattaaagtgcgaattttgtgggctgagatttgcgcagaaaggaaatctgaacagccacatccgcactcacaccggtgaaaaaccgtttgaggtgagttacggatttggattttttgactttattatttcttttgcaaaaaatagtgcaatttttatggcatg

SEQ ID NO: 113120 - DNA, 89 bp, Heterodera glycines
atgccaaggacattcttatataattggtattgctttttgatttggttccttcaagttaaaaacaaacaacaataacaacaacaacaatg

SEQ ID NO: 113121 - DNA, 96 bp, Heterodera glycines
ggttgggcaattgcaagagacctcttaactcgttaattaattaattaattacttcttcaaaggatttctgatctgccttggcaaatcaacaaaatg

SEQ ID NO: 113122 - DNA, 1003 bp, Heterodera glycines
ttgcaaaattgcttcaaatcttttatttttacaattaatttaatcaaaaatcattaaaaattatatttttcgcctccaattatcatctttaaaaattttggtgaggaaattaacaaatcgtaaatttcagtgcactcgggatcaaaaaatcagatttttaagaattttttgcggcgtatttttccaaaaaacttttgggaaatgggcgagggggagggtccggcggtgccgataggtgccgccgggaaaaatttgtgattttagtacgatttgttaacagatttttgtccaaaaaatgaccaaattttgccataaattttatatttttttgtaaaatagtgacattaggccataaaattttaaaattatgagtttgtttaagaaatcagaacaaattttggtcgttaccccaaaatcagagcatttctgacaaatcagaacagatcgcatccctgctttttggtgccttaattgtgagctcaagccataactttatggccggcggtgttgataagcgccgccgggaatttttttttgtaattttaatgctatttgttagcagattttgtctaaaaataccaaattttgagattttgggctaattttttaagaaaagatagctttttggggggtcggttgtgccgataggcgccgccggaggaaaattttaagaatttttaatgaattttgttaaaaaaatggccaactgaattcaataaattttgaatttgaacagtcgcagcggtgagaatcgttttttgatgaaaagggatggccacccgaactttattattttatgtgttattattatttgttcagtaaggccaatttaatttctgtcaaaattcattgaaaagttatgaggagaaaatattattaaaatttaatcaaatttattcagctttaatttttcaatggaaaacggacggaatggcctttataagccgaacaaattaacagaagaatatcataaatttaaatttaaattaaacaaaatcaaatg

SEQ ID NO: 113123 - DNA, 1003 bp, Heterodera glycines
caaattaaaactgacctgtttaaaactttccacctaaatttgatcccgcaagtggcacgtcaatatcccaattgcatataaatattccactcgaacacaggcaaaacatgagatgtagcatttatattgctttttctatccatcaaaggctttttctttcattttttattactatcataacatgctttttattcaaaacaaatatcaaaaccaaatcagattcttttcatattataagcaaggaaaagtacaaaaaacttttttaagtaacaaacctttttcattcaaacgaattctaatgcatttttttaaccaaacaattctccattatcgtttacataagcaaaacaaaagctttcacatcaaaatcaaatcaattaacaaaaacgaaaatttagacaaaaaaataatgataacagcaaacccacaaattttttcttacacacaaaaacagaaccttcatataccggattttccactcaaacaaacacaaaaatgtgctcattattttattaattattttatataataaaagatgggttataaataaggaagggatgcgagacaaatttcccattatctctccctttcctttcttttactctcttttcttttccattgcaatttactctctttttttcccactccctccttctcccacacacacgcacgcgtccaacagactgctgctgcacagcagcacgcgtctgttcactgtatgccccctctcacccgccgctgcccgcgtagacagacaatcagacagtgcactattttcccacctttccctcgctctacttttttcaaatacatttttaacgcaaaacaattacaaaacgccacacaaattcaaacactggacacacacaacagacactcaactttattatataagattttgtcaatgtccgttgccatccctcgttttaagtgcaaattataataaatacaaaaatctatctccaaatggaagacattacgacacataagtcagttcatcatg

SEQ ID NO: 113124 - DNA, 158 bp, Heterodera glycines
atgggcaaaggataaatggaacaaaaggaaaatataacctgtccaagagaccacccaattggtcgaattgttcctgtaccccccatcagacccggaaaggttcgcgctctattcacttatgcgtcactttcctggagacccagacccatcttaagatg

SEQ ID NO: 113125 - DNA, 343 bp, Heterodera glycines
aatagtaaaaaccggtaattgccattaaggatggtttaatatattttcccgagactcttgagcattttttttaaaacacaaacacctccttccattagagcaaatctcgaagcttttgtgactgattttccaataccggcaaccattaaaaatagcggtttcaatttctggaccaaaatccaggaaaatccagatccaggaaaaatccagggtgccgaaaaatagcctggatcttgacctagatcaaggaaaaattcaggcctggatccaggtcgaggccgacctctaattaccaaggcattttgtaattaattaattttcccattttcagagtcaaattatg

SEQ ID NO: 113126 - DNA, 282 bp, Heterodera glycines
attgcaatgtccgatcccaatcacggcaaattttcaccggtttaccaacccctttcggggaaggacaagcacgctgattttgccagtgtagcgcgcgtgcagccccggacatctaagggcatcacagacctgttattgctcaatttcgtgcggctgaacaccgaaaatccctctaagaagttgtgcccacagaagcaatgagccaactatttagtaggctagagtctcgctcgttatcggaataaaccagacaaatcgctccacgaactaagaacggccatg

SEQ ID NO: 113127 - DNA, 616 bp, Heterodera glycines
aaaaaggaaattttgaaaatgttgtaaaaatagcaagaaaggtgattttaaggggtgcatttacaatcttcttgtattttttttacaaatttttctcaaaaagccaaaatatgtgccaaacctcgaaatatgtgccatatgttttttgtgccaaaacgtcaaaatttttatgtttttatatgtaagtcgctgaaatcaaaaattgttcggagaaaatgctattttgggcttctctcgccataataaagccgcaaaagaaataaaacatgaaattcgggctcaagaaataacattaataaaaaataaaagaaaaaataatggcaaaaaaaaaactaaatcaaatgcacaaaacaataataaattaaacaatattcatctagaataatttgtctcaaaaaagcgttgttctgataagcagcagcctaagtgatcaaccgagcgccgctgtgccgaaaatgttgttgtttggtcctcgtccgcctccatctactactgcttctggttttcatgccgttgttgctgctgctgctgcttcttcggctttcgattgtgccaacaagtcgtcgtcgcggcaaatgtgttgtcgccgctggcggcgcccaacgttctcggcatg

SEQ ID NO: 113128 - DNA, 196 bp, Heterodera glycines
ttttcgaaagagaaaacatttagaaaataataaaaaagaaatatttgcaatgttttaagggatgcaattttaattggatcgatattcaatttaagatttgccaatcacttccaccaatttagtgacgacaattatttaaaaattacactctcgcaaaatcgagacaaataattagagaccggaattctcaaaaatg

SEQ ID NO: 113129 - DNA, 250 bp, Heterodera glycines
tttcccccatgttgtttcactgcttttccaaccattttttttgtttctatttttctattctttttccccattatgtttcagtcccaataactctcatcatcgattcccattgcgtctcatcgattttccgttggtcatttccagtgtttttagtaaacaaaaaaatccacaaacttatttacttttttcttataaaatttcttgtttcttttttctcaatttacattacaatctgaattttataaaaatg

SEQ ID NO: 113130 - DNA, 195 bp, Heterodera glycines
ttttacaatttccgaaattgtcgtgagaaaataatttttttaaatcttatgctcttttttattcgttgtaaagctttccccgggaaaaaggaaaggcttaagctgaaaatgacaacagcagaaatggaaaaacagtagaccaatagaaataatctttcatggttttaaaagattaaatttcagttaaaatttatg

SEQ ID NO: 113131 - DNA, 596 bp, Heterodera glycines
aaaagccgatcattagggggtgtaaaaaagtctcggtctcgagtctcgaaagtctcaaagaccgagaccgagactgaaaacccgagaccgagactcgagaccgagaccaaaaaaaccgagacttttctcgagttgagactcgagaccgagactctcgaacatcactagtagcgactaatcactgaactgctgcaagcactgcttaagcagcgtatagggatcagataattgtcgggacattggcaggtgctaaaggaatatgttttcaacaatttctgaagaaataaacatgctttgtattaagttcccggtcccgggttttgaaaagctcaggtcccgatcccggtcccggcaatttgggccggaaaaacgggactaaatttcattaatgaaactgccccaaatttgaaaaaattaataattttgtggcgaaatgtctttagttcaaagtttaaagatagaactgagaaataaattcagattttgatacatacataccattattttttattttgaaatccttaaaatgtattttagaaatgaatacatcaatctggaaaataggtttatttgaaaagtcaaaggatggcaaaatg

SEQ ID NO: 113132 - DNA, 140 bp, Heterodera glycines
ctctttctccctcccctttctatctctccctcccttttctctcattctctctcactctccgcccctccccatttattccgttctctcaggtgaccaatattccccaatctgtcgacccggacggtcttttgctgacaatg

SEQ ID NO: 113133 - DNA, 851 bp, Heterodera glycines
gaatataaatgatcagcaaaagagagaataattttacaatttgatgcaatcaaaaaaaaattgaagcaaaaaggaaaatatgaaaacaaaaaccaaagcaaaattgagagaaaaattgcacaattattggggacaaatagaaaattaatacaaaaatggaaaaacaaattaaatttaaagaaaaagaacagaatgaaaaagagtttttatgagatgaaaaagcgcaaattcattgaacgatttgatgaatttagagaattatatagccaaggcaaacaaaaagaatttgtgaaggaattgggcatttctgacattgataaaatggaaaaaagaattgttgccaaaagacaataaaagtaagcgaatttctaactttttaaaattatttattattttcagcgctaattaaaccttcaaattatgacaaattaaaaaaagatgaagcaatattttgaaattaaaggaaaattttaattttatttgtttaattaattaaaaaagcaatttacaacatttgttggatatgaagccaattatggtcaattaattatttttttgaattatgtgcccaaaaaaaaatcattttgagtaaattgctacactttccttttaatttattttttccataaaataaattattttataaattattattttttgcaataattatttcttaaaaaatctgagtaaaaaattgatttccatattatgtataaattacgtcgtgaatcacatattaatttttaaaatattgttgaaaagaaaaataattgcgtaataacatttaatgcgaataaaacattaaataaattcatttaatgcaataaattcaatttccaaaagtaaaaatg

SEQ ID NO: 113134 - DNA, 394 bp, Heterodera glycines
  unsure (1)..(394): unsure at all n locations
gatgatgatgatgatgtgtgttnggcgaaatgaatgccgaaaaaatttggctataatggcgaaatgttaaaaaatggcacagttaaaaaattgatcaacattggatcggtgatcagactattttatgtgatcaaaaataaatgatttgaggtcgaagattggttaaaaaagagggcgggggattatgctatatttttattgaaatgccgaaaatttttcaaaaaatcggatttttatcgaaatgatcgtcatacagtaatgctaacgaaatctatgtggcctacagtaaccatcaacagtgacataaacaatttaaaataaataccaaagtgccaaatctataacaattagcttcatgctgcgaccaatgggtgtaaaaaagcgccaaaaaatg

SEQ ID NO: 113135 - DNA, 84 bp, Heterodera glycines
agtaaacattttattggacacataaccgtaaaattctactcgaaaattaaggcgagactcgagaaaataagcgacgggaaaatg

SEQ ID NO: 113136 - DNA, 473 bp, Heterodera glycines
tttttggcgacaaaaaatgtgtgatggcatgtcccctgaggacgaaaatggggagggaattgggagacaaagaaagcaagagatggacatggacaccaactactgaatcaccattttttgatattttatttacaacgttcagtctttccttcctctatctctctcttttttcattcattttcattgtatctttttttttaaatttgttatcatgtttttctgtcctttgtttatgccaaatgtatttacctagttattttttaagaataaaaaatataaaatttgtttttcccatacaaaaattattggtaatgcttttttgttgttgtccatatgcgttttttcttccatcgatttgtgttgttcgttttaatatttttcgtgtccactgattttactgtgcatcgaaaggacagaaaagaaggaaaaggcgggcaaaggaccgaccgaccgaagacgccaccgccgcaatg

SEQ ID NO: 113137 - DNA, 1003 bp, Heterodera glycines
tccattccaccccgcctcttatttttggcaatcataggctccaaagaccaaaattcattccgaattattcctgaaatattttgcctttctttcaaccaaacgcaaaatcatattaaatgccaaaaaccaaaagtttttctttaattattttttcccatgcctgcgggccggacaaaagaattgcttgcatgaaattgctaatgatctttctgctattgagtttgaacgttcaaatcgtagagtccccacaagaaaatcaaactaaaggaatttcagtggataaagaaatttgtgaccatttttgtgcccatccatgccagccgactaatttaatttttccaaccgaagagagaaatgcaactttgggttggacttgtgtacacctaaagccaaaaattgtccctcaaagttggtcctcatttttctcgaaaaatgcttggacaattggcggcatcatttttactattgccggcatttccttttgtgtaattcgcgcatatttgtggtcaattgaacccgattcaattgaaattaatgtttgaaatttcttttcaaaatttgcaatttccccgcttttgactgcgtttttaattaattccatatgaccaaagttttgcagtgcccccccccccccattttttttctctccgtgccaaatatggcagccgacggaaagcaattcatctcccgtcccctctcccgttttttgctcttccccgtcgcgacattagctttttgcggcgatgaatctcccctgccgctcgggagaaaaacgttttttgccttttttttcccattagctcgccgctgttgtaacatttgaaaaaataaattgcatttttgctgtaacgcccatcgtccactcggacccgtcgttatttaaggccggctcatccttcagaaaagccatttcttgccttcattctcacttttcctccgctccatcattttttttcatttttccatttcctttttcaattttcaatttttctttttttagatg

SEQ ID NO: 113138 - DNA, 1003 bp, Heterodera glycines
tatatatatatatatatatatttatatacataatcatatgagttggcggttttaagaaacgcccaaagtggcggttttaagaaacgcacacctggcggttttaagaaacgccctggcggttttaagaaacgcccaatgtggcggtttttaagaaacgtcccagcaccaacgaaaacactatactgagaaaaaatatccgggaaccgcactttctttttatggataatatcaatcccgcattccgtgttttcaaatgctcatccagcttcatccatattttattatgtgctgttattagatgattagagcctataagtcagtcactcagatttgtttgctgcgcaacttaaatttatagaatagaaattttttgggattcctgtacataaattgtacaatctttttatttatttaaaattgcatttttaaattgtaatgtaaaaatcaatcaatgcaatcaatgcatacttctaaattgtatagtaaatacgtcatttgcacataatgcgcttcattaaaacacgtcaattaagcctactctatttgttgaataatgccaattgtggccctctcaaagtgcctctccccatgtttcatgccaattttgcctctccccacaatgatgccaattttgcctcacgccctctctatctctccctttctctctcactttctctctctctctctccctttctctcgctctctccccgatgccatttttgcctctccccatgttttcgtgcaaataattttgcttctttgttgtcaattttgcatgcctctttcctcttgtttcatgccttatttcggccctctcattataatgccaacgtgtgatttattgaaaaaattctctgcaatataattttgcataaaagcaaatataattcaatttggcatcatttttttgttgctcattttggtgatattgaaagagattcttttccttacaaagctttaaaatagtaaaaaaaaatttagatttttttttgaaattgaaatg

SEQ ID NO: 113139 - DNA, 305 bp, Heterodera glycines
atggaatccgtttgcatcatcccaacttgccgtgtgtcttctaatttggaggcggtgatcacaaaacctttttcccgcttgaaattctcactattatgttttagatgtttttcattatttaatttttgttgtttttaaaataaatttgttgcgtaaaatttttgtccattttaatttagatgaaaatttcaaactgtactgttatttttaaaattaattccttggacacgcaacagtttttggctattgcacaacgtggaattaatacagaatataatccacgccgtttccacgcaatcatcatg

SEQ ID NO: 113140 - DNA, 201 bp, Heterodera glycines
  unsure (1)..(201): unsure at all n locations
tgccgaaggaattcaatactnttgatttaaaaaaagtgtgtttagttaatcattccttacgagatttgcgcactcaaatcggcgaaattagaagtggaaaactcaagaaatctaaacaaaattgacaatgaaagtcttaaaagtaattatacacaaattctcagcggaagtcagctgataagaataattgcaaatgcaatg

SEQ ID NO: 113141 - DNA, 108 bp, Heterodera glycines
ttcttcctcatccctttcctctcccaaatgtgcccaaagattattcacctttttgcccatttaaaagttcccattttccctctgtttttagcacatttttcaataatg

SEQ ID NO: 113142 - DNA, 484 bp, Heterodera glycines
ttcccggcttttaccacgtttggtacatcggctgcactctctgcggacggcccggctacagtttcgagaatttgccaactttcacaaagcccaactttccctactaacaataaataaacaatgtccagtacttctcttaaaattcggcaacacattcgagattttcatttttaggtttattttagcgataacccacaaaatattaaaaaacaaaataatgtgaagattaaaaaatgaagttgaaattgtcggaaatgtaagggcagagagaaattaaaagagagagagaagtacttaccattggcgtagtcaatttaccaatgccttttgcagtgaaaatagagcttttggatttaaatacgaactaaaattggaaatcgactccatcttttgtcggccaatttacccttcaattggtcatttgacccttctgatcatttgtccgccaatgatatcaacatctttttttttctacatcagaatg

SEQ ID NO: 113143 - DNA, 874 bp, Heterodera glycines
  unsure (1)..(874): unsure at all n locations
aataantttgttgaatttatatttataaaattgtcgttccctttttataaaataaaattgcgaaattctgaccagacaattctccacatattctattagcccatcaatttcaaacttttgttcatttagtacaataaaattggtaatgagaaggaattaaattttgaaataaatgagaagaacaattggtcccataaaaaaatacatgagggaattcaaattttaaaaggacaaacggacattgtaagaattcggaaagaatttgacgccattttcttaaaaaaattttgatttgtccacaaaatccgtgccctttcctgatcaaatcatttgctttgttcctgtttatttaagggcattccaatggcatagggagtaaagaaaaaacaaaaaaaaacagccaatttgttttgaaatgcaaattatgtctctaaaatattaggtcattaatactgatcgcgaatctgaaattctaatcgttgttgccctttcccacgtattattgatctgattgtgaaggaagaggtttgacagcaaccgagttttgctgtgtcatcgctgaggacggcctgcatttgtttattatctaggcgataataaacaactttttgttggacctgctaacagtttgacactgttagtagtgagaaattttgcgccgctgattttgtgtcttggcgacacatttcagttcatccacgcgcatccactctgtttagtagcttggcgctgctaacaattgagtggcgaacgacacgtcatttaaaacgagtactctcgagctgaagggaaagtccacgagctgtggttaagatgggcgacgcaatccaacaactcactgcggcaatccagcaattattggcaaatcaaaatg

SEQ ID NO: 113144 - DNA, 60 bp, Heterodera glycines
tctgaacagtccctcaattcaataaaacattatgaattgcattacctccaatttcgaatg

SEQ ID NO: 113145 - DNA, 352 bp, Heterodera glycines
tttcggattttcgcacattttggaactctgctagaatttcggacacccttgaaaaaatttccgaaattttgaggcttaaaatttgatatgcaacgggacggatgtgatatgattaattacaattaatgtctttcccctcccctcacttttgggcctcatttgtgcgcctttcccttcgccgtcggcggccgacatcaaagaaagcgacggactttcacattgacacgcgctggtgataattgcgtttattcgccgtttaaaaatatttaaaaaatgtgcctctaactgttttttatttgcgcgtttaatgacttttggcttttttaattgcctaaaaacagggaagaggatg

SEQ ID NO: 113146 - DNA, 440 bp, Heterodera glycines
ccaattggccccgtcattgctcagcgaatgtccatcacttcactgtgtctctttcaatgatggcattctcacttttccacccgatgacagtgccaatgcgtcggatggctaagcggtggccaaatggttgttcacgccttgtttgtatggtgtgccgaaggtgatcagatgctttgtgaattcaccgctggatcaatggtcgtcaacgatagaacagattaaagcggtgattatccttatttaattaagctttctatgattttttgtcccatttttaggcattttccaatgcttctttggttactttttgcattcactttctaatttcttctccgctgtgctatttgatcggatcaacgaagtgacttgggagcaattgacacttcaattgttgcctcttccgttgtctaattgcacgggatggaagaaattggaaaatg

SEQ ID NO: 113147 - DNA, 152 bp, Heterodera glycines
tagtggacccatagtgttgctacctaattgtctttttttataagcagtaattaaatttcttaatgtgttttatgcaataaatttttaaataccaatttcagagcaaaaaaccataatattccttggttctctacattttcctacacaaaatg

SEQ ID NO: 113148 - DNA, 741 bp, Heterodera glycines
gctttctgatctgatcagcagtggtcgatcacttccctcactaagaaccaacgatagaagtttcttctccaaagcattcctgtaagtgttttacttgggtatattacatatactgtagaatagatatcccctacaaattaataatgtttttttagtcgacccaacaaaattttgcttcaatttggcaccgtaccactgccaattaggctgagaaagcattggcaaaaatttggcttcgttcatgccagaaaatatgacagaaattgtaatttttaaattaaaatagatttataatttttcaatttatttaggctttttctctcctgttcagtgcatgttgttattcagagacggctccaagctgaaggacagtcatttgtttcggcacttcagccaaccgaacccattttcactttttattttctcgcacattctgaagccagaacaatcatataagccaagaaataggccactcagaaatcagaattatcttttcgattttgcccaataattcttttaaaaaggatagattttcacagataaattttatttgtaatttatttgtacagcttcgattttcattgtatgaataaaaattatcaataaattttgttaaaatattcaaaatgcatttttttgtagtttttttggaaattttgaggctttttgtgatttatagagaaaagcagcctcgttactgtcaaaatattgttaacaaattacattaaaaattccaaaatg

SEQ ID NO: 113149 - DNA, 1003 bp, Heterodera glycines
taaataaaacaaatattgatgcacaaatctgaagcctcttcattgacatttataacagaattgaataaaattataaattgtgaaataaattttttttcagttgaaaagtttaaacaaattcacacgaaaaaaatactaaaacttaagcaataaaggtaaaataaaatacttatttataacaaaatgattaacaattaaagaattttaaatatttataaaattttattagactcattctcagaagggcagggactcagagtctggaaaatatcaatgtccgaaattaagttaaaaagaaaattttaaaaaaataaccaatagatgtattcttataacaacgaaaaaaaagtattagaaattttcaaaataaatttattgaaaaagtaaatgttgccatttagtaaactatttaaatttttgtaagaaataacatttgaaataatatttatttaaatattttagtttggaataacttaaaaaattttactttgaattgccagaacttaacatagaaataaataaattttaaattttctcgctagacaaaaaaaaaacaaattaaaaataccagtatattggaaattttggctacatccagaatttcatttaaaatattcatttcttctcttcaacaaatatttatttgttatttttggggggattttggacagttttaaaaaattttaaaagataaaagattacaaatagaaaaagtaactaaaagatatattcttataaattatttacactaaaaaagcaaaaaggactttgtcaagaaaataggtgagcatcagggatgggccaaattgaaaaataaaaagcaaatttgcgaaactgaaaaatgcgaaatgaaaaaaaagcgaaatgcgaaaagccaaaatatgcgaaaatgcgaaatgcgaaaagcgaaattttttttaaaaattttaccaatagctttttaggttgtgatgcaaaaaaaatctgcattttccggttcgatctttttctcagataaaaaatg

SEQ ID NO: 113150 - DNA, 142 bp, Heterodera glycines
aattattgtttttttttaaatttataaaaaatgtgaataaaatattaaaaaatttaatggtgtattttattaaaaaccctagagaaaccggaataaaaaacatctttaagattagttggtgaccataaacttgtttgtcatg

SEQ ID NO: 113151 - DNA, 375 bp, Heterodera glycines
ttttatgccattttttgttttgttatttatttctatgtaaagtgagacataacacatataaggaaaattatagaataaattggggctaatttttgatgttcttgcgataaaacccaatgaaacattagaggatttagtctatgaatttatttttctattttaacaaaaatttatattttttaaataaaaataaaatgattcgttaaaaaattaaattttatgccaaattatgaggtcaaaggctatcatttcgtcatctttattcaggaaaatccatatatattaaaattaacttttaaacatatttttcttatttttttttgtttattatatttaattcgcaattttatttggaaattttaagctattcaaatg

SEQ ID NO: 113152 - DNA, 110 bp, Heterodera glycines
ttgttttctacggcgactaagaaaataattcctggattggcgcccgtaattaaaaatatttaagtatttaaattgtttaatgtatataggtggaaaaaaaagtattgatg

SEQ ID NO: 113153 - DNA, 621 bp, Heterodera glycines
  unsure (1)..(621): unsure at all n locations
aaaaaaaaaattnttatcatttcagtaaatctcattgacctattaagctgaatttttttaccatncatatcttccaatatttaagaagtatacaaaaataaaagtatagaagaaatatttttttatgaaatttttaacgtcatttgatcctaatttgctgtttcaaaatatagaatcaaaatttaatgcaactgttttctgcacttgataaaaatgtagaaaaattcatgcctataattttcgatgctgatcaaaaaagtcaattgcattaaggtggtgcaattgacttttttgatgagcccaattagtgatactagtatgaatttttatatatatatttttttgctttttaaaaaagtttgatttttttaaaattttgattctataatttggaacagcaaacttggactattttcgtgaaaacacgttaataaaatttttcttctacaatttcattttgtctgcttcttaaatttatggggaagatataattggtaaaattttcagcttgataggtcaatatggactaggtgtaatgacaagaacagactgtatttaatttattagtgttaaatacatcaaaatttaaaattattgtaaattaagctccgtaacacaatg

SEQ ID NO: 113154 - DNA, 73 bp, Heterodera glycines
atttgggacatttttgttcgtgaaatttggcccattttttcgacaaacattcaccgtttgcgctttaccgatg

SEQ ID NO: 113155 - DNA, 92 bp, Heterodera glycines
cctttaaagtttaaatggaattcttatgttaagagaggaaatggcacggactttctcgtgtaacttggcaaaatgaagaagatccaaacatg

SEQ ID NO: 113156 - DNA, 137 bp, Heterodera glycines
tttctcttccgaaaatttgaatcgatcgatcaattttgcctcaggcaattccattcaccggaaatgatcagctgcgtcatcagcctcagaatggcaccgttggcacatcagctggtcttggaaatccatcagcaatg

SEQ ID NO: 113157 - DNA, 338 bp, Heterodera glycines
  unsure (1)..(338): unsure at all n locations
aactataatttttttttaaattcagaaaatcaaatcatattaaaaattataaatatattttttcaaaaaaataataatattttcgccaaaatttgaatttttaaatgagtttgtgaaaatatttttaacatttttatgaggaagtttttgcttacaaaaaaaaaagaaaatttanatatctttcattcggttttttgtcaaataaatttttgctgaaacaacaaatactaaataattaaataaaataaaatttagatttttatgattggcatttgtatttatacaagcaattttttgcgctgcattttttggtagcagcaaaagtcaaaataaagatg

SEQ ID NO: 113158 - DNA, 168 bp, Heterodera glycines
aactgggcaattaaaaccaaattaattaattaattaattaaatttgtaaagaaattaattaaataaacaacaaattaatttcctcctttctcttggttttcatagattcgatcattgctcaattagccttctattttctcgcttaaccccctttttcagaggggaatg

SEQ ID NO: 113159 - DNA, 714 bp, Heterodera glycines
gctgaaaaattagtaaaaataaaagtgagtaaaaatgaaacaaaactgagaaatagcaaaatcagtggtgaaaaagatcgatcagatatttaagtgcaaagcggatcactgggaataaaatggtggggagagggagaattatttgatggctaaacaacacgccccatctcagaatgggcggctgtgtgttaagcgaagaaatgcggcaaaaaccaaagcaaagcaaaaggcggattttctggccgtttctcctcatcaaaattccgtaacaaatgttgttgcacaccattttcataattcaaaagaaagcgacaacgccacaaataaaatgcaaaatatattattaaaggacggtgtggaaatgaaagtcgatagaaacaaataattttaatctggcaaacttaaaataacattaaaacttcattgaattcatctcaatttccaacaggttcaaaccaaaaaagtgtataaaaaatgatttaagccaaaaaaaaaattgggtccttcccataaatgctgcgctaattagtattgaaaggtaaagttcgaataaaaatcaatcaaaacaaagggaggaacccggagtccttccccttttgtccttttctttgtattcagggaattcatttaaaataaaaaccaactccttgataatcgttttcggaaagagacaccgtgcgatactaactggaggccaatcagataactgaaatg

SEQ ID NO: 113160 - DNA, 265 bp, Heterodera glycines
aaaatgcataaaacgggaaggagtgaagacaattcttaaactcaatgatggacgaacacttttacattttcaatggcaattgttaaagttgtgcaaataaatgagcagttttgtaatgtcctatttttggcattcgtttggcgttttgctgtgcgtcattttcaattttttgctaatcctccaatcatttaaattgttttttttctttcgagattaactaaattcaatatcaatttgtataactcacttcaacagaacaaaaatg

SEQ ID NO: 113161 - DNA, 276 bp, Heterodera glycines
ttatgaaaaatacacataaatattctcgattatcatccgttaacagaaattaatacaaaatttttaatgaaaaattcttaaatttctgaataaaaaattcaaaaaattcgtttttcttttttttacataattttttgtttcatcagcctcccttaatcaaaaaaagcacctttttaatgtttttctgtttatttaaagcatgttataatgacagtaaattttcagttttcaatcaaacttgcccctcccccctttgctttgtactgcttgaaaatg

SEQ ID NO: 113162 - DNA, 349 bp, Heterodera glycines
ttctgcgcactagaaaatgatgatcaaaaatgaataaaataaacctgaacaattaacaaaaactatatttgcttcttaattttggcgaaatgtttaataaaattcaaataaatgagtggacacaggaaacccggcaaaaaacccaaaaacccggcaaaaacccggcaatttcaaaaacccggcaaaaacccggcacggacccccaaaacccggcaaatgccgggtttccagggcaaaatggcacccctggcctccaaagcacattaaattgattatactgcactcattacaagcaaaaagttattccatttaggtttttgtttttattgataatgattttaggcccatg

SEQ ID NO: 113163 - DNA, 151 bp, Heterodera glycines
tctccaaaacaaggcgttgcccgggctgaaaaacggggaccaaatcgcataccatcacaggcaaaaattgaaaataaaaggcgcttaattaattaattgtcagtgattgccttcttaagtggtcgttgaatatttaattaatttttcaatg

SEQ ID NO: 113164 - DNA, 238 bp, Heterodera glycines
cccctaatacggtactggttacgccccggagggcaccaacaaaacactgacgcctctgatgctggccgccgcagcgggaacaagcgaaatggtggagatggtgaaaattttggtaggagcataagaaaattaaattaaaaaaatatttctatcagaatttttgcagttggagagtggcgccgatccgaaccaaatgtgccttcgcaaactcatcgacgcaagaggttcccccaccatg

SEQ ID NO: 113165 - DNA, 643 bp, Heterodera glycines
tttgcatcttgtgtaactaagtgtgaaagccgcttgctttacaaatttggcgaaacaaagtgagagaatggacaaaggagtgccgtaaaaccaggacaaaagaagtgttccgaggtcaccaagaacagatgaacaacccaagaaagcagcttataatgattgtaaaatcaatttattaactgatctaaaaaataagcatgtgaacgggaaatgtgtttacgagaggaggaatgttgtcaaattgtcccgggattttggggcttttaggttatacaatttcaaattattttaaatttaaaatcacatttaaaaaacttaatttgaattgatcaaagagttcaattgacgctttcattttacaaaaaatattcactttaaaatcaattgtatagattattaaattaatttccaaatagatttaacaaaatttgccattttttgcgtcattaaatgtaaaattcaatggaaaaagtggcatataaatgaacccgcagagacccatttctccacaatttgtttatatcttcttacttctatatcatgttgagctgttgatttgtggcttctgttctgaacttatattaataattaatattcattaaattaaacaaaaaatttgttttaatttactttatttaggatg

SEQ ID NO: 113166 - DNA, 150 bp, Heterodera glycines
aaaggattctcaacggcaaacgaatgtcgaatcatcatcgggcggaacgacacgtaaccctttcgaaccgatggaagtgcttcccggagacctcgagccagaaattcctttgaggaattggcacgccaggagaaatttgataaggaaatg

SEQ ID NO: 113167 - DNA, 592 bp, Heterodera glycines
atcatgccgaaacgatgtgccgcgaaacgatgataatgatgaaatggtgccacattcttacgaaaaaatgttttccgtgtcatttccgagtgtccatccgttcgatttcccgaaaatttcccaaaattttttttgtaattttgccattttcccgcccgtcaaatcacaagcgaattgtgtgcccggctctacccctaaattactcaattaggtgtgattgctttcccaatttaccaatattcgcatcgattggcccgtcggtccctacttaaaattggattttgccgaaattgccgtctaaaattaaaaaaaaaagtgaaattttcaaattgaaaaaatttattgcccttttattatcactttgtttttgttttaccgtttgcatttcgcataataacaataatacattttaccacattttattgttcatttggaattcgattttgatttgtcccaacaaaatcaaattgtacatttttaaaaatttaatctatttatatttttttaaattaatctatttaatttattttttaaatttatttagcattttttctatttttataaaatgcttccgccgggcgaatggcgcatg

SEQ ID NO: 113168 - DNA, 658 bp, Heterodera glycines
  unsure (1)..(658): unsure at all n locations
cccccccccnncccgaacccaaaaaagtaaaaaaatttcagtaattttttttaaattttaaacaattttcttaacaagagtgcattaaaatactcaaaaattttcctggcggcgcctatcggcaccgccggacccccattttatcataattttgtaaaattgaggccaaaatgacaaaaaatagtaattttttggcgaaaaattttccaaaataagctcctaattcgggatttcaaaaaaagcaaaaatacacccctaaaaatcgaatttttgacttcagccccccccctccccgaagccaagggtctggctacggccttaatgagaagttcgtttctcatacaattttgaaaaatatttcaacaattttttatttggaaacattaaaaagaaactttattcagcattaattattttttttaaatcgctagaaaaattacaaaaatatttataaattttgtaaaaatttttatataggggaggggaaacagtgcaccctgaaaagtatgtaatttcaaaaaaaaaggttaatgttattatttttggcccggttttccagccaacacccactcgggaatgggatttgtccatttacatttaactatttaattaaattattttttcccatttgaaatgagtgttttttctacccaaaatg

SEQ ID NO: 113169 - DNA, 147 bp, Heterodera glycines
aaaaaaaaaaaaaaaaaaattttttttggttttctttaaaaaaacgaaagctttttatttgattgtgcttctgacataaatttaatgttaggttgcctatgaaattttttgccgaaaacctaataaaataactttttttttaaaatg

SEQ ID NO: 113170 - DNA, 644 bp, Heterodera glycines
tctctttggcaaaaatcggtcggttggtcggctcgaaatttggcgggcattgaaaggcgaagggcccgaactgatcgaccgatttgaggacggattctacaaaaagttggcatttccccatacggcgccgcccgacgctttcatcacattcaaaagcatttgcataaggttttgcttacaaacagagagaattgggactttgttttattgtaatgccgaagttgggtccccatttggcacgaatttttaaaatcctaaaattacgggatgttttacccagggtttccgatccgctgatcacgaatacattgcctaaacccggataggaactcgaacaaagttggagacagaatttaccgaatttttctatttatggcacaattattggattttttgccgtctaatttttcggaaaaacatttgattgaaaatgccggggacaaatttttttatcgtaggtcgattttccaaaatttaattaaaaaaaaaaaattttgccatggtaattgaattggtttcttttcaggtacattgatcatactgtcgtggcctttctgcaccgcattcgtcgcctcttccgtcactcggccattgcccttaaaatggtcatttggccacagtccgtccgcgcatggcacgtcatg

SEQ ID NO: 113171 - DNA, 933 bp, Heterodera glycines
tttggtgtttgaacaatttaagaatgatctaaacacacacacacttattttttattatatgtatatataaaatagaaaatgtaggtattttgaaacaatttatgaaattaaacaaatggctgacaattttcaaaaatttgatgaaaaacatttgcaattcagacacccgttcacgctgacaatctcggggagcacggggagtggaaaatcggaatgggtgctgcgaatgctgaggaatgtgaatgcgctagtttcggaacccatctccgagattttctattgttatggggagttgaacccaaatataatacagctacagaaaagtggacacatcggcggctgtagggttgttgtacatgctggaagcccaaccgaagagcaggttaaccggcgcgcaaaagagagtgatggaaaactgctgatggtgctggatgatctcatggttggtatggggcaacaatttcttgacactgtgttcacccggggatcgcacaattggggggttagcgttgtgttggtcactcaacatttgttcgcgaaagaactacgggttgcgcgcaacaactcgcactatctggtgctgatgcgtaacccggcaggggcgctccaagtgcgcacactcgcctcgcagctatttccaacgaaaaacaactatttcacggaagcataccgagatgcaaccgaaaagcagtttggctacctattgattgacatgcaccccgagagtccggaattgctgcgcctaaaaacgaatatatatggagagcagggcgggctccccccattggtttatgttgcaaaatgaagcatgtaaaaggaagaagacgtacagttaaacataatatgaatgttagcccgctgatgttgaaaaatgctgacttcttacgccactttcgctctaaatatcgctcaaaaagcagtcagcgccaaatg

SEQ ID NO: 113172 - DNA, 287 bp, Heterodera glycines
atgtttaattcagaggatttgttgcaaattgtcacttgaataaattgtttttgtaattgaatatatttattgctgtcaaactctcaagaatatatttcgaattttttactttgactgaatcttcctatattttctcaacttgtgttacaatgacttcatttacccatcattttacatatttgggtttctttcaactcaatgaaaatttggacaagggttcagagtgcctgactgatggtttgcagcgcagaacaatcgaagaacaacttattgacagtgccgaaatg

SEQ ID NO: 113173 - DNA, 454 bp, Heterodera glycines
  unsure (1)..(454): unsure at all n locations
ttattatttgtgtgacatgattggaaaattgcaatntattatcaatatttatgcctaaatccttaattgtatccacaacatttnattatatttccatcaatnttatatatttctttggggtttttattccncaaatgaagtacaaaagtttttttaattgagattctgatttgccatttattgttgcacattttataatttttagaacattataaaatgattgttggcaattttcacaaaatatgacagaatcttggtggattttccaaaattcctcaaaaaaaataccgatttactcttaaaaatctttttttttgaaatttttttttaaaaaataaaatttaactgtaatattaaaaatttgtcttttaacttttttgaaacttaatgaaaatttttgaaaattagcaaattaataataaacacacagagctatcgaacaacaccaacaatg

SEQ ID NO: 113174 - DNA, 390 bp, Heterodera glycines
tttcgcttcgcttagccctttctccgcttttcactgggccaatggactcttcgctttgctcccatcagcagaaaaccatgccaattccgagtcggttttccttttctccattaataggccctatcatcctgaaagatttcggggaagcaccagcggacaaaacgagcttttttgtcaagattcctccctccggaattttctccgttcttcagagtgctcattgtttcgcttcttcgctcgttggttgacaatgtgccccttctgaatgccaataaattgcgtgcctttgtcaaaactgaaatttcgcggcaatgcgtctcattttggcaaattgggaaagcgcatttggcatccgcactcactttatgtgtgctacgaatcttgctgatg

SEQ ID NO: 113175 - DNA, 60 bp, Heterodera glycines
tctataaaataaaaaaaaaaactataaataaaaagaaaattacataaaaaaagtaaaatg

SEQ ID NO: 113176 - DNA, 294 bp, Heterodera glycines
aataaaaaaaccaaaataattttgtattattttcacttgatataaattaaaaatttgaatttttttttaattttttaaaatttcccggttggtcccggttcccggtcccgaaaaaaaatcgaggtcccggtcccggtcccggcttctcaggtcccggcaagtcccggtcccggttttggcaaaaattcccggtcccgtggcactctagtttttcattccaattattattaatttttattgaaataaaattatattttttaaagttattttagtatatgttatttaatagaaatg

SEQ ID NO: 113177 - DNA, 62 bp, Heterodera glycines
tcgttgtatatcagatcgcctggtatgccatcttacaagtccactatctctccgagaagatg

SEQ ID NO: 113178 - DNA, 193 bp, Heterodera glycines
aacagcggctcaaccgtttgtctaatttttcggattttgtttaaatcattttgactcggattgacaggtctcttcgggcggttcgaccagtactcagaatttgcagccaaacctcggactcctgaccatgcattaacagagcatgtaacgacacccgtaacaaatatccctcccgtaaatgaagagcaaaatg

SEQ ID NO: 113179 - DNA, 111 bp, Heterodera glycines
atactcataaaaaatacaaataattcaacccacctattctatgaccacattctgaaaaaaatcccagaaatacgaggaaagatatgcttggtcacaataaaataaaaaatg

SEQ ID NO: 113180 - DNA, 326 bp, Heterodera glycines
ggtaaatttctcattctgttggattgaactgatcaggacgtctttttgatcaaaaaaggcgcgagctgtcagttttatttttaaaatcaaatttaaaaaatttcctgatcaaaaacattttttgattgaaaatattaattaactatgggtgcaaatttggtgtttaaattttgtttttattttttcaagcttgcaaatatccgcctgctgagctcgacacgaagcaaaagatcacattgggctactatttcaacgaggcaaaaaatcgcattttgcaattttaatttaatttattattatttttaattgtgtttaagtacgtgatg

SEQ ID NO: 113181 - DNA, 630 bp, Heterodera glycines
tataataacgctgcggacatctacatttttgaattgaaaaaaaattggtaattactctttctttttctccatattgaccatcatactcatactccccccacccttttcttcttccgccacccacctcccccgctacgcgccgctcccctccccttcgtgctcctctctgtgccgatgaatagggcgaggaaatgggcctaagaggatgctactcctccgttccttcaaagacactgacctttcctgtcaaaatactcgcaaatcttactgcaaatcaaaacacattaagaataaatactgatatagtatctttttttcttctctatatggtatttttctcttttttaaatagatgttagacattataaaataaaaatatattttttagaaatatataaaaagtataaaattatttaacacgtgtcttcttaagtaattaaaaatatttaatatgatgcgtataaattatgtaaccggtatcttgaaaaccatcgttagcaagttagacacatgcactctttgcaatttgcattatggtctaatcaaaatatcaaatgatggcaaggaggttagctggttatataaattattattagttgggagtctaacttagttgattaactaaaaatg

SEQ ID NO: 113182 - DNA, 126 bp, Heterodera glycines
tcaaaacattggcacttccattgcgcaggtttctttttatgaaaacattagtaaagcttatgtaaatttaatatcaattcttactttgctctaaatgttgtaaaaacaactaatgagttcagaatg

SEQ ID NO: 113183 - DNA, 423 bp, Heterodera glycines
  unsure (1)..(423): unsure at all n locations
cgtgcaaattgaattttgtaaaaaaaaaaaaattttcggtgcttatcgcaaaacagtaaattttaaaattattaaaaaccnaattatannnggagagggaaccgagcccgnntggtttgcaaagtttttgtcaaaaggcgaaatttcaatttctcgatgagcacacattattttttaatttttcaaaattaatgaatttcacgcaaggccgagtttttaatttatggcaatggcgagagtaggctaatgggataataaccaaaaatatttttgcataaaaatgggaccaaatctattaagttagttatatttaagtgaacttacaattagcctaaagttgacttatttaattttaaaatcagacaattattaatataatttataattaattaaaaaataaattaataattttgagagaaaatg

SEQ ID NO: 113184 - DNA, 686 bp, Heterodera glycines
tggccaattaaattgtgtgatatttttgggagttaattaattaattaattaattaaattttaatacaaattttagttgcgaaaaattaccgtcaattaaattttaatatttttgaaaagaatttttttttttttaataggcattttcaatttcacaaatatatttttctggcaaattaacattttgaaacccatccaaaatacctatttttgttttgttttttcaaattacttttttttcactaatatatgtacaataaatatattttgaaacattttgtttctttttcgtcattttctaatgtgtacataatcaatcacttctaccgtttttaaaagatcacacaaaatattattattatattattattgtttttaaccggtaatgttaagtaattatttttgtttcattatcagtgcgtgcaaaacaaaaattgcaactgaagaaaattttttagtttattttcataattcaaataaattaataaatattattttttaacatatgtaaattgaatgggaaaactcatggttttaatggaaataaattaaacataaagcctgcaattaataaaatcaatttatataataattattttttattttcccattcttaattaattaaattcatataatttataattgcctattaaaattatagaaataatacataatcaattaataatg

SEQ ID NO: 113185 - DNA, 196 bp, Heterodera glycines
atttagagggggaaaaagtccgatcattttggcacacttttcccattgtttacgattcattattgatcagatcacatccattttcaaaaatatgtttttgattttgctttttaataatgcttttcctccgttccgtcgcactttttattgctaattcattttaattgccaatttgtctcatttctcggttgaaatg

SEQ ID NO: 113186 - DNA, 627 bp, Heterodera glycines
ctaaataaatttaaatgaaaggaaaacagaaaactagtaataaaacgaggattttgaacttatgtcgggtaaaaatatcaatcataggtcccagactcaaactttcataaaaacacctttatagattttctttatttcaaaaatctgccaaaaccccatcttattattgtttgggtaatacccggtaaggtcaggaaaaatgccgagaaagagttacctaaattccgaaatcccacctagaaattcaagtcgaagatttttgtaattttaaaatatatggcgttttgttgtttcacgtggactttattaaacgaggaaaaattttgcaaaattcttaatggaattgcttcatcttctcataaaataccttaagcattttctaacataaattaaaaatataatctctgtattccttagtttctttggccttttcagttgtgctgtatatccatcccaaattactctttcggttttcatcaatcgacctacaacttacaaaaaactcatccaaaaatggcctacagaccaagtgaggttctttaaactatcatcaaaatgtctctttaatccaatttttctcctttttcggatggcggctttctgttggagcagcaaaatgacgaaatg

SEQ ID NO: 113187 - DNA, 1003 bp, Heterodera glycines
cttgaaatagcttatcgcgtccttttcggtgttagttcgatttcggaaaatattcaaatttcttaaatcattttgaaataagaaaaaatcattatttatttatttataaaattattatagtatggattttaattaaattaaattttgcctagaaaaactgagacagttaaatcgagttattcaatgttctccattgaaaggttaccgtatttcctgtattagtgttcaaagactaatggtcccatatgattttattatttttgtttttctaatgtgttttaaccctttttagcacaataaatttttttatgtgttagttgaaatttgacgcttttaatttatctcaataagtttggtttttgaaaacctattcttgaatatattcattcatttaattgtgacagtaacaaaactaagctttttaaaatatttttccatctaataaacgattaaaattgttcactaattttggtacaaaaaaattttattcttaatcataataaaaataacaagcaatttagaactttttgcataattcgtttgcgaatttacgcttttagattttttatataaaaattctggaacgttcattattatattaaggtactataacaagttaattttattaagaaactaattaatatctcatattttataagattattaagaagcattaaaacatgaaatattttttaaatattcagttttaatgatttattattttcattatagaacaggttttattttctaatatcttttttattattatgaattttattttttagaagaaaatttaatgtttcaatattcacggtataattattaaatgtttagcttttgattgacaaaaacaaagctatttaaaaaattgaagaaagatgaatagatatgattttaatccgtcttatttttttgattaatttcaggattatatttaaaaatatttttttcttgttgtttttataattattttcaataaataaattctaatatttgagcaatg

SEQ ID NO: 113188 - DNA, 83 bp, Heterodera glycines
accttttaaaaaacggtaaatttaggaaatttaaagcaattttcaattccagcaaattttagtcaaatttcctatttatgatg

SEQ ID NO: 113189 - DNA, 104 bp, Heterodera glycines
  unsure (1)..(104): unsure at all n locations
agcaaatgctcgtcccatttgtttaatggaatatggttgccanataaattttaaatactttttaaaaattaaaaatattttgcttatattttcaggcaccaatg

SEQ ID NO: 113190 - DNA, 636 bp, Heterodera glycines
aatacatgaagtatagaattttgattattgaggccctatttattctttactaaaaaactgaacttatttagaaaaaaaagttttaggggtgccttttcggttttttgtgaaaatgccgaaatatggatgtaaaaatggaaatgtggaaataaaaattcatcctagaagcatcaaaccaagctaaaaatactatttacgtcgtttttaggccgaaatgagtttgcaaaaaaaatatggaaatccatacaaatccggtccctagtgatcacttgtgccttatttagctttgttttcttgtttattaatatttctttattgttttatgcgttcagttaataataaaaaaataattaaatagaaatattatatatttttttcccaaattcctaaaaatcatatgaattttaataagatccggcaatagattaagctgtataatcaatctgatattacaaaaatgaataaataaaattttcattcatagtaaaattgattaatgcatattttcctttattttttttattcataaaaatgtataattcatataattttttcgttatttaatttaatatcactaataagcatattaggatattttttcaaaaatttttttgttttatttttaagattatgatg

SEQ ID NO: 113191 - DNA, 134 bp, Heterodera glycines
  unsure (1)..(134): unsure at all n locations
gccggtttttaggcggaagcatanaattaatttaaatttttgtttcaagaaattatacaaatccncaatatctaattatttatataatttaaaataaatatatttcattaaggcacaaatgttccgaaaatatg

SEQ ID NO: 113192 - DNA, 998 bp, Heterodera glycines
ttgttttcacttttccgtccgacaaaaagtccttttttccaaaggcattcttttggccaatattttttgtcacttatcgactgctttttttctcaaaaatattttctttactgtaaaaatttattgtaactacaattttttatttttcgcataaaaatactcaaaaataaaattaaaaattgcaatttttttgttaaaaatttattaccaaattcctcttaaatttcaatgattttcccggcgggcatttcgccactgccggacccttacccattcagattttttttaaatacgataaaaattaaataattaatggacttgtgaactcaaattaatatttccacgaaaaaggaaaaaattcgcacaaatttattttaattttaatgtcaaatgctcactttcactgccaaatttgtaatggctgatcgagaatagctgtgggagctgaaaatgctgtgcgagcaatttacgtaaggggccaaatgaaggaaagggtggcaccaaaacaacaatcatccctccattggggttgtggtctagtggctaacaaataagacaacggatccacgtaaagggccccgagcggcggttcaaatccggccttccacaccaatttttcgtctaaataatacatacaaaaaaaaaattgggctaaaaaaaattgccggttttctgctgaaatttttagaaaattttgccgttttttgaactcgtgtgccggttttttgcattgcatcccttggcctttcccgcagcattccccctcttttccctcattttgtccctcttaatgatccatcataacttatgcatctgtcaatgccaatatgttttagtttttacattaaatctttttaccttattttgttttggcattttgcctcttttttcgtccttggttcgtcgcatatttttcgggagtctttccgcgtctccaacccaaaaattggattttgtgggcgacagacgtcggcgcccccgggggaagggaaggaatg

SEQ ID NO: 113193 - DNA, 138 bp, Heterodera glycines
aagcggaccaaaaagaaaagcattggggcgccgacgacgccaattcggctgcaaatttggccaaaggagcaggacaaattgcgcactccggtggggaacagttcgctgccggccaatttgtccgagttgaacaaaatg

SEQ ID NO: 113194 - DNA, 74 bp, Heterodera glycines
atcttttggccgataagttcgtcaccatcgagaaggaatttccaccggtcaacaagcggatctgcaaacaaatg

SEQ ID NO: 113195 - DNA, 1003 bp, Heterodera glycines
caaagctcacccggactcgaacaaaaatcaaaaactactagtaagtttttcggagtttgcttttttgcttgaatttaggttagacattcaaaattggatataatgggtgtcagatccctggttaacgcccccccccccccgagaacccttcagaatttgggggaaccaaatatactaacaataagtattatatgttacccccgaatttgcaaaaattgaaagaattttattatgtagtgaaaatgtgtaacaaaagttggctgccctgtcagttttggagtgtgaagttttttgtttaaaaaacaaaagatattgatcattatatcctatgcagtttccttacagtttttcaattctgtttttgtttaagcgtaatttttaaattaatgcattttttgctgttggggcactccgaaaaaccataggttgagggcccttttttattcgtgaaaacttgttttatgggttttcgggggtagctaaacacgaatcttacaccaatgttgagaaatctcttacccgaactcgagtgaaatagaaaactaagtttttcggagtttgcttttttgcttgaatttaggttagacattcaaaattggatataatggatgtcagatccctggttaacgccccccgagaacccttcagaatttggggtaaccaaatatacaaacaataagtattatatgttaggtttccttacagtttttcaattctgtttttgtttaagcgtaatttttaaattaaaaacggcaaggtcgcagaaaaaatcagtaaaaacttataaatccggtccctaaattataatttatcccacaacaactcctcgttatattttcattctctgactgccccatgttttttgattcttaggtcaacccgattttggttaatccgccagcccctaactcaaactaatctctccctttcctttttgtctgactaattttcaaacaaaaaaataaaataaattaattgctttctttttattaagcaaaaaatg

SEQ ID NO: 113196 - DNA, 153 bp, Heterodera glycines
  unsure (1)..(153): unsure at all n locations
tnttgaatggttttcccccgcagaattattttgggaagaacactccgcacgccttgtcaatgcttgaaccaagacagcacgcaccaaacgagaacgacaacaaatgtggacagtaccaatcgaagatgtcacagcagtacaaccgacatcatg

SEQ ID NO: 113197 - DNA, 556 bp, Heterodera glycines
gtattaatcattgttttaaaataaaaattaaaaaaaaaataattaaaaaaacttattagaaatttattacttatttcaataaatttcatattaacccaatgattatgttctatcaatgaaaaattcaatattttaaatgtcagaacatatgttgcaacgtagcaaatacaattttatgtgtgccctggcaccatttcatcattttttctctgaatttcactcttaatatatttgtaaaggatgcgtttttctcgccttgcctcataggcagtaaaaaatatacataattatttaattttcatttttacacatgtaaatatattcaccaataattaagcaatgactaaggcatacgcatatgcatatacgcgaccaatacaatacaaatttctccattcatttaacatttcatttacatgtaatatttgagagtttttaattttacatatttatttaatcacgaaatatttgagaatcgtgaatttgcgcgcatctctaatagcttaaattaattaaattaataagtatgtaaaggtgagaaaaattttagaaaatg

SEQ ID NO: 113198 - DNA, 150 bp, Heterodera glycines
tgggagggagttatccttatttttttggcattctgcagatattgataatgtcccgcatattgttaattgtttgctccaattttggggatggaagggggcataaatcattttaaatttcaattttttgaaatggcttagcccggcaaaatg

SEQ ID NO: 113199 - DNA, 167 bp, Heterodera glycines
agttggcacaatccgaaatcccttcattcaaatcatcatgaacgaatttgttaaggttggcaagaaacaacgaattttgggcacccgacgtttcggggccgtacggcgagggcaaggataagaaatattggcttttctactgcgtgccagttgacggcacattaatg

SEQ ID NO: 113200 - DNA, 512 bp, Heterodera glycines
tacctggctaaaatatcatcataatctctattttttataaaaattacttgaacatatttcacatttattttttcatctttatttttatatttaattttacaatgccccaataggggtttttgaatctaaacaattaacctttctcatttattcgcttttcccgtgctatatctttttcatgcctaccaaatgtccgttgaatgttaatgagaaaaaattgtagtttttagccggttcaaaaaaccccatttcgttcatttgaaaatatgagacattaaatacatagtgtaattgaccgaatattcagaaatacatcattgtgtgattattattcgattccattccaaattattacaacaaatggcgtcctacacttattccgccgccggttcctcggccccggcgggcagcaagaaggacattctgggcaatcttaatcgcgctttctccgcttggcctgacaaattgttgacactttttttttgattacactcaatttatgccacaaaatg

SEQ ID NO: 113201 - DNA, 394 bp, Heterodera glycines
ccttgtggtgacagcaatagttcgcttttctctccataactttgtgagtttggcgcggatcgtgaccttcattagaccattggaaagagcagctcgagctctacaagaaggtatggaaagataaaaatagttatttctgggactttttcagaaatcagaattaattctccaatgtggcccaaattttaggcccccagccacagccctttgcttctcccagttttaagtcttggatttgtcaaataaattcaagacttcaaattaataatcaaaaattctcttaaaatttttttgaacccaattcaaaaaaggaaaaaaatttgcagtcaaaaaattattcgaatttctccaattttgtttccataatttccgaaagttattcggtatcataatg

SEQ ID NO: 113202 - DNA, 291 bp, Heterodera glycines
ggacgttttctgcaacctggattttgctggacctggatttttgtccgggtccaggaaatccaggtccaggtcaaatatgaaaaaaaaccaggtcctgatccaggttaacacaaaaacctggatttccttgacaaaatttttgaacaaattttcaaaaaatgattaaatggatttaaacacattattatagtaaattatagatttttatatgttcctcagcactagaaaaagttttttttcaaaatgtagagctttaaaaattttaatttctctaaaatttcaaggcgtatg

SEQ ID NO: 113203 - DNA, 95 bp, Heterodera glycines
taaatatatattaataaataaaatgcaatttagaaatgatcgcaagtttctcagagcagacgatggattgggcattggccaaagggtgcgaaatg

SEQ ID NO: 113204 - DNA, 141 bp, Heterodera glycines
tctgaatattttaataaaatggaaaataatttttaaattaaaactcttaaaaagaattgaaaattatttaaaacgtaaagaaagtaagctaattttttcaaaaactcttacattcttttttttgaaggtgatgaggtgatg

SEQ ID NO: 113205 - DNA, 733 bp, Heterodera glycines
taccaacatttgcctctctagtctggctctaccaaccactcacacgatattgaaatgctaacgaaaaaaattcttgccgaaaaaatggctctcttttttctcctggggatttgaccgcaaacttggtaccaacatttgccttctctagtctggctctaccaaacactcacacgatatttgaaatgctaacgaaaaaaattcttgccgaaaaaatggctatctcttttttctcttggggatttgaccgcaaacttggtaccaacatttgccttctctagtctggctctactaaacactcacacgatatttgaaatgctaacgaaaaaaattcttgccgaaaaaatggctatctcttttttctcttggggatttgaccgcaaacttggtaccaacatttgccttctctagtctggctctaccaaacactcacacgatatttgaaatgctaacgaaaaaaattcttgccgaaaaaatggctctcttttttctcctggggatttgaccgcaaacttggtaccaacattttccttctctagtctggctctaccaaacactcacacgatatttgaaatgctaacgaaaaaaattcttgcccaaaaaatggctatctcttttttctcttggggatttgaccgcaaacttggtaccaacatttgccttctctagtctggctctaccaaacactcacacgatatttgaaatgcaaacgaaaaaaattcttgccgaaaaaatg

SEQ ID NO: 113206 - DNA, 191 bp, Heterodera glycines
aaagaaaaccaaagaagaagtaaagaaggatatggaagatgaggaaatgacagcaattgcgtcgatccaccgtaaataataaagtatttaaaagcatgtgattatttgatttagcccttaaacattcatcatgattggaaaccaattttacacagataaagaattaaagctaaaaatgccccttcggtatg

SEQ ID NO: 113207 - DNA, 285 bp, Heterodera glycines
attcgctaaatgtaagctaaacttctcaaaaaagactcttttagaaatcaatttaggagaaaaaggaaaaaaaataaatccaaatttataatattcctaaataaaaccaactaaaaagcgaaactttttcatttttgggtttttcacataaatttaacaattactagaattagtttttttaaaattaatattcttgagaaaagatgctctccttttgatttttataaaattatttttaattcaattttccatctctctcaggtcaaatacccattgtccaaaatg

SEQ ID NO: 113208 - DNA, 999 bp, Heterodera glycines
ttttaatgtaaatcagggatggtatccgtccttgaatggcaaggacgtccttgaaaatgggccctctttcttgaaaataaaaaatgtccttgtatgcaaggacgtccttgaaaatgagcatttggaaaagtttaaaaaagatcaaagaaatttgaaaaatctttgtaattttcaacaatatttatttaaattatggcattatgtcatttaaaaatgtaatttttgagaatttttgaaattttatggcattaagtcactagtcactatttttcttaaaaaattagccaaaaatcgcaaattttggtcatttttggacaaaaatctgtaaacaactcgcattaaaaattacaaatttttccggacccccctatcctcaaaaaaatttttaaaaagcgctccgtaaaaaacccattttataaacaaaaaaagtcgtcgcatggcttaaaatcgcaaaaattaggcagtttttggtgaaaatctgttaacaaattgcattcaaattttcaaaatttttccccggcggatactattataccaaacgaacccccccccccctctataccattcaaatttttaataaaaaatttttattataaaatacttttataactggttactacgtgtcaaaaacttacttacaattaataatatttagctttataataaatacatttaattatacattcctttctttacatatgtacgatttttctttgaattcatttaattttagtcttgtaaaaaacgtaaaaagattaccgttttgcccatccgcgaccgaccatttgctgatatgaattttttatgtacaattgcagcaaattttacttctcatttcttgtcacatataacttttttgatttagattatgtttgaatttatatgatattaatgccctaagcttttgctttcttccagtcttttattaaataaaaattataagtttaaattattttcagtaaattatattatttttttattaattagatttacagaatg

SEQ ID NO: 113209 - DNA, 558 bp, Heterodera glycines
gctgaaaaaaataaataaattttcaacaaaaaaaactcaaaattttaccgaaaaatttttcgtccggaaacggtccaacggaattacaagcccatgctgttcagcgcatgctgtgcgcctcaacggacggggcggaacgcgacgtgaaaagcgaccggcggcccaattctccttctctttcactaattaggggcaaattcaatcaatcaattaattaattaactaattaaattattaaaggctcattaaaaatatttatgaaatttacagaaaagacaaaaaagtttaaattattggtataattttgtatagaaattttaaaaaaaaaatactgatcagtaaaaagaacccttatcatttaaaagtatgtgtcttaaacgaggctaataaattatgtataccccatctaaatacggactgattaattggccatatcaaaaattggttcataaaaaccgaaattaattaattaaaatttgtgactccacaaaaaaatgatcaaaagaaaaatatgaaccgtatagcaaaaaataatactaattagaaaatgtgataatg

SEQ ID NO: 113210 - DNA, 111 bp, Heterodera glycines
gataacggcccgtaagcaaagccaataataacgatgaattaattttcatttggtttttcagattacgccttttgctggattgacatgctgcacagaaacccctcaacaatg

SEQ ID NO: 113211 - DNA, 89 bp, Heterodera glycines
ttactcatgatccgcaataataactggacaaaatttttcaattaagccaaattaataaacatttcttcggtatttttttagtaagaatg

SEQ ID NO: 113212 - DNA, 168 bp, Heterodera glycines
cgaattgctcgctcatatttcaacaatatttttgtttcctttcgcagggacattgtgcaccaatcgttcagcgactttggcttcctggtgcctggccgtgtcgcccgttacatcggcgttcagggcgacttggacccgttgttgaccggcaccgccgtgctcgagatg

SEQ ID NO: 113213 - DNA, 150 bp, Heterodera glycines
tctgaatttttatacatcaattgttgaatatttattgcacataaatatgaaaaatatatacataaattttttcaaattagggtaaaatttctcaaatttcttcaaattcgttaaatttaggctaaaaatcttgaaaataagctaaatatg

SEQ ID NO: 113214 - DNA, 206 bp, Heterodera glycines
atcattattcattaattggcccctcgattcgagaccaagactgaacccgagattagataattgacccctaagagtcgagacaaaaagcccaaaaatccgagaaatttctcgccccgagaaacgttcaaccaagttgttgtcatcttttcggctaagtgccaacttgccctttcaagatttgatcagctcggcctttctgataaatg

SEQ ID NO: 113215 - DNA, 278 bp, Heterodera glycines
tgtatgtatctggacagaaattaagacgcattaattaggcaaaagccacaaaaggcgttaattgaatatacaatttttgaaatattgtagaaatgatttccagtggcattatgtatgtatacctaattaatgaattgagattaagtttaagggaaggaaaaccgtctatataattctctcctaactaattaatcttcaattttcctgctgtgtttattgttatgtttcaatattcgccttgcttaatttagtaattaattaattcattcgtgtaaatg

SEQ ID NO: 113216 - DNA, 129 bp, Heterodera glycines
aataaatgaatgaatgagccgagggcgagaagcagacgcaattaaagaataattatcaaaataaatgatattcaaaatgaacaacttccatcgtcagcagatggtcgccgtttaattgacggcaaaatg

SEQ ID NO: 113217 - DNA, 392 bp, Heterodera glycines
aatttaaattttttgaaatttttattaattagtgcgtcagcagcagcaaaatggtccgcaagtggtcgagcaacaattgccatttgtgttctcatcttctgtcgacttcacaccagcgcaaagggcaaaggtggattggtctttctcatttctctctctcactctctgtctctctcacatttcataaagtctgagtgttgatgggcaggccttccctcgtgttggcccccccttcaatgcttatttcggagctgtgaaaagcggtaggcaggccttcccttgtgttggtccccctatagttttttgcttctcatttctctctctctcacacatttcctcatttctttgtgttgataagcctaaccaaaaatatttaaaaattcaggcaaatg

SEQ ID NO: 113218 - DNA, 777 bp, Heterodera glycines
ttccgtgttttttccctattttcaacatttttttgtgtccattattcaatccgtttttgctgtttgttgttcggttggccaaacggatgattcactttttgacgttttgttgttttggttcatcgacggcggcggattctccgtttttttttgtttcggcccgccccttcggcagcgtttttccgttttccgctaccatcagccgtcaatataaaaacgcgttcattcgctcattttttatggctcaaaaaatgttttatttaaaagttattttttgaatggtttaggtttcgaataaaaagttttttagtttttttaatcgaaatataccaaaaattatgggttagattgtcttagacaaaaaatgtgggtttttttggggattatttcaatgggggtggcttatcacttatccaaactgaaaaaacttttttttaactaaattttgatatttccgaaaatacagccccccaccccaaattagagcccctctgaaaaaagaaagccctcttcttagtgcgttgaaaaataaagcccctgggctctattttcgggaatacagtaattttcatcacaaattgggttaggaaaaacgatgctcaaaaactaaatgtttttctcgtcttaattgggaggaaatatttgcaaattgtttttgcttttcctaattaatttaatttttgtttttcaaaataaaaatttttttttcatttttaaagaaaatccaattccaaaacactacgccaacaattcgaaccctccgcttgcaacaaaatg

SEQ ID NO: 113219 - DNA, 318 bp, Heterodera glycines
tctaacaagggttgccattcgtccttggatgggcctcgctgattggaaaattgaaagggtccttttttgcaaggtgtccttgcaaattagcatccgaaaaaaactcaaaattttaagatttcaaatttttaccaatgtttttataacttattgcattatttggtgcaaaatatgttaataaatcgcacaaaaaaatcaaaaaaatttttcctggcggcgtctatcggcccattttttggatttttttgaccactttttgtacatgtttttgcaagccctaactacataggtatgttatgcaattaaatcctgttaatg

SEQ ID NO: 113220 - DNA, 380 bp, Heterodera glycines
cttcccttttcacacgcacatttgcaagacacctttggaaacaatttttaatcatacatatatttctagagcaacaagtcactcataaagtggaaaaattaatactataataaaaagaaccaaattaaaactttatatatataattacataatttcgttatttagtcagaatctatgctttttctttttttattcatctcccgtttttccgggactcccggtcccggcctttgttcaaaatactagaactgggagtcctggccaatcctttcgggctcccggtcccatccgagctctagtatttatgacccataacaattaaatttgcattatctattgttatatatacggttaaggattaaaaaatataattcggaatg

SEQ ID NO: 113221 - DNA, 926 bp, Heterodera glycines
tttcttgtattttcatcccaggtagacaagttgagtcggacttttgctgactgagatgatcaatataaaatacaaacttttctcctcgtcgaggttacttctttcttcacctcagctttcgcatctttaaaaattttgcctttgttatcaaaatcatctcagtttactttgcttgctaactttattcctctcattattcttttatccccgagagttacacaaatctcaactttaaaaacgttaagcaatttaactcataaaaaaagttgtgagagtttcaaattttcattacgttataactcaaggtctaggcagctctttttaaccaaaatgctaaaatttatttatttttattttttctaaatgtccaaagtgatttgtatctttataagcaaaattattagaatttgcgaattgatgttttttcatgtgttagagacttgaaaaaagaacgccaagatgagaggaaaagaaatattattttttgtttgtcctataacttgaactaacagataaattcaaaaattcaacatagaaatctatgcagaatttttttctctattgatatgcaaagtttaaagcggatttaacatgtagataaaaaggtaaacgtcacgaagtaaatgttgttttttatataggtaattaaaatgaatagatagtacgccaaagtgagaaaaattacaaagaaaaagagaaacgatgaaatactatgcttttctctgcacagtgaagttgacccatagccaaagtgagtctccagagaaattttagtatataaattcatgcgttctcgtatgtccgtcattcactcatttttttgaactccaatttaatcatctctgtttcttacactaactttgtcctctctttaaatgcatatttttattttcagacacacatattatttgaaataaaccaaaatg

SEQ ID NO: 113222 - DNA, 960 bp, Heterodera glycines
tcatcatcataagatggtggagtcacgtgttggggattttctttatttttcagttttctgatcaacaaactttgctcccttgatttcatccactgatgggtttgatgttgtttcccttaactttgtccgctcttttctggtctcattttaaggcttacactagtgctgaggaaagctcatcagtgtgaattcacttgtccctaaatatgtgatacatggaaattttctatgttttcattttttgaatagattttacgaccattttgttagccctctttgctaaccattcattttttcaatgaattaagaacaggatctgaaatttcttagccccttcccttatttaaaacgatcttctccttttttacttgaagataattgaagttccattttttgctccccccccccccacttttttggtttagcgaaaaagagaatcatacgagggagagctcgttttcagtgacagaaattctcgtcccatttcaatgacaaacacagagagaaagaactcaataatgcatcagcgtacataaagtgtaaccaaccaaaaaaaattaaaaaaaaaaaccaaaaaaaaaatgctagcaatttttccgcactttgatttttgttatcatcacttatcagccagccccaacagttttcggttttgtgtcttcctatcaacaaaaagggggagcatttgttgacccaccccacctaactttgtgatcgcaaatcgtccaataatttatcactccccctcccgcactcattaaaagcaattatatttgttgcactccaataataatatttgttgcattttcatatcgccatcctcccccaaattttgctaatttgtttttgatttattttttccagcaaaaaccacctgaaaacaaccaattcattctgacgaccaattttttgccatccaacgaaaacagtaacaccacaagcatcaattacggtgcaatg

SEQ ID NO: 113223 - DNA, 276 bp, Heterodera glycines
ccccaaaaaccctctacaaaaattttctataaacgatttaaaaaataaaattttttttatggtttctgtaaagtacataagtaccttgtatttaaatacatacctatgtaagtgtgtctgactagcattttacctatttttatataccacctattacctaacacacagacaaaatagttggaaattatgtttaaataggattgattttcgtcactttttcactttcatttgtattaaattaaagagcattgggctgacaatcaaagcgcaacaatg

SEQ ID NO: 113224 - DNA, 148 bp, Heterodera glycines
actctttgaatgattttgcgtcgacttacctctccccaccactaaaaacatacttaatatggaagttttcttagaaatgtcacaattttcatggtggggacttcggaaccacgtgactattttaggagaaactacttttccatagatg

SEQ ID NO: 113225 - DNA, 1003 bp, Heterodera glycines
ctcccctgagggcacacacaaaacaaaaattgcttttgggctcatttttcagtttatttatgccacgggaaaatgccaatgcagatatttttcataaaatttcaataaattaaatacatttttttagtgtaaaatttttttatttttttattcctaattatttatttttcgtatttaaagtaatgctttaaaactcaattaataaatttgttatagtttttagtataatttttattatttttgatttaagtattaaaataaaaacaattaaatttattgcgaaaaaactgtttcaaaaataatttataattttttcattttgaaatttcatttaaaataatttttgttttttttgtaacaattttacgtaaataaattttatttattttaactttcttttggcattttaacagctattttggcaaattatttactgttccacaccaaatctgactgttttggcgttctatttttagcgctgttttgaatttcctttgaatacccttggggaaattgggagacttcctcctctgttgaccttcgcttttactccacaaattgccggacatttcatttttggcatccgccccaaaaagttgccaaaaatattcataaaattatgccgcgattttttttttgcaaagattggcactgcacaatgccaaaaaggcgcaaaataagctttttcggtcacttcgtgccaaaaatggtgtgccaaagttgcataaatgccgcccccactttttcatgaccgcacagattggcattgcgttttatatgaaagcgttcaaaaaatacattttcaatattttcttttgcattaatccaaagattttttctcccagcacagtccgttcaaataacaaatgaatttactgtattacataataccgtaaacaaaaataggggttacgatacgattgtactttttgcttttgcgcgcttttctcaactgtaaattgtgtaaaacaacaaattctctggtgaacaaccagtacaaatg

SEQ ID NO: 113226 - DNA, 1003 bp, Heterodera glycines
ttttaatttttattttatgctaaaatcaaaattgcttttttatatttacaaatttttttcaaaaattctcagaaaaaaaaatttaaaatctttagttttaggggagcaaaaaagtcaattcttaggggtgtgttttacgaaaggacaacggtggaaaacatattataattttagtcattgaacaaaatgcatataaagattatcataacaagtgtttaagagaattattactaaattctaagaaataaaaaaaactattaatttacttattgttaaaacaatatattgatttttaatttctttataaattcattacatattctgttaattcactgaattaaatcaacgagataaattagtatcaaaaattatggctattaacaatgcattcagatggccgctcacgagaaattaagtcaaatgcaaaaccttaaaaaataaaaacaaacctattcatatatttaataaagtacatttaaattttaaaatttttaattttcattactatcaaatttaagaattctttatgaataaaaaataagtgttcagattttggaaaatataataaaagaaattatttttggatgtatcttagattaatcattatttaaattatttaacaaaaaaaaaattttttcgtaatttactttaagacagaataaataaaaatatataacataagaaaaagatcaaacagattaatggaattcaaacaatattttaaaaatgagtcaaacaatttataagataatctttcggtataaaaaaaaatcaaaaatattcaaaaaaatacatgagaaccgaaatatttaaaaaataataatatttaagtcaagaagatattatagatatttaactcaagtcgaaacaacaattaataaaactaatgattataatagagaaattgacttatgaatcagcaaacgcataaacaaacaatgaaattatcaatatttaatatctttatgggcagttgccaataaatgtattatttttacagatg

SEQ ID NO: 113227 - DNA, 1003 bp, Heterodera glycines
gaataaatgtgatattattaattctctttgtgaccaaagcatttttcgttatttttccattaaattttaatatttaattgttttttttgtttctttatttcttttacaaaggttgcaatggctgaagcggaagattccgactttgagagctccaaacttggcaccaaagaatagtgagacagacattaagcatttttaagcaacaattttttgacaataattaataaaaagttgcttgggctttaatttggaacctataaactttggaacatatttatgaaaagctctatctgtgcctgaattttcaaattgtttatttttaaaaaatttattttccgttttcatcaattcgatttaatgagttaaaattaaaatgttcattttcaaaaaaaattttcgaaattttagcttttttgactggaattcctgatttttttccatcaaaatccataaatttatttcaaaaaatgggttccgagagggaaaatgaccattttttggtaaagtacgtaatcagttaagaattccagcctaattctctagaacaaatattatgaagtttaaaaattttcccggatttattgacaatttgccaaaatgacaaaatgaattcatttagttgggacagtttgtacgacttggaattgacaaattttgctgaaaatggcgacgaaggcgaagtttaaaaaaatcattaatttttgtaattagtttttatattttcagatttggttcggccgttccgcggagttgcgcattttgaaattcatcgaacagcaaaatttgcccatttctgccaaaatttgtgacttaggcacgggcaacgggtcactgctacgaaaattggcatggaaattttttaatcgacattatgaagaaaatcccgtcctgaacctgtgtctgggttggatccgggaggcctccgttgtcccgtccctcatgacggagttttttaaatgaaatttttaattttcaaaattccagagatatttcctttatcatg

SEQ ID NO: 113228 - DNA, 230 bp, Heterodera glycines
gcttccaactcttagtgaaattaagtcgtcgtgccaaaggtcagcagaaaagtgcccaagggaacctcagaataccaagcgagttggctaattgattctgatggaacggacgaaaatgacgaggacgaaagcgaagaagccgaggtaaaagcagcgaatgaaatgggcgagggagaagggtcattcattcgctgtaaaattaggaggaggagagagaggacgaacaaatg

SEQ ID NO: 113229 - DNA, 137 bp, Heterodera glycines
aaattgaccatttcaatggttttttcctctttaattttttataagaaattctgagctgatttcaataattttaatcagttttgctaagccaattcaattccagcgaaaattgtcttaataaattgccttatcaaatg

SEQ ID NO: 113230 - DNA, 1003 bp, Heterodera glycines
attgtcaaagtgagcaaagcggacactttcagccgaaatttggccaaaaaagtgtcaaacattcacttggtaagacaatgaacatgaatagaaacatttaaatgttttttttttcagttcgaatgggtggaacagactgatttacttggtaagtcttaagtgattttcaatgattttgttgttaaaaatggatttcaaacacgaaacgggatacggtactgaccaaaaacggatgaaattccttacagtataaaacagagaatttgacgggatacggtactgaccaaaaacggatgaaattccttacagtataaaacagagaatttgacgggatacggtactgaccaaaaacggatgaaattccttacagtataaaacagagaattagacgggatacggtattgacgaaaaactgatgaaattccttaaagtacaaaacagagaatttgacgggatacggtactgaccaaaaacggatgaaattccttacagtataaaacagagaatttgacgggatacggtactgaccaaaaaacggatgaaattccttacagtataaaacagagaattagacgggatacggtactgaccaaaaaacgaatgaaattccttacagtatcggccaaaaaaaaactcggaacagaaattgccaaaaatgggatatttatgttttgggtcaaatttaaaaaaaaataaatttatgctggcaggtgccgccaaaaatcggaacttttgggcaaatttcaaaataaaaaataaaaagaaagaaattagtttttttttgaaattgaaaatacaagaaattacgaaagttttcaatttttggacgggcccattccttttttgtgcttattgttcgtctcgcctcccccgaaaagcccatccttcgctgcgtctgttcatctcccactccggctacaactccatgattgagtcggccatccgtggcgtccctttcctggccattccgctgttctttgaccaactccgagtggccaaaatg

SEQ ID NO: 113231 - DNA, 63 bp, Heterodera glycines
ttaaaaacagatacatatttattaatcctatttggtttcatatgtttcctaatcttcaaaatg

SEQ ID NO: 113232 - DNA, 81 bp, Heterodera glycines
ggggctgtcaattactagagcggaatttgggggagggggcagcaactcaacgccgttttcaactgcgtagaagaaaggatg

SEQ ID NO: 113233 - DNA, 749 bp, Heterodera glycines
ggtatatttttggcaatggccattaatttggttcaaaattagcaaaaattttttgaaatttggtaggctaatacagaactctttgggctctcgaattatatcaataattaaaaattggttgcttttttagcaatgctattgataaacaaaattaactaatgcttataaaaaaatacaaatttcaataaaactgtttgaataataataataaattttaaataatgcatgctgatttatattgacggatttataaaacgcagccgctggctgacccacaaaatgtccagcccacgaaatgtccaagtctcgaatttgagttttttattattcagatgggcctaaggttaggcaaggggtaatataaagggtatattcgtattcagcgaccccgaaaaccctaaaaatcctaaattagactcattttgtttttataaattttgaaaaattttggacatttcgtgggtttttactcttttggacatttcgtggcttggacactttgtgggggtgccaacgcagcaaacccattttggcggatttataaaatgcgtcagcatgcattttagccattaagtgtttattttttgaataggaaacaagaaaaaacaataatgtatttaaaaagcaaatagtctcaagtttttttttaaagaaataatatttgtaaatttttaagtaaaaaaaagcatttaaaatattttaaactattaataattaatttgtttttcaaattatttttagtaattatg

SEQ ID NO: 113234 - DNA, 74 bp, Heterodera glycines
agaagatccgtgaatacgtgtggcactgatcactccgtcgcatcgcaacaaaaaaaatcggcaacacaaaaatg

SEQ ID NO: 113235 - DNA, 542 bp, Heterodera glycines
tttagaccaacgcgattaacattgccaaaattaagcgccattttctggctggatcgcttaaattgcttgacagcaaaatgaattatgatgcatttgtccgtccttttactgggggaaaatttgagaaagtaaaatttaaagagaatcgcaaatattagttttgtgttcactttagggcgttcgttccattgcttggtttgttgagaaagcgtagcagcgggcgaacactttttccagttaaagcaaaaaacggattttacgagtctggatggaattcacttcacttaaggaaaggcgttctcatttttatctccgatttcaagaaaaattttcctattatttcacatataagtccgaacatttatttgtatgactcatcgaccccacaataaacgataaattatcaacaacgaaaattgcttccatttcttatttattgatttgttcgtccaagtcgatgttttctttccaatttatgtattaaattgtttctattttttagaatccaaaaataataaaactcgcgaatcatcaacaaaatg

SEQ ID NO: 113236 - DNA, 262 bp, Heterodera glycines
cctacaagcataaatgcaattaggcttaattggtttaaaaattgccttctttttgagccaaaaactttgtttgttttttattcggagtctttaatttaagcatcggactcgattaataatttcatccaaaaagctgctttgcctagccaaatctcggctcagtcttttcactttttaaattttccaattgcatttgagtgcctggcgtgagtgatcagcccatttttagcaactcaaacccgaaaaagaatcacaaaatatg

SEQ ID NO: 113237 - DNA, 1003 bp, Heterodera glycines
ttaatttattgttgaaatttattttaattataggaaactagtttttcaatatgaaaaattttatttttcaaagaattactttttcatttgtcagcacagaattggtgaagcggaaatgccgtcgacaacgttttcattatgccaattatttataataattgcacaaaaaaataaataatttttaaatattctatttagggcttatattttagtctctaaaaattgccaaaatagatactaaaaaatagaaaataggctctaaaaagcctcaaatttaggagtgtaaaataacaaaattttagtcaaaaagcaaaaaaattaagccaaatgaattacaattgttgaagccaaaattcttgtcaaaaaacaaattaataattttaagatgaatttttgagaatattttcatttcttagggatgtattttcgtttttgttaaatttttaaataaattttgaacataaggccaaaaggcaaaaacagttttttaaaggtttttagactttaagctctaaaaataaaaaccttgaataggcttacaaggcaacatttcgaactgtaaccacccagatcagtttaaaaccacttctatcgtatagagaatgatcgatttactattgccaatttttggcttttttggctccggcgccaaaaatgatcagaaaaaagtgatcaaagtttcgaaaaatcgataaaatagtaaaaatttttaaaaattcataaaaaatttaaaaataaagttagagtaactaaacttattttaaagtgatcagcaaacatttctctatcaaatggcatcataaaacaaatttaaataattgaataaaaatgtgttaggtgaacgaatagtttgaaaaaaattcaaaataattcatcatctgtccagcgggtttgaacccatgacaaatggtaaagagtagggttgagcggtaccggtaccggtactggccggtaattaccggtttttttggtaccggtaccggtaccggttttttcaaaaatg

SEQ ID NO: 113238 - DNA, 66 bp, Heterodera glycines; identical to SEQ ID NO: 107353

SEQ ID NO: 113239 - DNA, 549 bp, Heterodera glycines
tattagtccaatcgacttttatgagtccaaccaattgaaaatactttgtttttatataataattttttcatgttcgaacaaaccctttatttttggtatcattcgaaagtccatagtctgaataatgtaattatacgagaaaacaagagaattataacatttaaagaaagttacaaatggaaataatcagcatcactcaattcatatcttttttggtaattgcatgaacgctgcgattttatatcttttagcttcgttacacttggtgctttcgaatgataccaaaaagataggtttagctcgaacatgagcaaagttattgtataaaaacgaagtattttcaattgattggactcataaagtgcatttgtgccaaaaaaaaatcgaccattttcgcataaaaaccctgatttttctgaaaatagccatcgattcagtcgaataaaagctcccattttatcaacacaaaatttgccaagtttgtcagcttaacgactaatttgaattagattgacaaaatatttcaccgctttcatttacttcgacatg

SEQ ID NO: 113240 - DNA, 462 bp, Heterodera glycines
aaaatagattaaggtgttattagatgtatgtccaacaattaataattttcgaaaggaagttattttattaataaaaaacaaaatttagctggtggaaataaaatgggaaattattttttattaatagccatttttgggccatttcctcctttctaatctatgagcatttttttgatctgaaacattgcatctataggcattaatcgattagatagcaccactttaatttagcagctcggtcgtctcttctcgtaacccgccggaagcccgcaattcccgggtcatatgatttaaaagctttttggcggccggttaattaacctcgcaatttcgctgaatcatttaatagttgatcataaaaaactgataaattttcatggtataacctagtaagtaaaattgtctaatttatttttagacaaaaattggagttgcaaatgttcagcaacatttcaaattatg

SEQ ID NO: 113241 - DNA, 248 bp, Heterodera glycines
ttagtgcgaccaagccccgaagggccagtcagcgaaccaattttattgccctttgttcgcgccaatccctaaatggccaggggcagggaactccgaacaacagacgcgttgctgatgaacagaggacaatcccaccgtagccaaccttctgtttggaaaaagggaacttcgaacaattagcactgctaattaatcaaaggacaatcctcttttacaaacagttagctgggatacaaggccagaaaatg

SEQ ID NO: 113242 - DNA, 105 bp, Heterodera glycines
aaaaaatcaaggtccagattaggcacaaaaacctggacttcttggatattaatcaaaaatttaaattgataaataacaaaaatttttaatttaaggcccaaaatg

SEQ ID NO: 113243 - DNA, 57 bp, Heterodera glycines
agttaaaaataattttgtttttttctaaaattacaatttttaaagcctcccctaatg

SEQ ID NO: 113244 - DNA, 334 bp, Heterodera glycines
tcgctatttctccctctcacccgatttgaaaaagtgatcaaaaaagcacacggcgccgttccttctgctgctttcaaaaccgatcaaccgaatcaaaacgggggggggggggtggggcattccaaatttcgtatcatcattccgcttttacacactgctgatcaagccagcttcctctccgcccccattaagcttaaactctctctctgtctacaccgccgccatcattcactccataccttcccccccccccattaccccttgtaatggctgatcgaaaatagctgtgggagctcaaattgctgtgcgagcaaaaaagacaggggccaaaatg

SEQ ID NO: 113245 - DNA, 895 bp, Heterodera glycines
gattcggtatttcaaaataactaaccaccagataaattcaatttgattttctaatattgtttataaaacatgaaaatgccgataagcgcagtgatagcagatgcacaaaaaatcgcgaaatatgcacctaaaaaggcataaaaatgcaaaataggcaatcgaaataatgatgtttttatcttttcttagtagatttgaatttgatttacatcattaaaatataaaagagaataaactattatggtgcattgtttattgattaatttattatttatttttagctttttgttaaattgtctttttatgattttcagattaaattttgatttagtttttgccgacgcttatttgggcatttttttaaaaagtagttttcttttccagttttttaattattttaactaattttatattttatttatatgcttattttatttcctgaacttcattatctttttgttagggatgcgatttttagggacaaaaaatcgcgaaataggcactaaaaataacaaaataggcattaaataggcataaaaatcctcaagaaaaaacatttaaatattggggatcaatttttgtgaaaattttttcgattcttaatggtttattttctgaattttttcagatcgattattaggggtgtatttttcttttttattgcatttttgttaaggatttttccgaaaatcctgaaaaagactcaaaaaatgccaaaataggcacaaaactaggcatttcggcattaagcacaaaacgtattaagtgcgcagaaattttaggcatttccctaaaaaatggagtcaatatttttttatcaattttaatatttaaaattattttttaatgttaattatttattttttctaaattttaggcatttccctaaaaaatg

SEQ ID NO: 113246 - DNA, 728 bp, Heterodera glycines
  unsure (1)..(728): unsure at all n locations
tttggatttcatttttttaatctctntgttttatacaataaatttttcaaaataaaattgcatgcaatgtttaaatatatttttatttgaatttagtaaatatatatatatatatttattttatattattaacagggattctttttttatgtaagaaaaatcgcgaaatatgtaaataaaatatgtataaaaaatgctaaaatatgtatgaaatatgtacaaaaaccccaaaatatgtactaaaacatgtaaataaaaattttttaaaggttattttttggaaaaaaaattcttcgtaaaaagtgaaacagaggcataaaatgccataaacatgaccaaaataggcttagaatcaccttttaatatatcaacaattaatttttgatatatcattttttgaaaaaaaaattcgattttttagggatacattttcacaaaaaatttctgtaaattctcaaaaatcctcaaattatgtaaaaaaaaatgaaaatatgtacgaaaaagtccaaaatatgtataaaaatatgtacatatgtaataagtagaaaaatcccaaatatgtaaataaaagtcccaacttttgttcgcaaacacaaaaaaaaaagttttttttctactaattaggctatggagaatccaggaaaaaatatgtattcacataaaaaaagaatccctgattattaaacattctctgtaattctttttgttttattttgctaaataaaatg

SEQ ID NO: 113247 - DNA, 606 bp, Heterodera glycines
gcacctcacgaaggatcctacagagaagcgacgcttcctaaacattgtcccttccgccggttgacctcgagccgagcaaattccattggggaatggcgaagggccgcgcctggtcaaagtgcagccgaatgtccctctccaagttcgtccgcaattccatcagctgattttcgtcagtttcgccatagttcacagtttcgggctttgggtaaggagaattttgaactgtaaaaacagattttgatggaaaaacctgaagggatgggaagagagcggaggaagggaaaagaggcgcccaattggcccttttggccaagtcaaagtccaattgggacggatgagacgcattttggaggttcacataaacattattgtcagacaaaacagtgccaacagagagaaatggacacgtcgaatcggagagatcaaaatgatggcctggggataattagcggaaatgtgattagccttttatagcaggacaaaatgacgaccatttgagggaatgattagccatcggtcgccgtcggggaatttgacgtaaaccgcggcggagttgggcccatcgggcagagaggagccgagaaggagcaaagcagacaaatg

SEQ ID NO: 113248 - DNA, 285 bp, Heterodera glycines
tggaataaattttggaactgcgctgcctaacggcggtgcttaaagtgcgctaaaaatgatcaaatgattatcaatttttatttttcttaattccaaagtgaattcgaaacgcaaaaatttaatcataattcatgtggtaaaaaatgcatttaaaaataaaaaaattcttgaatttgcttctgaattttttaattttaaatagaaaattcctttttctgaaattcacaataacaatttggcgaagaaattcattgaaatttttataaagcattttgattaaaaatg

SEQ ID NO: 113249 - DNA, 89 bp, Heterodera glycines
tagtgcgaaaaactaccctttaatattgattaatatttttatatgactttttacataaatttatttcattttaatatatttttttaatg

SEQ ID NO: 113250 - DNA, 1003 bp, Heterodera glycines
aaatttctaaagaaagatagtaatttagaaaaaaaatttttagcaatttaaatgcaagatttcgttaaatggggctgactttttgatcggaaagaaatatgtaaatttatactttatttgaattttagaatttttcatttaaattaataagtaaaaaaaagaataatatccaatttttcatgccatgggctttctatttaatactcaaaaagtaaaaagattgaaaaataaattttggccaaaaatacgccgttattttgcttgtgtaagcgaccgcatttagtttccctaaaaagtgtgtgtgtgccgtgccatttcccatcgcattcagtggcaaattccacccatttttatgccaattcctcacatttagcagcacaaaagcagtcagtcagtgtggggggggggacacatcaatcacacgcaaaaattagaccaaaaagggtccatttttggggccaaactcgaaaatttgtacatatacaaagtaaaaatgacaattacggtggcaaaatttggtcgataatatttgaaaatgccaaattgaatgcttaaattggtaacacaattaagggcggcatcaacccaaacaaagaacataatgaatgggctttaattgcgtgatgcttattgaatttattatgggaaaataaatgtttgaacaaatgtgttcaaatggagctttttaaattgattttcatataaaattcaacacaaagtgcatgatttgacttaacaatttcaatgaaaagaatatcctaattataaaaaaaaataataatttaattaacaaatgccgaactgttttcattgactaatgttggtatatttaacggggaatgtttgaacaaatgtgttcaaatgagctttttaaattgattcaacatacatagctggcatgatttaaaaacaatttcagtgaaaaaaagattttcttaaaaattaaaatagattttctattaaaaatatttttaaaaaatagtgatttaatttaaaaaaaatg

SEQ ID NO: 113251 - DNA, 107 bp, Heterodera glycines
tggcgcgaattaacatcatcggcagagagcgaactttggggacggtcagcagaaagaggggcagacgaaatggaacggcggacgaacggaactaaggaaagagaatg

SEQ ID NO: 113252 - DNA, 1003 bp, Heterodera glycines
aaaaatagatcatttatcgcttctgcagggacttagttggttctttttttggattaatttccttctttgttggggttcaattcgttctcatagcgttatgtatttgaatatatttttaaaaattttgcttaaaactatcatcattataagtaaataaagctcaaaatttttttaaataaataattttcctcttttaatacataaaagttacaaaaaattgttatttttttacaatttaactaatattcctaaaaattgaactttttgtataaattctgtaaacaacttggctcaaaatcacaatcgttttttgaacaataatttttagaaaacaattcgattaaaattaaatttttatcttaggccatctcagaatatatacaaaaatggaatttgcgaaaacaagttagaaaaattttaaggcctaacttcggttaagcctgccaaaaattgtgaaaagggtcttcagaacaaggcctcacattcagttaacacgctttaaacaagcatttcttaatttatatgaaatttttgctgtatttataatatgggatagaagcaatgcaagtgtaacgaacaaatcatgaacactctcttctttactctcgtttctatggccctttttgtctctctgcttcgtttttgtttctttcttcctttattaacggactctcacttattctctgttctctgccacctgtggtctctcgctctctctctttctctctctctttctgtctctctctcgccctctctctctctgcattcaaaataaaacactatttccttctgtagaaaaccaaagcatgagcccattttttgcacgacggccattgcaaaccacgccaattcgtcttaaaatttccgtcttttgatcccttaaaaattaaattttcattttcctttccccattttgtaatgattaccaaattttgacggttttccattaattaattaataaataaaaatgttaatgctcagcagcaaatttgttcgaagaatg

SEQ ID NO: 113253 - DNA, 253 bp, Heterodera glycines
tacgtttgcttaaaaaatattaaatttacttcattcataattttctctatcaaatttaaataaaatttctttttttttcaaaaaaataatttactctgctttcatatccagccaattctattgatttatttgcatatcaattgaaaatattatataattattagctataaattatttttaaaaaatttgccgtcgtcactttttagttttttatttaacatttattacataaaatataataaatatcgaaatg

SEQ ID NO: 113254 - DNA, 206 bp, Heterodera glycines
tatttcgctcatggttaatcaaaaatgctatataatattaacaaaatgagaaatattagcagttaaaactttctttcaaaagtttttactttttcatccctacaataagttttgaatcttttacgatttctttttgttatcgaaaattaatttttaacaaattttctcatcatttttcatagccgctgagaaggaacgataaaatg

SEQ ID NO: 113255 - DNA, 290 bp, Heterodera glycines
atctgcgtgctttctcttcggcagttgtggcggtggcggtggagggggcaagtggtacactggtgtcggggtctgcgtacaagcattggagcgaaaaccatggtcaacgttaaaaacacggcctttgtttcgaatcttacaattttaaaatttgtttcttgaattttaaaagcccaaaaaaatgatgatgatgcaggtcagaaggaaatgggtaaataaatgccaacaccgattaccgagacttttcattttctttcgttttttatcctatttccctctccaatattatg

SEQ ID NO: 113256 - DNA, 773 bp, Heterodera glycines
aaccctatctttttggtatcattcgaaagcacaaagtctatagaacctaaaatacataaaatctcagcgtttaggcaattgccaaaaaagatatggttaattaagtaattgttgattgttttcgtttgtaaatttctttaaagcttagcattctcttgtttttttttgtattattacattcgtcagactttgttgcgttcgaatgttaccaaaaatatagtaatgtacgttgtcgaattgtttcgaattttttagagcatcaggttaggtaaatcggtttttaaaatggttaaaaagtatgtggttaaaaagtatgccactttgtctatcaaatgaaaatttttttttcatttttttgagaataatggaaaaatatgaatgtgattctattttggtttctgcacgtgattcaataaatcgcgtccaaatttcctgtcccaaaaattggaataggatgtcaaaatgttattttgtaaaagcgatcgatggtttcgtgcataaattaaagcctccgatgtcccttctcccctccccaccacttcttttatctctcatttccctttttcaaaattttcagtggtttgctgctcccatcacaatttatgaaaaactttgttttttttggtaattttaggctcccaagaaaaactgaaatttattttaggcaaattcggctgtctgatacaaattatccttgaaaaaaagaaagggggccaattaaaattgttggtgttccagtttatgtttcgtcggcactgcgctttggccaaatg

SEQ ID NO: 113257 - DNA, 294 bp, Heterodera glycines; identical to SEQ ID NO: 99762

SEQ ID NO: 113258 - DNA, 588 bp, Heterodera glycines
agttatgttttttttcaaaagacatgaaatcatatttccgagcgttttcgggatcactggtcacgaatctccgggtcggggcgaatttgatcgaaattaatgtcaaaatcggattaattcctaagaatttttttaggaaaaatttctaggtttgaaaattaaaaaaaaattttcggaggggaaacgacgggggaaatgaagtgcaccccctaagacaaccttagttcaagaaaaaaaaattttttttttttaaaggggaggggggtaccatcgacagtattaccattttttaaataaaaacttttgtatgtaccgtattgtctctaattatcgcccggggggataaatggagacggagggataattagagatattatacggtattgtgtgtttgttcatcacaggtacattgaccattccgtcattgcatttctccatgcaaacaagcaactttgggacaccaaaggcaccaccgtgtatttttgtgtggactcggatggcaccgaaagtgacgcacatcagctgcagcatcagcagaattgggatgtgttggcccgcgaaatttggcccatcttttcggcaaatatg

SEQ ID NO: 113259 - DNA, 79 bp, Heterodera glycines
actcctcaaattcgtctttcgattatcgcctcttttgttgcattttgagcaatattttgttaaaaattgtttatagatg

SEQ ID NO: 113260 - DNA, 1003 bp, Heterodera glycines
ccgcaagtgtcagcgccgcaaaagtcggcgccgcaaatgtcgcatcaccgaaaacatcttggaacttttcatcccaattaaaccctaaccaatcaatccaaaattagggtaattcataaaaaaacaattgggtttcgctccgacccttttagcatccatccatttggcaattcgatcgctttgcaattttcaagccgatcaaaccgattgtcagtggcaccagcagctaattgattaattaataaatttgtcgattttgaccggaaccaaatgattttatgttgttctcgcttcacccttttgcacccacttttgtgccctttcccgcttttgctcatccccacaatcattgtccgactgcttacaaaataatgagttgctgctgatcaatacgacaaatgaaccaggaattgagcgaccttaggacggaacactcacggagagaaaaataatcggcgaattaaacacagagagtggataaatcagtaacaggagcaaaatcattttagaatcatcgattatttaagccgtgtcgagcgacgagaccgagcagtacagatagacatgggtgctgcttctgatttgtttggtacgcaaaatcgttttcacctgcgagaggccatccgttgtttttcagcagccgcaaaaacaaatgggatcgcaactgctggccatatttgaagtccgcaaaaaatgatttttttggcaatttaagtcctaccgatcggagactattccgagtcaccatgacttatcgctttaattcacgacgcaatgacaagcggtcaatttgaagcatttcatgagcaaatgcacgagttattattcgccattttgagccgggctcgcagtgccagtgaaaatgcgacgagggcacaccgcgagacgaagtcgggccaactctttgagcagtttggctagtggtttatgatgatggccgacggggagaaatgccaaaacgaactgcggagaagagcagaaacattgctgtgggaaaaagatg

SEQ ID NO: 113261 - DNA, 159 bp, Heterodera glycines
aatggtttgtcagtcggtcgaccatttgtctttgtttgttttgtccgtccgtttggacattttaggcaatcgacggatcgcgacagacgcaataagccaaagttcacccaaagtgcgctcagagcgaacgccaatcgtccgcttcgggtggcggagatg

SEQ ID NO: 113262 - DNA, 184 bp, Heterodera glycines
gctgaacaatcaaaatgtttggcgaattcatcaaaattttaaattgtcaaattttttccgtttcgtcgccctataaatactctttccaaaatcagttttggcaatccaataaaatttctcttaataaaaaaatactcttcaaataaataatcattcctagctgcttttggtttgatcacaaatg

SEQ ID NO: 113263 - DNA, 59 bp, Heterodera glycines
tcggagtcaagtctcggtctcgagtctcgggaatttttcggtctcgagcatcactaatg

SEQ ID NO: 113264 - DNA, 96 bp, Heterodera glycines
ttgcgctcggatagcccttggtctaaaaaaatattatttctttaaaataaaaaatagtctacatttttcttgacagtttctatgtccttgaatatg

SEQ ID NO: 113265 - DNA, 209 bp, Heterodera glycines
aattttttaggcatcaaaatccaaacccaggtttttttttgctgtgatgctgtttttttctaaagtagagacaaaaaattgtcataattttctttaaattttccgttgaaattttacaatattttagacaaagtttcaaaaaaaattttatgtaacgaatttttttgaagcggaaatttctatttcaatatagcttctactgagaaatg

SEQ ID NO: 113266 - DNA, 829 bp, Heterodera glycines
ttcaaaaaataaaaattaaatttaaaataaaaagacaaaatttgtaaaccgttggaaacgaaaaatgaaaatgtacgataaataaacggacaattaatttaatcgtattgattttctccatcattcctttgtaaataataaaattttatttatcagttttattttaatgaaaataaaaaagttattcacttttataattcattttttgatgcttcatttttaatttttgatttccttaatgttgtctgaattcaatcaacaaaatattttttcgtttgtaactttcccaactaatttaattttgaatttctattttcaattaaattaataatattaaatttattatttgttgttttttcaactcatttttcgtgcacatttgtcgatgaccttttaacattttcggctgatgactggtagaacggcggctaatctttgagactgatcaatcattttgttccgtcagtccgtcgtttgcgcttccccccccccccaataaaaacaaaatattttttattagtccaacatcgatttgcgcgaacacaacacatcgaattccccaacagaatgtccgtcccgtcaaaagtccgtccgccgcgatggcctttcctttttcagctaattcattaatgaaagcctttgttaaaagcaacgcaaaatgatgaccttgtggaaggagtgaatgctttaaagtgcaaaaataaattttaaaaagggacaaaaaaggtaaagcattggcctataaaatgccaatggcccatcaaaatggaaggaacaacaacagttggccaacaaaagtcactcttttcaacgccttttgccacaaatg

SEQ ID NO: 113267 - DNA, 222 bp, Heterodera glycines
agaatatcggttttttcgagttcgagattaggaggtctatattgatattagattcgttatcagcaaccccgaaaacccacgggaacacctttcaccattattctaacgccgtataaatgaggcacaactctgtgtaatatatcgaagtcttacaattagtgttacatagtattaaataccgatttttgttggaagaatggactattgaagatccaaacgatg

SEQ ID NO: 113268 - DNA, 83 bp, Heterodera glycines
cctgttcacccaaggatccggaaaggttcgcgctctattcacttatgcgccactttcccggtgaccctgaccatcttaaaatg

SEQ ID NO: 113269 - DNA, 777 bp, Heterodera glycines
tttttataaagttcaacctaaaccattgttgttttatgtgtaattttttgtaaatttttgtatagtgaatttcatattcttggcatttacatacatgtgcatgtacatggaaattgagaatggaatgaaaaatcaaaaacgctaactcatcgaaagaaacccaaaaataaaaaataaaaatttttggtttgtatgtattttggcattttctctgaagcgagagagagagagagtagagagtgagaaaaataaattcttgcagacagaaaaaggtcgcagagaacaaacaatgccttcgggaagggaaattatggtggatttctgaaagcagaagggggcggagggcgtcaagggattttgggatgaacagcagctgaaggaagggatggcaacagaagagagggagagagagagggagcgaaggcgtcttcttccttcgtcctttctgttgctttgctgcctcggcgtgggcgggggggggggagagcaaagagagcgttgtacagtgaggggaggagagcgattcagccatttttgtcctaatagttgtgtccgctctgctggaccttcattttcgtgagattcgaatggccgtcctctgtccactctttcccaatgcgaattcgttttatccattatttacgaggttcgctactttcccttgcttaaagaaaaaatatgacagtcgactttggttgaatttatttgcttttaggtttcatatttgttatattgacataagtatctaattagcactttgttattttctgcaaaatg

SEQ ID NO: 113270 - DNA, 562 bp, Heterodera glycines
aaaaatttttaaaaaatttttttcttttcctttttgatagaaaaagcatcagagagcttttatttatcttttaattaacatttggtggctttcagagcactttctgaaaaaatctttatgattaattttgcaaaataataaataattaatgaaaaagtcagaatttcgaaaaattttaaaaacaacaagcgttggcattttttcaggttaagttagtcctttacaatggagaaggcctgcaaaatttggagagattatatcgattttagtgcgctaggttcgatgaaactttttaaaatataagcctaaactttttggcaaatttaaaaaggaattaaaaatttttaaaatatttattcatctcccttttgatagaaaaagcatcagagagccttatttaacttttaattaacatttggtgcgtttcagagcactttctgaaaaaatacttatgaattaattttgcaaaaaataaataattaatgaaaaagtcagaatttcgaaaaattttaaaaacaacaagcgttggcattttttcaggttaagttagtcctttacaatg

SEQ ID NO: 113271 - DNA, 727 bp, Heterodera glycines
tatttgcaatttcttaaagccgataattttattgatttattataaaattagagtatttttatttaaaaccggtactttatttaaaaagttcgaacaccagcgggcgccggacttttcgacagaaggaatttttacaacaaaggacattttccagaaatattataaattttatgaggtgacttttcgacaatagatttttcaaaagtaaaagcaatcatgtttcaatttagggggttaatgtaaagttttatacaaaaagaaacaaaattaagccaaattagtattgagatacaaatatttcaaacaaaaatttttaagaaaatatataaataaatttgatcaaaatatgtatttttaaactttataaaaaactagaaaatagttgctataatcgaagagtagcttaacaagcgtactttcgggccacttaaagctcaggaaaaaaggtaaaaccaaaaaaacgtattcctaatatttatttagaaatacaaattaatgctaatttaaaagaaatttaataaaactgacaaaccataatttatttttatgtttactgtcgaaaagtccattattttttgtttattgtcgaaaagtccttcactatcgaaaagcccgttgctgtcgaaaaatcgggagctacaccagcttgttatcttgagaaataagggaaaaaagaatgtgggattggttattttaaaaaataatattaacttttaagccaataatg

SEQ ID NO: 113272 - DNA, 65 bp, Heterodera glycines
tagcacgatacgagtcgtcgccgtggcatttaatgccacgactaagaccgtacaaccaaaaaatg

SEQ ID NO: 113273 - DNA, 1003 bp, Heterodera glycines
taaaaaaatcacaaccaataacgaaaattttctcgttaccataaacgtacatattgtgcatgtcataatgcttgtagagttccgtcagtggcaaatttggtcaaacttgacgacatctcacacatcggtttcgccgaaaattcctccattggctgacgctaaatttttttaattaaatacagaagggaaacaaatgtgagagtgggcttcgtcagtacgaggtctctcttttctagaaaaaaagttctgtttcagccctgactcgtatacagaacaaagtaatcatcctggtgggtctcatgaagcccatgaggcattaacaaacaagaaccacgaagccaggctaaagccaccagcaaaccggatcaggacattttctcctgggcttcgctcaaatttgtttttaattatctaatttaaagccttaaaacatttaagaagtatttaaaaactcgaaaaattattcttgaattagtttttcaaaaaaaaattttgaaatttttcataaaaatttttaacgattttctttttgattaactaaatgtaagctagaaatttttcaaaaaaattagggagtcggggaagtaaagtgcaccccgagcaaaccaacaacggctggtgcttcctgccaaacacagagagaaacggcaacaagttgcgttacctgaaatggtcaattttgaaaaaagtgtatatgtagccaaaagcaaaagtatcatgtccaggtacgggccatgcatggacaaaggagtcatgcatttagcatttacaaagtaaagaaaatcacgccccccacccggttcctcaaaggacaaatttaaaccattgaaaaaaatacaaaattttcctacgaacttacaaaagaaatttttttaattttgtcaaataaattgaatatgcgcaaaattatataaaatttgtttgcaagccttttaaaattggggtaggtaagcaaaaaatgagataaattgtatgttttttttttgctaaattatagtcaatg

SEQ ID NO: 113274 - DNA, 541 bp, Heterodera glycines
catcaaaacgtgtgttttgaagggcattgtttgtcacaaagggtcagcaaattaattaaacaaataaatttatttattttaaaatcattttttattattaataaaatgttaaaattttaaataatttatttttataagtaaatatatttattattattaatacaatgagtaattaattatatttcaagcatttttatttttattaaattataagttcatatatttaaatgcatttatttttattattaaattaaaaacttaattatatttaatacatttatttattagaggaggagtcaattaaataagcataaaatttataagaataatgaatgcatttgttgtttttttaaatattgccacataattactattcttgtaatatttaaattagataaaaacccgaaattatacgatttttaaaaagcaataaaattataatgaaaggcaaaaaatttttaaaaaaggaattttatttgaaaatcattaccaaaatacaaaattttttgctagagtgactttctgttttgtcggcaaaatg

SEQ ID NO: 113275 - DNA, 204 bp, Heterodera glycines
tttttcaatcgcttttttaaacaaaacaagggaccccccttttggtgactaactcacagaccactaagacgaaaaaacccacttaattgtacttggagcccaaaattgaatcgccgtgattaaaaaaaattaaatttctttttttttggtagggtaaaataaaaggttgagctttatgttttcatgaatcaacgaagcgaaatg

SEQ ID NO: 113276 - DNA, 1003 bp, Heterodera glycines
aaaaaaacaattaaatatcacaatatttaaataaataaattatctaaaactcaagaaaattgataaaaacaaataaaataccactattaaatgtatcaaataatttcttcattcagccaaacattaatttgacaaaatatttcaatctaaattacataattaattttttgaatattttcactcatttttctttattctaaaatttttcaaaatttattttttaactttttaatgcaaaagcaaaaacattaattgattagttttatacgaataaatgccaatttataagttaattatttatctttttttcgactttttatgaaattttgttactcgacaaataaatttttttcctaattttttccatccataccctacaatttttgttttttgaatttcctctccgatccctgactttttgatccgctaactttgcgggcaatttcatctccgatccccgacttttctctccccgccgattgtcggagtgtacttctatgtttaaattaatcatttacattccattttatgcatttttatttgaatattaaataaatatatattgtatatttcaagaaattattgtctcttaatccctgcaatttaatccctacttttgctatacaactcaatttttttcccatttacaaattgtcaatcatctgcatcccattttattgaagcagaaagaatgtgtcgaggattatgggggaaacacctcttctgctgttgttggaaaagatttgtgcagtcaattaattatacacaaattacggttgtggtcctaatgaattttgcacatggtattagaacaattttagttgtaaccagtactttctcatagcaaaaaaaaaattgaggataaatagtttgtacaattaaaatattatcaataactaatttgatttttttaaatattctaactttcaatcacttttttaatgaaaatttttgtaaataaaataaatttttaaattagaaaaaattattttaacagaaaatg

SEQ ID NO: 113277 - DNA, 1003 bp, Heterodera glycines
ttttattatatttataaatttgtttttaaaattatattttgcaattaatggttagtatttagagcacaccatttgtccggattacggtagccccccccacacttatgggaggggtgcatggccaactgagcgccagccatttgagcgccaaaatttttcagtactgaagcaaaaccttttgcgcgacttttcttgcaaacccaaacctattgtaagggggtgcgcggcttttttcttactgcgcgacttttttgctgcgcgactttatttacattattttaattaattttaaattcaatttaaacatctaaaggtcaaaatatcttaacgtgttgaatttaaatgcatttaaaatttatcaaaaattccccgcaccgagcggatccgaaccacggagggggtagccagactgacgtactacccattcggccacattggcaatgggtgataaacattaatttgctctcataaagggaaaaattgacgtcaccagcggggggaggggggcgagagcgtgtggcaagaagggcgggggtgttgaaaaggtgccaaataaacaaatcaattaaataatttccaatttacgtttttaaagacaaaatgaagcgagggactatataataaaaataatattattaaaataattataaaaatgtttaaataactaataattatttcaaaaaaaaatattttaagtgaaaattaacaataattttaactttatttatttctcattaatttttagagtttaatttatcgtttgctgtcgggtgttttttactaataaaataatttacttgaatttattgatttgtctgttcatttttatctgctcaaaaataattacagcaaccgttcaggtgttgaactttgtttattttgccgtataattttaatttcgcatccttgcgctgcccctcactctcacctgctcattactttattccaataaattaaatttcaattaatgttatttaacatttggacacaaaaacaaatcatg

SEQ ID NO: 113278 - DNA, 666 bp, Heterodera glycines
cgcagataaagctgaaaaattgaagaaaatatttaaaattttttgttgaatttttacattttttttttgttgggggcgtcgtcgttttttgacatggccaaaaaataacccaaagagtgatggcccaatcgaccaacagcagaaaagtgcagcaacaaaatgagaaaaatttagggagaacgaatgaaatgaggaggaggaaacgaaaaaagggaccacataaaagcaagcaaataaataaattaattgtctcttatgtatgtcatgggaatttttttttggggggggggggaaccactttaactactaccaaattctttagacaatctttcaattatcctaaaccaattggccaacaaaaaaaatcgagaaaaataaatgagtatgtatattatagaaggaatgaattaacaagcatttctgagagaaaataagcacaacaattgagatcgatcatttctcaaatacaataatattcatttccatacacttaatcagacgacatctttgttgcttctatccgcttcttcttttcttccatcactttttcttctgctgctcaccgcactaaaaaaagaaatgcgtatttttgtttaaggtatagtgagtaaacatacgcggctggagcggtccttctggcgttcaacgtaatccgattttgccatg

SEQ ID NO: 113279 - DNA, 231 bp, Heterodera glycines; identical to SEQ ID NO: 104497

SEQ ID NO: 113280 - DNA, 912 bp, Heterodera glycines
tttggtgctcgtcgccatgcgcgacattgacagcgacgaggagttgctgtacgactacggggagcggcggccctccgtgctggcggttaacccgtggattttgggctcataggtggcgaggaatgtgcctctattgtgttttcatttcgtctggcggcgtgacaaggttggtccaaacccccaaagctcaagcccatcagtaggcaggctaatgacagagcccttacattgaaagaaagaaatttctaaaatttttaataaaaaaccctttctctctcattgttatattaattgtcatacatcccaatcaatcattgacaaatttccgtaaaattttcaaaagcttcctttggtcattcctttccgatcactaaccatcaaaggaaagcaatgacgacattgcgcatttgttgaacattcttcgcgcccgcggtgccatcgacggcggactccgttacgcgcccaccaatggcatgatcagtgccatggcagctgatcaaatttcttctcaaatgcgctccattgagccggttggcatttaagcagattggcacacaatgccaagccaattaaacaccttttgtccaataaaggagaaagtgccgacattgagcgggaaaacaaagcaattggctgatcagcaacaatttccattgccagagtttctctcgctgcacgacggacggcacattctcgacaaaacacaacggcaggtaaaactgatcagagtttttggtcccattgtgttttcttttcctaaacccattttcggcggcattttaaagttccgccactttaatctcggtttagtttttgccggacggaggaggagggaaatcgtcgggggcgaataaaagtgccggcgatcggaaggacggctttttgggtgccgtccgacaattgcatcaaatg

SEQ ID NO: 113281 - DNA, 682 bp, Heterodera glycines
aaaaatttgcggatttttttttattattttacttttccccgaatagcttttcagaaggcagctaagaatttttttttgaaaaaatcgaaaatttccagaaattctggaataacttttttcttttatgtgataacaaactcaaataaatcccataaaattctctttatttttctctatttttaaagctttattatagttaaatcgatgaaaccatcaccgagttatgaatttttccaatattaactcaaatttccaagatccaaaacattctcaaaaaatacagtatttttacatgattccaataattatgaaacttaaaatagacatcatctttgtatcgaacacatcaatatccaccagcataatgtttttgaaacgccttcgccgaaacgccatggacccaaattaataaggcaaaggaattcaggggttgctaaaagcaatgagttctgagtaggaaattttctgtgccacatttacactatattttaatcgcctgtgaatttttaacctttgatttatttttattcatttttattacggtattcattttgtattttttatttgatcaaatttatttgtttgttttcatttttgcaccatgtaagagtactaatgtgccgttggtttgctcgataaataaataaaataaaaaaaaattaaaaagaaaattattcgaatg

SEQ ID NO: 113282 - DNA, 125 bp, Heterodera glycines
ttcattcataatttttttttaaattccaatttaatcatctcaatttacttacaccaactttatcctctctttaaatgcatatttttattttcagacatacatattatttgaaataaaccaaaatg

SEQ ID NO: 113283 - DNA, 325 bp, Heterodera glycines
tgtgagcgttccggtttacacacttaaaatgttttttgagcgctttttatagtgtgactcactgagtcccggcgggaattggtacttcattctcagcactttttcagattgaaaaagagcaagctaattatttttccaaccattttaaaccttttacatcgattctgaccgttttaagcatttttgagtttagggactatgctcaatatttgcctaatctttttttccctctaaaggttcgtgttccgtgtttgcaaaacattcaattttgctgagcaataattcgcccgtcattttttattatgaaatttcggtcaaaaatatg

SEQ ID NO: 113284 - DNA, 419 bp, Heterodera glycines
gattaatcaaaaaaagatcaattttacccaaacacttggaatgtatttgatttgcgttgtatgggcgaaaaatgataaagaatgagatttttgggaatttttatgcaaaaacacacttgatttttccaatttttaacacatattttagcacatattttggcatttttggggtttttagcacatatttcagcattttttagcacatattttattacatatttcaggatttttagcacataaaaatcccatccctagtcatttcgctttaattaataaaaatgtacaaaacaattctctaaatgggcttaattttgccgggacttaagtcccgctctgctacaatttaaattaagtattcatagactatatatatttaaaataatgaaactccctttttttggcagtttaattaaagtatg

SEQ ID NO: 113285 - DNA, 388 bp, Heterodera glycines
tttctctttctaatctataaattatctgccgtccttattgcaaattaagcggctttattcggtataaatgcggacggtaatagaatctgggaaataaaaactcggaaaatcgttgatgtagcctaacgctcaaatgatatgtaaatttttaatttaaaacaataaattttaaggaaagaaaatttaaagcaatctggggtaaaaattaattgtgtgagaatttcgcggtacgggagcctaatgcagaaatcccgcaaaaaagtagctaagccaaaaaggatagtggcgagaggcatataaaatgtgccgctaccaatataccacaaaataagtaaaattgtttttatcttagacatgcccaaggggatttactcaagtctacacaatg

SEQ ID NO: 113286 - DNA, 409 bp, Heterodera glycines
  unsure (1)..(409): unsure at all n locations
aataaantttgaaaaataattaattttttaattaatttaatttctggcatttaagtctggtgatgtccaattccaattgccaccaatgttttacataaaaccggataacaaatcactgagcacaatttgctttgtgccgcatggatttgatatccacgccaaaattttgggacaatttcaatgcgatttgaccaaaggaaagttatgcagtgacaattcaatttattgcatcttttgcaaggcaaaaaatatgaaaaataaataaataaaaattgttaaaatttttaaatattttcttcagaatcctttggtgaactttttgaaaaagaatcatttgactgtgccaaaattggaaataaaatttatgggcaatcatttcaatgtgaattttattgtcattccgcaaatg

SEQ ID NO: 113287 - DNA, 1003 bp, Heterodera glycines
ttgaatgttgcatttgaaaaattgaggaaaagggaaaattccaaagaaaacagaatcaacagcaaagtgaaaacaccgaaagggaatggccaattgaggacaattgttttttcgaaggctggggaggaattggccgactcaacaggtccaacgacgaagttgttgaaagccgacacagaacgaaaattgtcagccgttgatggcacaattacgaataaagctgcgtcaagttacgctatcaggcctgttcaaaattgtagttttcgttttttccgcacattttacaggtcaaattatgatattggtctgtgccactgctgattgtccacccttactgccccttttggaagccgaatgccctgccgatggatttgaagcgctgaggacatcgctttgtagagggcgaggatgtcatatcgttgttgatttgaattattttggcgttttgttttagtttttgtgaccctttattttattttgttttgtttggagtatgtgtgatatatgtgctcttcctaaatttgtaattgattgctgtgtgctgttttattaattggaagtaaaagaaagcagtgaaaagagacggcgatttggttttggatttgggatacaattcccctttcccattggactattctttttcctacgacgtggcgctcctgtacaaaggtggctcagcagtggcaataaacgacaaatttggacgagcaacaacgattttaaaaggaaaagtaaatccttctgcaatttgtaacaggaaaagcaaatcctggtctctggaaaagggaaacaaatccctactgaatttcttcattggttgtggaccacaaaatcagtaaaacgggaaaactaaatccctcttcatatcaaaaaaaaaacgcagcttagaaaaggaaaagccgtaaagtgtgaaacaaatcacgaaaatttgtcagttcggtaaattaactccgtctacaaaactgacttcaaaaccgggaaacgaaaatcccatttcaacatg

SEQ ID NO: 113288 - DNA, 408 bp, Heterodera glycines
tctgaatttatttattataatttaagaattaaaaaatatattttttattttacattcaagaacacttgtgaagaggaaattgccttcgaaagaattaaaattaaattgtatatgaaataattgtttgccacgttcaattatttttttattttccttttcacataaatattttccaattatgatatcacctatttttgacaattcttctgtccataaggtaaggaaaggggcggaaatgtttttgtgccgttttggcactttgtccacgttaatttggcattcatgtgactcttatgtttttattgccaaatttaatgatgccatcttacctaaattgggttatttaagtcggcatttttcaaacattccaatcccaatttcccattcatctcactcactcataaaatg

SEQ ID NO: 113289 - DNA, 512 bp, Heterodera glycines
aaaatttgggctttttagagcaaagttataagcaaaaattttaattatgatggttttttaagtaacgcccattatgatggtttttaagtaatgacatagcaccaatctgatgagaattaatgaaaggctattaatttgtttaatagataattttatatcaaaaagcatcatgtgggcttttcattaaatgattgaatgacatttgaccatttcaatgtaattaatgaacaccagctgttcctgttctggtactaccaatgtaattattgtaatagaaaatatgcatgaatttaattacgggcacattatgaatttatgaatttaattaccagtacagcgaggccagtaatttgctagagaattactttaatttgtaaggacaatgattattgggtctgtctttgatttttaagccattcctatcaatattaaaagtaatttttctgaaatttacttttaatttgagtggattaaaataagcaaaataacggacttttttctaacaaaaaatg

SEQ ID NO: 113290 - DNA, 512 bp, Heterodera glycines
tagagttgcatgttttttttgcgcccgtagcggcttttaagttgccgtgggtaatgggcgaggtggtttttggttagagcattttgaggcggttcttttaaaaaatttgagtccctagcccaaagttgagttggtcatttgtctaaaaatttggtcaaaaaagtcggctttcgcagtgagtgggagattttgggggtaattgagtgcgtagagcttgatatttgtttttaaatgggttaaacaatgttttgacaggtctaacaatgtttgggagtagtgggacaaagtgtcgacaagtcggtcaaaatgtcgaaatttttaacgtgatcaaaatgaagtttttttttgtaattttttatgttttgaggcatagaaacagccttctgggcttttttgcgcgagtttagggcaactgaaacggttaaagatggacgaaacgatcacgaagaagccggccaaataaattattaaaaaattctatttatcccccccccccccccggcacataaatg

SEQ ID NO: 113291 - DNA, 449 bp, Heterodera glycines
atatttaaaatattaaatttttttatttgtaagttatgtacggcctctaaacggattaaaattgattaattacatctgtgtccaaatttttggtggccaaatataaagtttaatcctttgactaattaccgcgtatgtgtattctcggccctaactatggacaaaacccttagtctttgtggtcctgtgcccctaatctgatgattgattgacacattcgttttgatcgtcgcattgtatgtcccccacaaccgcgccctatggcaacaaatgttctttgtgacatccatcactgagtgaaagggcggtgccggagtttggaccaaatgatctcattctgccattcttgcaccattttcctccgttcgcttcgtttttttttcgctacataattttaaataaaataatccaaatgagcaacttcaacaacagccacaataatacctatg

SEQ ID NO: 113292 - DNA, 377 bp, Heterodera glycines
cgttttcgcgtgcttccttgtcgcgtggccattttcgcgtggccgtcgcgtggccgttttcgcgtggttgcatataaaagagaattcataactcacatttatttaacgaaaatttgtttcactcttttttctaacgaatatttattttataattaagtgagtttataaacttaattaaggctgtttcaattatataatatggaccagcagcaaaaaattaaaacaaaacgaaacaaagttaagttagaacatgacggcgcactctatgttttcgaccaattgagcgctggttgggtatttccaatttgctactgtcttttaacatcgaagtgtgccgcaatttatacgcgcatgttacagcttcttttggaacgatg

SEQ ID NO: 113293 - DNA, 1003 bp, Heterodera glycines
gcaaaacgatataaccaaaatataaggaaaaattttttaaaaaaatttttctccatcttcctttttgatactaaagcatcagagtgctaaaattaagttgtaaataaaatttggtgcgctttagagcactttctgaaaaaaatatttatgaaacaaaaaaatcgattttttcaagtgtccgtttggggtactcaaacatttatggggagcaaaaatccaacgcagaattaaagtacaggctatagggaagctattcccgaaggattcggtctccccataaatctgggcgcatcggttcggggggactgccccgaaaacaaaaaaatcgattttttcaagtgtccgtttggggtactcaaacaattatggggagcaaaaatccaacgcagaattaaagtacaggctatagggaagctactcccgaaggattcggtctccccataaatctgggcgcatcggttcggggggactgccccgaaaacaaaaaaatcgattttttcaagtgtccgtttggggtactcaaacaattatggggagcataaatccaacgcagaattaaagtaaaggctatagggaagctattcccgaaggattcggtctccccataaatctgggcgcatcggttcagggggactgccccgaaaacccaaaaaaaaattttttggataaaaattatttaaatgaactgactagataatatttaaaataggttatttctcttcctttcagtatccctgcaaagtttggtgcgcttctgatcagtttctgaaaaaaaagttaagcctaaactttttggcctgtttaaaaaggaattaaaaatttttaaaaattttattcatctccctttttgatagaaaaagcatcagagtgcctaaactaacctgtaaataaagttttgtgtgtttcagagcactttctgaaaaaatacttatgaattaattttgcaaaaaataaatacaaacgaaagactcagattttccaaaatttttttgagccagctatg

SEQ ID NO: 113294 - DNA, 139 bp, Heterodera glycines
gatatctcttctccacctccacaatttcttttcttaaaatttttcttcttttttttagttgtttttgttcatagtcttcaaatcaattctaatgatttcctttccccttcaatttttagcggcagcggatttcaaaatg

SEQ ID NO: 113295 - DNA, 110 bp, Heterodera glycines; identical to SEQ ID NO: 98226

SEQ ID NO: 113296 - DNA, 392 bp, Heterodera glycines
ttgctttaagtcaaataacaacaatttaaaatttaaaaatatttacattttctatttttgttttatttttaataatgtccacgtgtacatatttattatgccttaattaaatgtacttttagtcaattaatgaccattgaacccaaatttcagccaaaaacgcaatttttcataaagaagacgaagaaaatgctggcgccgataatgagtaaattgaggagggagggataatgaaaagctaatgaaatataaaatatttaattagtttaaatatttaaagaggaataaacttaatttaaattttgcaattgatcattggtgcttatttttgcctttagccaaggagatgaagctgttcccgtcccaaccgcttccgtcccgcgttaaaaatg

SEQ ID NO: 113297 - DNA, 85 bp, Heterodera glycines
agtgagttttttttttttttaaattgaaccaaccaaatattaagaaatcaaaactcttcgcaaccaagtgggtcgccaaacgatg

SEQ ID NO: 113298 - DNA, 1003 bp, Heterodera glycines
tttacatactagccattttttattttattgtgaccaagcatatctttcctcgtatttctgggatttttttcagaatgtggtcatagaataggtgggttgatttatttgtattttttatgagtattatgtaaggatattttcgacaaaacataaccaattccgagtttcatgaggctgttcgaattgggcataatttttccatcatttccccaattctcggccaatcaattaattgattgcctttctcatgaccctcattcattcgccctatttttccctcgtcattatcattgtgatttcgccaaatgtgggcctcctacgcatcttccccccatttttgcccatcatcatcattgtgttcatgccaaagtgggcctcccactcatttcttcgccccaattctgcacatttctgtaaaatcgtatagttccacgtcgaaatgccctcccgattacgcccgtcaaatcccattcacatgcattggacacagtgcactcaagcccgttcagcaatccaatcaccgcgcactcaatcaattgtgccggtactcatctcatcaacaggtggattacaaaatccgcacaaatttccttgagtatttggtttcaaggccaatacttttagaaataagggaaggggtcgaaaagtggtttcaaagaattgagtttgagacttcaaggtcttagctttattctcaatcgatcgatcattcatttttagccacaggcttcttggtcttgactaaatttgggtaacggaatcaaagtattgggtttcaaggctcaaacttagtttctgacaaggttttgtagtatcagacttcaaggtcggaactataaacctataggggtctaatccgtgcatttgcccctcgtgccaaactcacacaatcaaaagtgagactgtcaatttgctgttgtgaacaattcaatctgtcaattcaatcgcggcacaaccaatcacaagcaactcaagcaatttaacaagcaattgacaaatcatg

SEQ ID NO: 113299 - DNA, 110 bp, Heterodera glycines; identical to SEQ ID NO: 99093

SEQ ID NO: 113300 - DNA, 1003 bp, Heterodera glycines
cccgataaaggtttgaaagttaaggtatagtttctaaattaagtgtttaggaccaatagacccacgagaagcatttgcgggtgggcgaacacaagcattttgtttatattttaaaacagaagaaaatacggagattaatttagcggacataatttcgctttacccatcggtttttaataatttcttattttgacatatagttaaatttaggttaattattttacttcatacccagtaaaaacacccataataatcatatcaaaaacccatgacgttatgtggcaataccccgaagacattccctatgacagtataaaaaagtctttgatacactaataaaatagatttaaggcttactaaaagtacgggcaatcccacccaaaaatttaaaaataccattattaccgttccatgccgattcaattttattttttaccaattgctctaaatgttgtcaacgggcaaaacccgattttgtttttgtgaaaaacgttaaaaaatgtaagcatacagacacggaaagagtactacatggagtttttactagtattgaactaaaattaggtagggcaaaatttttaataattaattttttgttatttatgctatggaattaggatataaaatagataaattctacaggtacaataaatcaaaaaaaatattaattcatttttaagggcctaccattttgaagagtttgattcaaattattgctctatggtattgaaaaaaataataaaactgattagaaatttttttataggacgacaagtcaggcgagaatagtcttatacaattttttacaaaaggtggcagctaacccgcaaaataaactcttatactctgatacaggtcccattaatcaaaaatttttttatattttaataattcagatagtgtaatttacaagcaccaaaagtgtaataatcccattgcttttggagaatatttggggtatgaatttttcaatttttttatataaaaaattttaagcgaaatg

SEQ ID NO: 113301 - DNA, 173 bp, Heterodera glycines
tggaattcatttttgtgttttttttgtaggggtccgttgataattctaaatttttgcgtccgtcctaaaaatgaaatttttcgattattatttttttttgttaggctattgctttctaggaaaattgaaataatcatttgcttatatattttgatcatttggttaaaaaaatg

SEQ ID NO: 113302 - DNA, 264 bp, Heterodera glycines
taatctgttgaaatacaagagtttaacaagaaaaaaagcacttttacctaattgaaattttaattacctaatttttttttaaattggcattttatccaatttcactaatctgaattactcttgcactcgctcttaatttgactttgcttttgcttgctttgcacttagaaacgtggaaaagaattttaatatgcttttgacattattgtttcttcgttgttcatttttgtcttaaaattgccttttagtcgtctttttcaaatg

SEQ ID NO: 113303 - DNA, 283 bp, Heterodera glycines
agtgagttttcatggggccatggctttcgaaaatgcccaagacgtattgcaccgagatttttgttcacaaaccgagactaggcccctaaaataaatcggcatttcgttggcccctatagaatcggcattttgtggcccgtgtataatcggcatttttgccaacagtgttggacccgcgatatttttggcgatgccggcctgatccctcaattggcaccgacagagtttcccgaaatttgatttttttttccagagcgcgtgccatcaacgtccagccgggatg

SEQ ID NO: 113304 - DNA, 905 bp, Heterodera glycines
ttttcgggtgggggggggggaagaatctttggattcaaaaaaggtactttcctgttttggggtcacatgtcaaaaactaaaatttaaaaatgcgcaaattcacagtcgcgtacagtattgtttgggtgcataaatacaataattgttcctaacaataaggctcccgtaaaatgccagtgaaaatttaaatgtcaaaaaacaagttccttttcggacttcagaacgatgttcttatagaattttccctttatacagtacctacaataatatttaatactgcagaactttattttaaaatatttgtatcactgacgcattttccggtcatggttgctaaattctcgtcaaatggatcagcttgagaataggatttgtgagaattctgtcatttttgttgttttttaaaattttggtgtgtgacccaaaaacataaagaacccaaaaaggaaaggttgccatggaaatgccggcgcggggaggggacggtaatcgaaatttacagtaatactaataaaaataaataaagcgcaaaaaattgcaaaattttgaccacttttactcgttgaacacaccacattcatttcacatttaattaggattttttagcaaacgtaaagctcttgagtttagaaagtgatacataattgaaaagctcataacaacacaaaaaggcagtgatcagtacttttgaattaacgcaatatttatatatatatttctttttgaaatgataaaaaatgtaaggttattcgaaaatgaaaatttgattggtccaaaaactcaaattgatacactagtttttttgttggaaccacttttgccattcacaatcgacatgctaggaaagatgagcgaattatctgtcctttatttaaatttaatttgaattcaattttagagagatg

SEQ ID NO: 113305 - DNA, 162 bp, Heterodera glycines
ttcgtctgtgaattcattcacaagtttgaaatctgccctgtccatcattcaacagcttgcccagattgagtttaagtgcctcatcaaagtttatctgggattaatttgtttcgaattatattttgctttgttatgttaattattatgtaaaatttagaaatg

SEQ ID NO: 113306 - DNA, 264 bp, Heterodera glycines
ttattagctaggattatttattttaataaattaaatatatttgaataaaggattgaataaagtgatcttgttctccgtttttatacagattgatgtttgtttaacccagaaaaacaaaaccaagattgttataaatagttgatgcacacttatatttttcagttttattcttcacttcgttaattctgctctttttctccctaaatttacatcttttcttcattaatttttacaatattttagcttttgaatttgattattatg

SEQ ID NO: 113307 - DNA, 141 bp, Heterodera glycines
tttctatgtgccgtatataaaagaatgccaatttaaattcaaacaatgccaaattcactcataaattttcgacgccagtgatcaatgttttcgcggtgataataaaataatttcaggatttttttttaatcaaagaaaatg

SEQ ID NO: 113308 - DNA, 555 bp, Heterodera glycines
ttatagggttgtacgtgaccgggacctgatactgaaagaacgtacaactgagtacctacgtcccggttttgaccgggaccgggaaaagtctcgggtttttccctattttgccagccaaaaattcccggtttttcaccccgaaaagtactggtcccggtttttcttaaaattcccggacccgtacaactgtaatttgttgtccatattttagctttttgtctatatttttcgtttataatataatgcatattttggtgtttttttgtcaatataaatccgggccctataaataatctaaggataaattctcaaccgaaaacatcggtaaaattctatggtacggtccccgacgagttaaagtaataattatataattttttatattatatattttatttttattttgggctttttctctccgttgtttgcactacattgatcgaaatatcagtgctttgatcaaatcagaatcctttttgcaaattgatcaaaatttgttgtgtgaaattctcgaaagagatgagctgagaagcagtgaaatcgaaatttggaatg

SEQ ID NO: 113309 - DNA, 312 bp, Heterodera glycines
cattcacttttggggatgggaattcgcggatgccgcgccccttttcaaccatactaaaatggaattgttttgcgttttatgtgtcacccgaatcctgggaaacacttggaattgtagtgggccctcactcacttcagaatcttaacaaagtgaatgaatttggccatgaaattcccattttgtaattcggaatttatttacttttcagtttactttttgttgccaggcaaccaaaaccaatcggaaatatgcaaaatttagtgcccattattttttccattttaaatcttttcactttctctttcacaaatg

SEQ ID NO: 113310 - DNA, 534 bp, Heterodera glycines
atgtaattctctaaaaatacttgagttaatattttcaccaaaaaaatattgtggattcatgaaaaacataaaaaaatattttacagtattttcttccttttttgcattttctagtctaggttattttgaagcttctaggatgctttttttcatttttttttctgtctatcttgagaagaaaagaaatttttttcgaactgttcctttgtttggcgttttgtattttttccctatttttgtttttgaaagtcctaaattttctcagtttttttatctttggaaaaacaacatgggtttgtcgaattttttcattcttagttaaagcatctcttctgggggatttcgcttctaaaaatcctcgccatatcatgaaaataacatccataaaaaggaacaccaaaatgatcaacatattttttatgcaaaataaaatacaaatttatgtttactttttttttgcctgtaaataattcgttgcgtatgattaaaaatagatttttttttagtttttctcggccggctattcatatcatg

SEQ ID NO: 113311 - DNA, 627 bp, Heterodera glycines
ttgcatttgtcgtaattacacctattatgataaattaatgaatatgttttcgtaaatattgaatgtagctattctcgagttgtgtaaaattttattaaataaatttttaaaatgaaaaaaggaatttattaaattaaattcaagaaattgtttttaattttctcctcgcagtctccctaccgtatatacaattaatacttttatttttctcatttatttttcattagtttatattcaatttcatttttctctttctcattatttttttctcaccaccgtaccatttttttcctttactctttgtactctcctaagcgtatgtgctatttctcttcacttaacagtttacggtattttttttctactcctttctctgctaaattatcctcggcgtatgcactatttcatttgtttctcattcttttttgattatttcttcaaatatctattctttctccgcacactacctcctttttctcaattgacaaataaacagatggacaaaaaaattcaacgccatccgtaagatgagcaaaatatgagaaaatgggccaagcttcatttaaaaattagcgccaaaaataaagaaatgtcaatgcttcatttactgccgccaaaggaaagatg

SEQ ID NO: 113312 - DNA, 1003 bp, Heterodera glycines
acactctaaaaaaatttttttttctctagattatgtcctattttttttaatgagtgtatggcattatttactcaaaatattcaactaccattattgacttcatttttttcattcgaattttgtatgtgaaccctttctaatagttcattattattattcattatctaacacccaaattgtcccaaccattttggcctcattttgttacttaaatggaaggcatttgccaaattatactgattgaaatttcctacgattattttttttaattgattgattgattgtatcgctttcgaaaaattatcttaattgatcacaacaacaacttttgttaaattgatttaaatatggagatggatgaaaacataaagtttggttttgtttgtacttacaatggcacaataatttttatttggctatatggcaacaaaattgtttttagtgggttaaaaattggttaaatttcgagaaaaaaaactgaaccctctcggtttttttcaaaattttctatggtaattttaggcgcagaaaacgaatctgacatttattttattaatccatttttgagttacgacttaaattttattcattagcgattaacgggagaaaggactcaaaattgtgtgaatagagaggggtaggcacaataaaggtgccaatttataagtgtaaaatactttgaaaaaaatcaaaataaattcatcatttgtcgagcggatccgatcccatggcaaatggtcattaaaatggaagtgaaaattacaataacattaaactaatgtatctttgcttgtgtttttgtttgatctattttttcgggtgttttagtgaaggcgcgctgtcatttcgtcccgcgtcgtttcgccccccaagccaaaatgagtcatttcgtccccaaatttctttttatttataaaatatttagtttttaaagtgttaccactaaaaatttttctgggtttagttaaacaaatcataaatttacgaatttagacgtatgatg

SEQ ID NO: 113313 - DNA, 108 bp, Heterodera glycines
tttaattaatttttttaaaaaatccccaacagctatcgcatcgcggccatcgtcacgagcagaagagcgcgagtggccattcccgtgagctccgggtgcactggcatg

SEQ ID NO: 113314 - DNA, 1003 bp, Heterodera glycines
acaatgaactttttctaatgtttttgataaattttccaaaatctttttaacatttttataatgagaaggcaaaattgggtaattaatttcctggctgttatgaagcaatacgccgagcagggacatgccctgctctatacctagaaaatttttaaaaaatatataaaaatttgttgaaaaatattttttggccattccccgaccggggccaagcccacgatccccgacaattttgcgatcaccgaatccgatccatgaggattttagtggaaaaattagtgacatacaaaggacattttaatcaacctatttgaatattggttttttattgttacttttttaatttttttaatttaattaacaaaattagcaaaatttccaattttctgtcgtcggcagctccgtaagacctatgattcttgataatttttagaatttacacaagattttgtaattttaagtttttttttgcaaaaaatgaatggaaacacaaataaaacgttttctagaataaattttcaaattagagttttcagggtcgctgctcactattataacatttattttggcactgatttcatctgttcataaatttgacttaattccatgcatttccaaaatatataaaattaaaataatgaaacgaatcagtaagcaggtggacataaatgcaattaattttataaaaccgatcaaattcatttaaatttagttgaatctttgatcagatgacatcaaatagaacaaaaatgaaaaacccccttattccttaattattgtttatctcgtattaattactccccaattcgttgagaaaagcaaaatataaataaatagaattattattaaaatgttgtagcatattgatgatataatgactaaacgtggctaataattgattgaatatataatttagccagtcttaaaattaataattacaaattcattgggaaataaacattttttatgaaaattattctttatttttttacaaaaaatcatg

SEQ ID NO: 113315 - DNA, 83 bp, Heterodera glycines
agtgagtttcgtccgttcttcggcttccgatcgcttcgtctgatcagtcaatcattctctcctcttcccatcccaaggtgatg

SEQ ID NO: 113316 - DNA, 53 bp, Heterodera glycines
  unsure (1)..(53): unsure at all n locations
tcaaaagaaaagtgcaacaaaaatggaacaaagatcatttcnaggattacatg

SEQ ID NO: 113317 - DNA, 592 bp, Heterodera glycines
aaaattaagaaatcataaatcgtagtctctaattaattaagaacattaattctgctgtttgaataattgatgtgatgactttttcaaaaatatactaactatcaaattatcatacccccaatcgctttaggctatcagggattgaaaaaaacccgacataggcacgaatgcctggagcaaaacgtgggataaccttgccaaagatctctaaaataattatagaaaatctaaattggatgttttgattatgtttcacgcatccacacatccattgtactttttctaattgaaagaaagaaaagaaaatattcccaaaattaaaaaatccatgggacgcgtaaaaactcttggaacgcgtagaaattcaatgggacgcgtaaaaaaccatgggacgcttaaaagttcatgggacgcgtattctgaactagaaccgtttttctgccatatctgtcgcttttttctgttaagttaaatttaaggttcacagattcggatgtgaattacattatggctttgaaaattgttgagattgaacccatatgtatttctccatggaaaagttgtgaacatagacaaaacattgtcgaaaatg

SEQ ID NO: 113318 - DNA, 144 bp, Heterodera glycines
attgatttttgccgttgttccatttgccctcttccaacccgtgaaaggggaggagacccattcaccttctctggtatagccccattttcccaaacccataataaaagtattctaattttccataattgttactcggaagctatg

SEQ ID NO: 113319 - DNA, 53 bp, Heterodera glycines
aatctatgctggtgcacttcttgttgcactattctctgttgcccttgtcgatg

SEQ ID NO: 113320 - DNA, 484 bp, Heterodera glycines
  unsure (1)..(484): unsure at all n locations
cccccatccctccttgtctcncctcccatccctccttgtctcccctttcccctcccttctttctcactctctctctttctctccttctttctctctctctcatttagatcctccgtctgtttcccttctcttcttcttccctccgcgttcacttctctccattctcttcgtccctgcttttccgtgctaagtctacttcatctgtccaacagctcaaaaagcaacaaaatatcccctcacaatcactttgtcgcgctgtgatcaatgacaatgcgaatggtcagtcgaaaaaggagagcagagagagagagatatggggagagagtgagggaaagaaaagggagggagagcaaagggaggaggagagagtgaggggatgagggaaaacagggagagagagatatggggagagagtgagggagagaaaaaggggggagagtgtcctcctccattcacttttttcagctttacagtacaaataatg

SEQ ID NO: 113321 - DNA, 131 bp, Heterodera glycines
ttcttttctatttgtactgtggcgatatggcagaagtgaaaggcgaaattttgttcgaagttttcatagccggtcatcaaatgccttttttattttgttattttttttgtttagctgaccaatacttcatg

SEQ ID NO: 113322 - DNA, 1003 bp, Heterodera glycines
tcctttggcaactttagctgctttgtgtttcttttcattcctttgtttcatcacaaatcatttgtcactttttcctccgttttctgcccaatttccttgtccaattagcccttaacgcaacaactggccaggctgtttgcgttcagccaaagttcggccaacaaccactccatcgctcattcattaattcattaaacatctgattaacaattcgggaaggccaaagttaagcccgctctcgtttctctctcgtgattaagctaatttcgtctttttccattttctgccaattaatttcgttatgtcccccttaatttgattggaattcgccgtcgtcgacgaaaatgctgacacctgttgattctctcactttggccagcagacgccgccattcccaattttgcccgcttttgttcgagcggaccggaggggggggggggtgaaaaccattgaaacgggagaagcaaaagaatgagagacagcgagagagtgaacatttgaacgttacaaaatttgttgaattgactttttgtttggggtggagcaaatttaaatcaactttctataggcggagaaatggccaaacattaaattggcagtttattttctttaaaaaaacagtttttcattcctgacaatttgtaccctttttattctttctttattttatttccaaactttttaggcatttgatccaaaaaaatgtgggagcttaaagtaaactgcccaatttcttgtcccgcttctcatttttgttgggagccagtcgattatacggcgcccaccatttgtcttgccgggggcatcaatcccaattccttcctaaatcatttgtcgctaggcgaaaacaacgtcattctcgcccttcttcttgtcatggcggggggaatagcactcggatggatttgctgtctcttcttgatctgctgcttccccacttgccttcgtccaattcgtcgtcgtccgtcaaagagccgaaaagagtccgcttccgtcaaagatg

SEQ ID NO: 113323 - DNA, 1003 bp, Heterodera glycines
taataattttggttatgtaaaattcagtcgcgagtaaagtcgagcttcaaaaaagaatttacattttatttaattaaagcataatgagcgattctgtaaaaattaaaaaaacaaaagataataattaaaaatataatgaaacggtaaatgaattaaaattcatcttttattattttcataagctaaccgcgacgcagacgaagagtttaacgatctacgacaataataatttatttaaataatattgtatttattaatttaaatcaaattaaatatacactgtgtaacattagaatagggacaccctattttttgggagtttgaccacttcccatgagccgatcgagctgaaattttaactgtacgtagcaattctgaaaatatcaagattccgaaagtgagaaaccgaaatgatgacggaaaaatattttacgaattttttttccaattagttcaggttaattttgattattttagaagattttatcaaatgactctagtaaactttttaccttcgttttttctgagcactaattttttaaataattgatgatttcttaaaatagataatattcatctgacttattaaattatattgtaatatatgtacttcgtttaattaaattcatatcactttctccacaaattccatttccacgcaatggcctttgaatgaggtctctacgtcgcgtctccgcgaaggcgcgtcttgttgaaaatggatgtctcaaaaatgaggaaaaatggcttgaattgagccattttttggatagtcggtatttaacaaggcacccctcagcgaatacttgctatagagcaatcattcaaaggccattttgtagagaattttgtgctctttctcttcgtcataatcatcctctacggaaaatttttcccaaccccctagaatttttttttcgaatttactcagattttcgtattttttcaccgcaaaaattttgtgtttaatgccttttttatggcataaaatgaataaaaaatg

SEQ ID NO: 113324 - DNA, 110 bp, Heterodera glycines
agtgtgcattttatagacttgggtatttaatctttctcttagccaattacaaaacattttccattttgaacggcgcgaaatgctttccagcttttgtccatttaaaaatg

SEQ ID NO: 113325 - DNA, 345 bp, Heterodera glycines
agttggggagcaaaaaaaaaattcgaattttaaaatccaaaaaatttttttcggaatatataattaattattttgatcgaccgttctacatagctcctctacgaggtagaagctcgtcccgtatcatcggggagcctaaatccgcataaaatttgaataccttcaaagctgttagaatttttttttcgtatttttttcaaaaaaattatttatccgtctctttttttaaatgtcgggtttgcatttcgtcgtttaaaacggtaaagtattaaaaaaaaaatcgattagggctcggcccgtgacatctggcaagaagtcagtcagctgcggaaagtgtcgttgatg

SEQ ID NO: 113326 - DNA, 407 bp, Heterodera glycines
agacaccgaatataaaagcttatttttctatacaccctataaataggaagattttgattatccatgttgccatatttacactatatttttatcacctgtgaatttttaacatttgattgatttatttttattcattttttattacggtattcattttgtattttttatttgaccaactttatttcttgttttctttttggcaccatataagagcactcatgtgcctttggtttgctcgataaattaaattaaaattaaaattaaattaaaacaaaacgaaaaatctaaatctttcataaatgcatgcaaaaaagacaaataaaatttttatagttctccatttttctcttatcacgaattaatcttgctaaaaattatagtgttaaaaattaacaattattcagatg

SEQ ID NO: 113327 - DNA, 721 bp, Heterodera glycines
tattacgcaactgccttttttgatggatgagccaaagccttttatccctttcggtttgttcttcgtttagtccttcttcctctaaaggattcgatcttctccgcgtgtcggccgtttttgatggaattgttagaatatgtttcgccgattaacaccagaatttagaaaataaatccagaattttgttgattgtagtcgagaaatttaaaatttaaagaaatatgtcgtcgaagtgtctcagaaaaataaaagatttgttgaactccagtaattgttgattggaaaatgaagtgatgaagtaattaaagaattgttcgtcgattggtgtaataaaaataatgaaacaattggtcgtcgttgattggatgatgattgccaatgtgatcgcaatgtgatcgtctaccgtccctctttgatgtgcatttttgtgtccattttcgtgccctacgaaggcaattaattaattgtccattttctctgtttttcccaatttttcttcatttttcccgtcagttgttgcctcattttgtttcttcgaattcgttttcgcatttttgtttcgttaattgttagtcttttctcgtgatttgccatttgtgtttatttttgtcttgtcccgggactggcatttgttagctgaaatttcttttccccaaccctttttcccctgtgattaattaattaatgagctctgatcaaaaactccaaacgtccagggatg

SEQ ID NO: 113328 - DNA, 56 bp, Heterodera glycines
tttgttgagctttaccagtacaaaatgccttgcaattttagaaacggttcggcatg

SEQ ID NO: 113329 - DNA, 144 bp, Heterodera glycines
  unsure (1)..(144): unsure at all n locations
aaaattttagtggnccatgaaattcaaaaaaaaaatgcccaccattgccatcatttaaaaaatgccattgctcttacccgccgttcattacggcaccgttggccttcttcggctgtgccatgtcgccgttttgttcaagaaatg

SEQ ID NO: 113330 - DNA, 66 bp, Heterodera glycines
aaaactgcacaatcggacgacgaagaaatgtttggcatttgaaaggagaaaaattagggaaaaatg

SEQ ID NO: 113331 - DNA, 136 bp, Heterodera glycines
tgagtacctcctcgccatcagagagcgcgccggatggactcataaaggtcgccggcttcgaactcccaccgccccccacatcggccaagtggtcatcgtcgaagaggacctccgcccccggaatttatggccaatg

SEQ ID NO: 113332 - DNA, 770 bp, Heterodera glycines
tcagaagcgcaccagattttgcaggggcctaaaaaggtcaaggaaaggcgtctctgcgttgatttagcagtagtacctatgaatttaaattttctatgaatttttaaagttttttgaaatttttttaagtgcaaaagtggtggtgtctgcaaaaaattttcaccgggtttaaaaaatctaggaaaattagtaagcatttgtagtgttccgatacgtatccctgcaaaatttggtgagcccctgatcaattacaaattatttatggacgatcaaatttttagaaatttttatttatttttgcataattaattcataaatatttttttcagaaaatgctctgaaacgcaccaaattttatttacatgctagtttaggcactctgatgctttttctatcaaaaagggagatgaataaatttttaaaaatttttaattcctttttaaacaggccaaaaagtttaggcttaacttttttttcataaacttatcagaagcgccccaaactttgcagggatactgaaaggaaaagaattaacctgttttatcacattagcttgtcatcagtttttataaaaaattttcaaaattctgagtctcctattattttatttttttttcaaaattttgaggcgggggggggggggggggcgcccaaaaaaaattttacaatgaaaaaagagaatttggaatgatgagaaacaaaaattattcagtgaagaaaaaagaataatgttaaagcaatttgatcaaatatatgcaaaattaaaaatg

SEQ ID NO: 113333 - DNA, 206 bp, Heterodera glycines
tttgtgacccatttaaggtaataaaaaaaaatttaatttaaatatgaaaacggaagattacacaaattataaaatttatttttaatagaattattattattatttatcagtttgagaatcgacgatgaaatttctaaataattcgacattctcccattgatcctggttaaattgaatgtgccaatccctaacttatcccaaaaatg

SEQ ID NO: 113334 - DNA, 649 bp, Heterodera glycines
ttttcataaatattttaaatttaattaattttggactttccatttgaattgtttctcttttcattattctgcacattttggtgttattttaagaatttcctcttttgtaggtcattttcattgccctcccttctgatctttgctttttcccttttttggtcttttcgcccaattttcaaatcattcgctttttccaactcatttttatgattggatttgttctgtttattttagtccctttctttaatccttttgcatgaccaatcaatcaaaaaaaccaattcaattcaaagatttttctttccttcgcaactttttcaaaatttcattaaaattccaattttctgctcaatttcccccattttcctcctccttttttggtctttcttttgttctttcttccgctgatctttccaatttgtccttctcttccttcgtttcgttttgttcttccgtccgtacaaatcggtgccccttccggcgcaaaacgcaaaacgtcgtcggggggcggccacgccaccgaaatgaatcgacggacggacggagggctataaaaaggggcgaaattgggcaaaaaacgtggacagaaagagacttaataacatccaattaaaaaacaaccatcaaaaacaatgaaattcacaaaatg

SEQ ID NO: 113335 - DNA, 177 bp, Heterodera glycines
tcatgcaccaatttatcattatttagttttgttttaattacttgctgctggttcaatttgtagttaataaaagcttaactgtcaaaacattaaaagtaatttaaaaaattaacaaattatttgaatgcaattttttttttgcacatccactcgtacgaaaacggcggtacgaaaatg

SEQ ID NO: 113336 - DNA, 149 bp, Heterodera glycines
gccaaaatgagcctctctctgttgatggggccaacaaaaagaaagagtggtctgactctccccccctccccctccccctgcagcgtgtcaatgccgcacccccttccgccgctcattctgtgcctttgtccattctgtgcccggccatg

SEQ ID NO: 113337 - DNA, 809 bp, Heterodera glycines
tgttcacccatttttttcaaattggccaatttttggctcaatttcgcgcacaatcttttaattgtttttgcccatttttgctgctgctgctttttttttcaaggtttttgggtcgccgcggggcacacaaaattttcaaaaattgttcaacgacattttaagagcactaccatttaaggtcaaaaagcacattgtccttcaaggacgccctaaatataaaatataattattatgatataaatagttttttttcaacaaattttacacatttttctttttcataattttgttgcaacaaaaaatggggagcaagtttcgcccaccattcgccaattacacaatcattttccgtttttaattttttttaaaattgacgtacatattctctgcgcaaaaatttgtttgttgcttggggaagggcaatgccatttttacaacaatttttaatggatttaacccaaaaaaacagtacaacgccaaaataacgttaattcaattttcgttaggccttattttaagacacattcattaatatgaggggaaaaattattaaaaatattttaaatgccaatttatagataaaaaaaatttttttttttaatttaataaactaattcttatttaaattcaaaatgaacattctgtaaaaagggtaaaattatttaccgacgaggattttaatgttattaaattcgatttaatttttgatcagttttaaataaattgaatatgattttaatgatttttcacatttaaaaatttaataatttcgatttttatttatattataattatcattattataaatg

SEQ ID NO: 113338 - DNA, 194 bp, Heterodera glycines
ggtataattcacttaaaaacaacattagctatatacctagtcttaattggttgcaaatcgttttccgtttcttcgcgttgcttgggagtcgatgatgaattgttccctttgccatccactcataattcaatagatattattttttagtatcatacgtctcttcgttctcgtcccgctcctccacgactactatg

SEQ ID NO: 113339 - DNA, 353 bp, Heterodera glycines
tcaccccggggggtcacaaatttcggggtgagaggaagccaaaaaaaatctcggcctttcccttggggtgcattttccgttcttttatctcctgtcgatgagccttttgttttgatggactactattttcaaaaacccccccaatttttcagtgttctcgagtttttctcggcacaaattttcgaaaattttgcatttttatgagatttcttagtaccgattttggtccaattttaaatttgctttttaattttatttggccattaattcgacgctttccgaaaccgcaggacgatgctaacttcagcagcagcagtgccaatgttgacaatgcgcagcaacagatgacaatg

SEQ ID NO: 113340 - DNA, 768 bp, Heterodera glycines
ttttaaattgctaaagaaataagaatttaaagaaatgaacatattttctttaaataaaaaatagaaaaatttgttttataaaaataatcttacaagaaatcgtctcgaaaaaataatccaaaaatcaaattacggatcaaaattacggaaaaatcccaaaaatccgtaacccgtaatccgtaactcccaaaacccgtaatttccgtaatccgcaatccgtaatccgtaattgcgtgcagccctggttggcccacaaatttggccaaatgctttcaaattcattaattgttgttcccccacgatagtaaaattctaagaattgcaaattttgatgttcttcaacaaaaaaaaattcgaaatgaaaaattagaatttttttcttcaaaatttctaggttttttaaattattaaaaaaattttggttttaaaaattttttgattttttaaaattaatctctttaaaacgagttgattttctctacttcttgaaaaatttaaatttttaaatattttttttttacaagggaacggctgagtgattttaaattgttttcaaacttgttagttaaggttttaagatctacatggatttaaatccttaaatttttttgaatttctttaaaatttactaaattcttttctatttaaaatgttaggaaaaggagtccttttgcccccaattagatttaattgacgcaattagtatcgttaagtaactatcgccgtgcctaatttgcactgttttcaacacagagtcgtcgcgacatg

SEQ ID NO: 113341 - DNA, 116 bp, Heterodera glycines; identical to SEQ ID NO: 105272

SEQ ID NO: 113342 - DNA, 93 bp, Heterodera glycines
ggtaatttgcattaattacaatttctgaatttcctaaaaagtgttgccttcttcaataaggcatgtctggtggtccccggagaatttgaaatg

SEQ ID NO: 113343 - DNA, 368 bp, Heterodera glycines
aagttaaaaaaaaatatatattttaatataggaaattttttcattaacttttcatattttaaattaaaaatgaataatgttatgaatcaagttcaatggccaaatatttttaagcttcattcttctaaaactaattcaatttttccaatacctttttttccataatttggcgtttttttaaatttaatactcatttatatttccatttcacttctatttttttaaataatattttatttttttttatatttcattcaattaattaattttaactgatttaaatgtcattttgtttttttctctattcactctccattttttcaatacttaatttcacactcccgctgtctatcccatccctccaaatg

SEQ ID NO: 113344 - DNA, 55 bp, Heterodera glycines
tgtaagttttgggggagggcaatttttggggttaaataactgattttcaggtatg

SEQ ID NO: 113345 - DNA, 209 bp, Heterodera glycines
attttataaaaaacaaaattacgagaaattggaaaatttctggaaaaatactcaaacgatcaaataatctcgaaatttttgcaaatatgctttttaaacgggtgaaaaatttctacatagcggcatttagtgcccctgaaatcgaaaatttatatttttcattcttagaaatgatcgataaaattcaaaaattaccagggtttattatg

SEQ ID NO: 113346 - DNA, 68 bp, Heterodera glycines
gacaagggatcaggtattttgatgtttttttcggaattgctttcgaccacccccgccccgtttagatg

SEQ ID NO: 113347 - DNA, 553 bp, Heterodera glycines
tgtggacagctaaattttgtaaagggtaaagtaaacccgcgaaaagacgagccctacggttgaatttattgaaaaacgggagacaaatccctcaattttcaacggactgtctacaaaaaggggtgaacaaaaacccggaaaacgattcgaggagaagacgaaaagttggatttttttgtaaacgggaaaagcaaatccctcttcacttcaaatctcagcatcggaaaaggaaattgtgaaacaaatcacaaaatttgtcagttcggtaaaatccttcgacaaaactgactctcaaacagggaaactaatcccatttcgacatgcagcaacttcgccaaaacaaaagatcggacaaaggaaattgtatggaacagcaccaaaaacaagaaggacagcaaattggctcgttgaatttgtgctaacgatggaacgacttcctgagctgaaaggaacggaagggacgaaccaaattcgaaaatttttcaaaaaattttcgtcagcaaccgaagaatggacggaaagtcgacgcatttcagcgctagaaagcaaaatg

SEQ ID NO: 113348 - DNA, 1003 bp, Heterodera glycines
ttcttctgggcacatttttgaatttaggaaatttttgtaacaaagtgcactcaaattttcaaaattttttcaaaaaattttctcttgggaaaattcccggttggtcccggtcccggcttttctcgcggtcctggtcccggtcgaaaaacttggttccggtcccgatcccgacttttctggtcccggtttttgtcaaaattcccggtcccgaccagccctaataataagcatgaaaaacgcatttctaacttggtttgaggcttctaagtccacttttttcatgctgatttttgctgatttcccgattttttgtgctgatttggcattttggtgctttttttgtgcagtttcgtcattttgagcaactttttaaaatattttcagaaattttcaaaaaatttattaacaaaaatgcaataaaaacgaaaaatacaccccctaagaatcgatccgaaaaatttcagaaaaatacaccactaagaaaccaaaatttattttatttttttgacaagattttgcttttttaaagctcgacttttgaggcatatgccttttttttctccgtactactttatatatattaagcataaataacacatttttcacttggtttgaggcttctacttagacttttattatgccttttttgggattttcgtgccttaaatgccttttttggctttttccgaaaattccttaacaaagacgcaataaaaaagaaaaatacaccctaagaaatgaccaaaaaaaaaaaatttagaaaatacaccactaagaattgaaaaatttttcaaaaattgatcgccaaaatttcttttttttcttgataaaaatttaaggttaaaaaatttttcttattcgaaaaaaattataaaatttttaataatcatttaaatgacccaaattaaatttttttgattaagttttacgagttttgctccctaaaatccttaatagaaaaatttcaaatgctttttttcatgcctttttagggattttcatg

SEQ ID NO: 113349 - DNA, 859 bp, Heterodera glycines
ttaaaaagtaataataataattttgcctgaattgaaattggctataattttttcctttgccaaccaaaaccaacaattttagtatctttcgatagccctaatatcctttataaacctgcaaaatttcgttaaggttcaaaaaagttcctcactctattaaataattttatgcatatgaaaaagaattaataaatttttatgcctttggatagagagaatattaattatttaaacgtgtattagagaagagtgttgacttagctggtcgataaattattgaattacataaataaaatgatcacttatatcattcttttttaattctatttaaaaaaatagtggacctgccctgctggaataatgttttaaaacctaaattttttgtaataaatatttttgtgaattataaaatattaaaattcaaaatttttaaataggtaattaaattattttttgtatgaaaatatgaccgagagattaaaatttaactgtgatttgggatcagaaatacttttgttgttcgttttgattttgtgggttcgagtcttttttgttttaaagaaacgatttaacatcgttttgttaattttaacgatgtgcataacgccaacgatgttttaacgatgtttttttaaattacgaattatagaattgaaaaggatgtaaatgaaatgcaggtgtttttttatgtaaattgatgcaaatgtgtgttgaacgagggagggggtgggatgggtgggtggaacgaccttttcttcacccgagcgaccagccgacgaaccaccattgattcatcttctagtagtatttgttggccaatagaaccaaaaacatttgtccttttcctcggaattaaatg

SEQ ID NO: 113350 - DNA, 937 bp, Heterodera glycines
ttttaaataaaaattatactgtaacaacaaagaaatttgaatatagtagcaccaattcagcaaatcaaaacaattctatgtttataaattttcaatattaattaaattaaattataaataaataaaattatttaccacaaatttttgctaaatgttttattcataaatcacacatgctacatgttttattgtattctcatgaaaataaacaaagaaatgaaaatttaaaataaaacaaagaaaatttaaaataaaaatattagacaaaaaaaatgttttttaatttataataataaatcactgtaaaaattaaattattaaaaaatagttaaatgattaaactgcaaaacttattttaagaaataatagaaaatcctaagttaaaataattttccgaacgaagcgaatagtaaactacaaagaaaatgttttatggaaatgaaattttaaaatcgtaaaactaaaatattaggaaatataaatttaatgatttttgattaaacaattatttagcattttttctactaagaaaaatcttatctaaaaagtactttttagatcataaataaaacatattctattttataaattgaaatgaaaaaattcaacatgaaatggaaaaagaattaaaacaaatgcaaacaatataagctaaattaaacgacaaatatgattatttattttagttttccataattgatgcatattcctaataaataaataaaataatttggaaataaataaaaattgttaactcaattttaagaaagtaagatcatttaatgcaaatatgaaatgcctccaaatcgaatttttagaaaacacaatttttgcaaatcacaaaaattacttatataatgcacgtgacgaaaacttttcttatttattaaaaataaattttattttttaatatttagtttaagtaaatttaaatatg

SEQ ID NO: 113351 - DNA, 1003 bp, Heterodera glycines
atatgttggcattttggcatataaataaatatcgcacatatttcggggtttggcacatattttgcacatattttggcatttttgaaaaaatatctaagaaaaacacaaaaaattcaaaaatgcacccctaaaaatcaactttcttcccatttttataggctctttcaaaatttctttatttatttcgtgtaccgaaaatcgaattcttcattaattcgttactggatatcgaagtttcttgctggcacttactcaactgatggaaaaattatctttaaaaacaatttatcaaaaaaggactaattttatccccaaacacctccaaatgttttttatttgcaattgtgcgggcaaaaatgataaagaatgagttttttggaatttttatgcaaaaataccattggtttttccaatttttagcacatattttgcattttttaacacatatttaggcctttttttagcacatattttattacatatttcaggatttttagcacataaaaatcccagccctactaatcgcataaaaaatggttttaaaaacagaaaaaagagaagaaataatacgattgcatttcggttttattattgttgttaataatgcaagaccaaaagttaacgggggaacgttttattgaccgttttttgttggattatttttcacaatttttgcgttatttaaaggccaattctttctcattttaaacaaaacttaaattatcaaataaaatattgaaattgtcatttttcttcttcaattttgccgcattgttctttttcaatgttttttggtgcgatttgaaattttaaacttaagcttaaaaacttctaatgatttaatttcaatttacgttatttggagttaaacttagctttaaactcagggtatttcaataaaaaacaaatgtttggtggctttatcccccaattttatagtgcttttctgaagcgggcgtctcctgcggcctcgacggagtgtgccgcgatttcgctaagaatg

SEQ ID NO: 113352 - DNA, 886 bp, Heterodera glycines
actgtttgatcgctgctgaccagctgttgttgttgtagcaccattggcataattagcgaattggggggacagcggatgattccctggtgccggtgatctgccaatgacggatgtgccaccggccatggccaaaaccgacagaccaatgccggccaatccgatcacaaaaagcattaaaaatttaacgacaaatattttatcagaggcaaataaacatggcttaatttaaaataaagtttgtaattaattttgtcaatctgctcagataattatttattgattaattacacgtgttattagcccccattaaaagccaaacataatcccgaaaatatggggcgtgcttttaatgagaaaatattctttcagtatattcgggatgggattaaaaaaccaacccacacaaattataacaaataaatgtgaataagtggtaaagatttgggaaaaatcacgtgaaagcttttcttccattgcaaatgtaaacttttaaacttttatttttgaaagtgcgaaaatggaacaatcttctttttttattattcatttcaactaaaagcaacagttttgtgcgattgataaaaggaaagtaaactcatataaataaaaaataagaaaaatatccgacaataataaagagttaaaaatatattcaaagatgagaggattctttctatatatacatgaatcaattgagatttaattttcttaaattttaattaagcaaagcgcaatactccgactaaaattgcatatttcttctcttaaaatattttaattgtatcacaaagaagccaatgaaataaaaaagtttactgaattaaatgacaaatttatttaaattcaaaaatatgaatccctaaaaaagtgacgataagccaaaatg

SEQ ID NO: 113353 - DNA, 420 bp, Heterodera glycines
acattcccttttatagacttaactcgaaatataaattaccgtttaaaatttataccttttgcggggcgggtaacaaaaatttggaaccaactcgataaaaaccttatcgaaataataaactcattaaatcaatttaaaaataaaattaaaactatttcatttctgtaagattgaccggaaaaataaaagtcgaattattaattcattaaacaaaaagtgatttggtcattatttttattttttattgatctcacattatattttattttttggcggcgatctcgtttttaattgtttatgcgctttcttgaggacattttaattaatgttttgtcctcaatgtaagcggatttttcccttttgtggactttttctttattgacaaataaataaataaataaaaatcgcagcaaaaaaatg

SEQ ID NO: 113354 - DNA, 1003 bp, Heterodera glycines
acaaatttttttcgtttaataattatataattataataagacggtttacttcagttaggccacagccatgtttttggactaaaacttttttctatctcaaccaaattttcagtcatttttggccataactttatttttcggaatttttttggctaatagtggacatttagggctgaataccaaaataattataataatcatcatcacatttacacaatatttaccatttattttgtaatccaaatgtcacattttgtatctatcttatttcccaaacaattgtctctctcctctagtgggcggttctttgatcactccctccacctttgattacccccccccccgcccccgggggcttactctcgatcacttatatacaaatcaggcttctcccccggcagtctctgctcccgagaccgaatcgggaagagggcctaagcattgtgtccttcacccagaataaaggcgtactgtttcttactgtattaatggggaataaaggggtacaaagggttgcactacggtgacgcacgacattcagtgctctcattttaaattttatttttatagggaatttcaacaacttatattcaaatttccattttttatcaaagtattttgcgaatgattggcaaaatgcattggatttctctgctaattttggcaatgcttttgctaatggatggatgccatggacaaaaagtgccggcggattcccgcaaaataatgtcaaaacctgccgaaaaaacacaagaacattctgtcaaagtgccggcggattctggcaaaatcacgcaacattctaaggattctggcaaaatgcccgcccaaatcgctgacgggagagattattttttgtttcaagaatatggataaataaaattcttggcaaaaatagcaaacacaatgaacaagtgaagaaggttattgaagggttaaacaaaaaaaagtgccttttggaggaagttttttacctgcaaaattcaaaggtaaattaaaaatg

SEQ ID NO: 113355 - DNA, 832 bp, Heterodera glycines
tttttaacagtttatttatcaagccaaaattcttcttttgttcaattaatttggccaaaatggtacgaaataaatctcaataactttcttaaatccgccaagggataggaaaacataaatctaggacataaaaattcatagcttggctcaaattcaaccaaattattcagtagctctagggttctttatcagaatatcaaaaatttttaaatagaataaaaaattatggttataaaatttctaaaaatcttaagtgttttttggcaataacctttttgaaattcaatgaaattttttgaaattttaaaaaggtatgagtaagttaaaaaaaattagacaaaatttaatcactaccccaaaatcagaaaatttcttataaataaagacgtatgaattttttttaaatcattcaaaaaagaaagctaaaaatataaaaaaataaattagaaaaaaaatttaacaaaaggattttaaagttattaaaaaaatagttaagaaaaaaaactctaaatcgaataataaaataaaagtgaagacctgagataagtagcaaactcaatcgcggggggaagtttgggcaccggatgtttgggcaccggaaatttgggcaccaaattaaggattttaaaaataattccaaaaagtttcgttaagtatcaagaaagttataactaaaaatgttcaaaaaaacttggttttttgagcttctcaggtcataactttttataaacttaaagaattttttaaaaattttgcaggataatagaaaacacttagggctatcgaaaaatatcaatattataaaatttgatccattttaggcgaaattatg

SEQ ID NO: 113356 - DNA, 162 bp, Heterodera glycines
acacattttcatctttaaatttaataaagagttgtttttgaacctagaatatagagaatcgtttgtaatccgttgtttacttttaatgtctatctcatagacaaattttcatatgtaaagaaaaaactttttcgattgagaaccgcaattacaaaagcaatg

SEQ ID NO: 113357 - DNA, 1003 bp, Heterodera glycines
  unsure (1)..(1003): unsure at all n locations
gaaaaaatgcataattacaaccagagattgtttactcattggaaaaacactgtcactttcacagcgttcgcattttttgggatttntatgacttttttgagtttttgcgacttttttcgtgatttttntaggcttactgaagcaaaatttgaattttagcgaagaaaatgccgaaaaatacaaagaaattccgaaaaataaaatttcgatcgataaaaaggcaatgaaacctggatgaattttttcttaattgttggaagaatctcttttttatgcccatttaggtacctatttataaaattaagtgcctaaaaatacgatcaaaatgttattctataaattattaaaaatgggattttgttaactttcgcctaatttttcaggacatttttgcattttttacgtgcttttttggactttttttgccttttttatgacttttttgtgactttttggcgatttttatggatttttagtgactttaattcccggccctaatgataatcggaaaagctatgttgtgttttgtaacacttaaactatctgcacaaatataagattcaatttttccatttaattcttttttacgttttgaagccattctttcacggtttttttgcttttctacctgactttcttctacaaaaatttaacgatttaaagccattctttcgcgatttttgcttttcgctctctttttgatcaatattctttttttttcgttgtttcatttttctaagagttgaattattcatttggctagagattgtatatctgtgaatagtctgatacttcatcgtcgtctatatttataatttctattgtttcttcttctatttcaatatcatagtcattctaaagattaaaaatgctcaccgaataagtcaagacaaaaataaacaaacaaatcattaacttttatcaaccaacggtaaaaaattaaactagatttaagatttaccaaacttccaatcgcataaaaaaatgccgaaaaatacaaatg

SEQ ID NO: 113358 - DNA, 207 bp, Heterodera glycines
tctgcaaaatttacaaaaaatatgacaaaacaaaagaaaaaatcaaaatttttaaaataattttccatagatcgaggaaattcatggaagttggaaaaagatacacatccaaattttttacaaagaaatttttttttctgccagtgctaatattcatgtaatggaaaaataattaaaaaataataaaatttaggagtatagcaaatg

SEQ ID NO: 113359 - DNA, 309 bp, Heterodera glycines
gtctctcaaactcaggctaagcaaggatttgagaatctggccgaaaagctcaaccagtgcggaaagggtgggcggcaacggcacaaggcaatcactctgaacaatcgaaaaaataaaaaaaatggtacattgagaggtaaacgacagatcattgatcagctaacacttgcacattaacatttgacaccatacgaagcctataaataggtgagataattttagttttttcacaatcgactacactctcagcaacatacattaaatattttgagagaaacatactaacaaaaaaaaactcagtggaaaatg

SEQ ID NO: 113360 - DNA, 433 bp, Heterodera glycines
aggccaacgttaaaagaccaacttgacccataatccggaaatgtggagagaacgaacccttttttgcacattttttttctaaaattgttttttttcggtttgagaaaacgcaatttatgttttcgaacatacagaaattttagtttttttctctaaatcttctcaaaaacaattttcgttcattctctcctcgtttacagatcagattcagcaatagatttggttttttctccttttcatctgttaatttattcattttgcatttaattgttataggaatctcgagtacgataaaagagaatagcaaatttggcataaaggaaaatattgtgagatttatatttaaaaatacagaaaaaaactcaaaaaagaatttcaaaaagataatataatatttaacaaaaaatgcactggaaaaaaacgaaaaaggatg

SEQ ID NO: 113361 - DNA, 362 bp, Heterodera glycines
tggagcgagtgctgttggagtaccagcaattagcgttgggtgtgttgttcccgccttccggcgcgtatgtccttccgtacgttccggcaacggagcaccaaatcaaaaatgtgctgggactgctcaaaaaatgtcctccggccccaccaattagtccgctaattgaccttggcagcggagacggacgcgtcgtaagtgattttctttttattcagataattaaaatgtatttcaattagtaacaattacataattgctcatcattttgtacatttaatgcgcgtgcaatatattacacacctcctaaattgttattgttgttgctgttgttgttacaaaaccacaaattgtaaacggaaatg

SEQ ID NO: 113362 - DNA, 131 bp, Heterodera glycines
aggcagatcagcggcttgttcaggcagatcagcggactgttcaggcagatcagcgggattctcaggcagaaaggcggactgctcaggcagaaaggcggactgctcaggctgaggaggataaccggcaaatg

SEQ ID NO: 113363 - DNA, 254 bp, Heterodera glycines
tggatttggcaaattaatgctggcaaatgggccatttatattagcaacaattgcacgaaatcattttcatgtgctatttcaatgccttacttcaaatatttatttaaaattaaattttcaattcctttttttttacaaaaattacattcaaaaaataattctgctcggtgttaatttgtataatgaaaaaagaggcgttaattcattgaatggcatccaaatattttgctaattttttctggtttttttagatg

SEQ ID NO: 113364 - DNA, 451 bp, Heterodera glycines
  unsure (1)..(451): unsure at all n locations
cgtttatttgtctccacnngctttcaatcagctcaaatctctcttcacaagattttttgggccaaaagaatggccccgaaattgcggtggcggaaatcgatcagacggaacggaacaaaattggccaaagggcacaaggaaaagccgaaaatgaaaagaaaaagcagctgttggcccgggtcaaaagaacggcacaaacaaacgaacggagcaaagcaaaaagtaaagcgagaaaagtgctggcgacggaataaattgaaatgaaaatcgcgatttgtgttattatcgggcggagaaaaagcattttaattgggaaattaattaatttattggtttaaaattatttgttgggtacaatttattatatttgaattaatttgtgaaaataaaaattcattcattaattttttcttaattgtgtttagctcatttccaaaattccccaaaaatg

SEQ ID NO: 113365 - DNA, 164 bp, Heterodera glycines
ggtcaccgaaagcactcttctagtcacaataaaaaacgcactcattctcagatggttctgtcgcgcaaattggcacttacagtgacttattggctggttctggtgatttctccgatctgatcagagattacctcaccaatcgcaatccctccaaccgagaaatg

SEQ ID NO: 113366 - DNA, 241 bp, Heterodera glycines
ttgtgagcaggtcgctcctagggttttttgtgacccaaggcgcctcccgcttacacggtcggacccatcgagtttttcgtaactcgtagcgtccttcttcatacactgtaagactcttggtgggtctgaagtcaaactcactttgtccactgtttgttcaacttactgctattttgtgaccccgaaccccacacaatttgttcggaagtcgggtagcagaacccaaaagtgagcaaaaatg

SEQ ID NO: 113367 - DNA, 560 bp, Heterodera glycines
atgaaattcagttgatgtcaaatcgcccgttgggacaattgagtgtcccccagatatggtccataatttaagtgaaaattagtttcctgaaatccttaattatgctgacatgagcatacatctgacattaattttttttttcatatcaaactgtcaaatctaagctttagaatgcaatcattttcaaacaaatataattatgactttcttctgaaaaatccaattacttttttgttatcggctgcttagaaaaagcttttcctcattaagtgcttttgaataatattctaaaaccgccttggcaattgggtttttgataatataaaaattgtaagcatattgaattgacattatcttagtttaggcaatctgtgtgattaaaattattccagatacatgttcagcaacccaagggaaacattaataaactgattttatgaaaaaactaatggatccattttaaaagattgcacaaaaatttactagataattcattttaaaaagttgttaaaattaaaattttattttttatttaaggtaataaatttttcttcaaaatg

SEQ ID NO: 113368 - DNA, 733 bp, Heterodera glycines
aaaatttcagtgcaatttggttaaagttttgtaaaaaatgacctattttgtgatttagagccaatttttttaaagaaaaattaaggttttgtcagctctgacggggaaattggaattttaaaatgaatttttgagaaaataatacaagttttcaaaaaaaatttcatttaaattttgaatattcaaaaaagacatcgtttcaaaaaattttctttataaaaattttacaaccaaaaaatgcgcggcgcaccgcgcaacaaaaaaaaaaccgcggccgcgcaccgcacattcaaattgccgcggccgcggatcgcgcaaaaaaaaacgccgcgaatcgcggtcgcgctccagccctggtccggtggcgccgataggctccgccgggaaaattttaaaaactttacacacaatttcttagcagatttaatacaatacttcaataaatatcttattttttcttaccaaaaaagtcattcttacgggtgtaaatatttcgtctttttcgtccaattttgctctgacgaaaacgaaacacgaaacgaaaaaactttggtagacgaaaacgaaacacgaaaacgaaactcaaaaagtgccgaaaatgtaggacgaaacgaaaacgaaacgaaatttcgtccatccctggttccgataggacaccggcaaatcagaaaattgttttgcttaaaactcaaaaaaattttatcgaaatacattgttaaaatttcaggcaatg

SEQ ID NO: 113369 - DNA, 137 bp, Heterodera glycines
ggtccgctgattaatgcctcactttggccaaatggtgcttgttcaggtgcacttacattttgggccccgaggggcgtgtgacgtcttttggggagagacagcaaagcgaagtgattcaatcggtgatcgaaccgatg

SEQ ID NO: 113370 - DNA, 123 bp, Heterodera glycines
tttttggggtttaagggttgaaaaaccatcctgacatccatttcgatcaatcaaacccgagatctggtgttaaaaagaattgaagcgattttgtgtataaaatgtgaattttgttcaaaaatg

SEQ ID NO: 113371 - DNA, 110 bp, Heterodera glycines; identical to SEQ ID NO: 98226

SEQ ID NO: 113372 - DNA, 257 bp, Heterodera glycines
tgcagaatgatttaagccaaatgcatgtgcaaacaatggaaaagttgcccatggtcagggaggaattttgccaaaaaataaatggtatactgtcaattactgtattattgttgttacaattagcttgatgagcatggctgagatttatctgtttatacataggcgttaccttaatgcacaattttaataatatttgtggtgcttttaaattcaaaacgaaagtctgaattttttaattttttattttgccagaaatg

SEQ ID NO: 113373 - DNA, 505 bp, Heterodera glycines
aatggcgtcattttgacaattatgacatcaaaaatcgtgcttctttacccgaattcgtcgttgcgctttttacttctcaagtttttcttaatttacgcggcgaggttaaaaagaaatgaaaaaagaaattaattaaaaattaattaatttaatttttgaaaattaaaaagagagagagaaagagagagccaatgggtaattaattaaccaaaaataaatatttaattattcatttagtaaaatcaaataaattgaacatttagaactggtgggatgccaattcaactcgaacaaatcgaagaaaagtcaaaaatgagcccatttttgactaaaaatcccatggaaaatgaaatgaaaatttacacgacgattttcccggagcaaaacgccgcacgattgatcacttatgtaaacgcaaaaataatcagaaaagcaatgatcgaaggcaaataattaattacttaatttaattaaattatcatgcattttagcgctgaacaaaatg

SEQ ID NO: 113374 - DNA, 265 bp, Heterodera glycines
tcctgagccattgaagaacattagtgtaagcattgggactgaaatggccggtccaacaaagtgtttttttcaacaaatgaatcattcaattttgaaaaaatgaatgattgaatggttcattcaactcccatccttttgtttgtgtcgtaagatggtgcaatttcctcccctcccctgccattatgcacagatcgaacgttcatccttcaatgaggtgaagtacaccaagtcattgcccagctcggctgaccgttacgcgaacatg

SEQ ID NO: 113375 - DNA, 63 bp, Heterodera glycines
aatttcaaatttaaatctgaccaaaaaaagagtaatgagtcaaacaaggtcaatttgaatatg

SEQ ID NO: 113376 - DNA, 169 bp, Heterodera glycines
ggtcggaacaacggaggccatcacaaaccatgttcatgtcttttgttttttcagccaggcagtgctcctcaacaaccagacgctgtacatcagtggccagaccgggatcgcggcggggtcgacgaatgtggtgccgggtggagcgcgagccgaggcgaaacaagcgatg

SEQ ID NO: 113377 - DNA, 711 bp, Heterodera glycines
ttttggctgttaccgtctttttctcaatctctcgcggccgctgctgctagtctgtcctcttccgctgcgtcttccgttgttgccacttctgctttccactctcatctgctacagtaccctctggtcggcaacagtcagtggctttttcagtccacaacacctaccgtacccccaccgctgaccggctgccacggaacatttccttgtgccaatggtactgtaccgtaacaaggatgtctactgtttgtcatcccatattttttcctaattcattataccgtattccttagtgttggttggactacgtttacttttcagtgtccccccccccccctccgtttttgctttttgtcttcaaattgtcccttttttgcgcagtttgaaattttaaattcattttttgaagtgcctttttcgttttcaaaggtgccaatgcgtccgtctcgcctttccctcctccgtcttcttcttcttccgcttttgcgtcgccttcgctttcttcggcgactctttcggcttcaaataatgaatttgtggaccgaagtaaagaataagcttatgtttgtttctcatcattcggctcattttatcttttaaatttccaaattaattaaaatttaagtcggcgagtcggcccgcaaccgttttggccgcccttacatttcgggacggccgctgctgttgtgcgaccggcagaaaatcatcaaaatg

SEQ ID NO: 113378 - DNA, 376 bp, Heterodera glycines
ggcactgacgtttgtaatatttcattttatattctgagtttagtgagtatttaattggaaaatctttaaatatcttaatttatttaaagaaattattttttgttttcatttagataatttatttttactttaaaaatggagggaaaatcctttttgaagaccccaaaagaaaaacgacaattgagaaataaaaaaaattatttcagtaataaaaaaaatattccaaatgatttatacggaaatagcaaacacgcaaaaagaaaacaagaaatttggcataaaagaaaatgttataagatttatatttaaaaattccgaagaaaattcaaaagaaaatttcaaaaaaattattgaatatttaacagataaagcaatg

SEQ ID NO: 113379 - DNA, 572 bp, Heterodera glycines
gatttcatcatcatccttgaacattgatgtcttaaaattggtttttgtgtttacttctaaatacattcattttaagttcaaatgcatgcccttttaaaaaaataaagcatgtttttttttaccaattttgaattttattatttcttttttttttaaatctgcgctatttatatgtaattttcattaggatgaaaaatttcgaattttagcttttgcattttatatttcttcaattcatctctctacctctctacatacatacaaacagcggtggttttcgaattgatgcatcagaaacgaatgtaagcctttgaattaactataaaaagttttctacaacacgttttttagagcctattaggtttccatttttttacatactcgaaattttattacttcttttttcaatctttcaagcattatttgagcaaaaaaaaatggtttcaaatgttagaacaaacttacaattagtatattttaaagaataacccggttttttcatataaatataattctgtatttcaaggagtttttcgccgggtccgtcagattcaaggacaccgacgcccatg

SEQ ID NO: 113380 - DNA, 788 bp, Heterodera glycines
tggacaacggcggtgagccgaagcggcagcccgacctgttcagcttcttcgaccaatgaacgtcttggccacgatgtgaatgtgtggggctataaacgatggcacgacattctctttctctgatcagtgatcacttaccccatcttttgctgtttcttttgtccaaatgactttttttattactgtttctccttaaagcgatgaccatttcccattttggattaacccaaatgatcacattgacttgattgatgatgataccctttctctgctgctgatgtccatttatttatacttttttccatttttggccctttttcttcaccaatgcgatgaatcagcgcctttctgtcaattgtctcgatcaatctttctttcttcctccccttctgttgtgctttctttctttcccataccctcgagagtgcttcgttctctaatttttttgtcccttcctctgctcttgaggttgcgcaattccaatccataaaatataagtacctatatgcttacacaacaccgaccattcccttccgcctgtccttgacttttaaggattccaataaaaatgtaaaagcattttttaacaaaataaataccagattgccaatttatgcactaattttttgatttgtaaaatttccaattttctctatgtccccttcggctttgttcgtttgttttggcactaggcagaaaggaggacgcaaaatgccgtgcacaaattgtatggcggaatacacacgacgcagaaaagaagtgggagaactttgttatgatccaaaatg

SEQ ID NO: 113381 - DNA, 87 bp, Heterodera glycines
ggcgaagactttcctgtcgttgttcccaggaaagtggtccattgccaccgtcggttgaccacacgcattcacgacgagaaagtgatg

SEQ ID NO: 113382 - DNA, 1003 bp, Heterodera glycines
atttagtcagcccctgatcaattacaaattatttatggacgatcaaattttttgaaatttttttaagtgcaaaagtggtgggtgtctgcaaaaaattttcaccgggtttaaaaaatctaggaaaattagtaagcatttgtagtgctccgatacgtatctctgcaaaatttggtgagccgctgatcaattacaaattatttatggacgatcaaattttttgaaatttttttaagtgcaaaagtggtgggtgtgtctgcaaaaaattttcaccgggtttaataaatctaggaaaattagtaagcatttgtagtgctccgatacgtatctctgcaaaatttggtgagccgctgatcaattacaaattatttatggacgatcaaattttttgaaatttttttaagtgcaaaagtggtgggtgtcttacagcttaacaaggcccaattaagcttatttccagaaaatctcgcatgaattctcatttttaaattttttatagatttttaaatatttggatatttttttggcttaccaaaacttcatcgaacctggctctttctattctcattcaaatcgctccaaattttttttacagcttaactaggcccaattaagcttatttccagaaaatctcgcatgaattctcatttttaaattttttatagatttttaaatgtttggattttttttggcttaacaaaacttcatcgaacctggttctttctattctctttcaaatcgccccaaattttttttacagcttaactaggccctattaagcttatttccagaaaatctcgcatgaattctcatttttaaattttttatagatttttaaatatttggattttttttggcttaccaaaacttcatcgaacctggttctttctattctctttcaaatcgccccaaattttttttacagcttaactaggccctattaagcttatttccagaaaatctcgcatgaattctcatttttaaattttttatagatttttaaatg

SEQ ID NO: 113383 - DNA, 635 bp, Heterodera glycines
aaatttattttaaaaatcaaaaaaatgtttgaaaaaattaattatttgcttagaagcataaaatccaggcctggatccaggtctaggtcgatctctaatattcactaatgtttcaaaacagtcaagaatcttgaaacaaattcatttttttgcctatttttcaaattttgcattaattgcaatggaaaaaacagaaagaagcaaaattgttttgttttctgtgttctctttggcaaaaatgatttagccaaaaactcacaaaatcaacgccatttccaagtcgttaagaaattcgtaatttgaaaatctttaaatgcttccaaatttagcattttggcaattacaaattttttgtgttttgttgaaaaatttattatatttagtgcaaatttataaggaatttttttaaaaataatattggttgattgatttttattataatctttaaacatttaggcatcgtctcggcaactgtttgagcttggccatatccctccctcattattgggaatctgcttgttgtgccgggaaaatgcacaaatggcaaattttgtaaaaaaaactattacttaggtaatttagcgtattttattttttagcaatgcccaacattgaatgtctcttgtcacaacatg

SEQ ID NO: 113384 - DNA, 300 bp, Heterodera glycines
gaacatcccaaaatcaacgaatgcccgtcacctgctacaattgcggccgagtcggacacatttctcggaattgtgagtcggaaccaatgcaaaggatgtaccatcaaaatgatgagccgccgaaaagggaaaatttatttattggtgccgtaaatttagaacaccgagtctgaaatagaacaattcttcggaaaaacaacgaatttgtcggaaaagggtagacttttggaagaaagcccggctgttggtaaaattttggcggccaaagtttcgattttcggtcgacatttggaagcaatg

SEQ ID NO: 113385 - DNA, 145 bp, Heterodera glycines
atttttatagggaaattgccaaatctcgttcagataaaacggcaagaaaaaggatacaacaggggagtggtatagccctgggagctgtcttggtcccggtactgagtgttttagctcaacatttattagaaaaaataacatcatg

SEQ ID NO: 113386 - DNA, 157 bp, Heterodera glycines
agtgcagttgaacgtcaaaagcaccggcgattgtctgaatccgttggcactccgcatttcccccccccccccaatttcagacgtcgacgccctttacgctgcgttggacgcactgaaagtgcactttgacgacgcaaaagaggcgggcgaaacgatg

SEQ ID NO: 113387 - DNA, 418 bp, Heterodera glycines
gaaatgtttttgatttgggttgtatgggcttaaaataataaagaatgagatttttggaaattttattcaaaaccccatttttttttcaattttaacacattttttaccacatttttggcatttttggggtttttacacattatttcagcattttttagcacattttttattacatatttcagaatttttagcacataataatccggcccctatgatttatctccgaaacgaagttagttgtggtaaagaatttatacaattaaaaaataaaaaagcattgaagattttgtataaaaataaaaagatgaaaaatttttttttcaagatgaaacagaatgccaaaataatcaagaaatgaaaatatacataaacccaaagaaaaactgaaaaatccgttaaaattatacagcaaattatg

SEQ ID NO: 113388 - DNA, 300 bp, Heterodera glycines
gagcagctcgagctctacagaaggtatgaaagaaaaaatagtattctgggacttttcagaatcagaattattctccaatgtgccccaaattttaggcccccagccacagccccttgcttctcccagttttaagtcttggatttgtcaaataaattcaagacttcaaattaataatcaaaaattctcttaaaatttttttgaacccaattcaaaaaaggaaaaaaatttgcagtcaaaaaattattcgaatttctccaattttgtttccataatttccgaaagttattcggtatcataatg

SEQ ID NO: 113389 - DNA, 749 bp, Heterodera glycines
tagttcggcctcacgaattttttgtaattcgtgtcgcttgccttcccgagggtttggccccacggattttttgtaatccgaggcgcttccccggtcccatagttcggccgcacgaattttttgtaattcgtgtcgcttgcctggtttggcccctcggattttttgtaatccgaggcgtctttttccttgctcagttagcccctcgggtttttcgtaacccgaggcgtgttcctttctccagtgaccgacccctcgggttttttgtaaccaaggcgtcccccattgtgagcaggtcgctcctagggtttttgtgacccaaggcgcctctcgcttacacggtcggacccatcgagtttttcgtaactcgtagcgtccttcttcatacactgtaagactcttggtgggtctgaagtcaaactcactttgtccactgtttgtccaacttactgctattttgtgaccccgaaccccacacaatttgttcggaagtcgggtagcagaacccaaaagtgagcaaaaataagggatttttgcgtacaaaaatcgcaatagagctaaaggctcttgagaaggcgaaaacggcaacagaattgtatgctgagccggaccaaactctgacctcattggaaaatgcaattctcctggaaagcgcggcagagagaataaagtcagaggtggaggcagtgaatgccaaaatcgagcaaatttggataaccgcaagcaaatggcatgacgtcatacaaaaaatg

SEQ ID NO: 113390 - DNA, 106 bp, Heterodera glycines
tttcttaaaaaaataaatgtttcacaatgtttcaaaaatgcagttgcgcatccccgggccctttttatgtaattaatggtcccttacccgaatttgacccgaaatg

SEQ ID NO: 113391 - DNA, 845 bp, Heterodera glycines
  unsure (1)..(845): unsure at all n locations
aaaatccgcgcantgaaattcagtacccattgcaaaggtgaaaaccaatttggaaatcgaaaaattggttttaatcatggcttctatttattaaggcccatcagattaaaaattagtaaatacaggaatttcataaaaatcgtacaattcacaaaaaaaaaattatttaaactaataaaaagtgataaatagagcgaggatttatatttacaaaaaatcctgaaattttaagcaacaatgcaaaacatttaagaaaatattgaccaaaaatgagaaaaatttagagcaacaaaaaattgaaaattctcttttaattaaaataaaaagggaaaaaaaattgtttacttttgcagttgcaaattaagtgtatgtatttcaagcgttgagataaagtttatatgatttataagattgggtacgacctttttcatttttttttgtaaatttttattttttattatttttaaagttttttatttctaatatctcgaaaagtaggaaaccggtgttaatcttttaatactcatatgaaagccctttttgaaaaaattcttaaaccctaagaattttttgtaaagaatgaattataatcccataattgaatccttttcttaataattaaatatgccgaaatatggatataaaatatggtggacaaaaatctaacttaataaaaaaatttacggatatatttattaatattttttcctccttcttatttgaaactaaaaaaattgctttaatggtcgctattaattaacaataaatgctaagattttgttcgcttacttcaaagaaattattcaaaaataaaaatttgaaatttatagggactaagcctaatg

SEQ ID NO: 113392 - DNA, 120 bp, Heterodera glycines
tgtgtttggtgacctttgatgctggaaagagactcaaaagaagaaaaagacaaaaaacataaatagacgaaaaatgttgaaaagaaatatttgctgtgacacacaacacatacacacatg

SEQ ID NO: 113393 - DNA, 64 bp, Heterodera glycines
ggcatttctccgtgccacttcttccgccagtttcattattcgaattgatcgtgtgagagcaatg

SEQ ID NO: 113394 - DNA, 97 bp, Heterodera glycines
ttttggaaacgatgcgttggacgcatatggattgcgagctttttcaacaccgcttacgaaacaaaacttaagcgccctgcagcgagacctaagaatg

SEQ ID NO: 113395 - DNA, 285 bp, Heterodera glycines
tgtctttgcgatacaattcgaagttatatgagtgataacggcccgcaattcacttcaaaggaatttgcgaagttctgtgaagaacgtggcattacgcacacgctcacagcgccataccatccgcaaagcaatggagaagcggagcgattcgtccaaaccttcaagaaaggaatgcttctcaacaagaaggagaaaaattgggaaaacgaactcgcgaaaaaccaatttctgctgaaatatcggatcacaccgcattaagcgacaggacaatcaccggcaaaaatg

SEQ ID NO: 113396 - DNA, 644 bp, Heterodera glycines
tcaaaataaaaaaaatttgctttttgagtttatcagttcataacttttttgaaacttaatgaatttttttgaaatttcgcaggataatagaaaacacttagggctatatatcaacataataaaatttgattcattttgggcgaagttatgaataatttctgtcaaacatttttaatttgatggtttttgggtaacgcccattttgatgggttttgaataagacccggcaccgtcagaaatagaggagtttctaattgttgtggaaatgcggaattttccgcgctttggaactctgccgcatttttgaactcatgcgccgcttttttggttatttgttttggaaaccctggttaaaaattctgcaaaatgctccccgatttttaaaatttaactgaaaaaattaatttgtctttttcttttgctgtggcgccaattttgcactgcaccgattcttcaattgtaccaaaattttcaagctttggttttattatacccgttttccaccaatttcaagccgggcacccccattttgagatcaccacccccatcgattagacataaacaaaatattgaatattattataaaacaaaatgattgaaaataaataaataatataaatttaaaggaaataatcggctcaatg

SEQ ID NO: 113397 - DNA, 57 bp, Heterodera glycines
  unsure (1)..(57): unsure at all n locations
tntggtgccctcaagggtggcatcgaaggacttaccatgcgctggctgaaaagcatg

SEQ ID NO: 113398 - DNA, 374 bp, Heterodera glycines
agtatcccaaaatcgaattcggatctgggattcggaattggtcgaaatgtatgtcggattcatgatcagtgaccacgaaaacactcgaaaacacatttccaatgacttaagaaaacaaaaaattgtcagtgtgccgcactaaaaataatcatgtccgagaaaaaagttcatatactacgaaacgccaaattaagcttttaaagttttatcgaaggtttattagcattttttgttcaaaaatagttaaaaagctaatccaggcctttttttattatttttctgtcaagcaaactgtaaagccctttccaattttgccttgtgttgatatttttgatttcgctatttcatcaaatccaaccgaacattaaacaatg

SEQ ID NO: 113399 - DNA, 55 bp, Heterodera glycines
ggcaattttattattaatttttaaatatttttaaatttatttttaggaagacatg

SEQ ID NO: 113400 - DNA, 1003 bp, Heterodera glycines
agtcccaacttttgttcgcaagcacaaaaaagaaagtgtttttcctactatttagagcatgtagaatccaggaaaaaaattctttaaaatccgttatgtattcaggacgatcgcttacaaaattaaatttttcgggtcacgctgcgacagaatgaaatcccgtgggattgcttaattcagcaaattttgccattttcaaaaaataatgcggaattcagaacgatcccgtccacaaaatcccgcgcgggattccgctccatatcgggtctcttctattcagtcttataaagttaaaagagtttttataaattgaaaatttaaaaagatttaatatatagaaaacagtctcagtatattaccttgatattccataatttaatagttaatttgaaaaaatgcatactaattttaagctaaattttaatgcaagcagaaaaaacgcttactttacaccaaattgcttagatcattccatcacggtgatcggacaccaaaaaatggcttgaaagcttttggaaaatattcctttcccttatacaatacattgtcactcttctcatccttagctcctttttcaaaaaataaaaaataaattctcattctcattataataaaaaaatcatttatatgaattctttttgctcagttcggtacggacaaaaagcgttattcatttattatttaataattggaaaagatgtaaaacgtgtaatttcattaattaattggcaggtgccatgaacagaaaggcagacacaaaaaatcacaaatattatgtaaattcagaaacatttaattaaataaattgtcaggtgagctttcggttttatttaagcaaataattcagcattttgccattcgttgttttatctcaaaaaattaattaaataaaattaaacaaaatgaatgacaacacaacgtacaatacggtagtcattaattgaaatatttaaaaattacttttttaaaatttttttgcagttttatttggtcttcaaagatg

SEQ ID NO: 113401 - DNA, 112 bp, Heterodera glycines
cgctgtccacaaaggtgaaaaaatgaaaatcctaaaattccactaaattctgtattaaggcttggtgtttgctcgatcttcgacttacaatggacctgtattatgaaaaatg

SEQ ID NO: 113402 - DNA, 981 bp, Heterodera glycines
aggtctgtaaaataaaaatagcccaaaaatccgcaatttttttctctatttaataaattttatttcatctttttatcatttttttgtaaaaagttataaaaataaaagtgattttggaattcgggaccaaaggggggtgcacatggtttttgagtggaaaaatttttctcacaaaaatcttccaaaaatatgtcattagggctatttgaggctgctgatcactaatctgacatcagatttcagttattagatcgttaagccctcagaatccctgtgtgattggggattctgcctcagaatccttgcgtatagagtgatgaatcccatccccttaaacactcttatgtggatggtgaccatccacttagttaatgatatgtggatgtgggcttggtagtgttcagcgaccgaatacggactggatccgtagtccgtatttttcgatccatgtgtgtttttatggacttacgggttttacgggttattgagcccgtaattccatcatacaccgtgtagttaggtgctcagcccgtaacccttacccttatccgtttattcgaaattgatctctaatagtgatgaagatgcttgaaaacgaaaattttccaaatttgtgaccatgattttgatcgaccacaatactttaacaatgatcaatgcttaacctcaagactcgaccgaaaacgaagactcgagacacggattaaggttttaagacgcgagggcacgaatttctccaaaaaattttggtcaaattctctggcgattatgttcaactccccccggcagattatggcatttttggaaatttttcggacccggctttcgcaattacaatcgcccgaattatgttaaatccataataaacctatcttcattagatctgtgaactgttcaattctgctccgacttcggcgctttgttgaagcagtgttgatctacacggatgccgaacaaatacacatagtcgcgcactcaatg

SEQ ID NO: 113403 - DNA, 124 bp, Heterodera glycines
tcaatcggttggtctgatcaattaattgcattcatttgttgcgtttcctttgcattgtccgtttttgccaagatttttgcttttcgtccgttttttcagcttttccttttcccttcccaaaatg

SEQ ID NO: 113404 - DNA, 988 bp, Heterodera glycines
aatagggaaaatatcgtaaatatgtcatatatttaatcaaattctagcttcacatttgcaaacgaaatacatacatttctcaagattttttgaaatttttcattttgttgtcagcgaagatttttcggaagcatacaaaatcattaaaaatttcgcaacatttgggaaaaaaatctattcttataaggtgatgtttttataaaatttgcaaaacactgatccttagtgtgtacttttcgattttgtttttcattaaatttgctgataataaaagagtatttcatgtgattagtggcaatccatggtgacataaaacctgaataattttatgtatgtcaaaaaaatggttgaagaggaagctctgaaattgattgattatgacggtaacactatcataccggtggggcttttcggaaaaacgacaccagaaaccaaaatcccaatttttcttaaaaaaattagtttaaaatctctaaatttggtctttttttatacaaaatctgttaacaaatcacataaaaaatttcaaaaattttcccggcggcgcctatcggcaccgccggccccccaattcccaaagttttttggaaaaagcacgccgcaaaaacattattaatttttaaattttgaataaaatttttcaaaatgctgatttacaaaattttcagttgacaggccttcgtttttatgctaataaaatgttgttttaagtcgttttttcatgtttttattgcgtttccttcgcgctactatcagttttagaaaaaatcttatttttggggtccgaatcttagttttagcctcatctgtccttattttgaaaataaaaacttgaccgccctgggtatgaccgcttaaccgaaaagtaccccaaattctttacataacacccatggtgttttccccctgctgaagttaaattaattaaaatttttagcgttcattttaaaattcaaaacttccaaccaattctcttttcgtcaaaatg

SEQ ID NO: 113405 - DNA, 1003 bp, Heterodera glycines
cggcatggcaatttcaattttgggacaattgtagtacgccaattagagaccggaattcggagaaaacccgtgcccaaagtcaagggatgtgtcaagccaaggggaaaattactgttcttcgatattcgaatcaaaacccacttttaggggtcgggaaatttttttttggaattttgagtgaaacctgacaaagctgcatttgcggctgcaattcggggcaaaaagcgacggagccgtcccaaaagagatgaagacgaagaagcaccattaccgttacattcatcctccatgatgaatttgaataaaatattcgattatttttgcgggctaaataaaacaatattaaatattcccgaaaaatttgcaaaaattatatgggatccttaaaatttaggcatttttcatgcgcccattttcgaatgaatgggggaaacgaaaaattagtcagtccgtgccataattttgtgccaaaaataaaggaagaaatgaccaagataaaaaaatagaattaaaatggtacaaaacatttcatacatcaattagaatttgataaataaatatatatttatttgtgtgtgtgtttgaacgaaaatataaaagagcagacacatcatacagtaaatcaaatcgaccgattcgtactgtaatttttgtaattgttgtcactctcactatctgctggcgcttacgcataaaaagaaagccatacgaatgggttgtttttttgtcatgggaccgaagaaacaaaaatgcatacagaaaacggaattggattggattgatcagctctgatcaccaaacaatgtgacgatttacaacacaattagcagccaattaattgcttggatatgtttttacgataattaatcactttctctctctctcccccattctttccctccgatcaaattaaataacgcccgcccccggctgttctgttgatccgtgtttcagtgaagtgactgggcggaggcctcgagttccggcaacaaatagggaaatg

SEQ ID NO: 113406 - DNA, 653 bp, Heterodera glycines
  unsure (1)..(653): unsure at all n locations
aaaaattgccattttttangcatcatttttagtttggattaaaaaaatgctttttgaattttacttccctttttttggtgttgaaaattttttaaaaaatttcgaaaactgtatatttttactattttatgcctctaaattaaaagtaaattaaacaatttttcattcattttaaaattaaaaatattttatttattcgagagttaataaaaattaatttgatttcatttttttatatttatttcttaattcataaatttttcatataaaatataatttaaattaaaaattaaaaataaaatttatttattaaaaagttaattttatattttttttatatgtaaaattaaattcttattttttaaattttattatttatagattcattatttgaattttttaaataaaaaatgtaaaaaaaggtttttaatttaattttattacaaaaaataaataaaataaaatttaattattgaaaataacatatgttgaccttaattttattatacatataatgtaaaattttttgtacttccttcaattaaataatttaaacaattatttatttatttttccatttaattcaattaaatttttaaaattaacaaattttagtcataattgttaattatatttttattccctccaaaatg

SEQ ID NO: 113407 - DNA, 1003 bp, Heterodera glycines
caaccgatgaaaaaggaataatcaaaaggaacttttgggacgattttcacaacaacagattaataaaaaagtcaccagaaaaatttacaatactggtgcaaaataatgttgaaaagcgaattttaaaaacgttttaaaattatgcgaaaatgaataaaaaaatggaaaaaaatggcggaaaactcttcaagcgcaatcaaatttaattcagcgaactggcggtcaatttcccaataaatttcattatatgtcaaattttcatagccaataattatttaattgcttggcgaatttaaaaaaaatataaataaatgtttttttttttaatttaggtggcatgtcctgatctgcctgattctacggatggaaaggtcaaaaaattaggacaaaaactttactgagataaattttaagttaaagaagcatttttagaattttaatgtaatgcagctgaaattctttgtgtttattcagtctatgtattagtcacaacaaaatgagaattaataaaatacttactaagaagtaaacaatttctctttttttgttttaacaaatttttcattttattcaattgttaaagaaaaaaaggtttttgaaaattcttcgtttagtgtgaaaggtcgatcctttggggtgatgtgagggtcccctacttgaggagagaaaaaatcgagccctaatttgtaagacattaatatttttcgatataaaaaaagaaagaattggatagacattaaaaggatcttagtctagatattatgcaaattaaaaaattaaattctttgtcatacatttttgaaactaacctaagttttcagaaaatagggattgagtaaagccttttcaaaaagccaaaattattgacttatctctgaattatataataaattcccaaaaaaattgaaaaaaaaaaattcacagattgcggaaaatcaacatttaatcactatttaatgcatgtatttaacaggaaacactaactgataaaccaacagaaatg

SEQ ID NO: 113408 - DNA, 543 bp, Heterodera glycines
  unsure (1)..(543): unsure at all n locations
gcgacagattcttctttgtgaattttacattttcatagtttcaacccaactggtcacaaactgtgatttatggctntagtcccttaatggctgcctaatccggtaatccaaaaatgggcatttcgcaacatttcgagttttatttgacccattaaaattaattaagccttttcaaatttccgaatttgacttgtcaaaattgcatttcccttacaaagtccgtgcgtcaacaaatgttgttatttctctgttcatcacggttcaaaatgcattaaaagtccttttcggttttgtgtcctcaaattgtgagggggcgggggattaaaatgaatggatgattaatttgaatcatgggtgagacgcattaagggcaaccaacgaatgaaagaaaggtatttaaaaaagggacggacggaaaagggcggccaaatcaaaacgaaacaaacttcaaattaactttaattcaatccgagggcactttgaactgattggacaaaatgcatttttccaatttagcaaaaatttatttgcatattaaaaatg

SEQ ID NO: 113409 - DNA, 584 bp, Heterodera glycines
cgttcgatcaatagaattccaattcgaattgaagaatgtgctgagaatgaaaatggatttgccgatgattatgcaaagtagttattttcatccctttaattccgtaatttcccattcttttccgctatctcttcgattccgaccaatccgacagcgacaatgccgaagaggaaaacgaagtgtcggtccaaattcaaagccaacccatcggaggccaccgacgcaaaaagacgaaaagctatcggccgattgaaattgtggacggatttccgttgaagcgaaacatgggggcgcagaagtggcgtcgtgtggaaaacagttagtttgtcttttgttcttttcatttgtatctttgcttttagctaggcttttgacgagttttgccgacactcaggacatttgctttgatggttccgatttaatccccgagacgatttctgcgttctcacgccttttgcgagatgaggcaaaaatgaaggtttttggcttactattgcatttgtcccatttgagtgagtcttgcactttttatttaggtttggaatgacttcctggagaaagacgaatcaggacagaaaaagatg

SEQ ID NO: 113410 - DNA, 147 bp, Heterodera glycines
aaatcacaaaccggcgaagtgaataaacaattattttattcaagttgtgaagacacaaaataaaaaaataagcgaagagggacggagggcaaagggcaaatattgattgcacaatataagcacaaataaatggatgacaaatgaatg

SEQ ID NO: 113411 - DNA, 470 bp, Heterodera glycines
aagtaaaaattataaaaaatgaaattgaaatacaaaaaaatgactatgatattctcttggtgatgtgggaattggctgaggaattcggacttggcaagtgaatataatttaaaaataatataacaaataaattggggtaaacccaactcatccatagctcatccatgcataaaaatgccatgaccaaaaccgctcaacgtaaaaattctacgatcaagacctcataaaaaatgccaagacaaaaatgccacgacggcgacccgcgtcgtgttgtggatgagttgggcgtgacacaactaaattaattattttatatatgtattaaaaataaattttaaataatcgacaaaaaaaacatttgcacagattttgcaaatatttgtgaagctggaaaaagttataaaaaagaatataacaatgccaatttaattcagaagggattatataatttaaaaagttattccataatg

SEQ ID NO: 113412 - DNA, 1003 bp, Heterodera glycines
gttccattcaaaaatttttagccgcgaatttttgtgcaatttttatttcaattttagtccattctttttttgaaaatttcatttccatttgcttaattttttccttaattttgttaaatttttccacaatttcttttcttttgatcaattgcttttaaaaatgatcagaattaagtccattatttgttggcaattgttcaatttgatcactatttgttgaagtttctctttctatttccaaattttcattaaataaatgattaaattgttctcttgtaataattgtataattttttcatcattttttgtctcattttggccatccgtttgtccaattatcccattttgatcagtttcattctttccattttcatccgaattttcttcccatcttttgccaaatatttgatcataactttttttcttcctttattccaccagcataaattttattctatctattatattagattattaaaaaatgtataaaaagtatagtttataaagtaatatattagtaatattaattctataaatcactaagtagaagtgtgaagaaaatcattataaaaaaacaagtagaattttctgaagccaagcaataaataaataacagcataaataagggaataaaaatgaatttgtaaaagtatttgtattagattttaatggttttattcagaaatatgaaaattaatataaaatgaatataatttataattacaaaaaaccttaaaaaataaattgatttccttggattttcatcaaagtatgattacaagaaagccctaagtagaattttgaaacatcattataaaaaaataagtagaatttgcttaaataattagcaaaaatttgagaataaaaccaactagaaaaagaatttttttattaattttattcagaaatatgaaaattaaaatattattttcaatattaattttcataaatgcaatttttaatatttatacgagaaagataaacgaagaaaaaagcgttgatg

SEQ ID NO: 113413 - DNA, 280 bp, Heterodera glycines
ccttcaaaaacggaatgtgggtattactgtgtgtcaatgatcagtgatcaggtttgcagaaatgtgggcattgacccgaaaattttggttacggcaagcgatcagtgaaagagattagcactgtgtaaggcagtgagtgatcacttaccttcaaaaaaatctggattacggtaagcggtgtaagtcagtgattgatgactttatctccaaaaaatttggattacggtagatgttttctgatccgtaaaaacgttttatgaattatttttgagtgccaatg

SEQ ID NO: 113414 - DNA, 139 bp, Heterodera glycines
ttctttttcataaatttttctttttaacaatttatgcgtaagctaaatacagctaaattaataatatgacaaatctgattaaattattaagcaaaattcagtatttaaataaaattgcattgtttgttcattcacaatg

SEQ ID NO: 113415 - DNA, 1003 bp, Heterodera glycines
caatggttgatgaaattgttgagaaattacaaggaactaatagacccgccgcctgcaaaaattctgtattgctattcagagatgaatgagtcggttcttgatctgatgaagcggggaattgagacgcacaacggtttgccggatcaagcgttgatccagagccagccgaaaccactgctcctcgtgcttgatgatttaatgttgaatgtgggagcgattttctggatctactgttcacacgtggttcacataactggaatgtcagcgttatttttgtcacccaaagcctatacgggcgtaacattagaacagcgcgagctaacagccattatttggtgctgacaaggaacccgtctggtcaactccaggtcagaacggttgggtcacaacttttcccaaaacgactcaattactttatggaggcgtacaatgaagcgactagtcaaccgttcagttacttggttataaacatgcacccaaatgctccggaaaatgagcggttgacaagcaaaatattccctggggagagccgtgaggtatatttacctgtagaataagcgtaatgaacgaaacaagtgcgcttaaaaactatttaaggaagggaaatttttttggttcgcaaaatgtacgagttcagtccgtccatacattcgcgcaaattctgatttcttcaaaaaattagcctcaacaaaatcggataaaaggaaaaacgatttgctgaaaggcgcatccgtagaacaaattctcggattggttgagatttgtgcaaatattttaaaatttaactttcgcctcaaccggcgacagaggagacgattggccgtgtacgcagactattaccgagcaattgcacgttcacgtagtgagcgcacagccaggcagaggctacaacagggcagcggaatagctttaggagctattttggcgccaattttgagcgttttggctgaacagctggtccagaaaattgttgcaactccatcggcacaacaacaacaaaatg

SEQ ID NO: 113416 - DNA, 932 bp, Heterodera glycines
ctcttaatcatgccgtgcacattattcgatagaaactccgcgctcttttgaccgccatttccaccgactcaatacagggggcaccgatgtattgccgaacgaccccacttccctggggtatattagcgttgccgccaagaagctctcgcagaaaataagcagggcccaagccctcctaaaagactggacggttaataaggaaatcaggtagcaggaaaatgctttatatccgggccatgaatggaaatgaggggaatttgtcctctttttgggcggctttttcgcacataatccatgataatatttcgcttaatggtctctccggggtagcgccctggtcttagtcgattggttctccctaattgatcataattactcaattgttatagactctgaaagggtcgtgctaagcaagcggaccgactccgcagcggttccaatttattgccgagaacgaccctacttccctggggtctattagccttgccgccgaaaagctctcgcataaaaaaagcaaagcctaagccctcctaaaagactggacggttatcctttcctccccgagtaagaaatcagggagcaggaatgctgacaaagttagaaaaaaattgacgggatccgggccatgacaccaagagccccaccctgcaaatctccgggcaattcttttcttttttgatttttccgtatgatttgccccgccagcggatgagaagcaaaaacattgtcattacataacaaattaatcactcgccactcattcataataaatgaaaagcaacggactgaaaaaagccaatgttagcatattattcagcattatcgatttgtttattaacgtcaataaaatgagaaaaaattgagcaatattaatataaaaaaacaatattatagaatatttcaaacaaatatttccattttatgtaaaaatg

SEQ ID NO: 113417 - DNA, 273 bp, Heterodera glycines
atatttagcctcgtttaaaatgactggtggggagaaatgcgagcaatttcatagaaacctcagaaaatttcgaggcaaaaaaaaccttgtgataaatcaaaatctgttattttgattttcaagctttacgctatgcctcaaaatgcccacttttaaaagtttcaccgaccttttctggttacagacttgacgctctcttatcagactttcttttcttttagaaatgaccccggcaagttcattagtgttgtgctttctgccctctcggcaatg

SEQ ID NO: 113418 - DNA, 293 bp, Heterodera glycines
tcgccggccgaccatggacacgagaagaccgagagcttgttgccgaacgcctcgatctcggggttcaacgggtcagacgacagacgcggcagcacggtcggcgagctcagcgagcggcaaccccactcatcgccattttaaaaatgcgctaaaaatgatcaaacccgtttttagctgaatattctgtcaatatttccctattagaaagtgatcctgtgcattctttcgcctctcctttgtaagtatgtttttgtcagcctactaaaagtgcggcggccgacatcattccgatg

SEQ ID NO: 113419 - DNA, 343 bp, Heterodera glycines
  unsure (1)..(343): unsure at all n locations
agggtcggattttgggcccatttttcacgcaatgccctttttcgggcganncagagccaacangnaccgaagcaaaccttttaagcggagaagagcaggggccgcggacgagccggcgcancagccgcaagcgacgccgagaagagaaacgccaaagngacaggagggaagcgccgcccaggaaaaagcggaggaggaggcggaggagaacgcagccgaggggggaggaaaagggcaaaccgaaacggaagaaaggaagcagcaaaaagaaaccgcccatcggcaagaggaagtcattggacaaaacgaggagaacggaagcagagagaaaggccataaaatg

SEQ ID NO: 113420 - DNA, 982 bp, Heterodera glycines
tgagaaatggaaaagaaaattgaagagagagaaataacacatggaaagacagagcagagggaaggagagagtgtgcgtatttctcggcccttctctccctttttccaacccatcataaatattcgattcattgcctgttccttcactctttcccacgtttccttagccttgcgctcggtcaatacagcgagcaatgaggcctaaccgagctgctgttattgctgattgaaaacttttaccaattacccgccttggcctgcgaaagcggtgccatgtgcaatttttggacgccctccggggcttaaaaacgaagcatttggtttttgcctctttccccgctcatttgaatcgcattagagaaacctcttaaaggaatagcccgtagctcagtcagttaggaaaatttttaggccgctgatcgtgattttaaggacagaatcactgatactgaccgtaactcttaaaaaatttaaattctttttatttctattactaagtatatattatttgattatttattctttattttttattaaattataaattgttcatttgaaaataatcagttaataataattctaaaaaactaatgaatgtgttgaagcgttgccaaaaataaataaaaatgcgatcaatcggtaagacagataatttaattaactcaacttaacaaactacgaattttatttgattttttttttaattttttatttttgatgatgcatttccataaaaattcattgacatcagaagtgatttttattaatgaatgtagctaattaaattattaagaattttattttttatgagatttaaatcctaaaaaaatttcatatttttctcaggcactacattatttatttattaattgtcccccaattataagtaaatacaataaaaaaatgtatgttgccactttcaggcaaaagatcaatataaatggaaaagtcattaaggagttagagttgataaagtaaaaatg

SEQ ID NO: 113421 - DNA, 96 bp, Heterodera glycines
atgcacgaggggcgcgaaaaagtcaaaagtgagattgaacaaacagcggaactatgagggaaaattgtgccgaccgatcagcaacagattgtcatg

SEQ ID NO: 113422 - DNA, 1003 bp, Heterodera glycines
gcgagtgccaaaaagagtgaatgccaaaacctggactgggaagtttcgtaaaaaaagccttcttggcggctatcgttttataaacgccgcctaggctggcttttgttacgaaacaaaaaagcacaaaaaaaatctttctttttttaaatttaaatgaatgagtggcactcatcaaattaactttttaacctttatgaatgataagagtgataaaaaatgtttaaaaatgtttaaaaaaatcctataaaatgtgagagagaactgcaactgcagcacaagtgctgccacattcacagcgcggcggcggcatcgtctgtacctttgcccaatgttcggttgctgacccatgcaatgtgggcagctgcaacaacggcaagttttttaagaggaaattctgattttatactgagaataaattttctggagtcgagactgagaaaaattaaagtaggggttgttgctccctgaccctcgggcagagaaaagtcacgaatcggcggggaggaaattccccgacaaaagtttgtcggggatgggtggagaaatgaaaattttaaaaaaatgttagggcgagcgacaccttcgttggggaggaaattttcatgaaaagttgagaaaaatattaccaggaatttttctaaaagaaaaatgaagaaacttatttaaaacatgtcagacaaattaaaatttcttagaaaataaaaatttaagttttaagcgtgaatgatataaggaacaaacttagaaaatccaacatacagtatgttcgtttttacaggttttggaaatatttcgtaattaattaatgggaaaaagtcatgaattaaaaatattttgaatattttataatgaaatttataggatgaatattccaaaataatcgaatcctcttcctattagtgtccctgcaaaaatttggttcgtttttgacaaattttagaaaaagtatgggggatatggggaattaaaattttcaaaaaacaaattaattgatggaaaaatg

SEQ ID NO: 113423 - DNA, 476 bp, Heterodera glycines
atgatgagggtgatgacgctgattgcggcgccggtgcctgcctttttcggtgcagttgcgcaacagtttgtcacagcgggcgctttgttgcctttgtcctcccctgaggggtcggtgagaccgtggccaatcgctgccctcctccccccataaagcgttccagctttttctgtatgctttagcttcccgttttggccaaaggggaggaccgccccccgccccgttgtgcagcgtttttggccaagggcccaccccccgtgcccccggggggtgaaaaatttgatggtataataaaagggggcccccgttccacccctcagggaagtgtcagtcggccacaatttttgagccttcaaacaatgttttgtaaacggactgacaacactctttgcccccctccccttgtcattggcgtttttggataaaaaatttaaaattaattattttaggaatttaaatttattttttaagttatg

SEQ ID NO: 113424 - DNA, 68 bp, Heterodera glycines
gcccgagtgagtgggggcaaacaaataaagtgaaaatggaattttttaatttgaattgctaaataatg

SEQ ID NO: 113425 - DNA, 231 bp, Heterodera glycines
aatggtgcgaccaaagaatggatatggattccattacaagtcaatggccaccagatcaaacttgcagccgattcgtgttcacatttgtcgatcatacagcttccggtttggcaaagtttaggcgaaccgaggttggaaaaagttggtaaattagtgggttccttttcgggccacaaattgaagttgttgggaagtttcaagtgtgacgttctgttcagaggagtcacaatg

SEQ ID NO: 113426 - DNA, 148 bp, Heterodera glycines
tgtaagtgccataattatttaaattgacgtaattttcaattgtaattgaactctttgataagatttcaaaccgatgtccgagcaacaagtgatccaacaagtgctgcaaaacaaaaagcatgagaaccaaagcgttgccgaaacaatg

SEQ ID NO: 113427 - DNA, 92 bp, Heterodera glycines
attgatttgttaattattgaataattaatgatgaatgtattaattgtttttcattaattaatcccccttttttaaatacagtgtcatttatg

SEQ ID NO: 113428 - DNA, 747 bp, Heterodera glycines
aaacggatgatgagtgatcagagattttggctactggacgaaaggggggataattgaactcattggtgctgggggtgatggatgcgatataaaaaaaaataaaattgagataattgttcaatgtttgttcatcccatgattggtcacacggggctcatttctgagcgcccatctcgccaaaaaccgctttgtctttacaattttaaaatgggtgtggcacctggcccgacttttttgcgtataaatacgggctcaccggatggcaatgttcatttggcatcccattttcaaattcgctattcccatggcaatcaacatctccgacaaaaaatcgttgtgcaaccaaatcctcggccaaacggacctcaccgtgacctcgagtttataaccatcagcggtccacgcctctcgacaccccgcttcattccttttgatgaagcgggccgttgtaggtgttgtaagggaacggagtccgaaattgacactgtgatcacgaaagaaggcatcacgctttggtgcacccgcatagagaaggcccaattcatcccgttcgatgttgtgtatgatttgccgggtcattgttttttccgtctgaaaaataagtctcgtgtgttcaatataccctatggcgacataccctcttctgacacgcacaccactaaacgacggacacacaccaatgaccatcaacacgagctgaagcgcaaagcaaaggtagctcttgacttagtggaggccggactaatg

SEQ ID NO: 113429 - DNA, 230 bp, Heterodera glycines
  unsure (1)..(230): unsure at all n locations
tcgtttcgatctanttttgtctaacactggggtttgacccatagtgtaaccggtccgcccaaagtcccctaccccccttattccgctattctcaccttttcagtcgctccttcaataaagctaattacctaattaagctttttctttttgctttagttctgtacacaattcaattccgaaagttctttaaccatttttgcacctcaattctgcgaaaacactttttgatg

SEQ ID NO: 113430 - DNA, 652 bp, Heterodera glycines
caaacaaccagtttttacacatttttggccataacttttttgaaacttatctaaatttttttaaatttgtaaaaataggaatttgagttggattaacaataaataaaatttgaacaattccgtcgttttgcgatcaaaaatgttaaaattttgaccaaaattcaaaaaatatatacaaaaaaatttaggaaacctaatttctgcatcggttgccttggccttacccattcacactgaaatattgttttttcactctaattcactttacctattatctctaattagcccccctcccctatctaaggaggttgaacaataatcatccggggggataattagagatatacggacggtatcagctcaatcaattttgaattaggatacggagaatccaggaaaaaatatatgcatttacaaaaataaggaagccgtgtaaattatgtatgtattgaacaaaatcagcaaaacacccttccccattactctctctttatatacgcataaattaatgcgttatggccattatttttggccaacaaatcattttaatctccccccatccgttcatccgttttcaaatctctcacttttattttggtagatatataaagaggccgaaaagacatttttgatgcataatagagaaaaaatg

SEQ ID NO: 113431 - DNA, 576 bp, Heterodera glycines
taaaatgaagaaaaagaaaatttacgatttttaaaagaagatttactggttttttcgttatttaaaattttcaaaatttttacaaaaatattactatttttttttataattttacttttcataaaaagattattgactttctttttgggtttctcttagtgcagagaggggccattttagtgacgagcttttacgagctttttcataaatgtggacatatcacatgaaaaagcgcgaggcaaagagaataatcatcattgtgaattaaacataggaaataatttcatttgtaaaaaaagaaaaaaccatttgctatgctttaataaaataaataatttttattttatgtaaaatatttttaaatacataaaaattattacttatgcggtaatatttttaattaaattatttgtttttttaaaatgaacagggcccggttaaagaaaataattagctctgttattttttttttataaattctgatgtttttttaatttatgtcatggcatattttagcttttcaaatttagaaaaatcagtcaaaaattttgacaaaatctggcatccagaaaaatg

SEQ ID NO: 113432 - DNA, 55 bp, Heterodera glycines
agtatgttctttgtgtttttttatttctttttttctgtttaggcctttgaaaatg

SEQ ID NO: 113433 - DNA, 161 bp, Heterodera glycines
agtgggggcaaattactcatcatattttaatactcaaacccggtgtttttatccccgaaattaatttatttaaacgccattttcgctctcgaggaaaggatattattttctacagccaaatttctgtttgtgaattccgccgcctctttgtccaggagatg

SEQ ID NO: 113434 - DNA, 82 bp, Heterodera glycines
atttggcttttcactgccgtcgacatctgtcacaccaatcggcgatttggtgcctttttcgacaacaccaactgcgccaatg

SEQ ID NO: 113435 - DNA, 194 bp, Heterodera glycines
tgtgaattcaattcatacaatgtgaataaaataaaataaaatttaaatatgaatttttttcaacacgattttattatcatataatgatctttattttttaattttgcaattttaatcacaaaattacttccaccaaagaaggttttgtctgttccaaaagccaaaaaatcaaaaaagcattcgttgacaaaatg

SEQ ID NO: 113436 - DNA, 91 bp, Heterodera glycines; identical to SEQ ID NO: 98538

SEQ ID NO: 113437 - DNA, 402 bp, Heterodera glycines
atgctttgcttttttgctccttaatttatgctttctttttgttagttattaatttattgctgtgagctttcttatttggtttgtctacggaagggccgaaacacttagtttttttaatttgtaatacggaagggatcgtactgactaggcccacccttccagttaatttttttggcaattgtcgtccgcaattgtacggtccgcaattgtcgtaacacctataaaattcgaatgtcatcattaaccactttttaatcaacaaaggacgaattcgcgtcatttcgacgtaagatattttgtttaaataaaaaatataaaaaacaatcaaaatattttaattacaatttatttatttttcatttttttagcaattttccaaatctgagcacattggaagaaatg

SEQ ID NO: 113438 - DNA, 934 bp, Heterodera glycines
attttatgtgaaaattacggatcattaaagtcgaatttatgttataattttccaaaatctgtaaatgtggaaaaatagaggcgaagaaaaaaggggtgcactattttctaggcaattgtcttaaataaccaaattataaagaaaagtctgattcttaattgttaacaaataaatatacggtagccctttaaataaaaattgaaaaaattgttttataaaaaaatcttgcaggaactcgtctcgaaaaataatccaaagtaccagttgtgggtctaaattacggaaaaatcgcaaaaatccgtaacccgtaagccgtaattacggggtccaaaaaggccgtaatttccgcacgctcagccctggcctatgggctcattttcaattttttttcactttataacgaatttactctatttatcaatgactggtttttatttcttttaacatatatatttttttactctataatttatatataaaattgtatttttcataattaatttgtttaagatccaattcaaatttatgtattttcactttggatttgaacccggacccccaaaaatacaaatgaaccaacttaccaacaaattttgctctatctctttcgcttctctgcagtcgggaaaggccctcaagcacttaaacctatactttttgaggctctgtaacttttgaagcaggcaaaatttaccgctaaaattaaaagttcacgatagaaaatgactatgttctatccaatgtttatcgtttatatgtattttccagactgatagcttgggatgttcctttattagttaaaaaaattcagaattaaaaaagagcgtaaaaactatgcaaaaatgtaaccatatagcgtaaatttatttagaaaatttcattttgacagatcaccttaaaaaaacaccccaattggcgcaaagcaaagcgcatg

SEQ ID NO: 113439 - DNA, 243 bp, Heterodera glycines
  unsure (1)..(243): unsure at all n locations
gctgaaaaaatcgtcaggcattgaaaaggngaagaagtaaaaaaagattagcagacgatggaccaaagcagacgattgacgccttatttttctctgttttattctccctttgataaacaatgattagctaatttcgttagcaatttcccttcgtttctccctgttctcttattgtctgtttgttttttattttgtttttctatgttttgttcattacaagtgttgtactttcttcgctcgatg

SEQ ID NO: 113440 - DNA, 200 bp, Heterodera glycines
tttaaaaacaataatgcaatttgaaaactgaaaatataacgataaagaaagcatataaatttgaagtttgtttattttctatgaaaaagcaaaaaaggaaattttttttttctatcattagaaattgaacacatgaccatgatcacaacaacagtcttaatttttaaaattacatttttagagtaatttttttatctatg

SEQ ID NO: 113441 - DNA, 276 bp, Heterodera glycines
ttggttggtgccgaaatcaaacaaaatttgccacttcaatttcaggttttgtctcaatttgaaaatggcaattatttcgcagagatgaaaatactgttccagtcgggttctcgcttttgttcgggctttgccatcaaaagctcggcacactttcgcaattatccgtcgaatttattcaaccaaataattgaggtcgctttatgtgttaatacgtcattaattagcacagcatttaatatttagcatgctctgaccactcgccaagttcaaaaaatg

SEQ ID NO: 113442 - DNA, 110 bp, Heterodera glycines; identical to SEQ ID NO: 98226

SEQ ID NO: 113443 - DNA, 1003 bp, Heterodera glycines
atagggatgggaattttacgtaagaaaaatcgcaaaatatgtaaataaaatatgtgtaaaaaatactaaaatatgtatgaaatatgtacaaaaactcccaaaaatgtactaaaatatgtaaataaattttttaaaaaagttattttttcgaaaaaaaaatcttcgtataggcttagaatcaccttttaatattttaaaattaatttttgatatctcatttttgaaaaaacaacgatttttagagatacattaaaaaaaaattgtttttaaatttttcacaagaaattttataaattttcaaaaattcttcctactttttagagcatggagaatccaggaaaaaatatgcctttgcataaaattcccacccctagtcattacaattaaaaaagaaagctaaataaacacaaccgcttgacaatgcatttggccatgagatgaccaaagtcaaaaagctcgatctttaaaaaaaattaacaaatatgtgaatattataaatttttgtaccaagttcacaatttgtgccatttggaagtgccaaatttatcacaaaatttttgattaaaaagtccagcaactccctcacactagtgaaaaccttaaaaatcattatcacaattgaaaaccacgagaatatgttaagaccagggctgccagattaaaattttcaaaagcctcatttggcatgcaaaaaaacctcattttgggtcaaaaagcctcatttttacgaaatttaagcattttgtgaaaagctgagcacgaaaaatcgaagttgattttttgcggcgctttttccaaagaacttttggggaataggggggccggcggcgtcgataggcgccgtcgggggaaaattaagaatttttaccatatttttaacatattttcattgattggaattcaaaatttttatgggacgggatcccgcatatataaatcccgcaatttccaaaatgtgggattgcggattgggatcccgcaaaatcccacaatttccaaaatg

SEQ ID NO: 113444 - DNA, 1003 bp, Heterodera glycines
taattaattgatcattagtggtcggatgtcatcactatgaaaattcattaattaacatattgttagagaatgtatagcaccgccgccacgcaattagtgagtgcctgattagctaattgatcattagtgattgaatgccacttcattgttaattagtaatattatgccatttaattgatcattagtaattaaatgccactgaatggatcattaatgatggatgttaccgtcatgcaattagtgcgtggcgagcttattaattattagtggacggatgccactgctacacaattaattgattgacaaatcattagaaattgtataagatcgctgtcacgtatgagtggcacactactcccccccctctcagtgtgccatttacacaaaaattagtgccattatccgatcattttcttccccaaacagttccgcctcctatttggtgatcgcgccaaaaattgtgcggcccgggctgccctatgccgtgtcagtgaacattctgcgcagtgcggagcccgaccacattgtccgggtggagatcagggacagcaaaaatgagacgatggccgcgcgggtggtcagcaattttcggaccggtgagaattttttttttttaaatttcgaattttcaaataaattttcaaccaaaaacctaacccaataggtgataaagccttcaatttgaaaaattcgaaattttagaattttcataacggttttagaaatcggaatttaaaaacaaaaattcaactatgaatcatagaaaattaataagaaatttttttttaaaattttgaccaatttttcaaattttatgataaattgctaagttctttcaaagattttccaaaaattgctgaaaaactaaaaaaaaaatttcttgcaattttcttatagtgtataaaaaatttctaggtttttttcaatttctaaaatgaaaagcagggtgggggaaattttgttaaaatttaaaaattccaatcctttcatatgcgcaggaatg

SEQ ID NO: 113445 - DNA, 555 bp, Heterodera glycines
aaagtttattagttcatttcctctctcaataaaatcttaaaaataaaacaatatattttaaatgtttaaaaatatctttttggctttgtccttcgcaattatttttatttaaacatataaacaatatagtacaaaagaagtataaaattactaaaaaaattaacaaaatccaatgagacaattcagggaaaaccctatagagtttgtctttttcaaataaaaaaagacaaaaattaaaattactttttacgaaaatctgaaaaaaaaacaattttttcaaattgtagtttatatataataaattttatttttgaagcatatatttaaccgatacatttaattgattaacgtcatcattaaatttatagaatcgccttcattaataaaaaaatgaatttatattattatatttattatttctttaactgtttttgtttcttttaatgaattatattcaaattataacttttagaatgtttcaaaaacgtttggattattttttgattttttacacatttattttactgctgataatttcagtgcaagaagaaaatg

SEQ ID NO: 113446 - DNA, 389 bp, Heterodera glycines
ttgttcttcctcatcaactttgacctccgcatatatttgttatttcttcactgcataaaataaattggctgttggtcggacacaacagttcactggcgcagtcagcagtgcaaaacaaagcgacgaggcacaatcggagttaaataaaatacgcaaagtaaagcgttcaactgccgatttcaaaaacgcaaagtaaagcgtacttcttctgccgacttcatccaacgaaaagctcaaaaagctaatttaaaaacgtgaaagtaaacacgaattcgttttgtcagctcagtaaagtaattctgtctacaaagctgaagtttcacaaaagggtaaagtaattcccacgtcaaatcatcagcgtcaaaattcgtcaacattcacaaaggatg

SEQ ID NO: 113447 - DNA, 958 bp, Heterodera glycines
attttgaatttttttcaactatccttccacctaacatatttttattcagttattttaatttcttttataatgctatttgatagagaattgtttgctgatcattttaaaaaatgtttaatgactctatcattatctttgaattttttatgatttttgaaaaattttgatatttttaccgatttttcgaaactttgatcacttttttctgatcagttttggggtcaggaccaaaaaagttgaaaattggctatagcaaatcgactatgctctacacgataaaagtggttttaacgtgatttcggaatgttcccttgtcagcatgttttaggctataacttttttctttgtcatccaaatgcgacaatccttgtatcattcgaaagctcttcacattctatatagcctcacaaaaaaaaactaagattttctagcatataaaaaagttattaagaaaaaaaaaatttaattttacttttgcaatcttcatgttataaatacaacttttttctttttcaaccaaatataacaatcttggtatcattcgaaagcttaatgtgtttagaagctttttctaagctattgcttggcaattagacaaatttcaaaaaatttataacatgcaattttaaaaaatcaatattttgaagtttttcttcataaattttttcaaatcttaaaatttttttgctttttctaaggctaatagagtatgtgaagagcttgataccaacaatgttgcatttagttgacaaagaaaaacgttagatcaaaaactgggctggggccgaaccgtgcggggccgaactgagccggtccgtgtgaacacattaaaattgctcaaatgttcgtgtcgaaaattgtcacttttacgcttttgcattgatgatttttcagattcgccgactcatgttgaatttgaacgaattggacggtggtgacctaacattggacctggatg

SEQ ID NO: 113448 - DNA, 177 bp, Heterodera glycines
ggtgatttgttttttaaaatttggcatattttccattattttgtcttgtgtaataactcaaggcgttaagacataagcagtgacgactcgtccgatttgctaagttccgactcgactttatcagcggatttgtcatccgacgaactgtctaatccgtccactgttcgatctgtgatg

SEQ ID NO: 113449 - DNA, 411 bp, Heterodera glycines
ccatttattaaaaattgctttatgccaaagccatttattaattgaaaccaaataaaaattaaacccaaaaacatttcccattttcaaaaccattttttaacaccaaaaacaataaaaacaaaacataacgccacacaaattcaaacagtggcagaaacatacatacagacactcaactttattatataggatattttaaatatattaacattttgttttacgccaagctttttttttaacctttttaccgtcaatgaaggaaactcaacattttttaaattacctactcggtttttttcgtttcttccatgatcaattttgtcaattgatgatgtatgaaaattcctttagatagtaaagttttcgttattgactctgaacattattgtttgtcatcgaaaaagacaaatg

SEQ ID NO: 113450 - DNA, 353 bp, Heterodera glycines
ataactaatcattaaaagcaaattttaaaaattctataaaatttttcttatattgaaaaggcaaaatttttcataaaaattcgttaaatgaaaactaaaaaaataatataaatgattcgtaaagtaaaaccttaaaataaatatgtttttcccatttcctttgtgaaatattttggcttttcaattcacctttttttgtaatcatttaaaaggagcaaaagaattcttttatactattttcctataaatatcagcttcttttttacaaaaattctatatcataattcttatgaaaataatttttatttttttttgtttattaattttttgtagaaaaaatcttacaaaaaatg

SEQ ID NO: 113451 - DNA, 1003 bp, Heterodera glycines
  unsure (1)..(1003): unsure at all n locations
ccaaattctaagtcggtggtgccgttattcacatcactcggcgccctcgcctgcgccttttgctgacagtactcaagcccaagggagccacctctccctttgccggccactgccagcttcactcgttcggcgcctctgcctgtgccgacgatcgcagcactcaagcccaagggagtcacccctccctctgccggccgctgcctttccttagggagtccaatttctcccgcgcaaatctttgtttgcctccccgacccctccgcctcactccccttgggaaagggacccggacggcatcgcgaatcggaacggcaatttgaggagtgaggcggtgccagtggaacgggagaaactcccgaccgaacagaggaaaggagttttcgccacactttgtatgtaatggaattttgaatggacattttcccattatagatacangttgatgagggntccgcttgtaatcgaatggatttgtgctgangtcgccaacaaaaataaaattataaaacattatntctatgctttatcctattctatcatttttgttttatcatcacaaatacgtacaattattaattatgcaataaataattaattatgtattcattcaccttttacgccaaattgtccgatgaaaaagtggtggaaatttgtcgacgaattaatttgtgatgattttgtcaaaatgtaaaaaagtaaataaattaataaattacttttgtcatttatcggtgtccacaatctctgctatggtcgtttgtccgctttttcttctgttggtggcttttcccccatttttttacacgtcgacacaaaaaattcagtgattggtccaacggattcaccccacatcaacaaattccatcccaccactttcattcatttcattttatttaatcatttgggaaataatatttattcataaaataaatcaaataattttttaattttcattaattaaatagtattaatattcattaattaattaatcaattagacaatg

SEQ ID NO: 113452 - DNA, 262 bp, Heterodera glycines
actgtgaaatgaattataaccaaaaaaccgtaccgtggcccgttgaccctcaccgagaaatactgtgcccgcctcctcccctccccagtaaaccgacctcgtagaacagtgggtacattctgttgcataggtggaaacggaacttcgggaacgcattcaaacaaccgaacaacgcattgaaggagtgaaggaacggctccaaaacatcgagtcggacgaacaggagttgggccgaaagattgaacggcgtcggcgcgaaatg

SEQ ID NO: 113453 - DNA, 718 bp, Heterodera glycines
aacgtttttgctgagacttcttggtggttcgccaagagtttgccaaatgaaaagttcgaactttggaggcgaacagtgagcacataaatgatcctgtaacgagaaatacccgaattaaatggataatatttttaaattttactcaattctcaatcatttggctcaaattactaaaaaggcactgccagatccgaatttcttatatttttgccaaaatttggaacaaaatgcctaaatttggcgaaaatggctaaaatttccctttttgaaaatatgaaatttaatccaaaattgtaaattaatttattaaatattttaagattttttttcgaataaggacaattttgaaaataaattattaaaaaaataataataaattaattggaaaattgttccatttcttaggggtgtatttcatttttgttaaagaattttccgaaaattctgaaacaggcattaaaaatggcgaaataggcacaaaaataggcattataattccccgtagacagcccaaatagctaaaaacgcgcttttcgtgctcaattgtgcgtattaaatttaggaatttatcaaaaaaatgacgctctacaataattggccaaaaacgaaataattggccaaaaatgagccttctttttaccttttttgttaatcaaatttcatgtggcaattagagcggagagctcatttatcagcgatcagccaagggatatgaatg

SEQ ID NO: 113454 - DNA, 240 bp, Heterodera glycines
tatttcgcgattttatatccatataattacactccctactcatgacattattgtcattcatttagccaactgtttgtttcctcattttccaatttgatttttaattggttttttcattttttcggttatttccatttgcataaaaaaactgtgctgtctgtgccaatggagtatgcgtattctatgtatgttagcggaccgccattagtggaccgctgttaacggaccaatggcaaaatg

SEQ ID NO: 113455 - DNA, 1003 bp, Heterodera glycines
ggacgcgcttgttcattctattcctgatgtcaatttttcatattaattttcaccagtttttgtctaaaaatatatcggaacacttatttatcgttttggaaattttttaaatttaattgaaattttttcaaaatttccaaaaatccgcaatcctgcgcaggatccggcaatagacgccgctgctgtgaatggagggagatgaatcgcgcaattgatatgggtgattaatagggatgcgatttttaggcacaaaaaatcgcgaaataggcacctaaaaaagcattaaaaatcgcaaaataggcattaaataggcacaaaaatcatcaaataggcactaaaataggcaaaaaagtttttttattaacgctttttaggtagcaaaactctaaaaattaatcaaaaaacctattttgcttatatttcaattgttttaaagttgttttcgataaaaataattttttaacccaaaaatttttattatgaaaaaataattgaatttcgaggatcaatttttgtgaaattttttttcaattcttaggggtgtattttctaaaaaattttcaagtcgattcttaggggtgtatttttcattgttgttatggatttttccgaaaattctgaaaaaagcgccaaaaatggcgaaataggcacaaaaataggcaaatagtcattaagcacaaaaagtccaaaataggcattataaaagtcatcgtagacaccctaaacaaagcggaaaacgcgtttttcgtgcttatctatgcgtattaagtgcgcaaaaattttaggcatttgcctaaaaacgaagccctattaataactaatgctatacattttatgcctttgcgtttcggcgccaaaaaaattataaaaatacaaatacttggttaaaatcagcaaatcaaaaaacaaaatattttctaggaatttccaggctctagaaaataactaatttacgcgttacatattttcaaatgtatttagttaatcagtttcatcgaatatg

SEQ ID NO: 113456 - DNA, 97 bp, Heterodera glycines
ttctgacaatggcacgcaattttcgagctcagaattcgccaaatttgttgcggccaacggtatcactcattttttctccgccccaaataatccaatg

SEQ ID NO: 113457 - DNA, 155 bp, Heterodera glycines
tgtgggggagacggcggagacggttcagaaacaacagcagcagcagaagaaaaaagatggaaattctgcgaacaaattgaacaatgtctatttccagaaacaacagcagcagcagaagaaaaaagatggaaattctgcgaacaaattgaacaatg

SEQ ID NO: 113458 - DNA, 290 bp, Heterodera glycines
gctgaaagaaccattcagcaatcacaacgagaaattcacggaaatacggtatatcatgcgaaaaaaaatgattggggcgggataatatttacaaaaggtcgagacaattagcaaacacacttatctgtcgataaatcttgaactttttaaaaaagcaacagttaattaaaaaattagtaaaaaatattattgtttattttaaattaatgatttaaatataaatatagtaattaatttattatttatatattaatctcaatttaattaaatatttttctcaaaatcaaatg

SEQ ID NO: 113459 - DNA, 169 bp, Heterodera glycines
tgttatttaacatcgaagagaataggtcttttggcatctttttcaatatattttgttctttgaagaagagtgtttgaccagctttacaccgaagcattgatggtccgttcggaagtcgatgagcgaatgtttttggtgcttttcctacagaattttcagttgctttatg

SEQ ID NO: 113460 - DNA, 132 bp, Heterodera glycines
gaaaaattaaaattaaggaaaagtcccctttttttaaagaatagccccttttatatggggggaaatcagggtggactttgataaatggggaaagtggccggaaaataaaaaatgaaaataattttaataatg

SEQ ID NO: 113461 - DNA, 1003 bp, Heterodera glycines
tcggaactacattttatgcattgggagcagaattccattttcaaaatttgggcgtcggaattaggctcccggacaatccgtcagtaaatttatataaaaaaatgatcccgcttgggggaaaatatacaaggcttttttagactcccgtaattatgaggttacggatttccgtaaccaataaacactccgtaattatgagccacgaagttgcgtaattaaaatccaattacgtccaatcccaatcggaattcgtcaagacttttggggatcacaacacaaacgcattacaaaatgcttgctcacccatgttgcgcaaatgatcacggagaagcccaatgcagtcaaaggtgaacaagcagcagtcacaacggaatgccatcgccacaaaatttttgaatgttttttgagtgatcactgatcagaagacaatgacttaattggcaattaattaatgactcatttttgatcataaatcaattcgcaagaaaatatgccggggagagaaggcattctgagaacaaagaacagacagtttaaatattatttattaaaataaaatacataaaataattagtttaaattaatacaccgaaactcatttaaacaattcggaaattggcagtgccgtcgaattggctagcaaattttgtaggttaccgaaaaagggatctttgatactgtgagctttcattatagagacatcacgttacagtaccccattttgattacaaacgatacagtatcaaatagaacaaatttcttttgagccaacttaggcttaaagtttaaaacttgagcgccaacaatcggtaaaaataaaatttaaaaaaccaacaaattcaacaacagaaaaaacaacattgacaaagcataaaaataggaaaaagggtcatttttggcaagtgtttggtgagatcaccgggcgcagatgtttttcttctcctccgcctccttctccaccagggacaaattgcctaatttcagataagcgacgggacaaatg

SEQ ID NO: 113462 - DNA, 837 bp, Heterodera glycines
ttggtctattaattttaaaatggtggcttctgctcccgtcatgcccttgttttacgcagtccttctgtcattgtttgccattatatccacgtggattataatgataatgattgataaaaattgaagcccaaccaggcaaacgtgtgaatgaatgaatacaatttttgaatgcttataataataatgcattttttctttttcttatgctatttcttaaataaaaatgctctttttcttttccccattatatttcgcttatttaaaatactctttttctttttgtgctatcctttctttttcttcattctttatgattgtttccatgtgatgtttgcactttcatatattagaattagggattctttttttaggcaaatgcctaaaatgcgcacttgatacgctcatataagcacaaaaacgtgttttccgcttggtttggggtgggtgtcacgatgactttttataatgcctaactttgcctattttggactttttgtgcttgatgcctaaatgcctatttttgtgcctatttcgccatttttggcgcctttttcaagattttcggaaaaattcttaacaaaaattcaaaaaaaaacgaaaaatacaccccctaagaatcgacccaaaaaattttcagaaaaatacacccttaagaattgaaaaaatttttttccaaaaattgattacgaaaatataatttttttttcttgataaaaatttttggtttaaaattttttcttatccaaaaacctttaaaataattaataacttcatttataattggaatataacatcagcggcttcgacgtgcggctgatttttgaccagcagagcatg

SEQ ID NO: 113463 - DNA, 76 bp, Heterodera glycines
tcttacggcccctcccccccccccttccctctcacattccttctcagatttcaattctttcctttgatgtcagatg

SEQ ID NO: 113464 - DNA, 335 bp, Heterodera glycines
  unsure (1)..(335): unsure at all n locations
aatggatagtaattaacaagacaaaaggatcaaaagcgaantttacaattcggaccgatgatgactatcacaaatttgaggaatttccgttgccggaccatgcgctgcccaacaaaatccgctttagagaccttcggattgagtaaatttatacttttgttcattcatgcacaaaaggtgtatcaggactcgggaccgaagaattctcatacaaaggcccaacaaattttttccatcgcgactttttttgtgactttccacattgcttttgtgcggggcgctctttcaaaaaaaattttttttttttttgaagaatgggatgggagtagagaatg

SEQ ID NO: 113465 - DNA, 182 bp, Heterodera glycines
acactccctaccacttcaagcttcactccagccaaaactttattgatttgtccaaatgctacttacaaagtgaattccgaattcgcaaagaaaatgagcatggtcagctggttgacctcacagcagacgaagttgctccgatccagatgatcggtcaaactttcatccgaaacatcaaaatg

SEQ ID NO: 113466 - DNA, 588 bp, Heterodera glycines
ttaataaatagtgattattatgtatttcacgtggacactttgtgtttcatgataattaagaggtattatagtgatcattgaaaaacttatgggcgtaggaatgggaacgaaaatagtcgttcgacggagcgtaaagatcgttggggcggtggggggggggggggtcgaggacgaaaatagataagcatcatttttaatgatcttttattttttgggagtattcgtatttaagcggcaattattaattagtcaaaccattcactcattctgatgaccggcgctattgcagttttcacgaccataaataaaaggacaacaacacaacttttttctaaacgatttttattacctttttatgatggattttgtgttctttaaaagcatttcgctctccccatttgttttacttttcctgttaaattcccctcccgcctctttctttcttttgatttgtgtacttttgttaacagaccgaccattcattcattcatttttttccttttgtttgctttccccctctttcacctcatttaaatcttttttcagtttcattagattcagtatttgagttgtcttaattttaaaatg

SEQ ID NO: 113467 - DNA, 238 bp, Heterodera glycines
ctgatttggcaatatatttggttttattttcagcataaaaaataataaaaattcgcataaattcaccgatttctaaatgtatgccgacaaccctcggggggtcagcaccaactctgcctgcgggcaaaatacagaatttgattggagcaaccccgcctgcgggcaaaatacagatttaaaggtgaaaagtgaggatcaaaatgtagtgatcaatcgacctgtgtggcgcataaacatg

SEQ ID NO: 113468 - DNA, 1003 bp, Heterodera glycines
catatcgtccgtctatgtatggaaatatgtcgatcacacatttatccgctgagaataaattaacttattaacatcgaggcttttttggggatttcacaacaatccctgggcccgggattcgttccccaaaatgtcaatttttttgaaaaatttcccgatttttctgtgtattttaggttgtcctatcagcatgaaggaatgatttgatacaattgctgtaaattactaattactttttttgatcagcatcaaaagttagcttaaatgtatcgaaatggaaaattattataaataatgaccttgagtgtattttaaaaaaagtctgcaagagcaaaatttataataaattaattaaaattgaaaatcaattgttttattgaaaatttattgaaaagaaattattttaatgagaattttgaataacaatttttttggcaaaattactgctgagaactggttccaatttccactttttttattattgtattttcatatgccaatcatcatcactcaattcatcttccatcaaatcaccaccgaaacttttgttgtaattctctaatttggagtttggcgtcgtcgctaattcattccacacaaaaattaaccttgatatttgtcctaattttttccctattttcatttgtttttctaatacggaacaattttaaataacaaatatcattaaataattagaatttgcgagaaaaacaaataaatgttaattacccttttttatgattaagcatccaattttgaaatctttaatttaacgcgtctaacaatttattatttaaagaatagtttaatattaaattattttcttctcttttttgatggccatttgatgttgcgccaattttcgcttttgcttttggccacaacattcggctgtttggcccagagggatggcgccaactccgccaactcaagtcggcatcgcatgcttcctgccgacagggcgggcatgttccaatttccgcagtgggaggttcgcgtgatg

SEQ ID NO: 113469 - DNA, 1003 bp, Heterodera glycines
atggaatttgctaattcgaagagcaaagccaaaacgaaactccgacggcttaacattggactgacgtgacaattggaggcgccaaaagaatgaaaggctctccttaataagacatgtgttgggcttgcttttcctgttctcacgattaatgataatctcgtcagtcggctttttttataaattaatctcgaccgatccaccgcttaaccgattggcgaaaagctgtccgaaatcgcccttctgacaccccgccacacttattacccaaaaaaggactctttcttctccaggggggggggcgggggagagagtttgttggtggatttgggtcggaagcattcaggaagggcaagggtcggttttggactggatctgctgaaggattgacggggaatgagcgtgaccgcctcaggggcgatgttgggaaaataattgcatattttgtggaaagagagagagaaacgacgaaaggggggagggaagagatttatttgtgatgggatggatcaaaaaagaatggaaagcgaagaaaacgaaagtttggggaaacgcacggcgaacgaagcgaaccgaacccatccaatcaccgaccatcgaatcaaagtaattgttcgaataacgaaaaaaaaaaactaaaaaattctaattgggaagggggggaggacattgggacaatgaaattggaaaggagaaaaaaccattttcaaaactttttttgttgctttcgttgtagtcatattggagcattttgcaatttattaggaccattctcggcactgactaaaattctaccatccatgtacggtatttgatattttctgcttttttaaattttcttcatttggctttatgtctcctttcttgggtttttcatttgttttgcgtttcaattttgttccagttgctttcactactacagaattgtctaactatggtctttcatttttaattccaatttctttcctttagttgaatattagcattgtcattaattcttaaaatg

SEQ ID NO: 113470 - DNA, 1003 bp, Heterodera glycines
  unsure (1)..(1003): unsure at all n locations
tcgtcatccattcacaatgattgtatctgggagtacatgcagtgggaagtcagagtgggtaatgagtcttctacgcaatttagagaaaatgatctctacccccattgagcgcgttatttatggctacggagagttgaacactaatgttttgaatttgcaacgcactggaaaaattggcaaattgccagtaactgtgcacagcggggtcccatctgcggaacaggtacgcgattgcgccaaaaaagaaaaactcttgctaatattggatgatttggtagtggggatgagtcaacagtatttggactcgcttttcacacgcggctcacacaattggggcgtgagcgtaattttggtgacccaacacctgttcaacaaagagttgcgcgtcgctcgcacaaattcacattatttggtattaatgcgaaacccagcgggtgctcttcagatccgtacaatagccacccacctcttcccgtcaatgaccgcccactttatggaagcctaccgggacgcatgcgctaaaaattttggctaccttttggttgacatgcaccccgagagttcggaagagattcgccttagaacaaatatatatgaacaaaaacaaatcgtttatatgccaaaatgaaagggtcgcaattgattgcaagaaatgaatcctttttggagacactgtctaattccaaaaaggcgaaaattgttattcgagacgcatccgatgaacaactattatgcctggtagaaatttgtctcaacattctaaaagggccgagttccattgcgtccacgtcatttaaagaagctgaaagctcacgcacagatgcttcgtcgtctcgcccgcacacgttgttctcgctctgccaaaaacgtttttgctacagcacggagacgngcctccccagccattgtagggctcattgcatcgattgcccttccgcttattgcgaacgtcattgaaaattatacatagtgcttgataaagtttaaaaaaaaaagtaaaatg

SEQ ID NO: 113471 - DNA, 59 bp, Heterodera glycines; identical to SEQ ID NO: 107294

SEQ ID NO: 113472 - DNA, 80 bp, Heterodera glycines
aaattacaattttataaaatatttcttgtgttatacgattatgtttttttccattgtcagatgaccagaacagaataatg

SEQ ID NO: 113473 - DNA, 180 bp, Heterodera glycines
atgccttaatgtgacgagtgatgtctttctcaggaggaacgccagcgcaagtcgctgcgcgtcaccgttctcgaccgcgaccgcatcggctctgactttctcggggagacgcgcgtcgcactgcgcaagctgccgctgggccagacaaagaggttcaacctgtacctggaacatgcgatg

SEQ ID NO: 113474 - DNA, 287 bp, Heterodera glycines
tgccaataataaaacaatggtggtcgaattttgtaaaaaaaaaaattataaaaagtggaaaatttaaaaaaattataagcaaattacatgggttgaaaaattcaaattaagttgattctcttccttttaatatccctgcaaaatttgatgagctttagttcagttaaaaatgagttttaggtgatgaaatttcagtctcggctttttttttaccgaaaaaaactgtctgaaccccacttttgtacggtcggtctctaaatgctttgttcgctgtcactaccgcaatg

SEQ ID NO: 113475 - DNA, 125 bp, Heterodera glycines
ttggctgttgaaacgatgcccaattagtgaaaaaacggtggcgattcaatgggaaaacgacgaaaattgggacgacaaattgaacaaaatcaaatttaatttgtgtggtggcaaaagttcatatg

SEQ ID NO: 113476 - DNA, 833 bp, Heterodera glycines
attttacaaatttttgcgagaaaaatttggcatagtattgcctttttcaatatttttggtaacaaatttttgaagaatgaaattttctggaattttttatgctaatttgtgttgcgtttagcaaatttatgaccgaatttttctcgaaaaatctgtaaaattggcactttttaagaaccgacggcctaacacaatttttttaataattacagacaacgtggtaataaactgttcttgcacattgaagaaaacgaaaaccaattgaataaattcagcaaattgctcaaaaatggaagacaatttgccaaaagaatagtttacgtggcaaattttgaaattaaaaaacaattctttatcaatttaattgaggttttttaaacatttacatataaagaaactcgaaaattattaaaataattatattttaaaaaatttaagcaattaaaactctcttttaataattatcccaataaaaaaagattgaatttatattttagtattcttccatttttcccgtttaatgacaatttgtttttgtttttcatttcatttcattttggccctaaatttttacgcaatttcgaaaatttggactttcgactttttgttcgaatttgggtcaggggtttggaattaagtacgacaatcttatatgattttacttatattttttttataatacttaatgctacagaactttattttaaaatatttgtatcactgacgcattttttactgacgcattttccactgacgcatttcccatgtcacggggcggtcgacacccctttaaaaaaggttaattctgactccatgcacacctttttaagatg

SEQ ID NO: 113477 - DNA, 151 bp, Heterodera glycines
tattttcaaatcatccaatcaatttattatatcccaaaattatcaaatatttacgagtgtctgaatggaagtgaccaaaactttgaaagcatggtcctattttaccagtgcttattatttatttattcccgggttgtcccaccagaaaatg

SEQ ID NO: 113478 - DNA, 888 bp, Heterodera glycines
ttttgaaatttcacggtcacttgccgacccctcctttgtgagaccccctttttgatgactaactcacagaccactaagacaaaaaatccaacttaattgtacttggagcccaaaattgaatcgccgtgaataaaaactataagccaaaacagccattcaaagtgcatttttttcaaatccaaaaacaagcacaaaataagcacgtaatgctgaaataagcacaaatctcagaaataagcattttagctttctaagattcgacccctcaaaataagcacaaatcttagaaataagcacacttggccactctgttctttgtgcaagatagaatgccattaaaaaaattaagaaattatcaaatgcttaaaagccagccagagccgaaactgtcggttatcggacgaatatttggggtaattagttcagtttgccccccccccttttcgaaattttttttgtgttttcaaaagtcataaaaacactttatggggttttcgggtcgctgatcacgaatccggcgcccatttagaccacttcctaatcccggacccgaattcgaacaaaaagtcgaaaattcaaattttcgattttcacatttttggttcaaactttgtttaaatacacggaaacgaactgaaattcaacattgcttcaataaaagatcatttgagccacttcgaaaaccccataaaaagtgtttttatgacttgaaaacataaaaaacaattcgaaaaaagggggggggggacaaactgaactattaccatattttttcttgctgtttgatttgaaagcgtttatccgtcttagtgctcattttctcataatagaattttcctactcttttttttcagctgcccgtggttttgtttcaaccctttaaaaatg

SEQ ID NO: 113479 - DNA, 326 bp, Heterodera glycines
cttctattaatggcattgacgtcaatggcaaaagatgaggcaattttgtatttcaaacaaagaaatgaacttcgcaattgatgaatgaaataaaaagggcattcattcgcatgtccatatttgggcatgacaatgaaaatgccaacagaaagtatcatcaggtaaatgccacgggtgagggggcgagaggagggggaaggtgccgcttggagcgtgccgttttaaagcggagaatcagccaccaatccatgcgcatcactcacaatttttttcatatctcctccattatcgctggaataaagaaaactaaaaaaaattcaaaaatg

SEQ ID NO: 113480 - DNA, 587 bp, Heterodera glycines
atttttcgcaaatttaaaaagcaattaaaaatttttagattttttattcatctccctttttgatagtgaaagcatcagagagccttatttaacttttaattaacatttggtgcgtttcagagcacgttctaaaaaatatttatgaattaattttgcaaaataataaataattaatgaaaaagtcagaatttcgaaaaattttaaaaacaacaagcgttggcattttttcaggttaagttagtcctttacaatggagaaggcctgcaaaatttggagagattatatcgattttagtgcgctaggttcgatgaaactttttaaaatataagcctaaactttttggcctgtttaaaaaggaattaaaaatttttaaaatatttattcatctcccttttgatagaaaaagcatcagagagccttatttaacttttaattaacatttggtgcgtttcagagcacgttctaaaaaatatttatgaattaattttgcaaaataataaataagtaatgaaaaagtcagaatttcgaaaaattttaaaaacaacaagcgttggcattttttcaggttaagttagtcctttacaatg

SEQ ID NO: 113481 - DNA, 136 bp, Heterodera glycines
aaacgcgttctgttctatgcgtccagcaatttggacgacgaattcctgttcaggtaccacgcacaaatattcatgccaagtgccaagttttccaaatggttaattcacacatttcatgtctgaactgcagcagatg

SEQ ID NO: 113482 - DNA, 1003 bp, Heterodera glycines
ctgattaacaaatgaataaaaaaaattattacaatagtaggaaaaaaaagaaaaaaaatcgtcaacaaaaaaaagaacaaagaaatcctttgcgttttaattatttttacggattattgaaaagaataataaaaattttggtgtaaaacttatgtaacaccctaagtattataaaattttttaaaattttcgtccaattttaaagacgtataacaccttaaaaaagcccacgagcaaaaaatcagaaagtgaccaaaaaaccttaattaaaatgcgctttatttaactaataattttaaaagtaaactaacagcacaaacatttatcagataacaaaaactccctcaaaaaatcacagtgaagcaaatttgttttctcatctgatcagtgttgcaattcaaattcacaattttttagcaattatttcgtatttttggattttcatctttaatttcaaaatattatttcatttttattactttgagctcattcaatattcgttgctaaaagaataaatatttcaacgaataaattcgattaaattttttttacagattttaccgaacaatgaaaattcgtcaaattttgacgataaaaatttttttaataaatttagccttaacatcttatatttctttaattaaatcttaaataaaaaataaatttacatttcgatattgttgcaaatttctttttccaagttctcaaagttcgacttccaatttacatttttctgcaatttttgggatatttaactcataaaaatgtaatttgtttgggaaatattaaataataaatcgacattataataatggtctacaaatctaattaataaattaaaataattatatattaattaattaaaatcatttattccgtactgaaatgacccgccccttccgatcacccatcactcatacttttttagcttcggctcaccacgcaaaacaatgaagcctatgaatgtataacatcgtatttttgatttattttctgtaatatg

SEQ ID NO: 113483 - DNA, 402 bp, Heterodera glycines
catacagtacccccccccccacggtaatcaaagaagcgaacaagccatttctcgcttaggctaatctgggttttcaggcgcccttcttcaatttttgtttctccgcagagatttcaaaaacagaattctttttttctcagggtttttccttgttttcgaccacagttctggtggtttttaattcacaaatttatacacatatgtagtttaaattcacttcgttttccattttaataaataattaattcattaaaagaaagaaagaaaaaccaaatggggggaggagagcatggaaacaaatgggtggggtgacaattaaaaaggctgcttaattatgattaagttttttttttgattaatttcaaggtctgaaaaattttatttaagttcaaaatttcaatg

SEQ ID NO: 113484 - DNA, 767 bp, Heterodera glycines
caggtggttgatggtgggaggacaggggagggcaatggtcacgggggaaggacggggtcaacaaattacccaattcccacggggcgcgggggggggcacggggaccaacccctccccaagatgtacaaattcccaaagaaatgctataaaaccctaaaataagcctcattttcccgactatcgtacggcacctaatcgccaaaccaaaagcatgggacgacccctgagggtgtggaaggggcgtgggataacaaatcaggaagtcccaacggaaaggggtgcatggtgtgaaccagggatggcacggaattccgatttccgatatttttgggctaggattccgattttgaaatttttggggcctcgaaatggcatccctggtgtaaacgcaatcgctcaagcagaatcttaattaatgtgtcctccccatgctaaagtcttgagagtctcgacgattgaaaaaatatatatatattaaaaattaataaaacgtaagggagaattttacaattccatttaaatttacacctaatttttgggcaaaaatggaaattaatcgatttttatgcaactattgaaaatctatatttccataaacttacatatttccacgaataatagacaaaaatttcattagcggaagtggataatattccccattcaaattcatgataaaaatatattttaaaagaaattaaattagttttcaaaactcagcacttatttttgttatcttctaattggttcttctaattggttaattaatg

SEQ ID NO: 113485 - DNA, 487 bp, Heterodera glycines
gctaaaaatttttttttgtggatacttttgtcggattctgaatttgttcaagaattcaaaaaaaattgtgatggtcaatttttgtaatgagtcagaataatttttgccataattactcatgctttaatttaaatggattttaagcaattttatttgttgtcactttcacttgccgttttgcttctttatctccgacagaatctctctttttaaaaaagaaagcctctttttgacttttaaaaatatataaaatttcaataatacatatattcacaattttattattcaatgatcagtagaataaaatattaatcattaaaataattatttattttcaattaggatgacttttttttattttacaggaaatcagtagaaaggcgatatttttacatcaataaaaatgcaaaataataatcaaaaattacatttatacaagaaaaaatttttttattaaatttatttaaaaaaatttgttaagaagatg

SEQ ID NO: 113486 - DNA, 668 bp, Heterodera glycines
tcatttcttcagctgtttaacgtagggttagacttgcattagtttccgcttggattgagactcgaatacccggcttatatggaacgaaaatatcgagaaagtccaattttatttaagggcataaaaatgatataaaataatatattttgacattgatccataaagaagtgtaatgagtccaggaaaattaaccttttaattgagtgtataattcgcttaaaattttaaatctaatttgattaaaatttttgctttgagattagaggtattttttatatatatttaaatttttttaaatgctaaatattctgcagaatctttccggtgtccaaatttctgttgccccttaaacaccaagaaatttgacatttattctaggaaatgaggtgtttttcttgaaaaacaaaacgcatataaactattttattctttctctatttattaattctcagaaaactcatcaacagttgacgtcagcgaactaattaatttggaaaaagaattggcaaattttgagcaaaatattctccaattttataaattgggtaattacataaattgaccacttattctaattacggttttgtctaaaaaaaatccttcgaaaaatgaataaatggtcgaaagaataatggaattttatgccaaaacccccaggcacggtaatg

SEQ ID NO: 113487 - DNA, 560 bp, Heterodera glycines
aatttttgtctctcataattctgacagatcgcaacttcttttacaaattcttttttgattgtcaatccaatctctgcattgactaattactcgcgcctgattaagtaatttgcatttttaatgacgggtaattaactaatgggccgagaaggtgttttgacgcgctaacaaaaagcaaacgattcgccgaaaacttgaataaatcgtgcgcgacgggaccacacaaaaatgtttcatattatttttacaggttttgacgtattgttccccgccaataacctacttcgcatataaaaaatagatacttttggatttttatatttaataattgaaatgtaataatttttatttaaaagcaaattattacataaatgaaacaatttttattgttatttttattcaacactcttttacaaatttgttttaacaatgcattgccattaacaaatataaacaacaaatcatcattaaaaactggtgaatttaaatatatttttaaattctatctattatttttttatcatttagacacttcgccaaaatttcgcgttttgattatg

SEQ ID NO: 113488 - DNA, 134 bp, Heterodera glycines
ggttcgtcgttctttgcctgctgccctttgtcctcttaattgattcccatccctgctaaaggcaagaatcgcgtgccaccgtggcaatgttagcgccggccgtgcacataatgcaccaagtgtggcgggggatg

SEQ ID NO: 113489 - DNA, 96 bp, Heterodera glycines
agtaaatttggattatttttttctaaatattttgtttaaaaaagaatgctctaaaatttttttctgcctaaaatttttattttcttagacaatatg

SEQ ID NO: 113490 - DNA, 1003 bp, Heterodera glycines
tcggccataaatgccggcgactgttcggcggatgcacggcgcgaacatgaacatgtcacctattacaagaacccaaagagtccgctgttcatctccaaatgcttggccatcattacaccggtttgggcgggcaaaagaaaaagagatttgacaaacaaaaatgccaagagatttgctgaacaatatgatgataatttgattggcaacgatgataaatctcgactaaaattcccgagaattatagttttttgtaggagtgggggtaaaagatttacataattcgtccaaagtactccttgatcattatccaaaatttaatgactaatcctgagaaatttttgttttttggctacaaaaaagagaattggaattattcttaattgctctaagtctggtcataaacaagaatatttggctaggcgcctgaatgtagggctctgcgagagtctcgactctcgtatttattgggcttccttgtctcttaaaatttttcgggttttttgacttaaatttttttgtaaattttaatttaaatattttctcatcccgttggttgatcagattcctgtcatttattcatccgagaatttgttgcacaatttgtgggcactgatcagcgagaaatttccgctcagagaatactcagtggaggacctgcttcattggatgttacacgaagtaataatcatcataaatgatgattaagaaatttaaaaaaaaattgcgaaattttttaaatctaataattgactaaaaaaatttcaaaaatttttggctctcaaattttactggccccattttatctaaatttggaccttcgtataaaaaatgtatttttacatttatacccaacggcacaaaaaaatcaataaatctgctaaaattgtgccattcccatccactcttcctttttcagctttatttgccggcacccgcctgttctgcacagctatgcttctccaacttccatttgttgctccgtgtgccgtccgtggacgaaatg

SEQ ID NO: 113491 - DNA, 141 bp, Heterodera glycines
aagaattaaaaaatttagcctattaaaatatttagaaatttttattatattgtatattttttgaaaaatttccgatttccgacgtttttggggtcggaattccgatttccgacttccgaaaatttttggggcctcggaatg

SEQ ID NO: 113492 - DNA, 282 bp, Heterodera glycines
acaaataatacccctgggagaagggagtgggaaacatgatttcgaaattttaaattttttgtactctaagctactcaaaacggttcagaattcaataaaaataacattcacggtgcgaaaaatggggtatgaaaagtttattgggggaaaaaagactacaaaataatacccctgggagaagggagtgggaaacatgatttcgaaattttaaattttttgtactctaagctactcaaaacggttcagaattcaataaaaataacattcacggtgcgaaaaatg

SEQ ID NO: 113493 - DNA, 421 bp, Heterodera glycines
atttcacccaaaattgaccataaatcgtgccagatgtaaaatttcgggtctatttcacttcaggcgtcaacaaatgacctcttcaataataaaatttcaaaaaaaattaaaaaaatttaaagaattttttgaaaatttttttggtaaagtgcattaaaacctagtaagtaattctccataaaaagaaaaaaatttctttcttagatatttgtggaaaattttttaagattttgaaatttctgtttggaaataaaaaaaatttgcgattttgagcaaatttttaaagaaaatcaaggatttttagggtccggcggtgccgataggcgccgccgagaaattttttgaaaatttcgatgcgaaattgtataaaaatgaagaatttttggctatatcataaaccggtaaaaaccggtccaaaatg

SEQ ID NO: 113494 - DNA, 166 bp, Heterodera glycines
gtgttaaatctataaaaggggatgttaaagcgtgctgatggattaaaaatagaaaatagtttcagatctgttcggccataaacaattttacgtcattttggcgcggtacttttttgccaattttgtttttcaatcgtttttctcctaatttcagtcgtggaaaatg

SEQ ID NO: 113495 - DNA, 816 bp, Heterodera glycines
aaaacccggaaaacccttactccgtataagtccgtatgcaggaaaaatacggacccgtatacggatcagggttttttgaaaagttttttaatcaataaaaaccatatttttttttactaaaatactaatatagattcgttctaaattttattacgaacattaaacaagagtttttggagtccggcggtgccgataggcgccggcgggaaattttttttaatttgattgcaaattgttaacagatttatcgaacaaatttgcgctttttaaccgattatataattttgctaacgatttttcacaaaaattaggtatctataattttgaaaaatttacaaatccatcgtaaaaaagttaagaaatttaaaacgaaattcatttcaaatgaaatttacgaattggaaattaaatagaatttcataaaaaattgaacgaaatgctattcaaaatcgtaaaaattttgagtttttatcacaaaaaacatttttttccaatttcgtaaaatttttcaataattttttgtccttgatgttcttattttgaaaatttttcggtcatacccctgtcctagagccacatccgcttttccacctactaggtcttaattccctcagttagaggatacaattttaaagttcttaattaaaattgaatatattttaaaattttcggttttttcgtttcgtttcgtacgaaaatggttattttttcgttttcgtgtttcgttttcgtccgtcaaaattttttcgtttcgtgtttcgttttcggttttcaaaatttcttttttcgtttcgtgtttcgttttcgtgtcgaatg

SEQ ID NO: 113496 - DNA, 212 bp, Heterodera glycines
ggtaatcaaacaattcaaagaaatattagaaaatttttatattaaaatttcaagaaaaaaatttgaaaaatttcagcgattttttgaaaaatttttcaaaacacttacatattaatgcatcgtaaaatttttaaaaaattgctcgaaagtttttttgatttttttttgaatttcctattaattaagaaaattatgagaattcacaagttatg

SEQ ID NO: 113497 - DNA, 104 bp, Heterodera glycines
atgccaacataattgccaaggttgaaccggaaacccggatttatgcctatccctttgacagcaactccacctgggaacaaattggatttggagagcgagtcatg

SEQ ID NO: 113498 - DNA, 164 bp, Heterodera glycines
ggaggccggggggggggagccatgggatgaattgttgttggggatggcacgggggttggacgtattaagaaatttgctgattgggtaacagtttcagtcccttatcggtccccttcgttttttgggtatgtccatgacgaaagtgttgtgtgcttttaggcatg

SEQ ID NO: 113499 - DNA, 408 bp, Heterodera glycines
ttaaagagtcgatgcggggggatggaaagtcaaatgtcccccccaggacaaaaactgtggtcggagtgcttttcccattcctccacaacagtttctttattcattggaaatttaaaatggaatataaaacccaacaacactcattcaaattttttccattttttaaatttgtcgcagtttgataagtggagaaaattatgcacgaaagcacataaattatggtcaaattttggggcgaacattttggtggggaatgaacgtgatggaattccgtccaaaagtttagcctcccaagaatttttgcacgctaatgaatatttgggggggggggagagatattccttgtttttagagaatttcagagttcaaagtttccctcaatttgaaaactgtcgatttcagcaaatg

SEQ ID NO: 113500 - DNA, 439 bp, Heterodera glycines
ccgatttctctcattttggcgtattatttatttatctctgttattagagaaaaacggattctatgtttagtttttttgtcctatgttaaatccgcttgaactttgcaaatcgatagagaaaaaaattacgaacaaaatctaaaggtttttaagagcaaaaaaagggtcagctaaaaagttattcaaaaaacaaattttcaaacgctcatatctttttttaatgtatttaattgcttagcatttgcttaggaaaagcttctcaacgtgagctttcgaatgatatcaaaatagtccagtttggttggcaaaaaacctcaaaaatgttccttgaatttcgtaattttttaagttttttctttctctgtaaatttaaagcatttgaggcattatattgatataatttgtagctaaaatatttactttttgacttttcaaaatg

SEQ ID NO: 113501 - DNA, 382 bp, Heterodera glycines
attggctggctgattttttcgaaattcagacaattatacgatgaaaatcgattttagttgtagtaccaggctcaagattatgctaagcaattggaagaagtagaaaatgtccttgaaaagtggttttgaataactttagtcgaagagtaaaaaataaattaaatttgagcgttaaaaatacgtcatgttttttcccgtgtccagacatttgcgccccggaaatttgcgtctcggacatttgcgcctgtgtaaaatcgggttcaaacattttttcatcttacaaattagaggttttaacagcattacctaaatttaagaaaatttgtttttttgtttattaggaacaatataatagaattaaaaaatatagtacagtaaaatg

SEQ ID NO: 113502 - DNA, 779 bp, Heterodera glycines
  unsure (1)..(779): unsure at all n locations
gtacagtcatggtcagatatttatgcagtaaaatattttncacataacttnatcagtcttagccaatctgaatgattggcaccaaaaaatagctggagtctcagttgacctatttcggcattttttggaaaaattcacgttcagacggttttcatggggtttaaaaattatgccattttgcctatcaaattaaaaaattttctcctaaactgagcccattttgacgcgattttttgcatcttctagagaatttagtgtagaatcatatgtttttccatatcccaaaaattttcctttaggcacatgaagcgaaaccggttttggtaattgaattttccaaaaaatgccgaaataggtaaactaagattttttttcgatcaagttatttttcatacaaatcatttggattacttggctaattaatgataaaattatgtgacaaatatttcactgtataaatgtatggccatgactgtattatattaaaaattgggccaaaaagctctaaaccaagttttcaataggttgtatttttcctgtccccactcacttaaaaaagggtaaatttaaaataacggtgttaggccattttgcgaaaagttcaaaatggaacaaaatcgaggaaataatcagttgaggatttttgggtcgagtttttgaaatttttgaggggaaagcgttggtttcaaaatgcactatcataaaattaaatttttttaaaatttatataaaattataattttacctattttagtttattttacccattttagtttatg

SEQ ID NO: 113503 - DNA, 104 bp, Heterodera glycines
atctctgccaatatacctcaacaaatgttgaccgacttattgccaaaacaaaagccgtttttgtcaaatcgccttacagagtgaagacatttcgagacaaaatg

SEQ ID NO: 113504 - DNA, 214 bp, Heterodera glycines
tttttatcatttaacatcgcgctcgggaatggttgatgcgtcgaaatagatgtgctgtttggatgcgttcatttgttattgaccccgaaaataatgcacttttgcttgtccttgacaacgaaatcagcaatgatgaagaataaatcacatattttttttctttctttatttgctcaaataacagcggtgatgttgggggcaccgtggtggaatg

SEQ ID NO: 113505 - DNA, 80 bp, Heterodera glycines
ggtattttttttatgaaaaaagtttataaataaaactatattagtaaaaaaataaaataaattttcaggaaggacaaatg

SEQ ID NO: 113506 - DNA, 559 bp, Heterodera glycines
agggaataaaaaaattattaaaaaaaacaaaattcttatttcaacgtttgctttaggactattacatggttttgcactcagagggtttttgaataaaaatacttttgttttattgaaatgaaaaaaatttcaatttttttctttacccgacaatgcccgggcccggttttttgaccaaataccacagggcctggtattttttaaggtgatcagtagggctgggaaatttaggtaagaaaaatcgcgaaataggtaggtataccccgcccgacatttgcgcctcggacattttcggtccgacattttgcggccactggccaaatagaaacttcataaaattaattatccaatttaagcgaattttatgtcacttttgaaaagccgatttcgattaaaattattttttttttttgcgttatgaaatggtgaagaaaaggtatgaacattattaggaaatctatgaactctacagtatcacctgggggtcttgaataagtataatttttgaaaacgattacttggtaaaataaagttttcggcgtaaatttgaagagaaatg

SEQ ID NO: 113507 - DNA, 174 bp, Heterodera glycines
tctctgctgcgaaatatttagtagcaaattcaattgaaattatttcggcttaattaattaatagtttaatgtaaatatttaattttaaaaatattggaaataattgggtttttgtgttaaggaataaataataattttttaaatataaaatcaaaaaaagcggttgcatttatg

SEQ ID NO: 113508 - DNA, 226 bp, Heterodera glycines
tgtaaaagaagaagaaaatggtgaaaaaactcttttaaaatatgatgaaatagggcagtatcttgaagcacgatatttgagtcctgttgaagcttgctaccgtttatttaaatatgaattacaaggtaaatcacatacaatagaaagactggaagttcatttagaaaacgaacaaactgtttattttgatcaaaacttaaacgatgataatttagaagaggcaatg

SEQ ID NO: 113509 - DNA, 106 bp, Heterodera glycines
attaactgctctaatgagtggtcgcaatttcactagatggagttgggcccggggctctcaaaacactacaaacaaaagccttgtttttatcggcagcttaaaaatg

SEQ ID NO: 113510 - DNA, 161 bp, Heterodera glycines
tcagatggggattgcgagaaaactttgaggacttaccgctgcaattgcgcaccaaaagtgcgggggatgagcaagagaccgtgaccgagaagtacacgcgagaggctgaacacgaagacgcgcaacgaacagtgtgggtgggacgcgagggcgagaggatg

SEQ ID NO: 113511 - DNA, 95 bp, Heterodera glycines
gggggggaggtcgcatgatagaaacttgtcaggttggctaatttataataatccttcgataagtttttcttctccctcagggtgtgagcaaaatg

SEQ ID NO: 113512 - DNA, 877 bp, Heterodera glycines
  unsure (1)..(877): unsure at all n locations
tgtccgccncaattggtgccaaaaaagtcctcgtttttcctcatgtcttcctctaatctcttttctattgatattttctcattttatgccattttcactttccttttacaaaaaatattatttattttcattttgccaaatgctttcttttattattttcactgaattaattgttctgccggtggcatttttggtcggcaaaggtaagtgaatttgtaaaattaaattgaaaaagagaaaaattaaatttaaaaataattaaaacaaacaaatcgtatgtcgtcggattggcataacttaaaaccttttatataattttttttttgtatttgttaaataaatttcttttaattttcgtttaattattttaaatggcgaataaatttcgaaatttaaaattaaacaatagtttaattaaaagttaatttatttttgttaaatcccttaatgttttccaaaaatgttgcatttgcggaaatatttgttcattattttggccaaacttttcaaagaataaaaaatcattgacacaatttgttttcgctcttcgcctccattgtttcaattcgtcgaccatttcctcttgccaaatttgccctttatttcgttcccaaaatgccgtcccccggggggacattcactcactatgccgtgccattgtccctctcactcccccccccccctctcctaatccgattgtgccatgactttcatgccaatttttcattttgtgccttcgtttgactgacatttgtggccaaacaattacaaaaaatgaaacgccaaaaaggcacttttccactgaaaatgccactcgacttttgagttgtccaacaacatttccttgtgcttcttggcaaatagttaaattgaaatg

SEQ ID NO: 113513 - DNA, 112 bp, Heterodera glycines
  unsure (1)..(112): unsure at all n locations
atcaaaaagatgcgcgactcaggggcgccattggaccaactcttcgaaaagacgaacttnggaattggggtgaagaccagcagaaagttttgaaaaagcaaaagagatcatg

SEQ ID NO: 113514 - DNA, 724 bp, Heterodera glycines
gacaaaatttctcataacgccaaatagcgtaattggcgtaaatttttgcgcgcttgtttgaaaattaataattttttcaaaaattcattgacgatcaaatgatcggatacaatcactttcaatcgcttatttaaagcttgtttaggctgtcagtgatttgaaaaacttaatttgaacccgattttggacaaaggcacaaaaaaatgtgaagcgattaggggaaaagtcagagacgaaggcgtaaaagaaaggcgacttcgtaagacacgaagaaattaacgcaaactcaaacaaaaaaaattgaaaattcagatttttacgatttttttaaatttaggttaagaagtaggaattttttttaacttatatttccagaattcttttaaattttcttccttttttttgctttatttatataataacgctattcgagacggaaaattacccgagaattggggcccttagatacttagattttgagatccattaatccgtgactcaagtaaagactctcgaacaacggcacaattgatttaggcattccgtttggcggcatcccgcttccgcttcgtcgttgtgtttttgggattcggatgaaattgtatttccaacattttccataagcaacacttttactggagaacatatgagtctcagactcaatggcaatcaaacattcattttgtttcggcactgtccccctaattttgtttcaacagaaatg

SEQ ID NO: 113515 - DNA, 161 bp, Heterodera glycines
tttcgggtcatttaaatgctttggtttaattaatttattttatttttgctttcaacagaaacgatttccccgaccttcgcgacattgtcaaaaattcgccgtttgttttcgttagtgtggacgaactgctcgattttccgcgacctctcttcccaaatatg

SEQ ID NO: 113516 - DNA, 1003 bp, Heterodera glycines
gtctaaatgtattattaagtttttaactataagaataaataactaattataagcttgcgccgcaagtttttaatagattcattaattgttattatcgatttacctcgaatgcaaaatttgaaattcatttttattaaattcaagcgacaaaaatccttttcttggccgattttccattaaattttaataaaaatgtttcatttttatccttgaacagcgaaaattatttaattcatacaaattaaaaaattcttttgatggttcatttgtatattttttataatattttattgatttaataaaatgcatttagagtcgtttttatatatccgcaatttatttaaataaaaaaattattttatataatcgattattttcaagtaagatttgcaatattttttatattttgtatttgaattattactatgtctaatttaagcttatgcctgcgggttatcacatcaaagcggcgtttgtactatttcataaatatttgtgaattatttaaatactagggtgtcccaaaagttttttctgattttttataacaatatcggtacccctgtaaataactaaatgttgaatataaaaaaaatagcgcaaagaaaaactcgcttgaccgatttttgaaccggtctaaaaaccggttcaaattcaattttatgaaaaatgctgaaacatgacaagcgagtttttccttgcgctattttttgatactcaacatttagttatttacaggggtgccgatattgctataaaaaatcggaaaaaccacatacataaatatctaaaaaaataactaaattgacattttttagacggtttcaaaaaattttcttgaaaatgaccggcaaaagagcattttgtaaaatttgctacaaaattatgaaatgaacgtaataaatttaatgcatttcaaaaattgggaatcgtacaaatgaaaatgatttatttttttgaatgttttgggggagtaaatgacaagaagataaaacatgaaatg

SEQ ID NO: 113517 - DNA, 441 bp, Heterodera glycines
ttttcccaggcaatttaggatatatatatttgcgctttttgatgaattctttttatttaagtttaaatttttcgaaaattcactaatccccggaatgcggcgcggaacctcacaaatgggaaatgcgtgatttgctgggttaatcctgctatatcccgtacagctaacaattccaatcccgcaacgtgacccgatgggcaaatttacaatcccacaatgccgtgtggggtcccgcaaattggaaatgcgggatttgctggattaatcccgcgggatcccgtgcagaaaaaaaataaaataaaaattttgatttccaatcccgaagcgggatcgagcggcaaatttgaaaattcaggcgatctctccatttttaaccacaattttagcaaacattgaacgtccaaggttcgattgagaacgaaaaatgccatcaaaaatatg

SEQ ID NO: 113518 - DNA, 64 bp, Heterodera glycines
cttaagtgtcttctattagcctgcaaaattgcaaaaaatttcgtaaaatttgaacaatcttatg

SEQ ID NO: 113519 - DNA, 99 bp, Heterodera glycines
  unsure (1)..(99): unsure at all n locations
gaactgcttcagagccgagaaaattgggttgtgtttcncaagttgcatcagcaacttcaaaacctacccatctaactagccattcatccataccggatg

SEQ ID NO: 113520 - DNA, 155 bp, Heterodera glycines
gctataattttagataatttaattaaatattatataatctattaataaaatcaaatttatttatttatttaaaatattaaaaaaaatatattgatactttaattttaaataataatatttttactcattattcatatcattattctgacagaatg

SEQ ID NO: 113521 - DNA, 753 bp, Heterodera glycines
cgaaatagttaactaaaatagtgaataaaaatgccaaaatagtgacaaaaagtccgaaatagtgacgaatattttcagccaaaaattaagcaaaaataatttttattcactgattgcattgcaaatgagtagggctgggatttttaagggcaaaaaaacaaaataggtacataaaaaaataatttttaaaattaaaattcttgccacgaaaatacctttttgagaaatttttttttcatttcataggagtatattttgaaaaattttagctcgattcttaggggtgtattttttgaaaaaatttttaggtcgattcttaggggtgtattttttgaaaaaatttttaggtcgattcttaggggtgcattttttggttttattgcatttttgttaaagaattttccaaaaaatgtcgaaatagtgaaaaaatagtgacaaaactccaaaatagtgaattttcactattttagtgacaaaatcccaaaatagtgatttctagtgaccgataatgacatcagaatcgaaaatttttaacgcagaaatgcgttttttgagctcctttcttcaaaacaattaggcaaaaaaagtttttcactaaaagttgcggccctaattattataaaaataattaattttcttaaggcgtcgctggagaaaataatatgatttttggtccaaaaattttttttcggacattttttgtgccaaattttcaaaaagtcaaaacaaattattaaaatgttcagcagaatg

SEQ ID NO: 113522 - DNA, 226 bp, Heterodera glycines
aggggggttggtaaaaattcagtgggggggttatattacaggaaatacggtacctatctcattaattttgttttcgaggattttggggtcctgatcagtgatcacgtaacatctattttgattaatttctaaaacctaacccgaaatatacaaaagtaaaattcaatttctcggtttttatttttttgttaaaatatttcattacaggattctcttctgtgcaatg

SEQ ID NO: 113523 - DNA, 173 bp, Heterodera glycines
cgccaccgccaccagccacgtttgcgcctccggcacggcccaccgacgagccagaggggccggcgccagaaggcgcgcctgctgcatgcgcttcgtagccggcctggcgcgccgttcggtttccgtgcgcgacgaatggtgcatttttcagcacctcaacctcgcgaaagatg

SEQ ID NO: 113524 - DNA, 230 bp, Heterodera glycines
  unsure (1)..(230): unsure at all n locations
ctctttatanttcttcttaaaataaaataaaaaataaccccccccccgcccggaaaaataacatttttaacgatgggatttttcttcgacttttggttgggaactcaaagaaggagtcaaggcttttcagagtttatttatttccaaattaaataaaagagacaaaaaaaggacacaaacaattttttgagaagacaacatcataaaattaatacaattaaattcgaatg

SEQ ID NO: 113525 - DNA, 751 bp, Heterodera glycines
tttcttcactatatttttgatattcgcattttaaaatggtaaaataatgccttttcattgtcagattggcaattttggatgactacgacttttgcagtccaattgaacgtttaccagtcgactttctgtgccaatgtgtgaatctttacctgatggactcccgggttggttttttaaccgaatacccaactttaaaaaaaaatttaatcttgaataaagatctaacttttgggggatttgctatcgtttctctctttttctgaatttgggtctcccgaaaatgacaactttgacttagagtgctgtttttagggtacaatctgaatgctttctccaatatttaaggacattttccccgattcatcgccggtcaacgccgtctcttcctctccaatttcgtctgcccatgccctgtggcaatggttgcattcgccgcggggggacgggcgacctaagattttgctgtgccaggaaatttggtcattcgctgacaaaattcgggaactaaaaacggtaattatcttaataaaatatgaatgtctccgctaataaaaaagattgccggctaaattgcaaattaaggcattttgcgacgcctctgcccccgttagtttcatcattcgtttgtctttgagcagttttgctggtatgtggcattttaaaaatttctagtatttaagacccccaaacatttgttgttttctgtgcaggtgaacagtttgaattgcgcaatgatcggaccggggaaatg

SEQ ID NO: 113526 - DNA, 245 bp, Heterodera glycines
ttcgtaacacccattccgattttccactccccgtgctccctgagattgtcagcgtaaacgggtgtctgagttgtaagtgtttttcatcaaatttttgaaaattgtctgccatttttttttttttttgcaaaacggtttatcttatattatccatgtttaaaaaatattatatatacacaataaagctttacagaaataataataataataataataataataatctcttaactattaaacaaatg

SEQ ID NO: 113527 - DNA, 350 bp, Heterodera glycines
atcagatccaaaaacgggaaacgtttattgttttgttagaatattgttgcttttagtaattgttgcatgcgaaaaacatttatttcctccattcattgaaaaagcgtaaattgaaaagtgctttttctattttgattttttatgtcctctgacaatgagcattattatcctacaaattgtctgtcatttttgctaatctgttgctggttctcagagttctctttccgatgacttcgtggcgattgtgtttaggaaagatcagacgaaaagagatggtcagattgtacaaagtgaagtcagtcgctttttaggattttcactaatttgttaaaagtttctttagaattatg

SEQ ID NO: 113528 - DNA, 1003 bp, Heterodera glycines
tttttgtcatttcctactttttctcttccgctcctctcacacactctctctccctttctgtcctcccctacctctttttgtcttccctattctctctctcttctcctctcactctctctctctctctttctttttctcttccctcaccaatcagactttctttccttatcctttccaccctctctttttctcttcatcagctcctctcacacacactccctttctccctccctccctccctcaccccgcccattctctactgtcccaatgtctttcacagtttttccacgatttttacaccaacacaccaacccacaccacagggttaattatgtaattaaccccagttaattacacatataattaactccttttatcgtgcattcctccgccgttctttcgtcctttccctttccctttttttctctctttttcactgtctcttccgctgtccctttcccttccccaatcattcaattgcctgccattcttctcacattcattcattgttttttgactgatgaaggtcatcttttcgtcacacagtagaagtgggaaagtaaagaaaaatgaaaaattcaaatggaaaaaaaatatatttaaaaagagggaaaatgggggggggccaattaaaacgataaaagactaattaggactaattaggccacagcaaaatgaatgcatggcaaacaaatacaatattatacacatatgaagggtatattacattcacaaaaaaaatgcaattgagattaaagtgatcatcggcttcgagtcaactttccatcaattgctaattttatgaatttttggaaaaattgaaattttttgtaaaattgggtcagggaggccttggagggggtaccaataaggaaaatcgaaacttttctgcatacaacactatttttccattaaagaattgttttcatttgtttctcacttgcaaaaatgaaaatttggcaaaatttcagaaaatttgccacccctcctttgtcggcacatg

SEQ ID NO: 113529 - DNA, 563 bp, Heterodera glycines
tggttcgaatattcggcgcaaaaatccggcaattaattggcacaaagagatgagcgaatgaagataattgacgacccgaagaaaccaaaaacaaatcaaatggagaatacattaagttttcacctaaattttattttgtatataaattaattatttctgttaatcctttctttactcgctgtacataagtgtcagcttattgttagcccaaacacgtacagattaaagttaggtaattaaaaagatttgaattatttttcgtggcattatgtttttggataattggcatttagatcaacctaaccaacaagaactaaagatcgattcatcaatcaaataacttttgatttcgtttaatgtggtcatttacatacatacatccaagcccgtagttagtggtgaatgaaagggcgggtgggttaggattgggtccattttgaaaatttctatcaatttattaaaaaattcaattgcaaatatttatttagatttaagcattttctaatttaattaacggtttgccaacctctgcacattcttcgttacaacttccgagattaatg

SEQ ID NO: 113530 - DNA, 70 bp, Heterodera glycines
aacgcgcaaaactttggcttcgcttacgatttcggatcattgatgcattatccatctggaggcgatcatg

SEQ ID NO: 113531 - DNA, 1003 bp, Heterodera glycines
aattaagtgaaaatttcgacgaaattggtaattataaatgtccaccatattaattttgtataggcgtactttagagaagacaaggcttccccgagaggatgattatggatcaattaagcagacaattgatactatataatcaaaattattacagtagtattttgatcaggtgtacttttttcgaagtctttttatgttttaaaatatttttaatgatgtaataagaaaatatccttatatttgacctatttttcggccaaataatttgcataatatgaaaaaatatcgaaaaatgatttacatagagaggatccggtccaaaaaagaaaagcgaaatgtgctattcaaattaattgaacaattaactaattaaatagttggaagggtcattggcacaccgtaaaaagttatttttaaaagggattttgtcattttctttatattttccctcttaaaattaaattttttcaaaatttccaaaatcccgcaatcccgcgctgtatcccgcagattttaaatgcgggattaatcccgcgggatcccgtcccgcaaaaaatttgaattccaatcccgcagcgggatccgcaatttgaaatttcccgtctctatgcagcaacacgggctttatttatttatttatcatgacaatatcgaaaaatcagtcatttaaatgttacgaaatacatcaatcgactacaatttgcatagctcagactcgaaaacacgtgaatatttatcgaaaatatttctataattttatttaaatgagaaaatgtaaattaatcaatcaaatcatttcttacaaattacaaactaaaaaaaaataaatcaaatatataccgatttatatatctatagtataacatgtgaagattcattgaaaatattttctaatattattatttagaattaatcaataaatgatttcattacaaactacaggcttaatgtctaaaactaaaaccaaaaaattaccaatttttaaagcttaatcttccttatg

SEQ ID NO: 113532 - DNA, 238 bp, Heterodera glycines
tttgcctttgtttcggtaaactaatttaatttaattaccaaatttatttatttctaacaaatttaatttaatttaattaagaattataatagtttgaaaatttaaatttttctttataaatttaattaataagcatatgtttttacaattttatttggtttaaattatttttttgcagttttattacaattttaattttattttgcaattttttttattttatttttatttaaagatg

SEQ ID NO: 113533 - DNA, 538 bp, Heterodera glycines
aatcctaagcttaagcctaggtccaagcaagcctaagcctatgactcgcctaaagcttaggtaagcctaggcctagcctaagcgattgtacgagttgccttttgtaaattctcgtaaagctgagttgtccatcagccgaattatccaatctgctgagttatcctgacacgatatatttttcataattggcgtttttttagcaaatataaatccgttcaaatataaatccgttccttggatataacaataaaaaaagatgttgaattgctttggtttattttttccaattttttttattatttcattattatttttaattattcatttgaatttttgtatatataatcgaatcttgttttccaattttagaatatttattttctttaaaaattgcttgttttctgaatgtcgagttaataatttatttatttatcctatagaaacattgttgcgacttttgtgtttccatctaatcattttatttttcgtcatagtttattttatgtgtaattattagagaccgagatttccaaaaatg

SEQ ID NO: 113534 - DNA, 637 bp, Heterodera glycines
  unsure (1)..(637): unsure at all n locations
ccccttctgttctatcacataaattaataaaatgccgccccccccgtcctttttattcctgatttttctttttcttacactttaatctaatctctaattttggcacaatttacccaaaatgttttattgtctcttctaaagaaacaaaggaatacattgagatgaatccataagaaaacttttcgcataatttaaattatcatttttattttaattctctctttttgttaagtgtctttttttgaattctttgggcaaaacgttttagcaacaagaagatttggaaagctattcacagatcatatttgaaatttatgtcgaaatgcccgggagattttaaatagtccctactgacctttcaattcaacaaatatacaccccttggcattggataatttaggcttttatgaaaatatttttatttataaattgatttatgtacaatttaaatcaatgcattacatttttattatcttatacattggataaaatcaaagcaatcaatcacaatttttataaaataaaaaattttgtatttaatgnaagcatagatttaaaaaataatttaatgaaactgtcctttgttcttgtaattgtgctgacagtgataattggcaaaatatcggaaaatgaaatg

SEQ ID NO: 113535 - DNA, 623 bp, Heterodera glycines
tttcaaacatccatcaaatgtaaaaaataaaatcacttgctttttaaagaaaaaaaaataattagaaaatttttaaaaaccaaaatcccaaagatatattattggaaaataaaaaaaaaagttgttggtttaattttaccgttattctgagcctggtcattgatgcggtaatttaggtaattaatttagaaaatattcgattgaaaagaatgagagagaaattccatttttgcattatttattcataaagggcgatttgatgaatcatttggcggatgatttgcatgtcattcacaatgcagcaggacagcgacaggaatcattttctgctgtccttttaattacatttgatatttgagaatgaaaatattggggaggggtcgggggaaagaccgagggaggaggggggggggggagtgagcagtgttatgccagtaataagggaggaaaatgagacgaggaaaaggagggggtggggttaaatggaacgaaagacagagagagaaagagggaaattcggaataaatttgggggggggggaaagtatgggaaggtaaaagatgctgacaatattggggcatgggcaaacgaatcaaaagcaaaagtgatcggtgggagaaatg

SEQ ID NO: 113536 - DNA, 408 bp, Heterodera glycines
tccccggcgggggaggggagaacccccccccccattaatccgatcacaaaaattttacgttttcgaccaaatattaaataaacaaataagtatcagctgaattaaaaaataaataaaattcaaaatatgtacaaaacaatgggcggcactgggggggggggaagcctaatccattggggggaaacaacaaaaatatttgtgcacaaaaatggggccaaaatgtgttgtatttaagcgaatgaacgcgcagcagcaaaagcagtagcaaatggtctgttttattagcttagatttaaaattttaagcttaaagaacttaatatttttgtggattctttttacggaaatttctttaattttacaaaattttttttttattaaaaaaatatccaattaagtgaaaaaaatg

SEQ ID NO: 113537 - DNA, 58 bp, Heterodera glycines
tttagtcgattggttttcaataattttaattttttgtaagaaaatccttaaacaaatg

SEQ ID NO: 113538 - DNA, 75 bp, Heterodera glycines
tgtaagcttttattttttattaaaaattattttattaatttaataaaacaaagtttatagactcataatacgatg

SEQ ID NO: 113539 - DNA, 600 bp, Heterodera glycines
tttttattataaagagtcaatatccaataattgtattcttttaaaacagtaaaaaaagagtaaatttttcgtttactcgctcacgttcatttttttttagaaaatatgtatgtatattgctttaaaattgagtttttgacaaactgaaaaagaaagaaaaaagataattttttggtttgttgagtttttgaattatatctgattttgttattgcgatttttattcattataaaaaattgaaggcaacttagttgtttgtattgactgacaaaaggatgtgaaaagcttttttttgttttgtattgtaatagatttgtgacattgtaagagaatatgtagttgtaatgaaattattttcttcaaattgtatttcataattgaggcaagtttaataatgaggtttcaaattacgctgaacaggtcggtttgattatttatttgtcacatcatttccattattcatcagttaattttaaattgataaactttaacttttttgtcactatttgtttaatgcaatattttacctttgcttttataaattgatattagtaattaactattatacagattaaaggcgcctttattgtttgagcgatg

SEQ ID NO: 113540 - DNA, 1003 bp, Heterodera glycines
tttaatgtccttgaaaaagaattcgagaaaaacaattattttatataatgtttttaatcatctacattcttttgaatggattttgggacaacaaaggttgatttgatgaaaaataaattttcgtcttttatttgaattcgggtccaggattcgaaattggtcaaaatagatgtcagatttgtgatcagcgacctgaaaaccccctagaaatgttttaaaaaatatttttttttatggtttgtaaagtgcatacataagtaccctgaaatctttcaaaaaaattttcctgctgatcggcaaccgccggaaccaatgttcccaaaaagttttttgaaaaaagcataccgcaaaaaagtgcacatgcggtgaaatgaggaaactgatgaacagaaacaaaataataatgaaaaaatactgcaatcatttttcattgcatattataatttttttgtatccttgaatttaatgaaactttcacgttacgtccttgtaaattattatacccgtccttggaaagtccttaaccctaagttgaggcaaggttaatgaatttaaatttccccatggcgcccaatcggcggcgcccaatcgtaccggcgcccaaacggcggcgcccaatcggcgtcgcccaatcggcgtcgcccaatcggcggcgcccaactgacccggtccgtgacacacccgaaaaaacatatgacatctaagaaaaggaccgaaaatttttcaaaaaaacccctaattttctgagtagatttttcataacggaattaagttttcgaaatttttttcttaaatttaacgcatttcgaagaaattttgggaattttacctccaattaaaaaaaaatttatatgcataatttttgaactctaatctcataaaaattaaatcccatataaaaataaaattgctttttcgcttatttgcgaattaattaattacataattaattttttcccttttgtacattcttttattttatttatttcatttcaaaaaaatg

SEQ ID NO: 113541 - DNA, 1003 bp, Heterodera glycines
accgcagtttttatgttcgtgacctgtcaatcaaattctttgggcgagaaaatttaaagcgcggcggagatgcaaaaataattgcgtcacacaaaccgcagtttttatacacgggaactgtcaatcatataaatgaagggaaggctgaagcgacttcatttcaattccatttcgcttaaggtggggggtcgggggctattcttgcccctcggggcgcttgcccccaaatattcaaatttttccatcgatcatctggatctgtcaccgcggcacggcagcacggcatggcagtgggaggagtcagcagcggcaccatccccaagttctcttctcatcatttgccactttcgcccactttttcaatttgtcagcagcggagacgcatcccaaattcgcttttcactagttgccattttcatccactttcatcatgccctttattgcccccggcactttcgcgtttctttcaaaagagtatggggaattttcggctgggcattttgacccaaacagagcatacgacccaaattcacttgcagaactttcgtaatgacatttattttgcttccattatctttcattttttctttgtagtcaatggcgaaaagagtttctggacggccgatatggatccaaacaaccaacccctccttccaccccgcgtgccccatcgcccagattcccaatcccggtcattgttggtaattttaatttgttttttggattttgcaaatattccgtttacaggaaatcgtccacaggatgaaaattgtttggttttccacaaatatcttgtctgattttttccattttagggcggcagatgttccccgatgacgaggggtaagaatcggaagatgatgaaattctcttgccacctgcgccgatccccccgcaacttggccaccctccgccaaatgtgccggtaatttcggtctcgcttttcgttgctttttctcaaatttccgagtgcttttttcaggcagttcgtgttcaaccaatg

SEQ ID NO: 113542 - DNA, 129 bp, Heterodera glycines
agtcaagagcatcagctcggccatgtgcttgtccgtcttctctattccccccatcgtttgtctgtctctgttctgtgcgtctgcggttttcacggcgcctcaggcaattaatgagtttcacaacaaatg

SEQ ID NO: 113543 - DNA, 304 bp, Heterodera glycines
aaaacaaagagatttgtggtcctggagcgttgctaggaaaattttgtgactttttaaaataaatatttttcaaaaaaatattccccatttttttaaatttttccaccctcttcctttaccaaatagttatcgggcctgctcgtaaaatatacagtacacagacagtaagaagttttttttttcgatttttgtttttgcgccttttgtcgcccttcatcgcctgataaaccaaacagtttgcttcgtttggccccgaatattgtactcaacacaacgctttcggcgccatttgcagcaacaaatg

SEQ ID NO: 113544 - DNA, 1003 bp, Heterodera glycines
atgtaggcttaacttttttagtgaaaattcgatcactcatattttttgctaattgagcagaagcgtaccaaactttgcagggatactccccggtaaaggactaacttacactgaaatgagcgccgagctagctggctcaaaaaaattttcgaaaatctgagtctttcgtttttatttattttttgcaaaattaattcttaaatattttttcagaaagggttctgaaacgcaccaaattttatttacatgttagtttaggcactctgatgctttttctatcaaaaagggagatgaataaaatttttaaaaatttttaattcctttttaaacaggccaaaaagtttaggcttaactttttttcagaaactgatcagaagcgcaccaaactttgcagggatactgaaaggaagagaaataacctattttaaatattatctagtcagttcatttaaataatttttatccaaaaaatttttttgggttttcggggcagtccccctgaaccgatgcgcccagatttatggggagaccgaatccttccggaatagcttcactatagcctgtactttaattctgcgttggatttttgctccccataattgtttgagtaccccaaacggacacttgaaaaaatcgatttacttttgttttcggggcagtccccccgaaccgatgcgcccagatttatggggagaccgaatccttcgggaatagcttccctatagcctgtactttaattctgcgtggatttttgctccccataattgtttgagtaccccaaacggacacttgaaaaaatcgatttttttgttttcggggcagtccccccgaaccgatgcgcccagattatggggagaccgaatccttcgggaatagcttccctatagcctgtactttaattctgcgttggatttttgctccccataaatgtttgagtaccccaaacggacacttgaaaaaatcgatttttttgtttcataaatatttttttcagaaagtcatg

SEQ ID NO: 113545 - DNA, 364 bp, Heterodera glycines
ttttccggaaatttttcagaccttaaaggccaaaaagacaatttagctgatgggggccgttctaatagagtttgtatgcctaaatatggacataatgtcaaaatatggacggataactatggtcaaagaataaaaaggatttccatataattgggagccctaggtacatatataaccatcgggccgggtttatatgccgaattttaaattaaaacatttaatataaaattaatatattttaaatttcaacaaaaaatgtcgctttccaaaacaatttttgtggctgaattttgttgttgttttttttcatatacaaactgtctactactgaactccttcaatttttttttcaacagacattatg

SEQ ID NO: 113546 - DNA, 609 bp, Heterodera glycines
gaaaaaaaaattttccaaaaaaagttaaaaccggtcaaattttggcgtaaattgcatattttttatgcaattaatgttgaggcattattttggatcaaaataaatagtgttaaatgaattagaagcttttatccacgaaaaatgtaatccttggaaaaaaatttcaactttttgttcgatttcgggtccggggttcggaattgagtaaatccgagttcagattcgtgatttttgagccaaaaataaaaaaaataaaaaagttaaattagggaccgcgattctttagcattgcgatcagacgaaagttaaaagggattttgaattttgatcaaaggaagaaaacccaatcagtgggagaaaaacgaatcgcaatgggaaaaagaaaatgggaaattccatcaaaaaatcaaataaagcattgtttaggaaacaaattagggaaaggaaaaatttaattgaatgttttaagaatgtgttttgccgttatttttaaaattaaatttttttcaatgaatttgattttactttgctttttaggattaagccatccagcggcactttacaacagtttcaaaacaaaatttattcgtctattaatatacaaaaatg

SEQ ID NO: 113547 - DNA, 220 bp, Heterodera glycines
agcatctgtttcatcgcagcaccggcggattgacaaatccaaacaatttatctccctgcgagattattgcaagtattatctcgcaataagggatgaaaatgtggagttgcaataccaccacattctttcatgtggtggaggacttggtcagcgctggatccttgaccaggctgcaaaaattgattggcaaatagcaacatttttgcgtagacctgacatg

SEQ ID NO: 113548 - DNA, 1003 bp, Heterodera glycines
ctttccaaattccattcccaccatttttctttctttttaaaatcagttcgcttcattcaaaagtttaaaatcccacggtctctccggttttttcgagaaaatcccgagcaaatgccacttttttttggtgttttaaagagctttttttgctgcccattttgttctccctctgtggggaaattcgtcaacgacgcaaatttaagagagaaaaaggacgaccaatttttattggacgggaaaaacgaaacgaaaaggaaacgaaactgtgcggcggcggcggcggcggcgccctccgccgtttgcctctcgaaaatgatactgaatgactgctgctgataataataatgataataatacgaatgaatgaatgtgtgcattttgtgttgtgttgaggcaaatcaatttattattatggttaaaaaaaggaaaagagagagaaaaaagagaaaagagaaggaaaaaatcatttcgaccaaaaataaatgggaattattggacaataataaataaaaaaagaacaacattttatttgtttaatttgtatacaataaaatgacaaaatatacatcattattttatacaaaatgtgcattgactgagaaaaaaaggggggggggggacggaattgccgggggccgggggggggcagtgtttattctgtcccctttattctgtcccgctccctccctccgccgttggctccgctccattcgctcgtcccattccccccccccccccccactcttcagctgattgtgctgcgaatgcttatgattatgatttgatgttgttagtgattaccgttgatttgagtttgtctatgtcaactaaaaaaaagaaagaaattattaaaaaacccattttacgatttgatgacgcattttgatacataaaactattacttaaatcattataattatcctgaagcctccccattttctgcccttttttattgattgttgggattgcctaagcgatcatcgacggatcgtttccaaagatg

SEQ ID NO: 113549 - DNA, 52 bp, Heterodera glycines
  unsure (1)..(52): unsure at all n locations
ggaattcaatganatgcaattaataattggcgattgcaaattagatctaatg

SEQ ID NO: 113550 - DNA, 553 bp, Heterodera glycines
atattttgacagtttttagtccatattttggtccatatttggctatttttgagctttttagtccatatttcgggcttttttagttaaattatttaatttacaacaaaatcaacagatcccttttttgtatgcaaattcgacaaaaaatgccttagcaaattaatttaatttttaaattcgcgaaattgtttaaaaagtttacaaaattttttgtccaaaattttgtcttttattgcccttatttgctcatttagatcctcaaaaattatacagtttctcaaaaggttaaatagatttacttgtaaaagattagtagctaagcacaaaagcagtaaaactgaaaactcatttattaatagaacaataaaacaatggaacaatcttgactctgaaattacggcatcatcttccatacgtagttttaaaaacaaagttcttaatgggttaaagcccgtaaataccataaaatatttacattgcatgagaaaaatatttttgattatttataactgtgtttcgttcgatgcttgtgatctgactttattttttcatg

SEQ ID NO: 113551 - DNA, 308 bp, Heterodera glycines
ttggcccttctccttccgatcattttgctggccacaactttgaacccgctttaccagcacatccatccctacctcaaatagtcagtctcgaaattttaatagtgaataagtattttaaattaaaaaagcaaaaatttaaatcgaaaatttgctgctgccttttgttgtcagctattgtatccacgccaactaacgttaattgtttcaaaatatgtttttaaatttaaatttgttcattcagtccgctgctgcacaccggtaactcgtcgcccagtcacgacgcgttcgccaccgacatttacgcgatg

SEQ ID NO: 113552 - DNA, 258 bp, Heterodera glycines
actgctaaaatggattggtttgaattgagtgaaaaagactaaatggcacatttaacactaattgcattgcaaggaagtgttcccgggtcaagaacccaaatttctataaacttaaaacgattaaagtaaattgttaataagcaagcatttggaattttggtactttaccgtgcaattgttcgttccattcattgcccaacaatatttcaagccctcattgggaaagagttctggagtaatattttgcaggtaacaatg

SEQ ID NO: 113553 - DNA, 808 bp, Heterodera glycines
actgcaaattgaccaaattgtcgaaaaattcactcgtcgaaaaaaagaaaagaaaggaaaagcagcgagaagaagcgacaaatacacgcaaagaagaagcaatggaagttaatgtgaggcaattccatttttggagaagggtggcggtgatcaaagaatgggagaaggggggcacaaatggagggggggttataatagggagtttcttaaatcccccaaggggtaggaaaacaaaaagtgttgtaacgcatatacctaaattcataacttggctcatttcaaccaaattaatattttaatttaatttaacattaaaatgttatattttgccatgtcaatgcatgtataattatagtcattttaaaattttaaagttattaaaatgtaattgatccaaacttattttatatattcgatattccaaagaattgtttaacttaataattaaaaaaaattaattgattttcaaaaaatatggccaaaaaattctgattaatgcttatttgaattatgtatatatatttttatattttttgtaaagaaatttaaataattatatattaatttgcaataaaatgttgaataatttcttaaatactaaaaactggtcgcaatcgcttttctgtgcttttattatgcaataaaggcatcatcttgccaaatgtcaatgggcgagaagccgacgacggtgaataaggcggggggggggacccatttttggacaaaattacgctgtgagcataaaactagtagcgaagcagttgaatgccatcgatttgacataaattagcaaattaaacagcaaatg

SEQ ID NO: 113554 - DNA, 996 bp, Heterodera glycines
tgcagatcattatcagcataagcataattatcatactccatttagagttagtacaggtgttgatgttgttgttgttgttgctgctgtttttgtcctacggcggcggtggcggatggacgaatgggaggagttaaagggggcgtggagcgagaaaagctgagggatgaagcagcaaaaaaatggacgaaagaatccggatgaagtagtgaagcctaaaagcaatcataatcaatcagtagtcagccagcaggtcccccgcttctcccccgtccccgccccgttcggttgggcctctgattggagttgccctccccctatccctccatcggcttctcccccctataaatagggagggatccgtccattctgagactcagcaagcatcagcagcaaaagaacacatagcacacttattccaatcccatagtggggctaataagggccaattaagaggaagaagcaaaaagggtgcctccgccaaataccctcggggcaaaaaacacagcgcgcacttttcccaattccaacaagtgcacatttatgtggagcaacaatgtgtacatataatcctgataatcttttttattttttaatagggctaataaaatcattttttgaatttcctaaaaaaacaataaattttgtttattaatcttatcaataaatttaattttctcaataatttctttaatctttctcaaaatcttataatcattatttgggacatttttgttatttctttttcatttaccgttacaatatttgcccttgaaatactgtatcatcgattactgtaattttcaattaaagcagccgtccgtccactggttgggaataaaaaaaaatcctccttttttaatgggtcattaccatattgaagcttccatcatgggacattattaatgagcgtaaaaggcgattaattatccttaattatcccttcaaaggcgggctaatccattgattattataaaacaaccggtgccacacattatg

SEQ ID NO: 113555 - DNA, 415 bp, Heterodera glycines
aaaatttcaaaaaaatgaaaaaaatggacctcctcactctcaaaataatttttcagataccacacattttgaaagccaaaaagttggttggaaatgatgagcttcaactgtttgcgtcgccatggtagcgaaaaaaacgaaaaaaaaaattttcaaaaaaaatttacaataaaaaaactctccaccctccccccattttcaaattatatattttttaaatgcactgctaattccgaacccttcgacaaataaggacaaaaaatgcttgaaatttgcaatttttgaaaacctaaccctccccttcgccctaaaatttaagaatttttgaaaaattaaacccttcagcccttccctcccctccctccccaaattggacaggtcggcgccggcatggatgaaaaacacgggcagaatg

SEQ ID NO: 113556 - DNA, 72 bp, Heterodera glycines
ggtaaatagatattacctgtgaataatatttgccttaaatagctcaaatataaattttaaactttaggcatg

SEQ ID NO: 113557 - DNA, 1003 bp, Heterodera glycines
tttttaaatcgtaactagaacattttaaaattagatgaaggagttagctcgcttaattgttgaacttagtatattcgtattaataactgaacatataaaacttcaattcgtttaagaaaatgacagttattctgtttaaaacattaataagccttaagcatagccttatgaaaattctcaaaaacaaattaaaaatttctcataaaattttggcattaaaaaatttctaactactttttttttcaatatcattgtagaactgattgcaattcaagtaagcagtttgatgagtgtgcgttctgatcagaaaacatagcaaaaacttttcaaatccgatcccgtcaaaatttttataataataaaaaaattttctgccaaaaatcacaaaatttctctcaaaattcaattcagtgctgaatgagtggtgaagatggggcttaagcctccttactaatcagtgtgagaactctgatcacagcaaaaaaaaagaaaacatactttttgcccccccccctccccttaaagcgttggttggttggagtgcttcatcatcgcaactccactttaaaaaattgtctccaataagtctcccccaagcccccggccctgggcttcatccctcccattcatttggcccccaatgtttgtccaaaatattttcttgacgacgacgacgacgaacgctgcggcgatggcgggaggacggaatattcagaggattttttggggggaggggggccaatggttgggccttaagtaaaggctaatgtttcaggcctagccaaatccgcttgatcgattaaggccgaattaaggagggcaaaccaaaaacaaagtacaaacaaaacaatttgccaagtctcgcactcagtgctaacatgttttggaattttgattaattaaaaatttgtcaagcgaggcttgtaatttgccgagactcgagactctaattaagttcatgatttaaattttgggcctcgagaaccgtgcttttaatggcatg

SEQ ID NO: 113558 - DNA, 697 bp, Heterodera glycines
attcatttgttttgattgtttttgtctatcatttatcattatttaaacaatttatttattgttctttatttgtttatgtgcgtacacttggtcggagtccttactccccagtgtttcattcatgcattaaatttctgttttatttattttatttgttttggacataacacttggttggagtccttactccccagtgtttcattcattcattcatttctatattttgttctctcatttatttattttgttttgttcacaacacttggtcggagtctttactccccagtgttgcattcattcatttatgtttatgtttgacaaattgcatttttttgttgtatgcacatacacttggtcggagtctttactccccagtgttgtgtgttttaataaaattttttaaaaagttagttctcatgtttttaacactacaaatataaattgttggtaggtgggtaggtcttgcacatatgagccacctcatcgtggtgtgcaagtctagtagccaacaacaaaaatatattgttggtgaagctaacggctcattaggcacaaataaaccacaattttacaaaatctgtttcaatataattttaaattgtttttcgttttctgcatctccccaaaatgttttgctttttttatgaacaataaattttgttaataatttttatataaaaattaagctctaaatatg

SEQ ID NO: 113559 - DNA, 212 bp, Heterodera glycines
tctcgcctaccgacatttcgcctactaaccaaaaaacattcatttcgcctactaagccaaaaacattcatttcgcctactaagccaaaaacattcatttcgcctttttttatgttttgctacctaaaaagcgttaataaaatttttggttctagtcggttttacgcgtcccatggcattttacgcgtcccatgacattttacgcgtcccatg

SEQ ID NO: 113560 - DNA, 193 bp, Heterodera glycines
tcatttatctcattatttacttctttttcccaactttgtctctttttctgtcatttgtcgtcgtccactgattttgttgccagtaatttcattcattaattcatttttattgtttattttttcagtgttatttaatatattttgaaaatgaaaaaaatcttaattttagtggctttttcttataaaaaaaatg

SEQ ID NO: 113561 - DNA, 82 bp, Heterodera glycines
tttttaaattttataaataaaaaattatgcttttaaagttaaaaattttcattaatatttttctgttacgagaaaaaaaatg

SEQ ID NO: 113562 - DNA, 1003 bp, Heterodera glycines
gtttggaatgaataaatcagcctgtttgcccctctcaaaagcccacccccaagtcccatcatttcgttgccggaggacatttgttccttcctcaaggacacatgcgcagagcgaagaatgcaaaacaaaatccgtagatggtgggaggatggggcgggtgctagatcgtttcctaaaaaccgcatgtggtaggaaaacaagaaaatataagacatataaattcgtatcttggcccaatttcaaccaaattaatatttatgggtgaaaaaggactgtggaaaacgaaacttggaatttgtgtgggcaatgcgcatgtgtgttgtgtggaagaacgggtgattaaacggggagaagaaccctttgtgctgcaagtgatgggaaacgaatgaatggtgttaaggaggggggagggcggttggagtggaaggaagtgacgaaacactggaggagaaaaagcactgtcaccgaacttgtttggtgacgactgactaactgtgtgtggtttgcggttgctcttccgcctccatttttctatttcgggggcgaccgcgcccctttttcgagagcatttttgaaaattcacaaatatttcttttttgcttatttaaaaaaaattctttcgttattttttttttctttctaaaatgctttgagtttggtactgtttcagcggtacaaaaggcattgacccgtttcaacacatgtttcgaaaatatatttaaaaagaagggtccaatatttcctctgagtttaaatttgaaaataaaatcgacttgatttttcattaaaaaaattttaaatatgccattttttccacagggttcgtcttcttttggggccttgtgttcctcgtcaccaccacgttggtgttcattttcaagcatgaaattgaccactccgtcgtctcgcaaccgcacgagtaaaaaaaaattttttttttgcctaatttccccatttttgacacggtttaaggaaggccgaaaatggtcaccacaatccgatg

SEQ ID NO: 113563 - DNA, 1003 bp, Heterodera glycines
ttctaagatttttttcttgaaaaatttctaagttagcaattttttttttttaattttctcgggggggaaacgattcgggggggaaacggcgggggggaaacggcgggggggaaacgaggtgccctcaaaaagtttgcctgccaatttttgaatatttttttcgtcgggacaccaattcttgatgattgccaatttggcattatgcaattttcgagtctgggacctagaacgatatttatatttacctaggagactattcaatattttgtccgtgttttagtcccggtcccgacctaccctattctatatgtaaatgaatacatagtggtgttaaaaattattggttttatctgattattagggatgcaacttttagtgatttaactattttttctgctcgattcttttgaagaaaggagctcaaaaaacgcatttctgcgttaaaatttttcgattcccgcccccggcgggggtgacgggggcggggtccgaaccctaatttcaacattttttggaaaattccttaacaaaaatgcaataaaaacaaaaaatacacccctaagaatcgaccaaaaaatttttttaaaatagaccactatgaattgaaaaattttttcaaaaattcttaccccaaatttgttttcttgacaaaatttttgatttaaaaaatgtcaatatttgctaagagaattttataaaggaaatgtagcacatttgcaactgcaatcagtgaataaaaattattttttgctcaatttttggctgaaaattatgtaactatttgccactatttcggaatttttctcactatttgtcactattttagttaactatttcgagatttttcatcactaaaagttacagccctactgatcatcccctcattttttaatccatttgaaataatatttatatttttttttcgtttaaccaaattaaaattttttcacagtccaaatttaattgtttttttccattctttcagctgtcaaaggcgaagatg

SEQ ID NO: 113564 - DNA, 882 bp, Heterodera glycines
tttcattgcggagagtgaaaatattatctattatttattttttcaaaaggaggctttttgaacttaaattaggcaattaaaaattttcacttgacatccatgatttgagcattaaaacaaatatttttttttctaatgagcaaattaatttttgctttttttatattattttgcctaatttttgaataggttccgaaaacctggcattcattcctttttggtggttttgccaattttactgtttttcatttaaatgtcttattatgtattggccctttacaatgggcacttttaaattttatcccaatgtttcttcgtcgtttcgatgttttataattttgcattttttgccaaaaaaattcttaatgaatttttccactattttctttttcttttttctgctaaacttcaattcggttcaaccatgtggttggctgaaaaatgggcccccacggtgattcaaaggccaatttggacagactcggcaagttacaatggcctggtcagtaaatgaataattttgaattttatttaatctaaattatggtgacatgacaattcgtaccaaagcgtacttgcgccaatggtgtttcattaattttttaaaatttttatgcattattttgtatgagttgatgttgaccccatcttcgtggcatggcgcatgtgaaattgttatttggggacctctatatttaataattcattttaactcaaattgacaaagttttaaattaacttaattaatctcaatcattgaaaagcaagaatgattacattacaactgtcttagattaagatttgcttgtttttccttttgtacgggtgttaggaggttgctctgccaatggtcccatttcataccattagaacgcaacgatg

SEQ ID NO: 113565 - DNA, 390 bp, Heterodera glycines
aatttttaaatgtttgacccaattaatcacattatttggtgtcggattatttatcattcattagtcattcattcagtcacccatcaatcagcaccatcaacatcatgctttcatttaaatttattaaaattctttttacaattccatccaaaatcaattaaaatttggttttttctgacgggtgcacttcgtttcccctcctctgaattttttttttaaatttccagtaaaagtattaattgattaaaattttgaaaaaatgctaggaaatgtttaattttgttttcttcaaattttctttaaaaaagtgtttgtttctccattagcttgcaaatttaaaaaaatttcgttattgttttttccttcccaccgcagggattgcccacaatg

SEQ ID NO: 113566 - DNA, 761 bp, Heterodera glycines
tttttttaaggagttctctgtcttaatgtacaattttttgatcaagaaaatctcatccggcataattttatatttacgtttattatctcgagatcatctgaaaaatatgtgataattgaaaatgttttttctttgtcaattgctttttatgttgtttattatcgtttattttaatgtaacaaatcaatacaactgtaatttgtattgtcctgggaattatgcagaagggtaaagttaatcataatataaaataaaattagaaacattttttaattgtcacattagtaaaataattaattttttgctcatttctcatgaggggagggggggggggaaagggtggaggagggagagctggtcccgattttatatttttaaactttgtgaaaccatttggttggcatccacgaataaatgaaacggtacggatcaaaatcgccaatttaggcgtaaattttgtcctggacaagaatgtttgttacgagcagccacataccggtggacaaacaaaccccttttggcccttaaattgaagtaaattgagggggtggaaaatttttaaatttcgtatgaaaagacaatctcgattgggtaatgtcggaatttttgaaaaatgcatcggagtagctagccataatcaatagtctctatttagctggaaaattataaaaaattaaaaaattcggaatcttgttaaacatcaaaaccaaatgtatcaaatttatgaataatcgcacatttttctgaagcacttcaacatg

SEQ ID NO: 113567 - DNA, 103 bp, Heterodera glycines
attcaggaatctatatttgaatgttcacgctaaaaatccctattttgagtgtttgcccctaaaataatttttttccccttattttggcatttctcttaaaatg

SEQ ID NO: 113568 - DNA, 537 bp, Heterodera glycines
gaaaagttttgaggagtttttaacaaaaatttaatttaattttgttttgattttttttctattttttaatttatcttaacattggggaaaaatattttaatttctaaaaaaaattttcttggaaaatcccagtttattcccgatcgtaatataaatcgaaaatttaaaaatggaatatttttcaaaaaatagtaatagagaaaatgattatttaacattaataattttgtttactgaaattaacttcataaaacattataatttagtcgtaaaactgaaaactttttctaaagcaaaaataattttcttgtaaaattaaatgaaaaacgtttcggcactttcgtgcagtgtttagttggaaaggcacaattggattactgagaatttgcacatggcaattattaaaattaatttaacgcgaatgaaagtgaaaagcgcacaatggcatttctttctttccaagtaaaaaggcaaagcgaaagcatttggcacggaaagaacaggtgaaaaaaaaagtaaatgaaaagtgtaaaaatg

SEQ ID NO: 113569 - DNA, 1003 bp, Heterodera glycines
gaaaacattaaaatttttcaaaaaatttcattacatttgatatatgtacaaaaaaaaaaagttaaagaattttacttaagaacattataattattagaattaaaagaaaaaattaaaatttgaaatttgaaaaagattaacaacaaatcatccaaattcaattgtgatttgctttaaaaaaggccaataaattaatattttattaaagaaaaattagtttgtaattaattaaaataattgccaaatttcaaaaaaaaagaatgagcagaaagaggcgaaagaaaaatatgataaagcctaccaccaatatcattatgatgatggatgcaacgacaacaaaaaggcaaagattgaatgggaacgaaaaaagaaagaatttaagaaaataaaacgcaaaattaaaacgtaagaatttaaaaataagaaaaaacacataaatttaattttttaaaaaacctaattattttctttttaaaattttttgagctgtcataattatgcataattagtgccaatatttttaggttttagcttattttttccagtgttaaatagcctaaagcgccacgaaaaacaagtttttttttgtgggttgttaagctacttttcgagttattcatttttagctaaacgggggttttttagagcctaaagcctagctattttggctttttagagcctaaaaatattagccctaattataatatttttttaattttgaattttttaattaaatttgacccaaataaacaaactttactaactataattcttttctataagctaaaacgagaaattttatttgttttggatggataattaattatattatattaattattttatttctcaacagtttgctgtttttggcgtttttgaaattaaaaaaatattttaatcaaaaattattatagatttccgatcaattttgaattcatatgcctattactgcttaattgaaataaattaatccaaaacccatttaaaaaaaaaattttcaatg

SEQ ID NO: 113570 - DNA, 99 bp, Heterodera glycines
ttcctaatttcactcatttttcttggtaaattgactctatattttctaaactttccccggcggtgcctaaagactccgccggatcccaattttcccatg

SEQ ID NO: 113571 - DNA, 206 bp, Heterodera glycines
tttgttgtccttggcagatggagttcagtaatgtctttgcaattccaaaaatcgagcgaaatgacggagtgcgacgctgacgaccaatccaagcgttttcaaggtattcaagaaaatcctggtgccgttgagtgtcgcaaaccggtgaatgaacctttctgccaggtcattaaaacgtgccacaacgtcatcaatttcacaaaatg

SEQ ID NO: 113572 - DNA, 460 bp, Heterodera glycines
  unsure (1)..(460): unsure at all n locations
ataaaaatnttgaaaaaaatcctattagttttggaattcttctaatttcgtaaaaaaaataaaccaaaaatttcaaaataattttattatctagaaaaattaaattaacgcaatttgccgacccttcttcgtttctcattttgatattaattaattttttcattttaccaattaatgtcactcatcgccacttttcgataagaaattgatcgttttccgcggtccgcttttaatttgagcaactttaattgatataatgacttgtgatctggtcagtcagtaagcactggattgtgtgaatgatcacaaaaaagtcatcagtccgttcttatttttaaattgtttccttttttaatttttttttttttaaaacacaaataatttatttatttaaatttatttttaattctcgatgattaaaaataaaactttcaattataatcaatcaacctcaacaatg

SEQ ID NO: 113573 - DNA, 295 bp, Heterodera glycines
tttaaatggttattttttgggaaaaaaccttcgtaaagtgttaaataggcgtaaaatggcataaaaatgacctaatatatttataatcaccttttaacatttaaaaaattatttttggaggggtacatttaaaaaaagtttttttttttaattttttcactagaaatttctaaaaattttcaaaaattctcaaaatatgtataaaaaaataaaaaatttgccaaaatccttccgtttcttaaccctatatttaatttctaaatttcaaaggtcacagcaacaagcacaggaaatg

SEQ ID NO: 113574 - DNA, 891 bp, Heterodera glycines
tttgatatggttatatgtaactagaggagcaaacaaatttagagacttagtttttgaaaaaatggaattcttaagaaaaatgcaccaaatttgtggaactcgacaagtatcattaaagcaaaatgcgttttatggaaatcgcaataggtgcctaaatatgtagacaccaaaatgtcaatccctaaacgctatttcggaagccaatttccaatattttttcagccgtcggaatgccgattttcgaaatttttgcaaaaaaaaaagccgaaaatttacaaaatgttcccttgtaagttttgatcaattgtatattggctattaaaatttttgaaaagaaatttttttcgaagcaatgttaaaaaacaaaatgacgcacaagacatggacggtaaaaaacgaaaaaaattgccaaaaaataattggcgtaaaacaaaacgccaacacacgcaaaaacaaagtatatgcacttacactggtaaatgccttttttgtattttttattttgatcagccataacacgcttcattcccaacaaaagtgaacaaatttgatatctaaaaaaagattttgaaaaggagaatctttttctaagtgaatgctaagcaatttgacatctcagaaaaaagttgtgatactttcaaatttttatcacgttataactcaagtcctaaactgctgttttcaccaaaaatgctaaaactattaatttctctattaattctaaatgtcctaagcgattttgtacccttataaccaaaattattagaattttcgaatttatgtttttccatgtgttagagacatgaaaatagtacgccaaaaagagagaaaaagtaatgcattttcatgttttatatatatcttttgaaaaagtgtataaaacataaaatg

SEQ ID NO: 113575 - DNA, 592 bp, Heterodera glycines
cgttttattaaatgtgcataatttttggttttttaaaggccgaaattgtggtttttttgaatcaaatcttccaaaaattcaatataaatattaaaaacattttactgttaataagaatggtttattgcttttttgcgaaaaaatataaaaatttaaaaaaaaaccgaaaccgaaacgatataccgaaaatttttcttcggtttttttaggtttcggttttttttcggttttttaaccgaaaccgacctaccgaaaattttttgagtttttcggtttttataccgaaaccgaccgaccgaccctcttgtccggtctctagttaaaattagaattttaattaatggtgaaacagtttttatttatattattattattataaaattattaatttcgatcattcagtagagagaaaaattcactttacaatttaatggatatagtgatcctgtcaatattttaccattaatgtaaatttataaggaagagaaaaattcatttttgagaaatatttttattattatttatttctttttttcatatcgaataaaatataaattttaatttttaagaaaaagaaaaattgtcaacaatg

SEQ ID NO: 113576 - DNA, 106 bp, Heterodera glycines
gcggtgccaatgccaacaatgggataaatgcagaaatggtaagcaattgtaattaaattttcaaaatttaattatttttctcattttgttttaaggcgatgcgatg

SEQ ID NO: 113577 - DNA, 936 bp, Heterodera glycines
cctggaaatttttttttgagattttggctaattttttaagaaaaatttaggtttttggggggccagcggtgccaataggcgccgccggaggaaaattttaatgaattttgttaaaaaaaatggccaactgatttgtcaaaaaagtcggtcgattgtttcggttttttaattatttcggtcgaacggtttcggttaaaaaatcgaaaaaaaccgaaaccgaaaaactcaaaaatttctcggtcggttttttcggttaaaaaccgaaaccgaaaatcgaaaaataccgaaaaaatcgaccggtccgatctctaattaagacctcctatttattacttactgaaaaatataattacaaaatttagttaattttttaattttttcacgcttaattttgcgcatgaacattttttttgcacatttcattttttccaaaatttaaaacatataaatatggacaaaagtctcaaatacagaaaaatattgaaaaggtatcttagaagcatcaaatcaagctaaagacactttttttcagaagcaaatagattaaattttctttttagaatttcaagtactctatttattctatttatctttctaatttcaaaaaatttcattgaggttcaaaaaagttctggacaaaaaattccgacttaaggttttgtggaattttaccatatctttttatatacttaagtaaaaaatttaataaaattatattctgatagaaaacacctagagctattgaatgatacgaagaattattaatttggttgaaaatggaccaagttatgaatttatatgtcttacatttttttgttttcctaccacatggcggtttttaggaaacgacccagcacgtcttagaagcatcaaatgctaaagacacttttacgtgaaaatgtcaaaccaatctaaaaatactatttacataaaatg

SEQ ID NO: 113578 - DNA, 471 bp, Heterodera glycines
tttccttcaacttcacttcgccaacatttgctcgcgtacatacatacacatattgattttcattcacatttttcttctcgacaatattcctttgtttttccgtaattttaaattaaaaaaaacatttttaatcatttatttttaaaatttataaattaaatttatatgcattcattaattaatagggattccttttttaggcacaaaaaacgcaaataggcaaataaaaatttttattttgtctatatttcattgcaaatgaaagtaatttaaatatttcaacttttttttgaataaggccaatttttaaataaaaaattttatcaagaaaaaatttctaaatttagaggatcaatttcttggaaaacttttttacttcttaggcgtttattgtaaatcttaaaattattttatgatatatacgcgacgcattttacaataatagatttcaattaaattaacctgaaaatg

SEQ ID NO: 113579 - DNA, 1003 bp, Heterodera glycines
caaagctttaagaaatcggcaaatttaattcaaaaattgtccagtgccttttacacagctggggacacccactctcattttcatgttcgttgtgttacctttttctaatcattctaaattcaaatatcttttttttaaattttgtacctaaatttcttaataaatttatttaaaaaacctatggattttccttggtggtgcttgtcgaatttcctaagaattttaccactaattaaaggccagaagatgacctcttcaaagcacactgacaatctacattgtctaatatttacattattattaaagcattctaaaaataaataaattttccaaaattattgcttcctttcgacggattgtaaaatgattccattccggtcaattaagcggttagtgaattttcccggggatttcgttaattcggaatatgtcgctgtgtttctctctgaatttgtccttttgttggtgcttgttaattctgtccattccttcacagaatctttatttactatatttatcagttaattattggaattgtaattccttttttccttggcctaacaaaagtaaggagcatttggcctgggagaaagacactattaactattagcacttatgttatcgcctctatcaattaattatcctaaatcattttgtaacgtttgcattgttaaaacaaatgtattttattacttatcattgtattcctcgtttattaacacaaatagcaaagcattcgattgataaaaattgggccatcagataaataaaatttaaattgatttaaataaaattcattgaaaagttaattggaaagaaaaattacctaaaaatgtttttaaaacggtaataacttctcgacgtttctctattggctcataatttgtacaacattttctattattccactcccaaataagcaattcgttattatgtccaatattcgttcaatttcgacgccaaatgcgcccgcggcgattgggccttacaggttggccaaatg

SEQ ID NO: 113580 - DNA, 133 bp, Heterodera glycines
ttttcgagcgtccatccaaaacctgcaaacatttcgcattaatgtgacaaaatgtgaaaatgtgcaaaaaatcggcaacgatatttctaaaattgtttttcccaattttatttttcgtcaaatttacaaaatg

SEQ ID NO: 113581 - DNA, 97 bp, Heterodera glycines
agtaatttctcataaatattttttctttcattttaattttaattttataaaatttaatattattttactaaatgtttatagttttataattattatg

SEQ ID NO: 113582 - DNA, 114 bp, Heterodera glycines
ttatttaattattttaatttaatttaattattttaaattgatttaattattttaaatttaattcacctatttttcattgtgaataatattttgattatttcagttcgaaaaatg

SEQ ID NO: 113583 - DNA, 1003 bp, Heterodera glycines
aatgccaacaaaaaaatatgattttttattttttaaataaaaattccaaaaaaaaaacaatttaagttaatttcgacattttatgggtggcaatagagcattttactaacaaatcaataatataattcatatttttttcagaaatgatgaattaaaaatattctatatttccttgaaatcaaaaatttttatgtttttggcatttttatataattttttaaattttctggcatcagcaggagttaattaaatatttatatattaattaatttaacaatacttttggagttttattggtaccaaatgactaaaacttaatataaattgagtatttttacttagtttttaaaaattctttgtgaaaggtttccaattttctattttttctctaagtaaaaaatttatgtgtttttcacttttttataattttttaaattttctgtcggtaaggtaaaactcttcaattcaattattaaaattgaatattatttcataaaattaatttaaaattataaatataatttttattccaatttagcttttaattgacaaagtacagcaaaatgagcgaatttcattgacaattttggcatcagtacaaagtcgcgcggacccaacagtttggctggacgggcccatctcaacacaggcgcattttgtgcttttggcagccggtttaatattttatttaaaaaaaactaattaaataatttctttttaaaatttattattaatgataattttaattttttaaattttatttataatatttaatttaatttttataatttttttttgaatttttttggatagtttcacgataaaattcaaattttaaaaaattaattaggattcattaattttatttatttaaatcaattattttatatttaaaatagtttcaatttaaataattttttttttttgaaatttaattgaatatttttgataataaattaaatcattaatttattttatttatttatttttaaggttggaaatg

SEQ ID NO: 113584 - DNA, 128 bp, Heterodera glycines
ttagcattgccaaatagcagaataaaacacacattttcactaactgccgcagcaacttggaggatgaaacggtcaagccaagttatcgagcgaggcctcagagaattgccctcgagaaagcccaaatg

SEQ ID NO: 113585 - DNA, 320 bp, Heterodera glycines
attaaaaatgaattgaaaaatgtgaacgaatcatttgaccgtttggtagtcgcactgatgaacatgttgacgagcgcacgaggcaaatggtggacatcaaacattaagaatggggaaaaacggattaagggcccagggaaaaaaccatggaatgaccattttttaacggcctttcccagattaattcgaaaaagtggctcccattaaagcaaaatttatgaacaaaaagagtaaaattaacaaagctagagaccaatgatcactgccaatttttttctgtctgcgacagtcacccaattcgctccatcggttccataatg

SEQ ID NO: 113586 - DNA, 183 bp, Heterodera glycines
tttcggcgtcattcagcgccttttatagaaaaaatgaaatggtttttccgcaccggaaattctgcgtttttcactaattgagaaacattggattataaatagataaatttatgtacatatatacacattctttcattaataaattcgatttcaaactgatatttggcctataattcagtgatg

SEQ ID NO: 113587 - DNA, 59 bp, Heterodera glycines
ccttgggaaaagaaatgtttttttttaaattaaaacaactatttttaaattaaataatg

SEQ ID NO: 113588 - DNA, 166 bp, Heterodera glycines
gtttttggtttgtgaattcgacgaaacgaaacattccgattttgtgcctccgtttcgatatagcaattttaatatgctcttaaatagaacagagcatttgtatatcgaagcggggcattttcactttatatcaaaagaaaaatgaaaatgcatgccatccccaatg

SEQ ID NO: 113589 - DNA, 134 bp, Heterodera glycines
ttttgggggtgagggtttagtagaatagaggaagaaattttttatctacatatttatatatatatgtgtgtgtgtgtgtgtgtgtgtgtgtgtgcaaatacagagggacacaaaaaaccgaagaagggaaaatg

SEQ ID NO: 113590 - DNA, 706 bp, Heterodera glycines
gaaatgaatgaattaattgatggttaattgatgcgattatatgaccgaaatgatatgttggcactgtgccatttcaatattatattgtataatttgcttgtatgtacctatttgtcctttgcttgttttccgtaaaattcgttcatttccattttattttatgtgcatgtgtaaaatcattgtgatatgtaatcattgttaaaaaatgatttgtgataaaatggatttgatttctgaattttacaaaaccaggcgggatattcatacaaagcatcttttttctagcattatctcttccaaataaaaatctgaacaatttaaatttaatgaaaaatttgttggcgttctattttttcaaatttttaattgagcctggttttaatgacaaaaataaaattcattttcgcgttatggccattatttttggcaaacagaccattttaatctcctccatccctttcaaatcggtcaattttgttttttttttaccaaaaaaatggccaagtaattgatccatttgagccccttaaataatattgtgccgcggttgtgtgaatttgcgcgcttttattgttgattttcattttaaattttgttgcttaaaacgagaaagtcgaaaattgaaaatttttattttattttttgcttttttatgtgtatataaagacgtcaaacagaatttttcattcataataccgcaaaaatg

SEQ ID NO: 113591 - DNA, 320 bp, Heterodera glycines
gagaaggtttttcattccctctgacggggagaggctgctttaagattttcggaaaattaactccctcaatttgttaattatttccatatttttgtaattttatgtccatatttagcgattttatatccatattttttcgatccctacttataggaagtcgtaatcttatttgtttatgtacaatgaacaatttttagaatatatttaaaagtttttttgaaaaaaaatttttctcaaacgcccgaataataaaaataattttttttttaaatttaaaaggagacggattaatcagggtgatgaaataacgataaattatg

SEQ ID NO: 113592 - DNA, 55 bp, Heterodera glycines
  unsure (1)..(55): unsure at all n locations
aaatggcctcagtagtggtgccattgacgacaaccacactggtggtgacncaatg

SEQ ID NO: 113593 - DNA, 490 bp, Heterodera glycines
aaattggtaaaaaaccaatttaaaatcacataatataaaaatggacaaaaatattttgatttaaattgattactttttcaatatcgcacgcataaacaacattaaagttaagaaaagcagctcttgaaatattagggttcattattcataatttgaaatgtaataattgggttttcgaattaaaaaacgaaagaaaaaatgagacaggactattgaaatataatcacatcattaacacacttatagagttttgttaatattattgtgatagaaaacatagaatttaatttaacgaattcaaataaaaaaattttacactaaattattgacaaaatagaaaatctgagtttaattaattttgcaaattaagatccctggttcctgggccttttacacgctgttttttgcgctaattgccgtgctcatccttctctcagtgctcatcataatcaatttaatcataaaaattcaatcattttacggcacaatg

SEQ ID NO: 113594 - DNA, 199 bp, Heterodera glycines
gtcgacaaaagcgaattacgcaagtcaaagcatggcatggcggccatgtttcaaatttcctcaacatcttcacggagcgcgaccgacgggcatcaacaaaatacagcccttacgtccagcgatacatagacaaggttttagcactgaaccgaagtctgagccaatcaacaaatccgccgacatcgacaacttcgccatg

SEQ ID NO: 113595 - DNA, 465 bp, Heterodera glycines
taacatttcataactttttttaccaaatatgatttcgaaattttataaaaactttgaacaatttttcttaataaatttcattaaaagtcaaaatttttcctcggcgacgcctacaaaaacctaattttttacatggcttgatataattttaagctaaaataaaagactaaaaaattttttcgaattttttaatcaaaattcttaaaattttgaaaaaagtccggtcaaaattttggacctggctcggggcgcccggtaaaacgggcttttttttgaccgggcggccctggcccggtaaattttcgaagcccgtccctgtactttcaaaattccgggctctagtgattattagtgggcaaattctatattattttttttctcagtttttttcgcaatttcatgtctttaaaagttaaatttattttggatagtaattattaattaattaaggaaaacagcacgatg

SEQ ID NO: 113596 - DNA, 96 bp, Heterodera glycines
attaattaattagctaattaaccagcagccacccacacgccctcccataatttggcaccattacccgacaaaattgccaaaagaattgaagcgatg

SEQ ID NO: 113597 - DNA, 646 bp, Heterodera glycines
atttatcaacaataagaaatgattgacacagaaattaacgaatgttattttgacaaaattttcaacaaattttatgataaaatcaccgtgaatgctgttgaatattcgacttttttctttcatttgattattcattaaattaaatcattttaaattattaacggaattatatataatttcatataaaaattaaatcacttcaataaaataataagaaatatataattaaatttaaactagggtcggtcacgtcatttaactgaattgaaaagctgagggcccaaaatctcagctcgctgagaattatcgaagatttaaaaaaaagagtaatttacacactctcaaaaaaaaattattttcaccaaattttttcattaccaggggtggcacgataaaaatttattaacaaatgagcaaaaattaaaaaaaattttcaggcaacgactccctagaactctttaatttcttaaaaattgtcatcaaattgcaaaatctctaattcaaaaaataccaaaattaatttttaaaattaatattttaataaataaaaaacattaattaaacacaatataaatagattaaaatttattctttaaatttaatttaaaatttggtaattataattttaaaattatcagccaacatg

SEQ ID NO: 113598 - DNA, 108 bp, Heterodera glycines
ttttcgactcgcccctttttgcggtcggccgcgactcggcccttcgccggtggtgcctccgcgtggtcgaggcaaaatacagcggaacggcggaggaaacgctgaatg

SEQ ID NO: 113599 - DNA, 963 bp, Heterodera glycines
  unsure (1)..(963): unsure at all n locations
acaccatttgaaacatatcaaagggaactaaaaaaagaaatnttgtaaaaattgaaaaatatgtacatagatttgtacaaaaaaggaggaattatatatgaaaaattatataaaattgaactaattgtgccaaaatatgtggaaattgtttttttcttttttttaaatttttataagaaattctaaaagttctaaaaaccataatttatcggggaaattttaattaaaagttcggttgcacaattgtaaatcaaacacatttcatgcttttcaggcgttaaaatattttaattgtttatcctcctaatcattgccagggcttttactttttgaaaaatcgattgttcgggggtggggcgtattatttgaaattaagtagtttcttagagttgcattttattttattgcatttttcaaaataattttttattcccaaagtgaaattgcaagttctcgagcaaatcacaacttaattaaaaaatattaggagaagtttcaaataaaaaaataaaaaataatctttaaatcattaaaaattgtgaaaacaaattggtttcaagcattttttgattttgagaacgacataaaaattttagaattttattgtaaaaaaatttttaatgtttgtatttgattttgattttttttcgtatttcgtattttatttttcgattttcaacaaccctgttttatagccattagttttgcctgagcgcatcagtatgtcacagaaattatttgaataattctgtcgaattggttttgtgtatttatgaatagataaaatttcgtttttctttttttgttttagttacattttttagtattttattttacgaagtgtgtgttataaaggagggcgatcattgggacggaataaaatcggttaaaaaatttttctgcgtccgtaatttttgcgtgagctgtgaggttacgtatcagacaaaagaacggcacagaatg

SEQ ID NO: 113600 - DNA, 90 bp, Heterodera glycines
tgaattggatggcgacttgcaaattgcatgcatgtttaacttttagacaagttttagcgaaaaatttcgacatttttttttgtccagatg

SEQ ID NO: 113601 - DNA, 1003 bp, Heterodera glycines
tctgaaacgcacgaaaaacatgtttttagcttggtttgaagcttctgggatgactttccatatccattttttccatatttttccatattttcccatttttgtccatattttgggatttttccaaaaaacctcaattagaacggcccccatcagctaaattggccttttggaccccaaaaaccggaaaattttccaaaaaataattttttagcaaaattttcacgaaaaatattgaataaatttaaatttgccgacaatcgaatgagtttttcagttcaaaatttgtaaatgtatcttatatgcaattcaaccaataaatttgaagaaattttgagaaattatacactaaatttggaaaaatttatgtccatattttgcaattttatgtccatattttgagatttttgctattttatgtccatattttgcgatttgttgtccatattttatggaatatttcgtgattttatatccatataattacacgccctacttatgagcaacttttagtgacgataaatctcgaaaagttgtcaaccaccagggatgacattccgagactcaaaaattttatataaatcggaattcctaggccaaatttttcagaaattggaataccggcctccaaaaatcggaataaatacaaaaacgaattggctaaaacgaatcgtctttgtcctactcaagcttattgttagtgtgtaatcatggacggtaacaccgtcggaccccacccactcccgccatagaccctaaaagttttttgaaaaagcgcgacgtaaaaaaaagtacgccaaaatgagagatgttttttctctgcactctctatttatttacacatgtctcgttttttgagtcggtgtgtataatgattcgattaaaattaccattactttacaaggaattctgctgacttatttcacatattaaatttgtgtttcgatttttctaagctaatttaaatccgacgaaaactatcttaataatttgccacaacaaaatg

SEQ ID NO: 113602 - DNA, 1003 bp, Heterodera glycines
taataatttaaatttataaaaattaataaattaatatttctttgaattttaaaataattaatcttgctttaattggatttcttgagcttttcttcgtcatatcatcgaatgaatgaatgatgaatctaattttggaattttattgcactataataattattatttttacttattaacaaaaaaatatctgagataaattaattaatttggacaatgtcttcgaccaaatcagtgttgacatttgtcatctgatggagacgaaaaagcaattaaaacggggaattaaaggaaatttcaaattaatttgtttgccgattgagtaaaactggagagcaaaaattttgcaattttatgggttattttaccggcactggcgggtccctaaaaacatttccactaattccgacggcaaaaaagtcggagcccgcgctggaatcgagaaaatcgaggtcgatgaacacctggccaagcgaacgcttgaaaaataaaatggcattttggatttgaattaattgccaaaaccatgtccaataaatccaaaaatgatgatgcaaaatctgttggacattccgcagaaagtgcatttcttcgggcactgctcgtgccgttgtagccaaagtgttccttggagtttttgccggattttccccacccgccggacaacaaagtcggcacttccttttgttgtgccgcagtaactgttttgtttttgtcaacaattccggcggattcttaaaatacagatgaaagcattaagtttttggcttcataaatccataaaatgtgtattttttcggcaaaattatctaaccgttatcttgtcagctgaaagaggatttaaatggtatcattaaaaaactaatttgtgagtttagtcttaattgtttaaatcatgacgaatatttggaaaacaattgagacattgaaggatatcaattttaaataattaaaaatttattttacataattctttttcatttttttttgttattttgaagagatg

SEQ ID NO: 113603 - DNA, 234 bp, Heterodera glycines
gcaatccggtgggattttcagtttttggcattccatccaacgggctggggatcggatttttttttcaaaaattggaagaatttgcctttttaaaattcaaaaagttgttacatttgtgggagcagctcgtcaccaatccatgcacagttttcctggcaaatggaaaaattcttgaaattctttcaatagtattgaggaactatagtataatatttttaatcatttttagggatg

SEQ ID NO: 113604 - DNA, 192 bp, Heterodera glycines
  unsure (1)..(192): unsure at all n locations
gcggcttttatgttgattcgaaaatcgatagaaccccgaatttgggaaaggcaacacaaagaaagtaggaggaaatagtgtaaacgagagaaaaaggcaaatntaacaaagcaaaatgacatcgtttgaatgtaaaatgcgcgggctgtaagcatagtaaaatatcggcataattcccctaaatgggccatg

SEQ ID NO: 113605 - DNA, 161 bp, Heterodera glycines
acttcgactttctatctgcggcgttgttagagcccgaagaccgggaataaacgcagcagacggcattgcaaattgctcaaagattgagaaattgcacaaaatttttgctcaaagactgagaaagtgccgaaactctcgagttagcccgtcgaccatccatg

SEQ ID NO: 113606 - DNA, 617 bp, Heterodera glycines
ttaaatagccattcttagccgcgagtaaaattatgctaatgaaaggcaaaacaaatggaagagaaagggcaaagaaggacgaatgaagaatgaatgacaatggattgaaaacaaaaagagaagaaaggagaagcggttcaatgggagcagaagaagcggaagctaatgggccaaagctaaaggcaatggccactggccaaaagcaaagggaaagggcaaacaaaacaaggaaaagcgtggaaggacaatttactacttttccgtttcttttctgttttattaaagcgaagaattttaaattttaaataaataaaatgccataaattatttacgcgctattactgtacttttggcttgggtttacatttacgcaatcgtagtgtttggtctgggaatgagcaatcgttgaagaaaaagaacaaacgttcacgcgtcgcttttcacgtccctttcacttttatttgtgttttgacttgtttaattaatacttgaccttgataaaacattaattaatcaaaatgttgttcgtcacttcgcataatctattcaattttgacgtttttacacttaattgtcatatggctttttatgcatttttctctttagataaaaatatg

SEQ ID NO: 113607 - DNA, 78 bp, Heterodera glycines
tcgggaagcgattttgggccgattggactctcaggggaacagagtccccggtctcattgacaaattaaagacgccatg

SEQ ID NO: 113608 - DNA, 482 bp, Heterodera glycines
caagcgttgtgcgcgtggctgcacacgccgcggttggacggacggccgaagttgctcaaatgcgtgacggaggagagcaaattcgcagagagtgtgcaccaactcaaagaggtgggctcacaaaattggcaatacctttcaaattgatttattgttcgatttcgtaattttgatcattttatctttcataaagttttttattgtttaaattatttggcttaatgcatcgttttgaatttcttaattgttccgttcacttcctttcagcttttcctccgctcctcctcccccgttaatttcgtcgtccgtttgtccgctttttccgcctgttcgccctcccctgtcgcttcatcatctgttgccgattttacgccttttgttcttgaaaatggcaaaactttggagcgtttcactgcgcggctttgtcggcactcattttggctgttggaaagggcgccgattgagcgcaatgagcagaaatg

SEQ ID NO: 113609 - DNA, 437 bp, Heterodera glycines
gcaacctttcagcgattcatgaaccatctcttcgatgggtacataaatgatttcatctttgtctatattgacgacgtattaatcgcctccgattcatacgaaactcatctgcagcactttgcactggtttttgagcgaattcgtgaggcagagcttaaattgaagctttcaaaaagccatttctgtgccaacgaattgccatttctcgggcatattctaactcgagaaggaataaaaatggacgtcgaaaaagtgcagccaattacaatgcaacaccactttttaaactcctgcaggaaaatgtcaaattttccattggtgaagtggaaaaagaggcaataaaaagcctaaaagaaaaagtcctgaaagacgtaattttgtacttccccaactttgaaaaagcgtaaaatgacccatcgcgttgctttatcatgatg

SEQ ID NO: 113610 - DNA, 644 bp, Heterodera glycines
acaaaatcaatcaatttttcttggccaaatttcttttgaaaaaaggtaaatgaaaacaatatttatggcacaaaaaaaatttgaaaaaaaaagaaataaatcgttgatttaaatttgggtaatttaaaataaataaagctgaacctcaaaaaaaaagtaattggaatgattgaatcgaaaataataaattgctttttaaataactaatagaaaactttttaatagttttttgtttttgaatttttaaattttctaaaattttaagagagtagaaatttcaaacatgattttagcaagaactcaaaatgttaaatgtgtaaaacaataattatgtaaattaaaatattatttaaaaatatctaatttttataaaggtcaacaatttttatcctaagaaaaaatgtataaaaaataattatgcaaaaaaatttatttgaaattaccaatttagaaaaatttcaacaatttttatcacaagaaaaaacactgaaagtgaatagggttaatgaatttatggcaacagaaacaaagaaaaaaaagtgccagcattgagtgccaaattgtttctgtggctgaggggcaaagacgcatttttggacccccaaaaatttcactgccctccgccggggggggggaggaaaatg

SEQ ID NO: 113611 - DNA, 443 bp, Heterodera glycines
ggtgggcaaaggggggcggaagtttggagacggtcacacccccaagggggatgaaatttatttgaaaaggacaaaaactcccgaaaaattgcgaaaaaaaacaactttttcctcgtcactcttccccaacccccgttaatcctacctgagactgttcctggagcgagtcaattttgaaatggaaggacaaataaatgatgggccagaggggagggggaatttttgaaaatgagggaattcttatttttggtagaaatgatcgaaaagccatttctcgttctcggcaatttctggttttgggataactttgccgtgttttccttcaatttccctcctcctccctattaaaggtgattccgatgttgccccgaattctttgtgaagaactctgctcgctgaaccctggcgttgatcggctgaccttttccgtcgtgtggcacatg

SEQ ID NO: 113612 - DNA, 95 bp, Heterodera glycines
attggtaaaaaaacaatttttaattaaaataataaaataaatttaaaataattaaattttataccctaaagtgtccctttttagggcaaaaaatg

SEQ ID NO: 113613 - DNA, 727 bp, Heterodera glycines
tcggtgatcattttttggaaacaaaaaaaaaatttttaatttgcatttttaaggcattttgccgcttttccgtggcgccattttggatcggcttaaaccgtgattgaagtgaacgagttttaaggaaggaagagcattatttaagtgggatgtcgaaagaatgggagaagaagaagtgaaataatggaaattcgaatccccgtcgatcagttaaaccattttcccccaattccgatcagtctattattcaaattaaattaattattcaatccaatttgtcgccctatatccaatcatttagcaaaatttttttgaaagaattctgagagggggggggggggggttctaattcaggggaggaggtcaaaccctaattttcaaaaacccaataaaatggcgatttttgtaaatattttcgccaaaaaaacggaacccgtataaactcattggacgtgtaaaatgccgtgccaaaatgaccctgatctggtttttaaggaaaaccattcatattacacaccagcagggatggcatggaatttcgaacgcccaaatctttaatcaaattacttagcatttacttggaaaaaaatttcgttctcaattaaaaaaaaattctgaaaataataaaaatattgggcggtcctaattttgacgctaaataaataaaaatataaaatttatatttttaaataaatagaaaaataaaattttaaagcaattaaatatg

SEQ ID NO: 113614 - DNA, 828 bp, Heterodera glycines
tggcgccaatttttagtgttttgttgaattgcctccaaaattgtaaaagttggacaagtttgttcctgcaactaacaggctgaaaatagaaattcaaatttattttttaattaaatttttttttataataatggtaacaaattagagttcggcctggtctccaacatggaatccaggtccaggcttttttcaaaatgccgagctcttttgaaaacccgaaaatttaaggactgatttggagattgaactacaaaagacaaaaaaaaattatattggcgatctattttataattcaaatataaaacaaagactaaatttgcattttctttgacgagtcactgccttttcgcttgttttgcatggattaaaaagctctttgaaaagaatattttaaatgatcaaattgcgattttggcaaattttttgggatttttaatgaagtttgaaaattttgattttttttcaagatccaaggacgtccttggcatccaagtaagaatcccagcccgtgtttaaactgaagagttaattgaataagggaagaacattaaaaaaacaataaaattggtttataacagatatacaatagaacacatgcaaatatagggaatattaaaaattttattaaaataaaattattaaaacaatttttgcatcatttaaccgaacattagtattattattattattatttatttttccatcttatggccatggcgaagatttccttctcatcattgtcagctgtgtcctcctcatccattttttgtcgtttttcctgcgcaaaagcgccgtcttttttgctgccgatggcatggcacaacaatg

SEQ ID NO: 113615 - DNA, 538 bp, Heterodera glycines
tttgtgctcatttggctgtataattatgataattacgcttttttattactctttcccaccaagacccatttgaacagttttcttgaaaaattgttttaaccaacaaaatttgagaggctttttatttaatgtgtaagctattgatattttgaataaacaaaaaatgctttaaaaataatttttataatgtgcagctaattttgagcaggaatgaactgattaattatcctgtttacgagtttttttgatatacaaccctcccacgttccctaattttgatgtttaacctttacaatttgtctcaattattattcattttagaaacttttctctgtgctatttacttttttaatgacaacttcatcatcatctgcttatccaatgcttttcttcacccaaaaatggagcggtgacggtgagttatgggcacataaaacagaaattatttgtagccggggtggttcaaagttccgattattaatttgactccttttttcgagtttagacagtctttgggtgttctaatggctccgcgatg

SEQ ID NO: 113616 - DNA, 191 bp, Heterodera glycines
ttgtttaaaaagaaaggagggcgtttgatttgcttgttttgttaatttctaaaaaaaattctaaggcataaaatattcatattatttttcaggtttctattggttttggataaacttattaatccgaaaaccggccttacaaaaaccttaaattcttaccattttctagttatttaactcaataacaaatg

SEQ ID NO: 113617 - DNA, 152 bp, Heterodera glycines
gggggggtagaccttaaaacaaattcaaatttttaaattatttagtctgttgctttctaatcacttttcgcttcccccttcagcttaattactccggtgggcgtccgctcggcgaatgggccgaattgcgcgatgcgttgagaagacaaatg

SEQ ID NO: 113618 - DNA, 320 bp, Heterodera glycines
tcactcttttttggcacaggtggaaattgggggccgacctgaagagatcggagatgaacaggtgaaagagagggggaggggttaaaacatttggcaaaaacatggcaaactctccattattcagatcattgagttttctctcgagaattccttctatggatgtttggcccggatggagctgaacggactcaatttgttggcctctgcgcccaaattgttgccgtcatgtcaggtgtgatgatgaatgggggtggcatggtttttccaatttggccatttttcgttttgttttatacccctccctaccccctccatagatg

SEQ ID NO: 113619 - DNA, 77 bp, Heterodera glycines
ttgctgacgccgcccaattcatttgactctcatttggattcgatcatttcattgtcttcattccactcataatcatg

SEQ ID NO: 113620 - DNA, 66 bp, Heterodera glycines
ggtaccatttccaaaataaataaatatttatttttcgtcatttaggatcggacacggctatcaatg

SEQ ID NO: 113621 - DNA, 950 bp, Heterodera glycines
  unsure (1)..(950): unsure at all n locations
ctacgatgacttttataatgcctaactttgcctatttcctttaagggttgtgnctaatgtgnctatttnaagattttcgacttaatatttaanaaaaatggaataaaaangaaaaananannnnntaagaaatgananaaaaaattttnagaaaatatannantaagaattgaagatttttttngaaaattgatnanaaagttaatatttttttntttataaaaataataaattaaaaaaaacttcttatttgttgcttttgaataaaatttgaccatttacacactaaaattgaaatttttggcacttttttcacatttctagcaaacctattttggggattttttagaacctaaaaatataagccctaataataacagatattttgtcaagtctcgtcatttaattttctttagcgttttaatttattcttaagcattccttcaggttaattaaggcgctgccgagtaaattttaaattaatattaatttcaaaatggaaaaagtcagctaaaattaaccaaaaaaagcaaacaagataagctaagaagattttcttttcttcaggtccaccatgcaaggaaaaatattccgaactgtctccgcttaatcattttgaaacctgtttttattgtgtatagatggtcgatctattattgtacagttttaatgcatattttgtaaaatttgcaaaatttaaaaatggcaatttgcgtggggcctaattgaaattaagctcacctaataacgcgccaaatcgccttgcagaatggctccatgaatgtatttttcttctctaaataaaaaagcattgaagattctgtataaaaataaaaagatgaaaatttttttttcaggatgaaacagaatgccaaaataatcagaaatgaaaatatacataaacctaaagaaaaactgaaaaatccgttaaaattatacagcaaattatg

SEQ ID NO: 113622 - DNA, 99 bp, Heterodera glycines; identical to SEQ ID NO: 101586

SEQ ID NO: 113623 - DNA, 380 bp, Heterodera glycines
  unsure (1)..(380): unsure at all n locations
taactgaatttttatanttttttaacaaatatttaataattggcttcgttaaaatcacttgttaagcaatattaaaaatttctttatataatttaggaatctatttacgtgcaaattcctcgccacaattttatgcggcgccctgcaatgtcctattcttattcagaaaaatttggctgttcatcagtaaaaacacttagataacatttttttaagtataaattaagaaccagattcctccggtccctgagcagatggcggcagtcagtgagcacaatgtaaaaaaatgtatttttaaaaagcaattaaattgctaattgccaattttttatggaagattaaataataataaacaattttttcagctcattggacaaatg

SEQ ID NO: 113624 - DNA, 151 bp, Heterodera glycines
ttcgtccaagtttttgtcttctgctgaacagttcgcccgtgataattacgcagattcggccgaacatttcgactctttgcttctggggacggaaggggacggtggcggaggaacgaacggagtgccggaaggggcggaagaagcgcaaatg

SEQ ID NO: 113625 - DNA, 669 bp, Heterodera glycines
gcggaaattgtgaattaattctcagaaaaatggctatctctttttagggcaattttttatcttgtaaccccgatgctaatccgttccgcagagcctcttcaaaattttttccattgccgcaagagttgcggaaattgtgaattaattctcagaaaaatggctatctctttttaggacaattttctatctcgtaaccccgatgctaatccgttccacagagactcttcaaaatttttccattaccgcaagagctgcggaaattgtgaattaattctcagaaaaatggctatctctttttaggacaattttctatctcgtaaccccgatgctaatccgttccgcagagcctcttcaaaattttttccattaccgcaagagttgcggaaattgtgaattaattctcagaaaaatggctatctctttttaggacaattttctatctcgtaaccttgatgataataaggtccgcagaatctaataataatagatacaatgagacttgaacttttgtaaagaaaattataaatgaaaataatcaacaattaattaattaggtaataaaatcttttttggaaatagcttaaacgctgcgatttatatatctattttggcttctttagtctttgtgctttcgaatgacaccaaaaagacaggttttgttcaaacatg

SEQ ID NO: 113626 - DNA, 331 bp, Heterodera glycines
aatgggtcaaaatagatgccagaatcggttttcccaaccccaaaaaacccttaaaacaaatttattttcaaaaaaatttttttgaaaacctgcacacagataaccgtaaagtaccgggtaattgttattattatgtacatacatattcttttttagattatttacaatgatgcaattggattataaatttgacttaaaggattttaaatcaaataattgttacaacccttcgaacttaaattttgttgagcttgagtccgagttatttcgtttgacatgccatttcgacaggcgaattcgaacttttgctataagcgcgttggagcaaatg

SEQ ID NO: 113627 - DNA, 764 bp, Heterodera glycines
gtaatccgtaattgcgtgcagccctgcaatagacgtcactgggaaattttaaatgtttcaaattggtgctgggcgttcgccaaactgccaattttacagttttttcataaaaaactcttcctggactgttcaaaaacgcaataaaataaataagcttggtatcacacggtaatttttgtatattttattaaaatgaaaattttcagataattttattgttcaaaaagagtggtaatttttttcaacacctttggtcacaactttttaaatttttcggaaatttcttttattataaaataggatggcaaaaaatgtacgaattttctgaaaataaatttattagtgagcaaaatgaataatcaaagacaaacgaatggattaaatggaaatagttccaagtcatttgttaaattgatgtctctgatccatcaacaaatgcatcacaaaaagtgcttttcacaaaaaaaaattacttatttatccaattgcaaaaaaaataataatgaataaaatattatttactttttgaattatttatgtttatttatttattagctatatttaattaccccgtgaatgcgtgataaaatgattgcttgtagcaaatcacattaattcacgcttattattagaacaataaaaaattttattttttggaaaaagtaggtccaaaataaggccggattcgtgctcagcatccgaaaataaccccagaaaaattttcccgattaagtttatttaagagttactaaaactccaaaatg

SEQ ID NO: 113628 - DNA, 329 bp, Heterodera glycines
tcagaatgtccttggttctgacgactctcgttttaaacaaatactaaggctgataaaacattgaagcgttggcgtaattttcggcaaattctctgtcagcttcgcatatttttgtaatatctgtgaaaaggtttttaaaattttttaaattattttacatcacttaggttttgttttctcttttttctttttacaaaaatcgtcagtttttcacaaaatttttaatttgtaccagggatgggggcgcgccgcgatgtgcgatccgcgattcgcggcgtttttttttgcgcgatccgcggtcgcggccgcggttttttttttgcgcgatg

SEQ ID NO: 113629 - DNA, 121 bp, Heterodera glycines
ttttacaattttcccaactttcccagacagcggaaaaacgaagcgaagcacaatttttaaattttattattaatattatgttgcttttctttttatatattttttcatttgtattgaaatg

SEQ ID NO: 113630 - DNA, 161 bp, Heterodera glycines
tcactttggcgtttattagaattttattttttataaaacaattaataaacaataaatttaataaaatactcattttatcttttaataataatgaaataaaaatttggcaatttaaatgcattaaaaatatttctagagagtataagaaatactaaaaaatg

SEQ ID NO: 113631 - DNA, 349 bp, Heterodera glycines
tataacaaattgaggaactggcgagcgctgtttttggtagttcagccggtagagcaaaggtccgcaaagctaaatccgaacccttacatagtttttcccaaaagcttttccaatcaacattaaaatgattaatgggcaaaaggaagagacttttgtccggcaaagaaatgccacggagttgggagggcttgccattaagacctttgactatcaccaatccttgttagtccattccactttccaccccaaatctttcacggctacaaaagcattaaaattttctaaaaatggtcaaaaccttacgcctcgggagtgaatcgaacccacgccttctccatccagtgaaatg

SEQ ID NO: 113632 - DNA, 393 bp, Heterodera glycines
tatttatcattgggcttgtcaatcaaaagggaaacaacaaagatgctgtttttaacgaataaagggcataggttattttgaagaagtgtcaaagaacatgcagcaataagcctgcaaaatttaataagtggaaaattcatggagtatagaattattttcagaaaagtgtccacatacttttggaaaaaatatatttgcaatttatcaacaattttggagaagtgagttagaaatgataaacttcacgattcaaaccaattttcgttgctctaattaaccgcgataaaaacattcgaatcaattaaatagcttctgagataataaggtttatcataaaatgtcatttaaaaataaaccctcaattattggtgtgaacgatactttccaaacatg

SEQ ID NO: 113633 - DNA, 485 bp, Heterodera glycines
tttttttgaattggtaagcacagaaaatttaaaagaaatgaactgaaaaaacaaaatttatcaaacaaatggaatgaaagggaagaaggatatgactggaaagggatttggtcggctttatatactcggatacacttgaggaacgggggatggaataatggacatcagaagaaatagtaattaaaaattcttggcgctttgcttccctttcatcgattatttttctttttgacaaattaataaataaattgcgccttttttatcttcctaaataattgttgcaagttaaaacaggcattttcctctcattttttaaatttggggggtgtaaatgaaaagtatcttatggtgtttttgtgttccttttgctctctcatttttccaatttgtctccttttttaagtttaacaacagatttttgctcttttgagacacaccaatcaaccgggaaagggaaaagtgtgctaattgcagcaacaaaaatg

SEQ ID NO: 113634 - DNA, 140 bp, Heterodera glycines
caaagctcggtcaacctccagaacagattattcgtgtcaaggtgtgttgtattaggcattccgcagctcactttagcagaacaaataaatcttcaatgtcatttccctctgatcatacctccccgaagagattccctatg

SEQ ID NO: 113635 - DNA, 340 bp, Heterodera glycines
atcagtggccgatcattctaatcactcttttcattaaaaaatgccttatgctgttaattgtcgttattccctctgcttcattttaattattattacgaaaaacttttatttttacaaaacataagccatgcccattgtaaggacatcttttttgaaacatttaaaataaaaagccaccaggcttccatagtacatttacatatgtgcaaaaatatttcaaaaattctcttgaaaaaatatttcacaaaatttatttgctgatagaaattgttctgataccaaaataaaaccgatacccatccttttcagattggtcaaattcttatcaaaattaaagatg

SEQ ID NO: 113636 - DNA, 422 bp, Heterodera glycines
tgtagcttttccggatccaggcccagaattttttgaaatccctttttcttattatgatttcatgtgcatttagataaccgcgctgaaagtgtccgccactgtgctcgtgttcgtcatgcctttcctggtccgaaaatgctattcaatcatcgccaaacagttcaatttcaaacgtaatacgcagtccaacaaaaaccgcatttactgaatttgagccccctctcccccctaaaataaaactctcattttgaggggagaagggttgaaaaataaaagcccccggggggctctgatccaacaaatgtcaaaattacatatttttattaaaaaaattcacattttttttgttgttgtcagtgttccaaaatggctccaaaaaagtgtgggcccttctcttcgcctatttcttcgcttctctgatg

SEQ ID NO: 113637 - DNA, 263 bp, Heterodera glycines
gggaaagggcgcaacttttcgtggcaaaattggtggaggaggtgaagcagttcgccagaatccggaagggatatggcaacgtgcagaaggagcgagaaaagaagacggcggaacaaacgacagcgtttgaattggtggcaaaattgctaagcgcggagcgcggcgtggtagtgctgtctgcagtggagcgtgccgaggttgcgaagcagttcagggcgcttggcttgcaggaaatcgtgttgaaagttgtgcttgatcgcatg

SEQ ID NO: 113638 - DNA, 796 bp, Heterodera glycines
aaaatttaacctattaaaatatttagaaaattttattatattttatgttttttgaaaaatttccgagttccgacgtttttggggtcggaattccgatttccgaaaatttttggggcctcggaatgccatcccattatctgtggtcgattttttgaaaacttttttgagataaacttgttttagggatttttagggtcggaaaagccgattctgacatacattccgaccaaattcgaatcccgaacccggattcgagcaaaactcgaaaaatcgttttacaacaaaattcacatttattgcacaaaaaggttttttaggggaattttagggtcggaaaaacggttctttcatctattttgtcccaatacgaactccgaactcagactcgaacaaaattcaaaaataggaaattcatttttcaacaaaagtacagccggaatttgaacaaaaattttaaatctgaaatttgtatttcccacttttgcttcgaattcgggtccgggattcgaaattggtcgaaatggatgccagattcgtgctcagcgactctgaaaacccctaaaaacatcgtttttgggacttacagatttttttaaattttttttctaaaaaggggggctaccatcggcactattaccgtcactaaaagtcgcggccctaataattacacgccctattcattatcattgatcttccatttattttctaaatactgtaaggcgaaaatttatcgcatccatttaatctctttctcaatctgtgatctgaaaatttaagaaaaatttgtcaaaaaatg

SEQ ID NO: 113639 - DNA, 354 bp, Heterodera glycines
tatataccgtatatactctttttatatgccatggtatattatttttcaacctcctcagaagggggtagataattggaggccggcagattaatggagactgggagattatttttcagctgatttatttagtggaaaatttttgaaatttttttgaacatgtcgccaaaaatgtcatcgcgtcaaaaaaaaattatttctattgcatttctgttaaacaacttctgagaattgaccccaaaatggcaaaaatgtgtcattttcttttactgttgaattgagtttaattttttttttggaaaatgtgccaaaaaaattatttaaaaaattctatttatcccccctggcagataaatg

SEQ ID NO: 113640 - DNA, 686 bp, Heterodera glycines
ttttgtaaaatatacagcaaataaaaacaaaattaaaataaaagtgaagatatgccttgttgaaaaaattctccggtgtttttataattaaaataggtttgataaggaactaacaatagtaaacccgctgaacatttctaattttagcgtgactcatcggtcgtaaaagacgcaataaattgaaaaatttaaaaaatgttaaaaatttatttgtggcaaaatgttttatttcgtgcagtcttctcagtcccaaacaattcctttggcagatttgagttgcgcggcgggagacaccacactaacacaaacattgattaattaatgggaggatatcccccagcgaaccaccaattgcttagaaaaggggccgaatttgaatggtttttagaaaacttaaaatttacgacttttcacctccgtactcaaaagccaattattaaataaaaaatttgccttaaatcattttgcctttttcactttcgattgccttttcctttttctaatcgattttcgtccaaaggcaaattaaagttgatatataaaatcggtcgcttaagtgcataagtcattcatctgtgtataatttgcactgtttttcaaaaattgaaatttttctcactttaaatacttagtttttctttctcgtacttagctaagatttcattttaatttagccaattgctatg

SEQ ID NO: 113641 - DNA, 258 bp, Heterodera glycines
cttgttatgggggcgtaaaatgaaaacttcacaataggagtcggccaaaaaaagtgagtgacggttaaaattgtcaaatcattttttcatctcttttttatgacgtgtaaattgtaataaaactgatttaaatccccaattcgattcctattatcacatgcatatatatatatatatatatatatatgacatatccaacttttttttctaacttaaatttgtaacagatacatataaagtaattaaaaaccaaaaatg

SEQ ID NO: 113642 - DNA, 228 bp, Heterodera glycines
cataacaatgagaagaagcccaacaaaaagcaataagaaatgcgagaaattgcattttaggatttcaaaaaattgtatctaaaataaagtaaaagttaggatttattttatttttattaatttttgtacgaatatttaaataaaaatgtttggctgaataaattggcagtaaaaataatggtttattataatggtgaaatcgcagatgtgtgaactgatgagaaaatg

SEQ ID NO: 113643 - DNA, 269 bp, Heterodera glycines
tatagtaagcggaacatatgtaatatcccgaaacattgatcaaaatgatgataaacaacgaccgaaagatgcgtcggttgaacttttccgcgttcgaattgtttgaagctggaaaaaacaaaatgaaaactttcgaaattttgacattgatgaatcataaatttacaattttttgtttgaaaaatcggtaatctccaaaaataagaaattttatgatgagttgatatagagttcgactgggtcccggaaaattgggcatcagacaaatg

SEQ ID NO: 113644 - DNA, 1003 bp, Heterodera glycines
ttattttttcgttttcgtgtttcgttttcgtccgtcaaaattttttcgtttcgtgtttcgttttcgtatcgaatgcactttttcgtttcgttttcgtatacgaaaaagtttttttgtgattttcgcacagccctgatctcgacccatattttgggatttttcgcctcaaaaaatcatgcataagatttattctgatcataaattacacttaattctttagattggattatcttaaataaaaatttttaaatataaattattttttcaagattacggattacgcaaaattatggccttttggacctccgtaatgatggattacggatagccgtaactaaaaaagccgtaattacggattacggaattccgtcattgaaaatcagttgcgtccagccctgctgtgggttctttgagaggacacctttcattccgtcaatttccctcctccgccccttttcccctcctctttccgaaaatgattatcgataattattaaagtttctctgctgctgctgacactttcgcctccgatggtccttccacttcttcaccattttagcttttgtagattctttttgtataattccataaatgttttattatttatttggaaaatttgctatgaaatcgattttcccattttaatgcattagcgtgatagcttctgactaatttgtaagtgcgagagaatattgcgggagatcaatcagcgggaagaattcgctgatcaggtgccattcaatcatttgccaatctttgtttgttcctttcaatttttctctttgttaatatgcatgtgtggcttagtgtttaaaccttctaccttcctttatttttcgcttgggttcaatccccaatgggatcgaatgtttttcatattttatttaccattattttaattgaaacctaatttaaaaaatattccatgtttttttttcatttttaaacagcctaaacaccaataaattatttttattttttagtccggcaaatggaaaagatg

SEQ ID NO: 113645 - DNA, 174 bp, Heterodera glycines
ttcgcagaaaagaaaccgtttgtaaaattttcaaaaagaaatttttaatttttaaaattgacgttttgttttaaatttttgcaattaaatttaaatgcttaatttctttttaattttttggaaaaaaagaacagtttatacgtaaattgcttatttgttttattgcctcagatg

SEQ ID NO: 113646 - DNA, 828 bp, Heterodera glycines
ttgttgtgccatgccatcggcagcaaaaaagacggcgcttttgcgcaggaaaaacgacaaaaaatggatgaggaggacacagctgacaatgatgagaaggaaatcttcgccatggccataagatggaaaaataaataataataataataatactaatgttcggttaaatgatgcaaaaattgttttaataattttattttaataaaatttttaatattccctatatttgcatgtgttctattgtatatctgttataaaccaattttattgtttttttaatgttcttcccttattcaattaactcttcagtttaaacacgggctgggattcttacttggatgccaaggacgtccttggatcttgaaaaaaaatcaaaattttcaaacttcattaaaaatcccaaaaaatttgccaaaatcgcaatttgatcatttaaaatattcttttcaaagagctttttaatccatgcaaaacaagcgaaaaggcagtgactcgtcaaagaaaatgcaaatttagtctttgttttatatttgaattataaaatagatcgccaatataatttttttttgtcttttgtagttcaatctccaaatcagtccttaaattttcgggttttcaaaagagctcggcattttgaaaaaagcctggacctggattccatgttggagaccaggccgaactctaatttgttaccattattataaaaaaaaatttaattaaaaaataaatttgaatttctattttcagcctgttagttgcaggaacaaacttgtccaacttttacaattttggaggcaattcaacaaaacactaaaaattggcgccatg

SEQ ID NO: 113647 - DNA, 550 bp, Heterodera glycines
ggaacttggcaaaatgctattccgtcacctgtgaaattaatggacagattattgaccgacaaaaacataaaataaaataaaaagccaattcatacaaaaaataatttaatataaatattttttttaacttataattagggaaatatttttaggtgctaaaactgccaaaatagttaggttttaagttctaaccccccccccccaaaaaaaatggtgctaaaaatgggaaaataggtgccaaaaagtttcaaatttaggggtgtaaactacaaaatgtattcaaaaaattttaaaattatgtatttttgaaaaattttgggtcaattgttaggggtgtttcgtttttattaccttttttgttaataaatttggacaaaaagctttcgtgcattttataccatagggagcacaggaaaaaaaataagtaaaaacctaaaaatattagccctacttataattctttaagataattcacaatttgcctcaacccaaatgggtacacaaaaaatgggaagaatttggcaacaaaacgaccatcgaattaattatg

SEQ ID NO: 113648 - DNA, 301 bp, Heterodera glycines
ccccgatcgaacgtccaaagaatcgtttgtgaagaaagagagtgtcgactctttggctgcgaaacgacccgcgttggttctgaagatcaaaaaggagggcggtgcctcctcggcagcgtccacaaagcactcttcctcctcctcttccccatcttcaacttcgtcgtccactgccgcccctccggcattggctgtgccaacaccgcagcagcagctcaatgaacccgtcgcgcgtttgtcaagcagcgcggcaccaccttcgaaatacaaacagcagcggcaacagacgaagagaccaatg

SEQ ID NO: 113649 - DNA, 904 bp, Heterodera glycines
taaggaatttgggatccggcgctgccgttaggcaccattgggcgaaaaattaggaaattttggatcaattcgttaaattccggggaaatcttaaaattgttaaaaaatataaaaattatttcatcagcttatttagttctgctattttcaagaattcaaccatacatggaaaggggggggggtcaaccgaaatttttgcgaaggggtctggaagggggggtcgagggggggggggggagagcagcaaccgcaaggcaaaaaaaagaaagaagagaaaaattgaaaatttagggattagaaagagacagtgagcgaatgggagagaatgtgagagaaagagagaggggcttttgaaagagggcaaattcggcattttcttaatttgtttaatctttcattcaaaaatgtttcgtctaatcaaattgttatggttgtgccccccccccaatcccgacattttctcgtcccgaactttttttggcagtctcgacccaaactttttcttcacgcgccgcaacaacgatttcgcgaagagaaaaatccatgaaactttctttctttattgagccggtgttatgacgctactcaaaatgaccagataaaaaaaaatgtttgctataactttgctcaaaagcaaacagatttattataattattcatgccattcgatagtattgagaaattttttgaaattttgcaggataaaagaggaacatttagggctagctattgaatcataaaaagaattaaaatttggttgcttttgcgtaagcataaatcaatttttcgtcaaaaattttcaatttgatggtttttgagtaacgaaaaattggcaagtgattgaaatagtgatttattgtaaattaaattcactaattgtcacaaatgctttcagacccaaatg

SEQ ID NO: 113650 - DNA, 999 bp, Heterodera glycines
ttgggtcgtcggccaaaatgttctaccctgtgtttcagtttcaacatccatatcaatttttgaattcccctcccacaaacttggaggatgatttttgggaatttacagctgttaagcatacggaaatagaaaaattatacagaagattggatgaaatttttagaaggagaagtcggaagggagccgtcgagaggataactgtaaacgaacggaacagactaattttactgtcgtaaggggtggaagaccacccaaatgcaagatttattatgctaagaaaaccaaccgaatcatccattgccgtttttcagttgattgtgatggaaatacaggtcaaaaacgaaacgaataaatctaaacaagaaaataactaaaagccgaaataaatattatcaataagaaatttaaacgaagacaaacaaagcgaaatgaagagaagaacgactgatgagagaatgggctctgcttaagacagaagaatgcccgggtcaaaagggaatcgataaatggactatgtgacgtgcacggtgtcctctcaaaggacccacagacagaggacccacaaaataataattaattcaaatatattaaaagatttaaaataagctgtgagagaaatgccagttactaaatttattcaaattggactgagaaaaatgctatatgaccaaaaatcactaatcttaatgagaaaaatgttacatgaccaaatgctatatgaccaaaaatcattattcctattaatgagaaaattctatatgaccaaaaaccactaatctgaactgattagaattaaattttgccaatggatttgcccgaataacctgaataggtgctataaaagctgaactaaatttacaaaattcattaaatataatggctacgttttttccttcacaaatgggcggctacaaactcgttttcgaaggccatatgtaccaaaaaaaagaagcacgaagggaattcatttattggcgctgtgaccaaaacaaaacaatg

SEQ ID NO: 113651 - DNA, 720 bp, Heterodera glycines
acgaaattgaaatgtataattaaatttaaataatttttattgacacttagactacctattttcggttcgtttcagcgtggtattttctactgacttattttcggagcactccttccagtcctgaagaaatgaaaaaagaaaaaaatcgggcaaattctttaaatttaataaaccggtacttccaaaattccgattttgtcgtgactcccggccccgttcttaggacaaaacaccgggaccgggattccctaaaaacgggagtggaccccgttccggtccaatttccaagttccggttctggtacttccaaaccaatttgccgtgtctcccggtcccgttttttggccaccgggacctacattttcaatccctgcagtgtttttaacctttttcttcgttttcgcaattcccgttcccagaagtttttttaccgggctccaatttatggcacatcattttatattttgtttttcttaactatagtttattttgctatcaccaccaccttattttcttatctgtggttattttctttttttttcgtgcacacaaaccacacacaaaattgacattttaagtactccaaaagccagaaccattaattgaaaagggaaaatatattgtaattaattaatgggatgggtgtgttgttaattccgttgtcccttttattttcccttaatggatttgcatttataatcaatttttagctttctaatg

SEQ ID NO: 113652 - DNA, 141 bp, Heterodera glycines
caatatgttattgtcccggaaaaggaggagactttttcattcctatttttggattctatgaagccaaaaaatgttatttaaactattgataaattacataatttggcgtcaaaaattatttaagaaaaaaaattaaaaatg

SEQ ID NO: 113653 - DNA, 146 bp, Heterodera glycines
ggttttaattaaattttccccatgaaaaaagcactaattcctttaggcgattaaatcttcatttctcaattcaatagtcaatgatttgctcggccaacgaccctctcaattcgacgttttagtatctggcaaacaaaaacgaaatg

SEQ ID NO: 113654 - DNA, 219 bp, Heterodera glycines
  unsure (1)..(219): unsure at all n locations
cgctgcccatcaaaatgtccctgcgtcataatgtcncagcgtcataatgtcccagcgtcgaaatgtcccagcgtcataatgtccctgcgtcataatgtcccncaagccanaaatgagtcaaaatgtccccctctaaaaattagtgaaaaaactgaaaattatataattatatgccttcatacgatctgctttttaaatttatgctttagcatcaatatg

SEQ ID NO: 113655 - DNA, 449 bp, Heterodera glycines
ttgcggtgtttgttcggcagtgaaaggtgcacacactcgtgatcaaaaaccacattaattatcaaatcccagttttagtgatgctctcagctgctacccctatttggactttcgaaaatcgtcttccgattttttcgtctgttttaaatgccgacggaattaccatgatctgatggactatcttaggcatgccgagatgtaccataaagcaacttatgaaaatttttaaattatttattttcaaatgtatttagaatttatggcattttgtttaccgtataataaaatcgattgtgttgagtgtggcgcatttgcggttggtaacctccgttccgcccacttacctatttgttaatgcgttgttttgcttcctaatgccattttcggtgtataattaattgtatcttttaagttcctattttggtacatttactgatcaaaaggcaatg

SEQ ID NO: 113656 - DNA, 120 bp, Heterodera glycines
caaatcaattggtcagttggacaatgtgacacgaaagcaacaaagcagcacgactacggtggtaagtcaaacacaaaaaaaggaggtgagtagaaataatttgacattattaagataatg

SEQ ID NO: 113657 - DNA, 98 bp, Heterodera glycines
ggtaattaagcagcgtttattatttttcgattaaaataatggcacaattttttaatttttgttttctcacagatctcttccaccaggccatccaaatg

SEQ ID NO: 113658 - DNA, 622 bp, Heterodera glycines
aacaacgcaaatgtcaacctttacaaatgataaaaaatatataataattaattgttattttatgattgaatttttcttataaaattgcgaaaagcgaagaaaaattaaaaatggtttttatttttacgtattttctttttgttttcattgctgagttttttgcttatggccactgtactgccgtttatcaaatgcaaatgcacaaaacgcaaaagaaaaataaaaaattattctcatcagctgctgaacaacgaaatgaaaagatattccattttcaaaataatgtaaaatcattcaaaaagatattaataaaatttgtatcagattagacgtatttctgagtaattttttatttatttgaaaaattaaagtcgaattaattcattaaaactaaaagtgatttggtaaatatttatttgtattgatttcacattatatttttattttggcggtgatctcgtttaactgtttatgcgcttcttgaggacatttttaattaatgtttttgtcctcaatgtaagcggattttcccttttgtggactttttccttattgacaataaacaaattaattttataaaaacttctaataaaattccattaattttagttcctatataatg

SEQ ID NO: 113659 - DNA, 1003 bp, Heterodera glycines
tttttaaaccttttgtatatattaacatatttaaaaaaaaattaatttattcagcttttttaaaatttattaatagataattgctgaaagaaaaatataaaatttaatttgttcttttatgtaaattttaaattactctaaaagaattaaataaagttgtttttctttgcttttttgtttttaaattaaaaaaacgcagaaaaaaaagaaaatttattattaatttttttgtcgaattgtaaatcattgaaataaaagtaatgaatttctactagagcctattggtttaatcacataatatttaagcctccaaaaccaactttaaggaatttgttgaattattaaaaaaataacttacaaatgaattcattgaggatggagtttttcctttcaaaacacagaattgttaccaattaataattatttattaatttgaattggcctggaccaggacaggaccgcacttttcaaaatcccgacccaaatggccgggaccggtaccgaaacttttgaaatgggaaagggacaaaatcccgggtccgaaactcccttttgccgggaaaagtgaaagattaactgattggttaaaatgccaaaaaggtgaaagatgtgaaaggtgaaaacgaaaccgcgccttattagggtcatatttttacatttttttagtatttattttaaaattttcaaaatcttaattagtagggctgggatttttatgttttaacatattttttttgcggcttagttatggcgagagaagcccaaaaatagcattttctccgaacaatgtttgatttagagcgagttataaaaacataaaaacacatattttggcgttttggcacataaaaacatatggcacatatttcggggttttggcacatattttggcatttttgagaaaaatcgtaaaaaaaatacaagaaaatctgaaaatgcaccctaaaaattgactactttacgtttattaagcatttagaaaatttctttatatattcaaatg

SEQ ID NO: 113660 - DNA, 810 bp, Heterodera glycines
tccttgggccgcgcctttttttgtgacaggcatctccaatttgagcatcacaaagtttgggctaaattaaaccattcggtaaaattaatttaaaaaataattgtaataaaatttagaaaataatataaatttgtttgctttttaatgtcatgcgccaaaatatggagatatgcacaaataataaaaatttgtaaataaaaatatttttttatttttatttttcccatcaaatgttttcccgaccatttcattttatgcttttagcaccgtgacatgtcacataatgataaaaaattttttttgttattgatgacacaaacaaaattagcatcagctgacacgagaaagaaattatgatttttctttttgtataaattaaaaaaaatttcccacaatattcatactggcatagctattatttttctcgtatacacttaatagaaaactcattctcggtgaaatggcaactcgtataaaatttctttgaaaaaacaattaaaaattaacttttttttataattttcaataaaaaattaaaaaagtaataaaatccgaaaaaggaacataactgatatttgattatttttaaaatattttttatccaaattaacaagtttttcacacatacaaaattttattttaaattaaataatatagaaattaattttattccgacaactttttttcaacactaattactcccctcgatttaaatttttttgatccgcataaaaatgctgatgattacgctggcatttgtgaaacaaattgtgaagttgagcctgtttttcaacggcatttcctgggatg

SEQ ID NO: 113661 - DNA, 224 bp, Heterodera glycines
tctaaatgactgacagggaagtgaatgataaggggcgtggcataggagggcatactgtggatggatttcgaaatcctcccgtctggaggtccctgcgtgctctcacttgagtgggcgtggcctattcccacgtgacacccccctctccgctacgtcacatacagtacccccacacttttcccttctcattttcatcttaacacacaaaaatattcctcgaaatg

SEQ ID NO: 113662 - DNA, 849 bp, Heterodera glycines
  unsure (1)..(849): unsure at all n locations
cccgatgggtgggtctttgttcttgaacaaaaataatgaaataataatttttgtttttntaatataattcattttcataattttttatttgaagtttattttatttatttttaaatttataatttttgtctttaaattaattttttgtttataaatacaaattctttttttaatattattattttaaatattttttcttgaatttttgtctaattctaagattaaaaaaggctttaatttcattttttttaaaaataggcaaaaatatttcttcaaatttctgatttttatggattaaatttattataagaaatgggcagctttaaaaactgtgattattattgtaccctgatatgtttgttctctgtttgtttatgttgttttatttcactaattttattctgaagaaagttatgagaaaaaatatgtgtcaagaaacttttgggacacaatgtatttaattatttatttacttaagtaatcaattcttaccaactcgatttcatctcaacaagtttttcatttgaacatttgaaatcgtcaattatgtgcccgaatgttcgccgccgtcaaagccttggcctaattgtttacaaaataatttataatataaattattcattatgaatttaatattttgaccgtttcaccgatttcaaaaaagtttgctttccatgcctcgctgcttatctgtccgtgccaatgatggtcattccgcgtgccattcacgacgttcttgaaattttgtataattttctattgtttttctctcttttttcatttatggtcgaatttttttgattttcaaaattcatatttttcacaaaaattttttattacaggaacatg

SEQ ID NO: 113663 - DNA, 305 bp, Heterodera glycines
tttgctttgatccaaaaattaaataattattgaaaacattaattactttaattttaataaacgcaatgaaaaaataagaaatacaaataaaatatattcatttttcttaacattttttaaaataaaagatatatgtaattaatataagaattaataattgagtaatttcaaattttattcaattgagggataaaatttaattcaaattttaataaataaaaattcattttaattggactaattttaatttaattatttgaataaacaaaagaattaattttaattggctaattcagagtgatatg

SEQ ID NO: 113664 - DNA, 1003 bp, Heterodera glycines
taattttatggtggttttttattttatttgcttttttctttttgttgcgtgtttcaaatttaagaaccttggaacagaatttatggatttttgtgaatttaataaaaaaaattgtaataaataatttaaaaaatttcttctttttttggtatattctaaacatgaatttcctgactattttaacaaattgaatcaccatattcacaattataaaaatatttttatctaatctataataattaatataattataaaatttataaaatattaatacactttcttcgaaatagaaggatattaatgttaatttatcaaatgcctgatatgaaacttccttttacaagtaatattgttttaagtatttgaatttaactaataattatcagtagtaacacacccgggacctctgtggattgacactaattagaagtgacaggtggcggggggaggggtgtcaattagtcactaattgggggggggggggtactaattggtcagcagtcaagagggcactaattggtcagccgtagggtgtggggtggggtgtcaattaattaattaattggggggacccaaacctattgaacggtttcaaattgtcttgtactttttttgacataaaatttgattgatttaaaaagtgacagccgagggggagggggaatttgattggtcagcgaagtgacagatgagggatgaaattcaaatttctgatggggagggggatcggaaaattatgattgatcaacaatgtgacatttgcgggggcattcaaatttgcggggagcggggtgggatggtagagagggatatttctcatcttttctctgtccacccctgtccaaacagagcaatgcatatcgatttgacgggggaacgccgtcactttctcaccgctttactcattgccattaaatgaccaaacgaccttttccataattctcccctatttttaggtgtgttatttttccatatttttctcaacatttgttcaacaccaatg

SEQ ID NO: 113665 - DNA, 386 bp, Heterodera glycines
actccgtacaaaaagtcctgtcttaacaagactccggtcctgtggcattttccgaaacattaaccggactatatcagttgcccatctccgtctagaaaacaatacagttttatttttaagatttgaaacttaacctaaatcagcacagagcatacatttagcatttgtttattagctgtattattttaattaacgttttttcttctttccatcacttttcctcctccattattttgttcatccttttttttccattacattggcaaaaaacttcccgtcggtgaatcatttcttccattccaattggccacttttggccaatccttcgtttttcattttcattgattcattttacatccgcataaattgttgcataatattaaatg

SEQ ID NO: 113666 - DNA, 210 bp, Heterodera glycines
atactctctctcttctttcgctgtctgcgctctcactgaaactaatgcagagacgctaaaatttgtttttattttagtgtttctatgtaaaaaacttttgcatggcaaaaatgtttaaatttaacttttacactttaattatttaattttttcttgcagagcaaatgaaaattattgtacgaaaaaaaatggcagcaagatcttcgcatg

SEQ ID NO: 113667 - DNA, 104 bp, Heterodera glycines
aatgattcattaagaatttcctttgattagggctgctaaatgcttttcctcccttttcccacagttttcgcctgcatttcgtccgttgtattcgtgccgaaatg

SEQ ID NO: 113668 - DNA, 1003 bp, Heterodera glycines
agcgcaaatttatagttttcttaaatcaagtattaaaaagctcgaaaataaaaacaaataaaaaggacagataatatagaatcaattgcaaataatcaaaagatctaactaactaagtaaccaactaataattattttttcaaatttaattattttaagataacgaaataaaacaaaaataaaattcagaaagatagatttttaaaatataagaaaataacctcaacgaaaattttcaattaataaattaaagagttttttcgagcgttaaaaatattaaaataaatgattttttatattgcaagtttaaaagtacataataaatatcataaaaaggttggttgttaaaaatataaataaatcattaataaatattcaaaaagtcttaaaaaaactatttatgtttttccctctttcactccggtttatttgaataaatattttgacgttagaatacaaaattttttaattattaaaaataacgataaatttatcaatttaaagaataaaaaatataattttatttaattgattcttggtagttgtgtgtggacgcgcagaagccgatgcgtttttggatgaagaagggcatcaatattttccttgatcaatttggaggggagcatgcagattgaaattattgcaatataaataaaaataaaaaaagttcattaaattttaataaaaaagaaaaataataaaatttatacaaatgaaaaatgaaattataatataaaaagtttaaaataatatttggttgttcgaatggctgaaaaattatataggcaaaaacgggacattgttcaagtcagattcaccgtgcactctacctcaattgaatatcatttaaataataatttaaagattactattactgtaggcaacaaaaaataataatggcacttacaaaatcccttacctaagaaaacaaaaatttattttaaaattttcaaacattatataaatataagtataaaatatttaaggttggacaatttgaatg

SEQ ID NO: 113669 - DNA, 66 bp, Heterodera glycines
tatccttttcggagtaatcggcgcaaaaagttcccacgtcgagacaaccaacagggggccgatatg

SEQ ID NO: 113670 - DNA, 149 bp, Heterodera glycines
ttttttggctttgaattgaccgattgacgcaaattgatcaaatcggaacctcagcgaatggacgaagaattcatcttcaacaaaaccacgtctgatcgacaaacggattggtacggagagttgtgatcgttcactttttgtgcgaaatg

SEQ ID NO: 113671 - DNA, 407 bp, Heterodera glycines
ttaaattcacccgctcaaacctcaaaatcattttataaaatgtcatcattatcattatctcccgaaaaaattatgtctcaagctccgtcccctaataaggcaaaagttgaccaacgagctctctggaaaatcttcaagggcaagtacatgctggcaatttatctctgcgacgatgactagcgaaaactgtacgagaataaagagaaagtcagacgactagaggacgacgacgacaatgtgacccttagtttccaaatgtgtgaggattgcgtgcgcgtgaattgcaatccaattgacataatggcaccaccgaagaaacgaaagatcgagaaagcttaagctcgactcattcgccccatcccatctcgtccaattttcgcccaagaacaactcctgccatcaacatg

SEQ ID NO: 113672 - DNA, 178 bp, Heterodera glycines
atatttaatgcatttgaacttcacatatttgtttttagactacaatcggacaaaaacaatgacaaattatcgtgcttttatggtggaggggtgggggtgataaaaagcacaaccttttttaaactttaataaaggatttcaaatttttttttgtcaggttatgtttttttaaaggatg

SEQ ID NO: 113673 - DNA, 266 bp, Heterodera glycines
  unsure (1)..(266): unsure at all n locations
aaaactcaggatttcattttaaaacaaaatcatcaaaaagagagatattanttcattcaatttaaaagaacaagnnatagtgntgtagtaatagtgcagatggtagatataaaatttttttttgaaatntaaagtcatttcattaaataggtatgcattgtaaaacgnactcatttttggtcttaaattttgtgttgaaatgcgaaaatcaaggtcgaagctcgcatttcattcaaatcaacaaatcaaagatttccaagtgaatg

SEQ ID NO: 113674 - DNA, 370 bp, Heterodera glycines
tttggctgaaatcggggactgaaaattaattacaagaaattgcacaaaacgaaaaaaattaacaaaaatacttagggtttttagtttttcaattttagattattttggagcaaaaaattaaaaaaatgacgattacaaaaaatttagtagatgaagaaaataaaaacaaagaaatgtaaatttgatacggagcggagcaatttatatagaaaaaaacgaatgacaaatgaaacggaattttggaaaggcacacggttcacacatcggaaggatatttaaatgggcatttttgcgctttgttgttcattcgtcgcaatcactgcaccacacataaataatattttgtccttcttcctcctcccataaaatg

SEQ ID NO: 113675 - DNA, 834 bp, Heterodera glycines
  unsure (1)..(834): unsure at all n locations
agacaaattaaacttgcgaatcaagggaaaaggtgagaaaagacgaaagcaatttaaagcattntatacagaccgtattaattaacttttntaatcaaacggagactaacaacacaaagggaaatttaacccaacggaaaaattgagctaatagaattagtgaggtaagtagaaatgaaacgattcatttttcttccgtttaagatactgtaattccctccaataaattattctttaaaatttttggcgccatgtttattttaaaaatggtgtttgttagctgacaaatgagttttcaattctatccatttccagtgcccgatttatacaatgcgtactctatacctaatgtggaccttttttgttttgttttttttttgtgattatcaggtcctgattcctgatacgaatttaacatatattttgactagttcttcagccctaacccgaacttcaataatcacagaaacaattttattactagacgtattcaaaaacatttgcaaaccaaaaggcccttggtttttaataaaattcaaaatgtccaattaggtaggtataaccagcgctgaaaattctatttttccaatttttcaggcacgtgttttaatcgataaaacaagcaaaaattagtcacaaacattgcgacttcactagtcattttatcagatttgaccataaatgtgaattttgaaaaatttaattctcgaactttttattcgaattcggactttgtgtcgaactcaaatttttttatgtatcaacaattccataattaaatattttttccccaggcggtattttttatttttcgattttacattttgtgacatg

SEQ ID NO: 113676 - DNA, 56 bp, Heterodera glycines
ggtatacgtttttaaacttctatttgaacaaaaaaaaaatgtttaggggaaaaatg

SEQ ID NO: 113677 - DNA, 1003 bp, Heterodera glycines
attattatatatatttgtgtgttcatcaaaacaaatccaagtctttcattcattttttgttttgtgtgcggacttctttcttttctcttttctgatgagcccttctcctcttcacacaccgaaacactccttttattattttgtaaaaaacaaaacaaattacttacattcgtccaaaaagtcactttttaaattttattccattggccaaattttatttcattttttcgcccatttttttgtattatttttatttgtcttacacaaaacactcccaataattattaaacacagtgccgaccgaaatttggtgtattttacctaacattttttacttactgcgctctttcagcatttttttctttttactttccctgtcccctttcattcattcgcttgtcattattatttttttttatatatatttgttttttatgactattaaatacttcaatgtcagaagaaagtgcgtgcatttttatattaaaggaagcagttaattaattacctgattataccttaattgatttacatctgctgcagcaaaagagagacaaagagcccttcaatttattagcgcgtaagtgtatcgaatatcgccatacccacaattaattttcattttaaatttgaaaaaaatacgcccacaaaacgccaaaacttttttgtgtaagaaaagaaaaaagaggaagagcagagctaacgccaactaacttcgaaaatgttttaagccttcgaactttttaacggccaatgctaacccattataaataagcttttgctttgctcaaattttcctaattttgatttttttttaatgatttctcactcacctggtgaacctcaagacaatgtctaagaatcccctactttttaaattcaatttacatttttatgtctaatggatgcccaataataaattttaaatgttttttcagcctgaaattttatctatcatttgccatttgctgtaaaaaattgaatttttacaaaaaaagcgatg

SEQ ID NO: 113678 - DNA, 869 bp, Heterodera glycines
gaataaataaaaaataaatttttttggcatttcaaaaaagcgattttgtatcaagggaatttagagcattctaaagccattaaaaataagcatttgatggaaattttcctgctattcgtcttatgtgttatttatttcttttttaaatgaaaaataaaaaacttatttcaattttttttaaagttacatagaaaatttaatgttatctatcctaaaaattttaactttattgactttatttagacaaaaacaattattctgattgagtaatttaaatcatttgttacatatttttatttaattagtttgttaaaatctttgatgtcactgttatgctcaaatctaatttgcaaaattagtttaacaaatgcccactaattaggttgcgttctttgtgaacctgttggttatcagccacggaaaaattaaaggcaccttcagctaatttataaacgtaataaagcttccgctttcaaagacgtaaatcattttcatgaaaataaatggtccactaacaatgaaaactatgcttttcattaaatttttttcatattagataatttgatgaatattttatataaaaaagtaatatttctttcaaataaatttatattttactacgatcaaaattattaacgtgaaaaatgcgtttataatttcgcttacaataatatataaaatcacattatcctatgaaaaaaattagcgtgaaaaatgcatttttaaattttgcttctccgaaacaacgataataatgaaaagggtcaatcaaatgaaagtgacattctaaagcaaataataaaagaaatttcataaaaacaaatttaaaaaaattaattttctttttagaataaactccctttaaaatg

SEQ ID NO: 113679 - DNA, 103 bp, Heterodera glycines
tttttttatgatttttagcgcatttcgtttttttggcattttgtaataattttaattgtttcttaattaggtagtgaatattgattttgattgattaaacatg

SEQ ID NO: 113680 - DNA, 313 bp, Heterodera glycines
ggaaaatgttaagattttgcccgttatagaatccgttgtaacaggacagtctcgtacaatattttctcaggatatcctggtctggatcttgcatattttatcccggatattctcgtcctgtcctggcgggttgttttttttaattcgattcaaatcatcgcctcgattatcaataagtccatttttttagtgggtaaaatttgtttgtttcttataggaaatgtgacataaaaatattaatttttacaaaaattttcccctgtttcagtgtaaggacaaatgcattgagcagtaccaaaaggcggccgacatg

SEQ ID NO: 113681 - DNA, 1003 bp, Heterodera glycines
  unsure (1)..(1003): unsure at all n locations
tttgtatttggccaatcatttatttatcttttgagggagcnnagcnnnggcncgnncgccgccncagcctttcgagnnggacgggcgaagncccaccgcnncggagcngnacacggacgacagacaggagcacagngaagccgncccggcncngngccggacgcacgaggaaagcgccaacgccaaaggcnncggggaccaannggcanncgnggacaacccaagngagncaaaccgnacaacannnnnccnnnnnnncnannannanannncagcacnncgacncgcncngnggnnggnggaaaaangggccgagggngacnncgnganggncannnncacgcccggnncggancgagaganggccggggaacagcncgnccaacgacgccacnnccccgaccngngcaanacggggagcggannnanggnnncggnaanaggaggagaannnggncangnnnnngnannnncgnannaagcgaacncgngaaanngcancnacggaaggggncanncngncgcagcaccaacaacnccagcaaaagggacangngcgcncnaacaancagacgaaaactggcggnccaaaaaaggnnccngcgaagcanngccaggggcatagnccgncgccaaaaggnnnccgngcaaangacaaancactgctcaancggnncatnnncgcgcgctttgcctgtgccgatccgtcagtgatccctccgttcttcgcctcttctcagtttggcattgatcgcgctggtggacccattgttttgccggaccaagtctgctgtttccatctgcgccacccttttcaaccagtgctttcacttaggttgggttgcttatcgcccgtctccacggcgtcgtcagcaccgccgtcgacgtgtccatcccttttgagccgaagggaggaaaagcgcaccaccagcggtttttgcatgaggccgatttgagtcaactgaacgaagcgttggaaagactgcgccaattcgtcgaaatg

SEQ ID NO: 113682 - DNA, 348 bp, Heterodera glycines
ttttaattttttgtttttgtctttcattgtttaatttaaaggtttaatattgcttatttttttaaattcaaagtctgtttgtcgtaaaattttatggttatgtattggttagaaaaagtatttatttttgttgtatacacattatttcatatatctactttaatttgtgttttattttagaattgttaaacaattagagaattgtttttctgccgatacggctcattttttctaccagtttggtcaaaaatctggtgactaaacaatttatcgttgtttttctgccgctacggctcattttttctaccggttcggttttttcaaatctggtgccagcctgttgccatg

SEQ ID NO: 113683 - DNA, 483 bp, Heterodera glycines
ctcgaataaaaatcggaattttgaatttttcaaattatgattttttgttcaaatttagattaggaaatcggaattgatcaaaataattgaaggattcgtgatcggggaccccaaaaaccccagagaataaatttttatgactatcacaaaaaaaactttgcaaaacaaaagggtccccccttttgaaaaaattttcaaaaagggccacttttaatatagcgcctataactgttaactatgtagggattttttgtcactaaaattcacagccctagtcattaggagccacattgtaagacggatgtcgtatcatttcccttcaagctcttggaattccatttgatcaattgtacgatgggtatggccaaaagtacatcaagcaaccaggtttacaaacattggccataacttttttgaaactcaacgaaattttttgaaattttgcagattattagaaaacacttgtgttagggctatcgaatg

SEQ ID NO: 113684 - DNA, 211 bp, Heterodera glycines
tagtgattagcaccaaaaatgttttggattattatggtattttagctaccatttgcttttgtctccttttttggtcgcccatttgtccgtccatccgacagataattccctttgtcagcgttccgcgtcaaattccctcccattcggcttcccgccggtgcttttaaagtgcgcttcgcccctccgcccattcattccgccgtgccaaatg

SEQ ID NO: 113685 - DNA, 334 bp, Heterodera glycines
cttaattggtccctccgcccgatcaatcatttttttctgtaaatgcaataaactcagttcaaattccgcatcctattccaattttttatatctctttcgtacatatttttattaataaaaaaaataaattttttatcattttaaaatatttagtatttcatttttcatttaatatggttttcattgtattttccaattaaatttcgtcattttgataattaattacaaattattttataagaaaatttctctcttctcaaaaagtgcaaaacaattaaatgcatattttttgttccacataatttagatgaccttctgctaaaaaaataaaatg

SEQ ID NO: 113686 - DNA, 251 bp, Heterodera glycines
ttgtttaggtatgagtacgcggacgaatcgaacatttcacagccgtcgtcgatgtacgcggacccgcccctcttcaaggaggaaatgtcggacgaatcgcacttttttctccactcaaacaacagcaatcagtcactgccatttccagcctctacgtttgtgcaggtggtcaacgaaagattgtccttttttgatggcaaaacaatgcgaaattattaccactgcccccccccccccccccgcaattaatg

SEQ ID NO: 113687 - DNA, 185 bp, Heterodera glycines
ttttgagcattattttaccattttggagaaaatgcccatagttttgaatgcttttggcatttttcttccaattttttgaaaaaaaagaatttgacctgctaaaaaattgcttaatctttaagctattaaatgaccaaaattgttttaaaacatgcgcaatttaatttttttagcatttaaaaatg

SEQ ID NO: 113688 - DNA, 744 bp, Heterodera glycines
gttgtttttcatcaaatttaaaacatttaaaattattacctaaaattcgacattatatttttaggatatcattaccaatagtttgtttttttttttttcaaattgataatgtcgacgagtagagaaaaacttcgaatagcaatttttatatcttccgagggattaatggcaactcgtacaaaaattatttttacaaaataaagcctaagcctatgtacgagtagactttgtatggtttccattatgtacaaattgtcatgactctcatttccagagcgataattcaatctttcggagtaattttctatacatagattttcgagaatttctaaaacagaataaagcattcattgaactcgatattttttatcgtacaatttattttcccttttcatacaatttatttttcgttttatttttgttattttataataattgaatcattcatcttccaaacacagaaaaatttattgccaggaaaataattatgcataaatttactgatttgggtgtcaatcagcttttttttgctcacatcagtgatgaaaccgcattacattctcattaaccacaagagatatgcatcgaaaacagaattgtacatcccttcccaaccattcatttcatttcattttggacaaccaatttatttggttaataataaataaaaataaataaaaacgatttaaaaataaaataaattttcatatgtttttagataatccaagaaccaaccttaacatg

SEQ ID NO: 113689 - DNA, 480 bp, Heterodera glycines
taaaagtttctaaaaattaaaatttgttttaatgaggggtaagggtttgatgttagacgttcgaccttcgattcagttttgttgctagtaaatatttaaaattaataaattggcgttttgcaatctttttttattagaagtaaattgaaaattttgaaaaatataaaattttttgaaaactttctattgtataggttgtggagtaaaattgaaaattttgaaaaatataaaaaaaaatttttgaaatagttgtcttgtacatttcgggtcataaaaaaaccccgagttcttttaaaacaggaatttgtccgggaacctgtcgggttcaactcggaattctgattctgctacagaccttggggttttttttcttcaagattacgtcctcatctatgtaaatgacaagggtttaattaataaatattctataacaaaaatatctgtttttaataaaaaggatttgtcttgatagagaatatg

SEQ ID NO: 113690 - DNA, 112 bp, Heterodera glycines
taatcatatcaacaatatatccaattccatccaaccccaactaaacacactacgagaaacaaatcctcaaattttagaagagcctgatataaaaatttggtttgacaaaatg

SEQ ID NO: 113691 - DNA, 440 bp, Heterodera glycines
gggaacacttagcgaatttaatgacggaaagtaacggagggaaggtaaaactgatgaagcaaattataaacaaagtgactaatgaacagacagaaccgtcagaagaaaaaaagacggaggtgaaaaattggttaattaattgagaaagacaattaattggcaaattagttaatttattgagaaagaaaactaatggtcaatttgttaattaattgagaaagacaattaattgaccaattagttaattaattgaaaaaggcaattaattggcaaattagttaattaattgagaaatataattaattggtcatttagtgtattaattgagaaaggcaattatttggcaatagccaattaattaatttaatttgtggactaattaaatatattttgcataaacgtaaaaatgaattttgaatttgctgccaaaggaagtgatg

SEQ ID NO: 113692 - DNA, 462 bp, Heterodera glycines
ggggggggggggggaatgtataagtaggatggcaaaacttgataaacctcgattttaaaaaattatagcggacccgcccccccccctaaaaaaccgaatataaggcaaatccgccgtctgactctgtccccattttttattttaatgttcaaaaaacattttttcattttaaggtcacaatcccatcacaaagtaagttcaatttgagaattagaccggagatcatatacagaaaaataaattgaaaattaaaatttttgaattaaaatattcctgttttttgtgttcccatttttacagtagccacaaattgagcacgaatgagaaaatgacaaaaccgatgacaatgattcaattttcatccatgcacaagagggacatgaaatgaattcatcgtaaataataaatattaaaattaaattataatattttatgaattaaaataaaattatagccaaaatg

SEQ ID NO: 113693 - DNA, 81 bp, Heterodera glycines
cgcttggcgcctgagagagcgatcggaaaagtgttcaattcatgtatggcaccgagaatagtcttctcaacagctgccatg

SEQ ID NO: 113694 - DNA, 275 bp, Heterodera glycines
ttccccactcattttgttctttttttcctctccaattttgccccatccattttttcataaaaatttgttttcataatattacaataaatttccaatttatcatttatgcatgttaattgtcgccgtttaatgaataattcatttttggtagaaagaatgattcacaacacacaaataacattaacagattttgaccaaaaatgacaactaccgagtttttttgagccattaaaaactagaatttgataatacatacatacatattctttaaaatg

SEQ ID NO: 113695 - DNA, 955 bp, Heterodera glycines
ttttaaatttctgtccgggctagtcgaagactaaagggactttaaaaagagaagaggtgagaaaatctgtccgggctagtcgaaaactaaagggacattgaagacgaagagaaaagaggtgagaacatttgtccgggctagcgaaaagctaaagagattttacaaaaaaaaagaagaacaaaatttgcccgggctagtctaaatgctaaaggggctgactgcatcgaaaattgacaaatttgacaattatttgtaggagagagagagaataaggaaagagagtgaaggaagccaaaaataaccaaaaaaaaagtcctggtaacaaacgaataaggactaatttataaaaatatttgaacgaatgtgaagcaaaaaaaaaagagagagagagagaagaagtgagacaaaaaaaaatatagaacaattttttgaggagagcaaaaaggcccgggctgataaccaatcaaaggggcactattttagctaattaaaaagagggaccaataaaaaatgaaaattaggccctatcaagttacagtttttacaagttccaaagttcattttatctctttgttttctcccgtttttcacgccataagaatattcacgtaatcacgtgccgccgcatttttcattgggcgagatcattcactttaaacatttttgcggcgcctgagaattgttaattgttcttgttaggcgaagtttaaacggagatggagcagataagcccattcctggaaggcgttcgcatccatttgattacccgctatcattcattaattttttttttctctctcaattaatgcataatgggattaccaaataattttttttagcaaaataaaacaaaatcttattacgaactgaacgacttcgaatgtctacatcagggggctcgtcaaatgagttcccatttggtacatcccaagccttcgggcaggaaacaaagatg

SEQ ID NO: 113696 - DNA, 334 bp, Heterodera glycines
cctaggcaaaattttgttcaaatttcgttttcttgaatgtcaaattttcatttttgttttgtctcattaaaactaattgcaacaatctcattatcgagattactactaatttgcccaaattaggggtgtcagctaggaccccaaaaattcgaaaacccggattaggaagtatgaaatgcagaactgggattcatattcccgaaaaaagtcgaaaactgcaacggtaaggcggcgggggggggggtcgaacgtcacccgccgagattaggcacactactaattggcccaagaatcatttggccaaaaaaagaattgagactgttcctcaaaaatg

SEQ ID NO: 113697 - DNA, 658 bp, Heterodera glycines
gtctatgaaataataaatttaaaaaaatagtgataaatctttgacaattcctaaatgatttcttgttgacatgatcaggaaaatttgagttaagattttttttaatatttaaaattggtattcctaaatttaaaaaattccttaattatgggtttggaagcaggaaatctttttaatttttagcatagaatttaggtcgacatttaatttaacgctaattattattaattctaactctaattatcattaatacctaattaaaataaagtaatttcaaaaaaataaaaatggcaaattcagaaagtcaaaaggtattaaatctgtaataatacaaagcattagcatctatttagcctagcggccaaagaggtaattctttagtttttaattaaccctccgcggtcatttttctaaaataacaaaaaattattaataaaataatcatacgaggcaataaaggggacacaaacagcaggaaaagcgttaatatcgcaatgtaatgacacaatattataagtaaatttttttatataaaattttggccaataaattaaaaaagttatctctaattaaatttattaaaactctttgattagagtttcatgtaaacgaacaaacaaattgtggtgttaatgatttagcacgtcattagaaaatg

SEQ ID NO: 113698 - DNA, 1003 bp, Heterodera glycines
  unsure (1)..(1003): unsure at all n locations
agaaataccaaaaaatatttaaaaaatgaatatttattaaaaagctatgtcaatattgtctagggtgagagggttgataggcccgcattctggaaaaaaacaattaaaatgacacaaaatcagtaattatcaaagttattttacaaaaaaaggcataaaacatcataaaagaaaaaaattaggtgcatatttttaataatatttggcgcatataaccaaccaatcgtcgaaacctgtaattgccaatcttcaaaaaaaataaaacatattattcaaaaagaaattttatttaaatcgtcactgcttaaacataatatatgtaatcaatttgatatagtatcatatgatagaaaaaagaaaaatgtactattgtataaaaagataaataaagtaaatatttattttaaaaatattaaaaattatntagttgggatggaagggtttcgacagaaaggctggacattaatcaattgaaaaaaatcaaaaagaatttaacataatagcacagtgtcaatcaaattggcacccagcagattttgaacggttgatgccgttatttttcaaagtgaagcgaaaaaatttaccaaatattgaatttattagcatattttaatgttttaatcttatttaaatctttactgcaatcaataaatttgtaacaatcaccaaattataaaataaaaataaaatacatttattataaattctcagagtctcattaattgtaaataactagtaatatttgaaaaataaaagaaatgctatttaccccaacgatatcagtagtgacccctgtacttttgttacaatttttggcgctaaattcaaatttgaattttcgcgtcgatactcggtgggtggagggacgcttgctggggaggaggaacaatgccgtagggtttaagtgttgctttggcacattaaaatttatttaaatatatattatttaaatgtgttatttttattgtatttaattgtttttaatttagatattccaaaaatg

SEQ ID NO: 113699 - DNA, 180 bp, Heterodera glycines
ttttcggtacaaaatttattaatctttttcattgattacatccatttgattataattattcatttaagtgattatgactgtgaatttgctcactaatgctgcgtaatgaagtcgaaactgaatttagatgaaaaagaaagaaaagaatttttgttttgatcaacaaaaacaatacttatg

SEQ ID NO: 113700 - DNA, 256 bp, Heterodera glycines
attatgtttttatacgatttttctttttgcgtgataaaaaaattcagaaattattaattttattttggcattttgccctaattaaaaaaaatcaagaaatgaaaaatttatgtttcccttccacttttcgctaaatgtaaaatctatgactctatggttattaaagccgttttttgttgttatacatatttccttttaacttaaatctctattttgaaggtaaattttttgtcgcacacaaacttgagtaaaaatg

SEQ ID NO: 113701 - DNA, 267 bp, Heterodera glycines
actgagagatttctttgaattttattttttcgtaaaaaatctatcattttgtacaatttgttactgtgcttattagagaccggacgggaccggggccccgccgggatttttccgggacccccggtcccgggttttttgggcaaaccaccgggaccgggagtcccgggggtcccgtacgggtccattttccaagtcccgctcccggtcccggcaatttcaaaattccggtctctactgcttatattacgtagttctctctaacgtatg

SEQ ID NO: 113702 - DNA, 1003 bp, Heterodera glycines
gtccgtggaaaatacatcagtgaaaaatactcagtgaaaatacataagtgaaaaacgcagtgaaaatgcatcagtgaaaatacatcagttaagaatacgtcagtgacaatacgtcaatagaaaatagtgaaaaatacgcagtgaaaatacatcagttaaaaacacacagtgaaaatacgtccgtggaaaatacatcagtgaaaaagacgcaatgaaaatacgtccgtggaaaatacatcagcgtaaaatacacagtgaaaatacatcagttaaaaacacacagtgaaaatacatcagtttaaaaaaaagtcagtgataataaataatacgtcaatgatttttgaaacttttaattttttaagcagactgttaggagaaagcactgtcagcacatttcttcaacaacatcttcaaatgaaatgagtcattctcatttaatgggataaaaaacgacaggcggaggagcaaagaaacaaataaaataattaaaaaattgaaaaaaataactgacgacaaatcgatgtgatggatgaatcaccgattcatcagcgaaaagacttttctcttttctcgctcactcaaaaattgtcatcattttgcaaaaaattcaatcaaaaaatttgtcacaaccatcttacaatcaatcgcataaaaggtgagcatatttaatttttgtatatctattcaattaacaaaaactgcaacaaaatactaataaaatatttcaattttgtttctgtaaaatcaaaattacccaattgttaggctttaaatcggagtaaatgtatgacattttaattgaaaaattaaaaccgattttaaacatcgttttaaataataaatgtttataattattaagaaattttaaaaatactaagccaaaattaataattatttatgactttctctaaaatttaataatattttataaattttctgcatacctaagatattaacaatttaatggatttttatgtgtcttccgctctccaatcaacaaatg

SEQ ID NO: 113703 - DNA, 324 bp, Heterodera glycines
cgtcgacgtggtgatggctgagcttgacaagttggtcagagcgagggagacgatggaggtgctgacaaaaaaactttgctgctcagcgatcctgtggagatcatcgtcacctgtttgacccctccagtagggtcagccccacgtttacatccataccaaaattggggatacgatgaatcgcaaagaattcgcatacgcaacaacgatagctactgtttatttcatgcgcttgttgcaggccgtgcctatcatgaccgcgatattttctgccttactcataacccaatagatgagcagcagcctcaatttatggcaaacataatg

SEQ ID NO: 113704 - DNA, 211 bp, Heterodera glycines
cccccccccccccaatcgtattccatccatcaaaaatattccgacgtaccacccggaagagtgaacttttgccgcatccgttcggtccgcagacgagcacattggtgccggatggcacctcaaagtccaacgagcggatgagcacgtcgccgttgggcgtcaccagcggaacttgttggaaacggatcaaattgtcttggacaaggacatg

SEQ ID NO: 113705 - DNA, 1003 bp, Heterodera glycines
gtgacgagagagtagctgcggatggtatctgcagataaaaaaatcgtcagctacagatagttagcgctagcattatgaaatgaatacggattttatctgcagctaccctatccgcatatccttagctgcagataactatccttagcattatgaataccagcaagagaaaattttatgcaaaatttcaaacatttctgaatgtgttaagcgaagaaaaaaaacctgcatacaaaaagtaaatcaaaagcatttttataattaatcagaagttttagctgacgtaataattttaaaaaatttaggaaaaaagtaaaaactaaatatgtatcaataatgattaaaaaacattattaattatggaacgaaagggacagaaaatgattatgacgacgaatggtgatgggtgtgatgatcagcagcagtgcataagtcatttttattatatgtttttgtttgtttgtttgtgtgtgacgtcattaagaatttaaaaaaatggttgtacaatttcaaatcggtttctaccagggcccagggctaaaaatgcagcagaaaaaaagttaaaaactaaaaatccgggccctattcataataaatggaaaaatgaccaattggtacaaaatctgttaaaataaattatagctaatttttttgaaagaaaattaattaaaagtaaaagaaatttaaacattatgaatttcgtaaagtttttcacctttgaaatcactccttctgtgaaaaaatttttttatattggagatcgaaccccattttaggggaggggcacaaatccgacactaaagaataaaaaaataattaacaattcattaaaaaaatttatttgcgtgagaaaatacgtttaattgcataagcggaaggttttgtatataaaattcaaagatgagaatttcaaattttgaagagcacacatttcgccgaaaaataaaaatcgatgacattttttgaggggggggggggagaagaataagttgcattttgacaaatg

SEQ ID NO: 113706 - DNA, 606 bp, Heterodera glycines
gtttttgacattttcgaattctcaatctttttaaaattaattttcgtgtttttacccaatttcggcaaattcgtccctcagaattccttttttaagtgtcaaaaacgtaccaaaaaaattcgcagaccgcttaaaggaagaggattagctaacaaataagctcgaaattttcgtctcacaaattcgttcgcaaatatttcattaatacaactctttccaattttttttttttcgggcaaattttgaattttatcccttagaaattctttttaaaaatgatcattcgatcagaaaagaagcgcaccaagcctaaaggaatactaaaaaaaaaagagagagagaatgattagcttattcatcaaatttttatcctctcagacaatggcgtcgttcagcggtggccgcctttttcctttctgcaacaaattggtcaacaattttcgcgcacttttgcagggcgccaaatggcgaacggttggattggcgcccttttttgcctatttatggcattttgccagccaatattttttttttatattcgaatcatttatttcaaaaagggaggtgtcaaatgtgggtccgttgttgatcatttttatcgcaatg

SEQ ID NO: 113707 - DNA, 147 bp, Heterodera glycines
tttcaccaaattttctgtttcaattttaatttggacagaaatgcacctccgctgttctcgcttatgcgttcccttctcacatttatgcagcaattccccgtcctttgcccttgggccgacttttccccgcaatttgtccataaaatg

SEQ ID NO: 113708 - DNA, 1003 bp, Heterodera glycines
  unsure (1)..(1003): unsure at all n locations
ttcgctagatcaattctatattaattatatacgtggtgagccgaaggtacatattcaatagttatcttatgtaaatatcaaaaaatagcatttcatttttcacgtttttcgctaataattcttacctccaaaaactaaaaacgataaatttaattaatataaaataatttttgttttaatttttaaaataatttattattttgcttttaatttgatcacttccactttatcgtacttcgcctattttgcaccttttcgtacttttcgcccaatcttgcacttttcgtacttagtcattgcacctttaatttaattcgacataatttttataaaaattcttaatttatttgttagctcatcatttaggctatggctaatcattattgttttttgaccttatatcaaataatttcattaattcgttttttaaatctcttttaaaattaattaatttttcctaattattttattagtttattaattcattaattactcattttgagataggggagagttacgtcgagaatatttgctcacctaacttgtttttttcaattattttttcctattttttggggtgaacaattttgttttttagtccattcgttatacatttgcactgctgcgcacaatttacactnttccaatttttcctaattgcaaaatgacttcctccgcaaaacttgattgaaattaattggtcgttaattagtagcgttatgatgctttgattaactaatgagtgattagcgttattgagtttacaagctaattgcagaaaagaaatgcatttaaagaaatgaacaattcaaatgaattcactcatttatttaaactcaaaataacctttatatataaaaaatatttcttaattgaaattatactcaatttaaataaaatgataattttcaatttcaaaatctatcactcatcagatgatagggaacattttgaattgagcaattaaaataaattgtccataatttaagaaaattgaaaaatg

SEQ ID NO: 113709 - DNA, 1003 bp, Heterodera glycines
gcggcggacgggggattggtgaagggcctcctccctcttaattccgccgatcattgatcggcgataggaataaaaattccgacactttttagtcaaagtcgtttgttttatgcaattttagatgcataaaaagatctttaaacataaacccccgagtagaacaaaatatcataaaaaaacaaaagttgagtttgtaattgtcacaaaactcgagatcgagctcaaaaggaaaacggcgagaaatccaagtcactcggccttcattaatgaaatcatatccatttcagacttttggtaaaaccacagcaggactattgcatcaaacaaatcatgaattaataatgatggtgaaaaagaaagtgtttttcccattgaatagaccaattagaaatgtttgtccattttatggggaccaagagtgggtatgcttatggcctaatcaacgaagagacgcaagagtacaagaatacagaagagagggcaaatatggtttgaaatttgatccttcaatctgggaatatttgagcgatcatgctgtgattactttcaaaaaatgcagaggagtacaagtaagaaaaataaatgaaaaattaaaaatttttcaatatgaaatttctagaaactgcaattttgaaattgggcgggtcgagacgggctgatcccttcaaaagcaatcggttccgagtctctccgatgctgttcaaatcggattctcaaatttcccggctcggaaccagtttccatttggataaaaatttaaattcccatgtattttcaccaacagtgaaattgataaaaaagtctcttgccaataaaattgatgtctccgaataatggtttaaagactcaataactgttggtataaaaaaggctagcttttagtatttcttaataaaaattgaaattatattcaaaatcataaaaaggtaaatgaatagacaaatttttaaggtttattttggttctgcaacagtacagctgttgcgtgaagttgctggaaatg

SEQ ID NO: 113710 - DNA, 345 bp, Heterodera glycines
tgtactctgatgctgcttatttatatttattatgcataaactttaagcatctttagtcgcattttgaaatggttttgtcggccatcttttcctttgattttgtgaagctgtttaatattaaaatttccactgatttgcctttgctatgggtcgaatgccttcgctttacccttcttggttacttaattatttgcctgacactgtatgtacattaaaaaacgcacatttttttgcataattcgttagattttacatcgaatccgacgcgaagagaatgtccaacggacggaattggcgctcccaacggaggagacgacgcttcccgaagatgccgacggtccgatg

SEQ ID NO: 113711 - DNA, 195 bp, Heterodera glycines
  unsure (1)..(195): unsure at all n locations
agtacgggctgtttttctcagaggacggagatgtggtggtatttagtgacttttgnacatnttatttgaatttttatatttgtttggcataatgttttttcgaatttggccaatttgttttcgtttttctttagtgcagtcgggacacttttgttgttgtttttgttggtggtaattcggtttttcatgaatatg

SEQ ID NO: 113712 - DNA, 699 bp, Heterodera glycines
atagggagtccaattatatgcacatgcatatttttttcctggactgtgggaggcctgaaacgcacgaaaaacatgtttttagcgtgttttgaagcttctaggatgactttccatatgcatgttttgcatatttgtgcatatttcgcgatttatgtgcatatttgcatattttggcatttttccaaaaaacctctaatagaacggccccccaacagacaaattggcctttttgacctcaaaaaccggaaaattttccaaaaaaataattttttagcaaaattttcacgaaaaatattgaataaataaattttctcaaaaaatggttaatttatgtcaaaaataagcaaaaaaagcaaaatttcgctttttgggttggtttttcgcaaaaaatgagtaaatttttgctttatcatgtttttttcttctaaaatgatttttaataccacatttagccattttttgaagattttacttaatatttaacaaatttgaagaaatttagagacattacacccttaatttggaaaatttatatgcatatttttcactttttatgtgcatattttgccatttttggtgcatattttatgcgcatattttgcgattttatgtgcatatttttggatgccctaataatcattattcccttttcaaaggtcaattccgacaatgtgcatttccttctctctgttgggcatg

SEQ ID NO: 113713 - DNA, 465 bp, Heterodera glycines
cgattttgacatcaattctattccacgtgaccagcggcactacaccattgaaagcaattctgttcatttctctttcaattattttttatgtaacaaaaattattaaatcaaaacatgagatgaaattttttaaaatgcaaatattttaatcaaatttatctttgttaaaccttttttatatctttgaacttatgattctaacagagacttaaattttggaaatacggaacgggaaatccgcgaaatcccgcggcgaccccgtctccgtccgggctctatcgaataaatttttttttattctccaaattggcacagattctctatacgctgtgcatcactgcgttatgggggcacgaaaatgagaacgcctgctacacattgttgtttttcattggcattactgatctgtcggtgttgtgggtgatcgggctgttccacggagtattggcgctggagggagccatg

SEQ ID NO: 113714 - DNA, 736 bp, Heterodera glycines
tgtgctaaaattgataaaagtggattcaggccttgttttcctaggtctaatactttttttttcaagtcttaaaacatgtttttagggggtgtggcaaactgaacaacaatatgatggaggaagaaaaagaggaacgtgaaaaaagaagagaaaaagacggagagaaagaggaaggcgaagaggaagagaaaaagatttttgtccaattcggatcccgaaccaggattcaaacaaaaagtcgaaagcctttttacactttttaaggcaaaatttaactttttgtgatgaaaattccaaaaaataagtcaatcttcgagacggaactgaaatttcttataccattagactcaaatgacggaactgaaaaataaataaataaaatttgaatatttttttccattaaaattagtagggatgtcaaagtttctgatcagtgatcaagaatttgacaacttttcaacaattcagtaccccggatcccaattcgaacaaaaagtttaaacttcaaattctcgaatatcgcatttttagttcaaaaccggcttaaatacacgaaaacaaactgaattcatcacatcgactctgttctgtaccaaattagcatttgatttaatctaattgatattcttatgtagtctaaattgtcttcaaattccttacatttaattaaaactgttctttaagcggtacggaataatcaagcagctaatatttggcttcttcgaattgcgcaatg

SEQ ID NO: 113715 - DNA, 168 bp, Heterodera glycines
  unsure (1)..(168): unsure at all n locations
agtgcagtttagcgcccctctttttgtaatatttntaggactntagagcaaaatgattgttgaaaaatatccctaaaaagacaaatttcattcttaccttaaaaagtgatctgcataaaaaattactcctattggtttaggattgaccttaaaaatgtgtgccaaatg

SEQ ID NO: 113716 - DNA, 141 bp, Heterodera glycines
tcattcatttgggagtcgttcgcacggaaggccaaccttttgggaaacattgacgttccgattgtcagacaatttccgtgccggcttttcgaggtggcaaattgcttggctggtgagtgggtgccaaaaatttacacaatg

SEQ ID NO: 113717 - DNA, 694 bp, Heterodera glycines
tataaaaacccggggattgtcaattgattggactcataaaagtgcactagagccaagattcatatgttcaattttttaaattttttggtattacttttctgaaaccaaatgaaacttgctttcgaatgagctcaataaagggtttaatttggatgacttaatagagcctaaaaataggcccgatccggtctctaacataggtaaattaaattaaaaacaaaaatattgtaaaaaaaacggtcgaactttgtagatgtttaagatgatgtcttgccggtgtatccggtgccaacttcgactgctcatcagggcccccccaaacaagcattgtcacaaaaaaatgctcaaggtttaattttatgacttaatcgccattcaataggtttggtatttcaaaaaaaaattttttttttttgcactgaattttatttgaatttaattgattccatgatttaaaatgtttcattaaggacggccaattccctaccaaacaaacaaaatgattcagcgccctcccgtgcccaatcaaatgcaatatttaaaaaaaacaagtgctgttccaactgcaacttcttgcgcttcatcatcccaaatatttgtgcgtttgttggcacttttgcagattaacccccccccccctgaaaaatttaaaaaaaaatgggccattttgtagggatttggaattggtgaaatg

SEQ ID NO: 113718 - DNA, 667 bp, Heterodera glycines
aattttatttttttcggaatttccccgattttcagtgcaattaaacggccccctctattaaagcggccatttgggctctaatgactcaaaattgttcaaaaatatcagatttttgggtatatttctttctgtcataagcattgatttttccaatttttacatttatttaaaaagtgcattgcgccaattcacatgttaagaaattaaatttttggcattaaacaaagggccaaattcacgtgaaaatgaacaaaattgtcattctcgtgtttaacagtgggccaaattcgcgctgtaaattttaaacattgccgtttttgcgtgaaagtgaaggcatgtcatcaatttcacatgtatacatttattaatattgttggcattttttttccactctctgtgtttggcacactattctcgcaacaattgtggataattgccctcaattttgccaaatctggccaaaattatagcgcgctaattgactttgcttatctaccggcctgtaaagcacgccttatatttctatatttctatttctctcactgtcattatgtataaatattttatcatgtgcatattaattttttttttgcagcgaatatctgcataaaagaagcagtgattaccaatttttaacaaattcatttattattttttttaataaatg

SEQ ID NO: 113719 - DNA, 209 bp, Heterodera glycines
  unsure (1)..(209): unsure at all n locations
ttaaatgagaataggttagttgattaggactcaaaaaacctttntggtgcattacacataaaacgttttttagaaatgagcggggaaaagaaattaatccaacaaaaatgatttcaacgaaattcaggataaaaagttgatgacgaaataggcaatttaatgacttgttttatgcatgtatgtaatgcaattctaacacatacataatg

SEQ ID NO: 113720 - DNA, 53 bp, Heterodera glycines
tgttggcatcatcataagacaatttcaaattaatgattcttcagggtttcatg

SEQ ID NO: 113721 - DNA, 1003 bp, Heterodera glycines
cgatgtccttgagcatcgtttgtcaatcggcggacctatctcggggtgtttaacgatggcaaataaattgattgattgatagactcaataaacaagcgggaaaagatttttccgaccggaaagggaaaacgcaatggacacagtcgagtcatatcataattgtgtggtcagtcggcaactaataaatgagggcatcatttatgcacgcgggaaaaatgagtggttcaccagcaaagaaaagggagaaaggtcaattaaagtcaaggcgaaagaagcacaaacacttaatcattcaacaaatttgcattcaataaaaccaaaccaaaaattaatacgtttgacgattaatcgtttaagatatcacttatttttaatttcattaaaatttcattgttttaatacattttgaaaattacttacaaaaaaaaaacaaaatttcattgtgttaaacaaacgaataaaacgcaacagaataagcatagcaaatgctaaaattcccttcatcatttcgttcccgtggaaacgttgaaacgatcgataacaacagaagcgccccggggatatgaagaggaaaagcccaaaacattttgcggacaaaaagattgatgaaaaaaggacaaatggagaagagagtaaagaaaaagataaaaagctaacaaatcgataaaaaagaatcgtttcaaaattttatttttttgatttgcctatcaattgatattgggcaacggacaatgggacagcaaacaaacgaacacgaggaaggggcgggggagtttctgccttatctttggcttagcttttttttcctttacaaaacacgagactgggaattcctgtgtactatggattataccattttatttctttaaaaaaaaattataataagggaattaaaaaccaaaagcataataggcaattctcgtttttataccacgacaatacttttggtttactatttgtttgactttggcatttgatagtaccaattttttagttaattatg

SEQ ID NO: 113722 - DNA, 124 bp, Heterodera glycines
gaatttcgactttttgattcaagtcttagaaaagcgctaaatttttgaaaattatcagtttttaaattaaattttttttcattattccccctcaaaaaaaaaatccgaaaattcagtggtcatg

SEQ ID NO: 113723 - DNA, 374 bp, Heterodera glycines
atttttcatcgagagactttaaaagcaagtgaaatatgtaaaaactaaacaattgtaaacaatttcagttttctaatgaaaaatcgtcagcatcaaccattatttcgactataaaaacattgcgtgattttttgcaagaaaaaactttctcaaatcgcattttgggcgtgctagggtcatagtggagtctttaaatgaacgagttcgtgaattttgcagcaacccactgttgcgagtcgcaatgctacttgatcctcgatttgcttacacagaactgttttctcagcaaaattggagggttgtcgaacagcaattaatcgaatttgcaaaagagagttggttgaattattagaatatttggtaattaaaatatg

SEQ ID NO: 113724 - DNA, 218 bp, Heterodera glycines
tctaaaaaggacaaactttaaaaaaagctccgaaatttttaggaataaaacacactaaaacctgtaaaattcaaagccaagaaaactcggccaaaaaaataccaaaaaatggactggcaaaaaactgagtcaaaaaatgtatcctaattttgcttgaaaatgttattttgcgaaaaacaatcgcgcacagtccgcccagaacctggcgaacaccgatg

SEQ ID NO: 113725 - DNA, 231 bp, Heterodera glycines
ttccgtcaacttcatctcatgctatgtcgtctgtacaaagtgcataacgaaaatttatggcgaaattctctacaagcgccatgtggcatttgtgggcggcagcgcaccgtcacattctcccaccgtgcctatgaacacacccaaaccgatgcccaattcatcactccgtgtccaatggcggcctttgctcaatggctgctcaacgaattcgatccgcgctatcccacaatg

SEQ ID NO: 113726 - DNA, 69 bp, Heterodera glycines
agataaagttttgaatgatttaaactgagttccaattgtcggctgtgagtacgtttcagggctcagatg

SEQ ID NO: 113727 - DNA, 564 bp, Heterodera glycines
accgttttaaagggtcaggggctccctttttcactcaatttttcgagttttaaaccggttcaaaaaccggtttttttgcatttccgcaactggagacctacttttttgtgcagagctcgtcgagacgaatcgattggtatatcatttgttccgttttttacggggggttgactatactacacccaaacctttcttagtacaaacaaattaagtgatcttcgatcattcggtaaccctaatttttttctcatttcattgcataatttcaaaaattatctatctataaaaaatgggaagttttttgttgaaatttttcatttgatggtttttaataaggattaagcatcatctaataaattaaaaaactctgatcagcctataaggttttatttgtagaatttttcaagatttttttttcttcccaaaattgtgtttttggcgattgatcatttttgtgattatttttgcacctcaaaaaattaagctggtcgatttgggtacactttctcgatgaaacacagtagtaactgttggaccatatgttagtaaagaaatctcataatg

SEQ ID NO: 113728 - DNA, 319 bp, Heterodera glycines
tttattggaaagtaaaattattattttttttatttaagacaaactaatgacccatttcttttgtttgcttaggctaattttttgataaatttttgcagtttttaagcgacaaattaattttaggctaatatttctgcagctatctaaataaaactgacgcattaatgctgtatttaatcagaattttttgtctcattattatcaaaatggcgtcatttattttgtttattattttgattattacgaaaggtatgaaattggtttaaattaatttaataaaaaataaaataaaaaatttaatttagctaataactcaatg

SEQ ID NO: 113729 - DNA, 465 bp, Heterodera glycines
aactgatgctttaccggcacttaaatagcaaaaaaacatagcacgtctgcttttttgaaaaaataatgtagtatttacttcgcaacgtcattcttctgttatctcacatccaaaattggaaccataagcaaaaggaaattgggtatacctactcgaaaacctgaatttcgtttttctctttttattttccctaattacagaattttctcttctcttttcgttgtatttataaattcccgaaactttaatcttttgcaagaatggagaaattatggcctaaaaaattaggaatcattgacgcctaaactgtgcaagagccaaaagtttaccttttctttatttaaaatcgtttcacactgtcccaaatcttaacagtgcataaaattctctattttcggcaaaacgaaagaattggaaacccaaaaaggcgaaaagcgacactagcatttttaaacaataaaaatg

SEQ ID NO: 113730 - DNA, 272 bp, Heterodera glycines
aatgattgatcatggacaaaaagcataagccaacgaccaaaaatagggccaaaaactttgagtgggaagcgtgtggcaatccgtcagttgtgttcgtcaatttgtcagtgctttgaacacaaaaaattcatttgccagcgaatgattctttggtcaaatttcacttgtgaaatatttatactcactgataattgccaaaagcttcaaaagaaaagcattttaaacacttaaattaaataaatatattttttagaaaaactaaagaaataatg

SEQ ID NO: 113731 - DNA, 290 bp, Heterodera glycines
aaggaagcggagagagaaaaatgcaatagaaagagctcaaatacaaatagaatatttttttaattttttcacatgccttattttactaactaataaagagattaactaactttctagaaaaaattaattgaaaagcaaaaaagattatttacatggctggaggacctcgtaaatttcggtccccaccacttactattttataacctaatcagtgcttggaaatttcgatgctttatataaaatgttttaggtattttgtttgagttgcgtcgcagtgtgtgcttgtgatg

SEQ ID NO: 113732 - DNA, 515 bp, Heterodera glycines
tttttgcgtagaaaaagttggcttgtttctgtttcctgtctaattgtaagacagaaggctcaaactatcagataaaacccatttactttgacgaattttttgtttgtattccgggtcaaggcgacgtttacggtcaatgtaaactgcatagccaacgaccaaagccgtcccaagagataaatatttcagccaattcgaagaaacatttaacgaataaaaggtagacattgtatgaataataacctaaattccaattcgcatgcatttgaaagaaaacaaacccattgaaagaaaaggcatataatctgtaccaaaatatagatcccactcaatcctttgtcttttcccacttcccatgttacggttgagtttgaaaaaaaagattttttaggctttttattgtacattaaattttaaatacaaagcgccaaaatttttaattttaaagttgcctaaaggctttactgacaaatgagttaaagacttctaattgagatgttcatgttgataacatg

SEQ ID NO: 113733 - DNA, 129 bp, Heterodera glycines
aactagtaccattaattctgggtcaaagacagacaaaagtcattgattgaacgcgtaaattattgtaacagagacagattctctaattgttttcttgcttcatttttctttttcagaaacaataaaatg

SEQ ID NO: 113734 - DNA, 363 bp, Heterodera glycines
  unsure (1)..(363): unsure at all n locations
gcttggctcgtcctttcttctcccctnatgtactcccttttcttctcctcctccgctcctaaatcaatatatttttgttgcacataaattatagcccatgtctcagcaaatgcatttaccaatttcattcaattatttgtatttttatttttaattttaaaattattaaaattaattaaaatgacatttatttctcattttgataatttcccaaaaatattatttaaaaatgataaattattttcagacaaattgctcgcctcgcctctcccacacattttttggagtgtgaggagccgaggccgcaatttccaaacttttttccaatcaccgcccccgccccgtaaatcgtcgtcccaaatg

SEQ ID NO: 113735 - DNA, 395 bp, Heterodera glycines
gatgcgtaatcagaaaaaatggtcagattttatgaccaaggacctcgaaatctatgggaacatagttgtcgcgaatttttcagacaaaaaacttgcaaacagcgaaattgggtcctacttggtcttaaaataaacgcgttttttgagttttttaactttttcatgtcttttaaaggctgtaacttttgcgagaaaactaataatttggtctctgaagacacgtataactcccgatttaattttgggtacaagttttttgggtttctatattagctgaactctatattatgtataacatgctggaagtggtaacatggtgaccacattcatcattgccaattttgttgccaaatttcaaaaaaaaaaattaaaaaaaaaatttttttagtcaaatg

SEQ ID NO: 113736 - DNA, 135 bp, Heterodera glycines
aggtttctaaaattaaaaatgacaaattttagtataatttttacatatgttcttaacaagaaaattcaatcattttataaaataaatccccaaaaaaatcattaaaagatattcctaaaaatattttagaaaatg

SEQ ID NO: 113737 - DNA, 1003 bp, Heterodera glycines
ttttcagcacctaagaaaacctataaaagtatttttatgcgactttgagtctgggacctatgatggatattttccatgatttaggccactgtttccgccggatcaaacgtcaaactcagcggaactgaattataattgatgggaattgatttgatgctgatttgtgaattatttgatgaaatgacagatcattttgaatcactactgatggtttgagaattgattttgatgctctttttcgtcgattttttttttaaagttaaatatttcattctaaatttgattaattaaaaaatatcctttttttaatccaattgaatggtaattcatttacttttatccaccatagatcaaatattcctcatttagccgccagcttaatttcaaaaaattaatttgggggattttctcaagaatattattttaaaaatggaatttaaaaaaaatataaatattaagtctaaaataagcactttggaaattttctcttttatttggctttcttaaaataagaaatttggctttattttgtattttttcttgttaaaatggcctaaattaagcgcaatttggattttttaacaaaataaatgctattttattttttttgtttctcacccaatggaatatattgaaacgaaaaaacaacaaaaatcagtgagcaaaaacgagcatcaaaaatgatcagcatatcacttctattcatccccataattcaaagtgtgattgatcatttctcaaatgcaattaattcacttctgctgaatttactcgcccttttcgctgattaagtgcaatttgaattagatatacactttacaatggcgtggtacataacaaggatggcacggaattccaatttccgaaaatttttggggcctcggaatgctatccctggtatataatggaaagttagcttagcttttccatccccacattcttttcaagtcttaaaaaccgtatgcccggcgttttcggggttgttcatcaagaataggacatg

SEQ ID NO: 113738 - DNA, 305 bp, Heterodera glycines
tatgtgagcatggcaataaacatttatatgtttatgtgaattcctctgaataatattttaaaattaaaatttaaaaaaatttcactgagtttaaaaaaagttaggacaaaaaaaatgttgactcaaaattttctttagctcaattttcaggacaaatatccttggaaaattttataaaatgcatgaggccgacctcaaaaatatttttaaattcataaacatttccatttttcatttcagaaaattttgatcttttgcattcattgtccgaaaattcgcccacagtttacgaagtgataaaaatg

SEQ ID NO: 113739 - DNA, 51 bp, Heterodera glycines
ttttaaaattttgagcaaatatagttcaaatagatttaacaactaaaaatg

SEQ ID NO: 113740 - DNA, 805 bp, Heterodera glycines
aaattccaaggaaattttgttcagtttaaaaaaaagttcgagcaaaaaaagttggaaaatctggttttttgaattcttctgaccataactttttttgaaccttaacgaaatttttcaaaattttgcaggctaatagaggatacatagggctatcgaatgacaccaacaatgttggatttggtcgataaataaaaaagttatagccaaaaacttgtgctcgtacgacatcggcccgtacgaaaacgaccctgcccccaaaaataacgcaaaaatatcaaaaaaatttgccaaaataaaaaaaactcccgtgatcagtaaaaattttttggacataatatatatttacacaaacaatctcatcctcaaaataaaacagcagttgtttctgttcaacatgctaagctttatgaaaacaaaattttttatttttttttgctgaattttctttttgaaatctgttcattatttcgttacattttttttttgttaaacataaacaaaaaaaatttgttattttaggtccacaactgttgttgctgaactgaacgacaacaattagggtatgttgatcgtggccaaattttgttgattgtttatggccacaaaagagcttcgagcaaattctttgatggaaaatgttgtttactcaaatgaactctcgtaaaatttggcctatataaaagtggccaatgaataataaaatagtcaattttatataaataataaaagaatttttattttaaatatttttatttttattttaaataaaatatttaaatttaagaaaaaacaattcttttaaatg

SEQ ID NO: 113741 - DNA, 59 bp, Heterodera glycines
gtaagaaattcatccaataatttgagttgattttcccgtttagcctcaaagaaacaatg

SEQ ID NO: 113742 - DNA, 491 bp, Heterodera glycines
tgtaagcaagttttatttccaaatcaattagatgcggttctgattgctttgggattttagggggaatttgcaattgattatactggccaacgatttttattatatgactcacgtgttcatcaacccgatgaggtcgttttttttatatttgccacagaactgggactacaacgtctctcacactatcatcattggtcatcagatggaacatttaagttagactaataatgtacataaaaagttaaaaattttggggtcgtaccttcttccttcctgcaactttataccattaatatattgattgaacattcatcaatggcatgtgcctatattcttatggcaaacaaagctatgcaaacatatgagcgggcgttaactgtcctgctgacgcacattactcatagtccaagcagtattatgattgactttgaaagaagtttaatgaattattaaatgacatttattatgtttaatatcaggtgccaaaaatg

SEQ ID NO: 113743 - DNA, 108 bp, Heterodera glycines
ggtggccaagttggccgagtacccggccattagctacgcaggttgccactgtttttttgtggatttgttagcctcacagtcagaaacatctaagatattgccgagatg

SEQ ID NO: 113744 - DNA, 247 bp, Heterodera glycines
cccccccccccttcttcgctactcccttgactgactgaccgtcccccgaggtgctgcccatgtcgcctcggtgctgtccttcgccctgcccttgtcctggctcctcctcgtcctcatcatcttggccaaacttggtctggaagtcgaacaccaactggttgtaggtggccagccaagtgcgctcctccgccgaaagcgcctctttgattgcctcgggcacttgtccgccggaggtccagcggagatg

SEQ ID NO: 113745 - DNA, 1003 bp, Heterodera glycines
atttatcaaaataggacttcgatgcagctgaaaaaaaatacgcaatcccccttgtcaagaaaagtagatattaaaggctttttatatattagtgattgcaatttatttgaaaaaaaattaaatataaaaaatttagaaaataataaaaataggctgaaatgaaacaatttgaaatttcacaatgactgattattttatacaaatcaaataaaaaatattgcattttcttctccaaattattaaatattttatattaattatattagtttaatatcacccaaaaactgtaaattaatagtaaaccgtaatggtaaaaacaccgaagttttatcaaaataaaatgatctttgaaagattagactttttttttaaatatatagatatatggctttttatcatagaaaaatgaagttattaaaaaaattagttaatcactttcaaaaaaataaggaacatttatgcaggatagttgcattaataagaaaaagaaattaaagaatctatagaagtaaaggaatattaattacgtcaattgtgtattaaatgctgcaaaaattcttcctatgtttataaaaaaacactgaaattataatttacacgttaaaataaaaattaaataaaatatttgtcgaaaatctcttaaataggtgtctccaacaatgtttatcaatagcatactaataataaaaacttttttcttcaatgaactacgtaaagctagaagccaacaagaaaattaaaaaacaaaaaagcaaagaaaaaattatttaataataatgcagaaatattgaaaaattcactcggccgaaatccgaaatcgaaaaaagaacggtcataaatgtaatttaaaaaaattataacgaaatacgagtaatacaaataaaataatatttttttctaaaaagtaattgatccttaagtacagtaacatgctttgaaaatgccattaacaagaaaacatttcacaaggctaatttttaatacgtgaataactagtaaaatg

SEQ ID NO: 113746 - DNA, 460 bp, Heterodera glycines
acagctcttgactcacgctagtttggaatttcttcgaggtatttcccaccattatcaaatgaacccttgaaaattgttgttttttgttaccatttatttattgttttttggtatttaataaaagttttattttatttttttcgttttaccaagtatttgaatttaaaaaattttttctctcactttggcgtactatctcttcattttaattatgtaaaaaacaacatttacttctctccatataactttttttctatgcataaaagttgcaccagattttgcatcgaatgttctataaggttttaataattttcaatcttgtttttttgtaatatttatttaagatttgtttgacttttttaattgtttaatggctaaaagaaatttgccacacaagctcaattgcaaaagagcaaggcaaaaaagggagaacaagcgagaggagcgacgaaccaaaatg

SEQ ID NO: 113747 - DNA, 1003 bp, Heterodera glycines
caccctcaaaaacgcctaaaaactggttttgagcacaaaattaaaaaaaaaattaaaaattagggacaaccattcttcaggattgccgcctgggtaaaaagaggacactacattaagttaaataaatggtttcattttggatttatattataggtccgtctcattttgtcttctttcttcactattaatagggctcggatttttaggtgctaaaaatccctaaataggtactaaaataggtgctaaaaaagtgcaaaataggtgctaaaaaccccaaaaaaggccaaaataggtgcgaaaataggtgttaaaaattgaaaaaatctagtatttttatgtacaaaaattcaaaaagtgactaattttttatcaatttcggcagcactattgcaactggtcaagaaaataaataaataaattttggagacgaatttttgagaaaattttcatttcttaggggaatattttctgaaattttggtcaatttttaggggtatattttttaaattttttgggatcgattcttaggggtgcatttttcgtttttattgcatttttactgtgaaatttctgggaaaatcccaaaataggtactaaaaattcataaaaatgccaaaataggttgtaaactattttaggtgccaaaacgccaaaataggtgtttttaggtgctaaaaagtcgctctaaatcgaaaattgtacggacaaaatgctttttttgggcttctctcatcataactaagccgggaaaaaaataggtaaaaacctaaaaatccgagtcctaaacgcaaaatgatcgaaggtcaaaaaaaagatgaatataaatggaaattggcgatgggttcaaaagcgaaggaatttctcttcccttttccaaatttacaattaaaaaactttaacatttgattttcaattattattaatattatttgttatataatttataataaatcaaatttaaaaaagcaaaacaaaattaagatttatttgattatccaaaatg

SEQ ID NO: 113748 - DNA, 97 bp, Heterodera glycines
atttttattaccattttcaagtgcaattccattggtgagtcaattaatagcgtaattatatttaataatccaatttaattaggtgtacgatgaaatg

SEQ ID NO: 113749 - DNA, 150 bp, Heterodera glycines
gatattatttaaattataatgcaaccaattaaaatagtaattttaaatacctttttaaaaaaagctgattaataaattaagtgatgctaattgttgcgttactattttaaaaaatcgaatttctgctgaccaaatttcagatatgacatg

SEQ ID NO: 113750 - DNA, 442 bp, Heterodera glycines
aattcaatgtttttgtttgcgttgtctttttcctttattcattttcacacccaatgagagaaaaggaagattttcatgaagaaattcagaagcaaagtatgtaattcttggttaaaaatgaacaaattccctttaatgaatgttgccaacagaaaaaaatgaaaatataaaaattttctcacgaaacaagtcgccaagtcactcgtgccgagaagtacaaaatcatttttcgacaaattgtttatttacgaatgaaattagtcacccttacagggattccccccccccttctctctctttggatcaattcattattaactatatgtacactatatgtacatttattgagtgttattgtttttttatttgagtttttaaatgtttacacataattttttgatgatattttaaaattttattttaggttataatttcgaagatg

SEQ ID NO: 113751 - DNA, 696 bp, Heterodera glycines
aatcgaaatgcgatgttcttcgatctctgttgttgtcccataaggcataagcctaagtacttaattctcgagttgttcacttatcgtacatttgctcgatgtatttttattttgttgctaatttcactctgagtatgtaaataaatgctagcgtgcttttattttaaaaatattaatgttgatcaaaaaaaagaaaaatttgttggaaattttttgctggcgataggcgcactggtacttccgggttatgctgccccctccccctcaaaaaattccaaaatttgtaatttgggggttccaaggtcggtgatcactaatttgatattaattttaacatctgatgatttttaatcatatggactcaatattatgatatggataactatatacgcacatgaatggcgccacacaggaggcaaaaagtgaaagatattgcgcaaatatcacgagcctttggtgcggaataactcctaatttatgaggtgacctgaggatgcaactcttgtgatattctcccagccggaccgaccgttattcaacaaaattcgcatgtaatatactttgcaatgagttaattattctaattataattattattaggttaggaatctgatacgaaacgagattcagtcagcagagctgatgaataaatggatttgatcgcttctatgtcgttattcacaaaccatcaaaatg

SEQ ID NO: 113752 - DNA, 245 bp, Heterodera glycines
tttgttaattgtttttgttattcggtttcaattcgtttggcttttccctttcagttgaatcgtcttaagccaaagggtgtgcgaaatgtgctgtttttgatggaaaagggtaaacgcaaccgatacagaagtcgcgactttttggtgtgtccactcacataatattttactgatttatcactttaaaaaaagttcagttttcgcaattttacaatgccgaaattaacgattccgacacttcgatg

SEQ ID NO: 113753 - DNA, 756 bp, Heterodera glycines
aagagtgggcgaatggcaccatactttataattttttgttttgttttgtttaaagtgttgtgaacaattgagcccatgacaactatggcgtgataaactcataaacttgttgaattgttcacacgaaatattttcagacattttctcgttatatgttgaaccggattttagaattttggtcgagttcgtgttagggaataaaaattggtcaaaatagttgtctgattcgtgatcagggagggacccccaaaatcatcggagtcgggaaacagttttcacaaattcaacaaaagaatccctcccccctatggcttttgataaaattcaaaaactatcactttagtaaaagcgccgtaatttttcatttaataacaaattaaccaataaccattgtaaaaatatcgattcaataatgtataggcaaatctgtggttaaacattgataaaatcatatttattttttaaattatttaattttcttatttatttagcaaaaaaaaaactaaaatagaaacattcaaccagtcaaaatttttaaaattaaatttcgccttcaatttttgaaataatccagtcaattttttaaaaagattttgctgacaatgacaaccgcgaatttttcagattggattgatcttcagctttttcattgaaaattcattgccctttattttattaataatttttggctttttatcacaaattaaatgatttgatttagcaaatttaaacattaaaaattcttttttactgatg

SEQ ID NO: 113754 - DNA, 447 bp, Heterodera glycines
  unsure (1)..(447): unsure at all n locations
ggttcaccagcctcgatgctgggaaagtttcttttctcagaaaggcccaggaggcctttacttttacgggtaagcgcccgccacacgggcaaaactcaaaatatnntttcaaatagaatagtaaaaagctggaataatcttccagtggtagcggtgcaaataataaagcaaaggattcaggggtttactaaaagcaatgagttctgagtaggattttccatgttgccatatttacactatatttttatcacctgtgaatttttaacatttgattgaattatttttattcatttttagtacggtattcattttgtatttttattttgatcaaatttatttgttgttttcttttttggcaccatataagagcactcatgtgcctttggtttgctcgataaattaaattaaatctatgcttatgaaaaattggaacgcttcaacgacatg

SEQ ID NO: 113755 - DNA, 680 bp, Heterodera glycines
tatttcaacttggagaaacaaattccgacaaagtcaattaaaaatggaatgagtttttcaaacttgttctgattttcacatttgtcctgagaaaatgaataaaatgacgatttttttttgttattataattaatgtaaaatatttctgttttggatgaaaaatttgttaataaatgtcctgattttttatgtttgtactgacttttttataatcgatccaagcaataaattctcatttcttcatttaataaataattcataaagataaaatttccttttttttttgaattgtaaattattactaatatttattgtcaattgaaaatgaaattctgtattttattatttttatttttgattgccctaattattccaatttttttctaaaatctctttacattgtgaatttattatatttttattgaaaatatgtttattattttcgaatgagctccagtagaaagtaataaaattttatttaatcattaatttaccaattggcaattattttgtcattaagataaaattattattattatttctttgcaattaaacaggatttccttattttattaagtaaaataatgatttattcagttttttaatcagaaaaaaatcatttaaatgcctcaaaaaatgaattgccatttaattgaagaaaaattaaattcttgaaaatg

SEQ ID NO: 113756 - DNA, 778 bp, Heterodera glycines
attaatgatgctaaaaagacaacaaacaattattctgtttttaactccgatgtaataggattttcgagatttctgtcccagggatgtacttttttttgaatttagtttaaattcaaaaagaggaatttatgatttttagaatttcttcaaatcattgaagacaggcacaaaaatgccgaaaggcaataatttaatgctttgcccggttcagttggccaattaactcagtttcaaaatgatcagaatgctattttgggacgaatttcccaattggagacgcagcaacagcaaatgcgtgaagcatttatttttatattcgaaaattttaaatgaatctttctgagaaattttaaatgttccttaaaaattcctcgattatttaatgattgtcttttttaaatttgacagttggcacagcaaacaacgaaagagcccaccaaagtaggcaatgccaaacaacagaaaaaagcgcaggtattaaattttgaaaatttatttgaataaatgtttttatcataatattatggcatttatgtgtaccaatataatttattttgaaaaattttatcatataattacaaatattcaacaaacaatttctaatttaataaaagcagacaaatatacgtattagagttagttcaaacatttttttacacaaaagatagtattgttaatttaaaaattttaaaaatattttcgaaaatttctcattccactttttctcgtgttcatatgtttttaggcatcacattttctcttaccactgccgataatg

SEQ ID NO: 113757 - DNA, 848 bp, Heterodera glycines
tcgcccctttccaaattttaggcaattttgggggccggcaaaaatttaaccctaattctgaccccaaaatgtcgaaaatcggaatttctactccaattttttgcgggaattgaaagtcggaattctgcgataatttcgtccccaaaaatgacggaagaaatcgtaatttgttcatctgtacttcaacatacaaacaatgcttgttactactataggcccagcgaatggagcggcttttgattaaatgacaattaatttatgttccgtttccatgacgatattaatagggcttcagtttaaaataccctaaaaggcgcaaaaatgggcacaaaatggacaaataggcagcacacacaaaagtctcaattgtatgaattttatttttttttcttgccttttttttgagaaaaattattcataaccttactcaaataaaaaaagggggtaattttttaacgagatggccgcaagcgaaggtgtaccgacattggcgcctcgacaattacgcaacccgtaaaaatagacatttgcgcctccacaattgcgccacccactaaaaatagacatttgcgccgcccagtataatagacattttcgccacccagtaaaatagacatttgcgccgcccagtataatagacatttgagccgcccagtaaaaatagacatttgcgccgcccagtataatagacatttgcgccacccagtaaaatagacatttgcgcctcgacaattgcgccgcccagtaaaaatcactgatcacaaataaacgaagatttgctaattaattttaagtgatcgaatttttaatttagaaaaattaaataaaaaattattatttaaaaaatg

SEQ ID NO: 113758 - DNA, 82 bp, Heterodera glycines
gtatcaattttgaaatcacattaaaatttatttccaataaattttacatttcaaaaatcgccttttcattaggcttcgaatg

SEQ ID NO: 113759 - DNA, 339 bp, Heterodera glycines
ggttacacagaatagttcaagacaggtactgttcaattaatgatatacaatacaacgaatgaattgttaagatcgtcaaaagggcacgacatgaagtaatgcaccacctgtggttcctaaaagtgttgaccaactgattgtaccgccggcataccgaacatataagcctattgacggtgatgaatagcagttcctattgggtgactctggtgtgtattacgaggccggaaacgaaaatccgcagaggtagttttttgaataaaattccactttcactacattttttcaagaattctgctgtttgggcgtgcatcttttgggcgatgggctgatcgcatg

SEQ ID NO: 113760 - DNA, 143 bp, Heterodera glycines
caaacgcaaatacataaatgctaatttacagaatttttaaagttctcaaaacatttaccattttattaatttgtttttcccattttattgtcggcttcacgcttttgcgcttaggtaaataaatttttttaaatagccaaatg

SEQ ID NO: 113761 - DNA, 970 bp, Heterodera glycines
agtagtgtaacttactttttttacaatgcattatttttttcttataagaatttggtataattttaattgttattggaattttttttgttaaagacaaatttttaaacatttaactgtttaaaaataataaattattgtttataataaaacttaattcctgttattaaaaaaaagtttggtctctcgccgccacacgcccgcctccgcagcgcttgtggtgaagcaaaggggaaaatttttcaccatatagtcaacaattatcccattcctttcaactcaccctgtggccaagtggttaagctcctcgcttccactctcaacggttcgagtccgctaccatgtttttgatttttcacaatttttcggaattttcatcataaagtcaacaattatcccatacctttcaactgcccctgtggccaagtggttaagctcctcgcttccactctcaacggttcgagaccgcgaccatgtttttgattttccacaatttatcggaaaaagtcgcgcagctctcgctcatttaaattaattaatttaaatttaaattaatttaaattaattaaattctcgcgcacaagtccatccaataggtttcggttgaagggatcaaagatcatccaataggtatggggcgggggggggggggtccgaaaatatggattgaaaaaaatcgataatcaaagtactcgtacattgtagtggaataatatgctttttaaacagacagaaatttttgtttttaagggtatttttgagaaactattaatccgatttttatctcacagattgacgcaaatttataatagaattaaatataaataatttttaggaataatatgctttttaaacagacagaaatttttatttttaagtttatttttgagaaactattaatccgatttttgtctcacagattgacgcaaatttataatagaattaaatataaataatttttaggaataatatg

SEQ ID NO: 113762 - DNA, 133 bp, Heterodera glycines
aaagtgcgttcaggacaacaccccaaaaagactaaatatcgaagggattgttaggcctgtaaccagaaaaattttgctgaaggggggggggtcgaaaattttatctaaaatttattaacgaatttaagccatg

SEQ ID NO: 113763 - DNA, 643 bp, Heterodera glycines
tattttgagcccgccccctgaattaagaatattttgcggaatggatatttggcagctccaaacaacagcactagtgccgcgcacaaatttgcataatccttcgttgccggaaattccacaccctttagcagaactgtcaatcacccaccctcccatccatgggattaggattggtcacccccgcgtccccccgaccctgctcaaaaattcagccaaacaaattgttgaaatgcagtaaacaattaattcgtgttaccaatttgtcagcaatatccccataggttttggctttttccccacccaaataattaattaattaattgaccacccccccccaattagtcacccgaaaaccctcccataggttttgattttaattccccccatctgtcacttttccctttgaccagctgtcaatcaattagctaattagcccccctccactggtcagctgtcacttttaattagtgtcatgctgcagaggtggcgtatggtttactactgaagtatgaaaaaatcaaagaattttaattattagttacagttgttaaatcaatttttgggtaatttaattaagaaccaattaatcattaaaatgcgggaaaattattaacaaagttttgatcgagatgttttacatatg

SEQ ID NO: 113764 - DNA, 502 bp, Heterodera glycines
ttttccggggattcgaataaaattgatgccattcattgctcttgtggcctgtaatgcccaggctaaatactcactgaggtgcggaacttgcaaaaaaattagatgtaccgtacaatttcactcgagacggtagatgtaccgtacccatcccccccccaaattacccaccgtcttggcaatggaccgtacccacccccttccatggcccaccgtcttggcaacggtagatgtaccgtacccatctccccccccccctaaattgaccgttgccttgggaacggaccgtacgtctgaactgggaggaggaatatggatcgcttttggagagggataccgaatccctcttttactttcgcaaatgatttgaaccatacttttgtcttctaattgggcacaccgataacatttagagtgcacatatttcgccatatgtctaccgaagcatcttcctcatcgtcagcatcgtccgtacaacaagatcaacaacaaaaggttcaaaatg

SEQ ID NO: 113765 - DNA, 608 bp, Heterodera glycines
tcagaaaataatggcttacaacccagtttaaatctttggttttaaaatttaactgaattaaatcaacctaggtaattttcgtttgttgactttggctgtctcacgaaaaaacagatgaaactcaaaaaaattcaaatacccgccatttggcaaaatgtttgttttattttcgaaacaccgaaattccttgaaagtgaaagagttttttgtgaattttaacgctgtttttgaaaaaatgagtaattttgacgcctttcagatcggttttcgaagtttctgtccatgtgggaacagaatgaactgcaacataacttctcaggttttattttgcttataataaatcaaagtgttgttacttcttgcattttttggatttttaaatcccgtaaaatgcaaaagtaacaaatgactcgtgttttatgtttgtaaatgccgtcgtccgaataaggacgggaacagggacacgcaaatgcaaacattgcgtaaagggtaaacccaaacggctgcgagttgcgtccgaaagcgtcccccaatgaggaaaagtgttcatttgattaacgaattccaaaaaatcaaccaaatctcagaagcactgaactccaacaatg

SEQ ID NO: 113766 - DNA, 387 bp, Heterodera glycines
ggtctggtcagggtcactctgatcaatgatcacccatgggtacgctaatataaaaaaatgaatgcaatacattgaacagcagagagacagagataaacaaaggacactaaaacaacaacaacaaaaataaaacacagacattttttttgggggggggggagatcaaacgaattcgcctcctattagcacgttggcaaaacatgcacaatcatcaacatttattattattattttaattagagttgttcggcactagcatttttagcaatggttggtttttgaaaaattgtgaatttaaattcatagtttataacttgattattgtgctcattttataaatcataaaattggtgaatgaaaatgattaataaatacgtttttcagatg

SEQ ID NO: 113767 - DNA, 393 bp, Heterodera glycines
tgttttgcgttaaaaaatgatttgaaaaatgaaatatttggttttgttttttatttgttttattaattaatgcatttacatcaagcatttttaataaactagcggggatgcgccgaaggagctaactaaccccactagttatacttaaaacaatttacatacacggaaatctgacgtgtgctcttccccaaatttctatctcctaattgtataatagatttcttttgtgtcaatttattgaaatgttcgtcgtcaatagaggagggcaaattacttggaagtaatgcggataatataagcggatataggtttgattataacatctttcatttaagtcgcacagattgtaatcggcaattcgccggtcagcgccaatttagtgaacaccttatg

SEQ ID NO: 113768 - DNA, 340 bp, Heterodera glycines
ttttttgacaaaaaaatgtttgttatatttttgaaaaattagggcaaattgtggttgtttatttaaatggaggacgccaaaaaagtgccaaaactttgatggattaaaaaaaatgaaatggggatgtagataaattggcgctatttacaaagaggtgcattttgaaacaaaaggggggacccttttgttttgcaaaattttttaagataaaaaaccatgataattttttatccggggttttaaaggtcgctaatcacgaatctgacatgtattttgactaatttctaatccctaacccgaactcgaataaaaatcggaattttgaatttttcaaattatg

SEQ ID NO: 113769 - DNA, 58 bp, Heterodera glycines
  unsure (1)..(58): unsure at all n locations
aatggggggtcaagtgcgatgaacncaaccggcgatcattttgcaacaacagcaaatg

SEQ ID NO: 113770 - DNA, 69 bp, Heterodera glycines
ttggttatattccctgaaaagcgatttatatttctaatacataaaattgaatttgtttagctaaaaatg

SEQ ID NO: 113771 - DNA, 1003 bp, Heterodera glycines
tattttcaaatgatgtgcttaatggggaaaataaaaaatcacagaaaatacaacacagaagagatgaagaaacggctctgctgctgctggtggcagaagagatttttatcatcccatccttaagaagaagggtgtggatgggagagaaaaagtggtggtggaaaaaggtgcgacaaattgttacgggaggggggggggggtgactcatcacggacagaagcaccgatcgacgtttggcatttagcggacagacaaatgatcatagttttgtatgtacattattccgccttcctccgctttcatccaaccgtcattttttaaattaaaacaatttacctcctgtttttatttaaaaaaaaaaattaattttttgagtttttacatttgtataatatgtatttgtagctaattttcgacacttattttttgttttgtatttttttaattgttaattttttcgttttattaaattatgaaaggggaacagaggaagagagacagttgtagaagaggaagagaaagtggaagacaaagagggacaggagtgacagaggaagaggagtggaagagaaaagggaaagagaaaggggaagagggacctgaggagaggaggaagagaaaagggaaaagaggaagagaaaggggaagagggacctgaggagaggaggaagagaaaagggaaaagaggaagagaaaggggaagaggggcatgagagaggaggaagagaaagagggatagttgagaaggggaagataaaagtagaagactaagagggataggagtgacagaggaagaagagtggaaggggaagagaaaagggaaaagaggaagagaaaggggaagagggacctgaggagaaaggagtgaccgtagggcactgattttacatgtgtatacctaatatgtatttttaaagctattttttatccttactgttttttttttgcctttcttattcatcttcaactactcatcacaatggctctcaatttgcaggaaatg

SEQ ID NO: 113772 - DNA, 63 bp, Heterodera glycines
caatttaaaagataaaattgaaatggtttgggctaaaaaccgcgcgaaatttgcagaaatatg

SEQ ID NO: 113773 - DNA, 472 bp, Heterodera glycines
cgataactgacatgtattattttttgattgtttcttaagtataaaatggaaatatatttgaaaatttttgcattattctgaacataaatttttcgataaaaactcttcatgatttttcttaaacacaatcaaattaaaatagtcttggtatcatttgttcaattaatatgaaaaatgaatagaattttcggaaatttctcgtgctaataaatgggataggaatttcaggcaacatgtttcaaacatcctccaaaaagcttttctttgaagccgaatccgacgtttatattcctctaatttaaaaaaaaagaaataatccgccaggaataattagaaaattgttattttttaaaattctaaagaaaatactgttttataaatttttgaatagaaaacacatacaactgtagcgatttatatattcatcatcagtagggttgtaaattatatggactaaaaaacgcgaaatatg

SEQ ID NO: 113774 - DNA, 313 bp, Heterodera glycines
  unsure (1)..(313): unsure at all n locations
aaaaatttaatgacgcgaaanaatattttgaaagcaattctctaaaaattcatttaatttgagttaaggatgccattaaccatcctgaaaattacgtgctcaaatcgaacatggaatgtggcggcaacaactatttcgatgaaaaaattccgataaaattaacgggaattactccgactgaacgttcgttccacattttgatgcagaaattgcgaccgatgccaattaaggcatctttttgaattttgaatttttattttggaaagaaattgccttttttatgataaatttgttttaattttagaacgttatg

SEQ ID NO: 113775 - DNA, 370 bp, Heterodera glycines
ttttggaggctcaattagcacacttttccctttaaaatctgttgttatgtaacttaaaaagagacagttaaaatgagaaagcaaagtacaaatcaatcaatgatgcataaggctgggaatttaaggcactaaaaatcgccaaaaagtcacgaaaaaaagtcctgaaaaattaggtgaattaatttatagaataacactttgatcatatttaaaatatcttaattttaggccattgtcgccaccagcgaaagaaaaagaagaagcgggcaaaagcaacgaaaatgtcgtctaattattagggaatagaattacatggaaatccatatttttttcctggactgtgggaggcctgaaacgcacgaaaaacatg

SEQ ID NO: 113776 - DNA, 1003 bp, Heterodera glycines
ttcggcctaacccgacattacaatttacccaataacaatagtttttctttttttaattacatcgatttaaaattcattcactttccacccattaccaccaccattgatggactgtgctctaaagtgattcatccaccagttcaatctaacggatgggctgatatccttttcagcaatcagaagaattaatgtttcgctagttaaatttgctcattttgtgccgttcgcttcccccgaccatcgaatgagaaaatatattcaaatttgattaaaaagaattcattcgaaataacaaccattcggtcgggtcaaccgagcaattcttgtacaattttagcaacctcaaaagatttaattgtattttttcaattttctgttttcaatttgggatgaggtttatggcttcaacaaatattaaataattcgactctttttaattcattccatttgttaaaatgttaagaattcatttttcctctttaatttaaccgccattctttcaataattaatcaactccattctctctgccgttcaacatgggcaagttcattcttatgtaagttagttagtcagcaggagtttggcaacccattgctttgatttgtcatttgaataagcataaattgaatcggagtacgaaattagtgaacagaattaagaaaaatgtcaaaattttatttattataattattaaggttatatgtaaatgattctgcgtttcatagtaataattgcctctctgaattaacgaatccgataggccaaaggaaaaaactgaaaattttgaattttgcaacaaatatttcaatattcgcaattaattcattaccacacatccctccaggagcattctctttctgctgacagcagcagcattgtcgatgggggcagaaaaaaggaccaaagtaagtgaaaagcttagaaattcaaaaaaccacaacatcgacgacgacaccaacaacaaccaccacgacaaccccgccaccggcaactcggacaatg

SEQ ID NO: 113777 - DNA, 879 bp, Heterodera glycines
cctgaaaggagagagaatgagaatgagggaaggggggggggcggtagaagcactggaggacgaggccctctgtctattcgcgactgccgatagatgtgtccgaacacggggattatctcgtacgaatattggtatacccaatctattgaatgcatttcagttcataaatccccgttctcgctaattttacgtggtcgagcagctcctcatccttgaggaacgtctcatcgcatgattggtatccaattagataccaatacctcacagcaccgcagacgagacatggcgccttgtcgtacagggccagtgatgtgacctcatactcagttgtgccatcgtcgtcctccgcgatgtcggcagcattttgatccgggtgtcaatgttggcactaataaacaaatttgtccattaaaaatgaggtagttgcgaatggcttctaactcattttgcactcaaaattatgaaaagatctatctcgggatgagtcaaattatcattttttgcctataatctataatttcacaattaatttagacttattagataaaaattaccccgaccgtcccctaatcacaatttcaacaaattttataacacattcattaaattcaaattttgccgccgccaaaacatgtcagtggggcgcttaaagtcacttattcttttgtgtccaatattccctgcactaatctttgttgatcgccccgagccaaacaaagaaagataacatctgttgtatggccattctgacaatgaagaggaagtgaaattgacaaaagaaacaaaaatttggagaactaaagtggatggggaggggggggggggttttagcgatcgggccatactccgctggtcatttctccgaatattcgcgccatg

SEQ ID NO: 113778 - DNA, 436 bp, Heterodera glycines
taaatagaaatctttgcttaaaacataatctccgtgaaaatcccaggaaaaagaagcattttggtaacttttctgaggactaatcacctgggatagccaaattcaatcatttttcttttcttttaatcatactgtattttaagtatgtggaccggtctcgagaagtcgtttcagcttgaaaatgccaacagaatttggacaggctttcgtaatttttaaatttgttaaacaataagtcccgcgggactgtttattgcttatctctcttttatcagttctgaggaactcatcaatcattatctaataaatattataatcatactcttgaaactgatcacttatctcagtcctgtgtcagctcagatactatttttatggttaaaaaaaaagtgaacatatttttctaattaatcgtttcttttactaagcacaaatg

SEQ ID NO: 113779 - DNA, 67 bp, Heterodera glycines
aaaaaagaaattgtcttctgtttagcgctaccgaagcgaccccgttttcgcagaaacggctcgaatg

SEQ ID NO: 113780 - DNA, 161 bp, Heterodera glycines
acatccacaaaacactaattaaacgtaattaattttttctatttaaaactttaattatttaatttttaggcattcctccatttttgcacattacaaattcacatatttgcttggacatctgttaatttgtgtaatttacggtgcatttacactgaattatg

SEQ ID NO: 113781 - DNA, 185 bp, Heterodera glycines
tggaattagcgtcggaaagccgctgcccgccggcgcaattccgggccgaattttgggcgaattttgtggccaaattccttccaatgaaaaaagtaaaaaaaaaaatacaaatttaaaacccaaaaaatcgatttgttttttagaaaataaaaaattctttttgctggccgaatcgtcgttcaatg

SEQ ID NO: 113782 - DNA, 268 bp, Heterodera glycines
ttgtcgggagagaatgcaaaaggcaaagacggggtgcaaagagaacgtttcgatgggttgcgcttgagggggcgttgacaatgggcttttctttgagttcggtcggtgttttgcgttgggcggcggtgtccgtcccaaaattcgccaacatttatttatttatccctcgccgccccgtcaactttccctcattcactcacacctcattttttgtcccattcttctcactttcaccgttacccttttttcgagttgtataatttcaatg

SEQ ID NO: 113783 - DNA, 133 bp, Heterodera glycines
aaatcaaggggttgcaaaaaggataagatccgtcatatttgctaaatggggacaaaaattaaaacccatgcaaaaatatgttcgttaaaaatcttggtaattggaaatttctggttattttttattgcccatg

SEQ ID NO: 113784 - DNA, 320 bp, Heterodera glycines
ttggtacggtaacccgcgttgattaaattacagtattcaaattggatgccattttttttgttgttgaaaattttggcaatttataacagggcattttttaggaaattcatcgattaaaaatcaaattttttgtacaaatttaaggcgaatcaaccgatcgcgaaaagaacaacaatctgtggacagaatggacggaatggacacagtaaaaaaatgcaataaaattataattaaaaacaaataaaaatcaaaattaaaatgtgtttgatttgtcattttttgccagttgttcccgcagttgtggtggaggaaaacagatg

SEQ ID NO: 113785 - DNA, 125 bp, Heterodera glycines
tggcccaactgacgtagaccgagtgatggataagtaaatgataatacaatacattcattgaacatatagataagtggggatttgttaagattgaaattatgtaacagaatacgtaattttagatg

SEQ ID NO: 113786 - DNA, 69 bp, Heterodera glycines
ttatttagttatctaattacatgtcaaaatttgactaaaggaaagccggtgacacgcattccgatcatg

SEQ ID NO: 113787 - DNA, 472 bp, Heterodera glycines
gtgaaaaatattgtgatagcaggtgaaaaaaaggggcagaacaggtgaaaaatattgtgatagcgggagaaaaaagggcagaacaggtgaaaaatattgtcatagcaggtgaaaaaaagggcagaacaggtgaaaaatattgtcatagcaggtgaaaaaaaggggcagaacaggtgaaaaacattgtcatagcaggtgaaaaaagggcagaacaggtgaaaaatattgtcatagcaggtgaaaaaaaggggcagaacaggtgaaaaacattgtcatagcaggtgttaaacaggtgaaaaaatgtcataataaagtaaaaaagtgaaaaaataagaaaaatgaggaaaccgtgaaaattttgtgacatcatatggtcgaacaatgatggtttgcgaagaaaacatatgaaaggtgaagagtctgaaagttgattataaataccaataaacaatttcttacaaccaaaataatg

SEQ ID NO: 113788 - DNA, 160 bp, Heterodera glycines
gcggcaaattaaaagcggaaattaaattcaaaaatacaacaaaaaaacaggtgaaaagggaccccgagacattgccgcaaattccggcaattccgctcagttacggcgacgcgtatgaaattctgtcgcgcgtggatgggccggaagtgccgaaagaatg

SEQ ID NO: 113789 - DNA, 1003 bp, Heterodera glycines
ctgatcaccattggacctcttctaatcactgttgtagctcttctaatcactgttgtacctttgagaccgttttttaatattattaaaaggttttttatttatttccatattttatatttttttcaattcttcgctttttgcatatatttttacattttcacatgaatgtcagactatgctctcagtttattgacacatttctcgtgtttgtgatggtgtgcgttattgattaatctgtttcttttttctctatgaaaacttttgatgggcaaaaaaggtactcaaattttcaaaattttccggcctcctgttcccaataatttttttggaaataaagcgtgccgaaaatattttttgtaatttttgtcattgaaataaaaacttttttaccaacaaaacctacaaattattatattttttggtaaattaggattctggaccaagggggattgacaggctttttgagttgaaaatttttttcaccaaaaatcttccaaaaaatgtcagttgcacatgttccaatcactgctttacctcttttgttcactgttatacctcttttaaaaattttccgaattctcgcctttgcacctaaataagttaggaaaaacctaaaccgatcatttccattcttttttattaaaattctccatatttttctctttcttttgttattttttccaggtttcttccttttttctgaccaactttttgattttttaaataaatttcgaattttttttgtcacaatttgttttattttttggagtggaaaataaaaaaatattttattcttgatttcgaattagccaatacatacctaaaacatttgatgggttaatattgatttttttaaaatttacaatactttattcaaattcaggcccacattatatggcaaccaatttttcagttttttgtcatttttaatgaaatattttgaatttgttgctctttttaaggcattgttgacattcaattcgatgacaatcagcagcaaatg

SEQ ID NO: 113790 - DNA, 306 bp, Heterodera glycines
atgacacttattgttagaaacttatgggaattttagccccatctaggaattttttgtccgtttttttacattcttttcacctttaaaatcctttgatgctttctttaaatattttttgcgtgagctttgttctcctccttcaccttgcatttgcctttgtccatggccatgcccacagtgacgagccaccgcatttaaaatacacacgcgaagtcaacgaagcggtggtaaatccaataaatgtataattcattatgtagcaaagtttgtctcttaacttattatttcagacaaaaagcgaagatg

SEQ ID NO: 113791 - DNA, 192 bp, Heterodera glycines
cgacaggtggggctcgctcattttttcctctaattaccaaatttacggggtcgttttgaaagtcgaatctatagcctggcttgctaaggattgaaaattctcctttactccaatcatttttttgtttctgttttagcttcctaccgtacggcgggaccgaaaacgaaagtgccagacaaaaacgaatggatg

SEQ ID NO: 113792 - DNA, 200 bp, Heterodera glycines
ccccggaaaattttaaaattttttcaaacctagaaattttcaccaaaaaaattcctaggatattagtaagaaaatttcttgaaaaattttttttgaaaaaacttattagttcatcatgatttcgaaaaaatcgctgaaaacgttttcaaaaataattcattgttttttctccccccccccccccccgtttttctcacatg

SEQ ID NO: 113793 - DNA, 171 bp, Heterodera glycines
gatagaaaatttaataattttggttttggaaattggtagataaaaacaatttaaaaaatggatttacattttttgtgggtttcattttcaattaatacatcttccaacaaattaaaaatcttctaaaaatgaaaatataagaaatattctttaggattacatgagcgaatg

SEQ ID NO: 113794 - DNA, 62 bp, Heterodera glycines
ttgcctgtattaacagtgaggcgacataccccccccccctttttttgcagaccaacaaaatg

SEQ ID NO: 113795 - DNA, 1003 bp, Heterodera glycines
cacccaattatttcatccttttcttaattatgccaattggatgtaaattaatgtaaaatatttcttattttttaagaaacatccatttatagaaaaaaaattaaaaaatttttttctttaaaaaaagaaaaaataacaaaaaaaatggaaaaaaataactaaaaaaaaattaaatttaaaaaaatttccaaatcgataaattctcattttttcatttataaatattatagcaaataatttcacaatttccgtcattaaattaaattaattaacagaattattgtcaattgaaaatgcaatttcccctgttctcattttaattatatttttaatcaaccaaattaatcaaatcggaacggaaaagaaaaaattggaacaaaaatcatttgatgaaatatttggggaaagttgggaagaaaaagaagaaaaacaacgaattgaagagaaaaaaatagaaaaaattgtggcaaattccataaaataaaagaaaaaataaaggaaaaaggaaaaaaatattcagcaaaaaaatggaataaaattgaacagaaaatagcgaaaaaattggggacaaatcgacacaaaatttatgaatggattaaagaattaggacttaataaacaaattcataaaagcaaaaaatccaaaactgataaagaaaaaattgaaatttcataaaatctctttaatttttctaaaatctctttacattgtgaatttattttatttttattgaaaatatgtttattattttcgaatgagctccagtagaaagtaataaaattttatttaatcattaatttaccaattggcaattattttgtcattaagataaaattattattattatttctttgaaattaaacaggatttccttattttattaagtaaaataatgatttattcagttttttaatcagaaaaaaatcatttaaatgcctcaaaaaatgaattgccatttaattgaagaaaaataaaataaaatcatttcgagacgacaaaaatg

SEQ ID NO: 113796 - DNA, 339 bp, Heterodera glycines
agttggttggatccgtgcattcgagcgagagtacagaaagttcaactccggttttctgtggggcacgtccggtacccttgggtgttcaaaatgatgttgacaccgaattggacagattgataaagttgggtgttctcaaaaaagttgactacagcagatgggaaattaaacggcgcaaaaatattttcccaaattgattttaaggacgcttatttgcaaattagcgttgatgaacagtcgcgtcaactcttaggcgttaacactcacaagggactttatcaatgccaacgcctggcattcggaatcaaaagcgcaccaggcatttttcaatggacaatg

SEQ ID NO: 113797 - DNA, 202 bp, Heterodera glycines
ggttttttattttttatgatcgaaattcatatatatatatatatatagttaaaacttgctttaaccaaaaaaaaaaaaaaaatttcaatgcaaaaatataacattcacgcaattttctcgcttacggtttggacgcaaaagaaattcaaaaaaaaacgctgaaagcttttcaaaaaaaacatttttttacttataaaaaatg

SEQ ID NO: 113798 - DNA, 293 bp, Heterodera glycines
tttcgggtcgctttttgagttcaattaattgactatcattgattaaaactctctctctctcgctctctctctcgctctctctctctctctctctctcttctctcgctcgttctttctctctctcgctcctcgctctctctcttattctgtctctctcattctgtctctctctctctctcttctatctttaaatcgtattcctatttaccacagaatttttgtacttttattttttatttatcccttttcttcttaaaaacaatcgcgataaaaagattaaaattttaaggatg

SEQ ID NO: 113799 - DNA, 391 bp, Heterodera glycines
  unsure (1)..(391): unsure at all n locations
caaaaaccacttcgccacacatgcaaacctttntggaactgagaggccaaaattgaaacggtgtgttaattagtaggaaaaacactttcttttttgtgtttgcgaacaaaaatcgggacttttatttatatattttggacttttcgccattttttcctacatattttgcaatttttgataaccgttaaaaaaatttttatttacatattttcgtacatatttgggaatttttgtacatatttcgcgatttttcttacataaaaaaagaatccctgattattatctatcctataaaaatttaaataaactcaaaattaatctttagatattaatcatacctaacaagtaagagttgaaactttaaaagcttttttattgcacaaaaatcatg

SEQ ID NO: 113800 - DNA, 55 bp, Heterodera glycines
ggtagtgtattttaagattttctaaaattgataatttttataacaaacacagatg

SEQ ID NO: 113801 - DNA, 485 bp, Heterodera glycines
gtctcggttcccggtttcggggttttagtctcggaaaccgagaaatttttacactgttcaagatgactatttcgggcagtgggggtcgccagcgaagggggaaaaggggaaaatttattgaattttgaacgtattttttaacaaaattcatgaaaatcccaaaaaagccaatgtttagggcctgtctttgttgtgatagcaataaaatttaagcataaatttaagatgcttttagatttgcatcacaattattgggatgccagcgcttgtcaaaaggacgtcaaaattagtggtgccaagcatttaattgccgaatgcgttggaggcatatacagtgaatatagtggtaaatttcgttataattatcttttaattattgtatttattctttaaaaggctgccattccgtcttcgcaaaacattcgatttcatggaataatgattacccttacattttttactttgaaatttcaatcataaaaatg

SEQ ID NO: 113802 - DNA, 812 bp, Heterodera glycines
acaaaaattcgattttttcagccattttacacaaatttcttcaaaaccctcaataaatgctaaaaattaagaaaagtatgaaaaatccaaaattcggaaaataagtaatttattattgtaaaaaaaatcagaaatataaatatgtaaataaaagtacttaagaaggttaattaaaaatttataattttaaatgtttattttctggtttttgggcctactgcagtttacgcttcaagcaatgaccatcctcagtttcttaagtcctaacttcttacaaaaaattatttttgaatatactcgaaaaagctgattttcgagttttaacgtcgaattttttttcttaatattttgattcaatttaataaaattagttttcataagtttgttattgtataaattaagggaatataaaaatacttttcaccccaaaatataatattattaatgaaattttattaaaatttttattagagattaagtaagtcccaaactttttaatttatttaatgatacttattcatttataattaattcataagttctcaattttgtccttttatcctcaatattcaagatattaatcaaatatctttttgaatgaacgaattctccataactattttaaccaatattctcttttttatttttaaagagaccccttcatttttccgtggtgtgatatttacgcctcacagcaaaaatcgtacctttatgcatatattgtaagggctatttatttgttaattatcccatggcacatttatttttgtttaaaaaaatcataaactattttcagcaaggtccaaaaaatg

SEQ ID NO: 113803 - DNA, 498 bp, Heterodera glycines
tacctgcaattagcgctacctagaagatgtatattaatgtctaattgaaaaaaataactgataaagtgcgggagaggaatgtaaaacgttatgaatttatacgaagtcaagttgtccatccagttgtaagtgtattaggctgcgagatcgcgaaaatgttaatgagcaacaaataaatgagcggatttgaagacggaatgaaaaatttctatgtgacttcatttctctctaccccttcgttaattttactacacactactcgattggtaaaccaatgtacatgtgctgaatgaataagtcgagttaaatacccggaagataaacactaccccttgacaatactcaaagtttgggtgattcctttagaaaattagatattctgttttgcccgtcaaagtgaatggtaggctctgattctctttatttatgaagtgcaccaaaaacaatcaaaaaggcaggatagacgtaaatacatatgcaaacacaaacaatgagatg

SEQ ID NO: 113804 - DNA, 1003 bp, Heterodera glycines
cttcgcccgttaaaaacaaacattttttgcttgtccgtcgtccaatttcccgagatgagaacaaatggataaaatgggagaatgaagcgattgagttggaatatggggccaattgaatatgtttcacattgcaattaatactgaagaaatcggagacaagtcagtaaaaaacacaattaaattgtaaatttccattttttggttttagtcttatcgatggcacttccgaccaaagtgattagcgcaaatgaattgttgagaagtgatggatcctttgaattgtctgctatttgtagtattcctttaaattatttttgtcattttaaatgtctaatttatagatttttcttgtatacaatatatatgtattgtggttaggtatttagtattcgattgataccaaaattgttcagtttagtggggaatgaagcgagttataggtgatcaaatgtgatcaaactaaacaacgaaaataagacactgaaattttcgtaaattttataaatattattttttatttaattatttctaaaaacacacgatttaacttatttgaagtggaattggaagctttgaccactgattaggaatttgatcaaagaaaaagactttgtattctttttaaatgcattggcattttgtttattacgccaattattttttgccgcttttttccttttttaccgtccatgaaaggaattggtttaattatgtcaaattcatgatcaaagaccgagtccaatcaattaaccataaagttctgaataaggtacataataatatcagaaaacaagataatgcttacatttaaataaagaaagtacaaccctttggatcttgaatggccgctacttttttgtagcgccgttttaactttgcttagttcatgttataaagcaaaattgtacaatgattcaaatcaatgtttttttactgtcttggttttctttaaataagttttttaagttttaattgttaatttttaccgaattcctgaaaaatg

SEQ ID NO: 113805 - DNA, 149 bp, Heterodera glycines
aacaacgcactgcagggtttccttttttagtgtcgaaattattaactttgaatactatcaaatgaaaatactttatgttgtctcctgtttttcacaatagattttttcatttgtccctttagaccgcttggcatttcgaccgtaagatg

SEQ ID NO: 113806 - DNA, 244 bp, Heterodera glycines
cccccccgcccccgacactatttcgggggatgggggactccgagcgtttaaaaatttaaaagctaattcatccacgaaggcgggaaatattgaaaattgttgagattttgaacaaattttcttaataaaattcattaaaaattatgaaaataaggttcaaaaaaattatggcctacttttttggtcccaaaccaagatcattagatttggttgacaaagaaaaaagttatagtcaaaaaacatg

SEQ ID NO: 113807 - DNA, 151 bp, Heterodera glycines
tgtccttttgtttgcatttgaaggcccctaactttttttgtaaaactcgaatcaaaaagtgcccgctgaaagggcactccgcctaagggtcctctacaaggtggtattttttaaaattttttttgagcaaacccctggcctgcaaaaaatg

SEQ ID NO: 113808 - DNA, 1003 bp, Heterodera glycines
atatgtacaaaaaagtccaaaatatgtaaataaaattttatttatttttaattaatttttggtatttttagaggtacattttcaaaaaaaaaatttttttcataagaaatttctataaatttttaaaaattgtcaaattatgtaataaaaaaatgaaaaattgccgaaattttgcatttttttgagaatttccaaaattaccataaaaaatacccaaattatttttaaaaaatgtacatatgtaagaaaaaagtccaaaatatgtaccaaatatgtaaaatatgtataaaacaccgaaatatgtaaataaaagtcccaactttttttccatcgttaagggtgtataaaaatgcaaaaaatatatatgtaaatatgggatatagataaaaaccaaacctttaaatagtatttttagcttggtttgatgcttctaggatgtctttttatttgcatattttaaccgcaagcaactgtctatgccgtagcgatgcgcctgttcccgaacgtctagccccggctgttcacctgcgcagccaccaacgggcgagccggctggtttttataagaaaattttttataaaataaaccaaacattatacaacataattgtaaacaaataattccaattaatgatggattgtgtgatcagtttcattaatttatccaatgaagatttttcagcctaaaagattttttaaggctcgtttttacatgcttataaaaaaatataaaattcaagattattacaacctaatgtaaacaaataaatccaattaatgatgatggcttatgtaatcagcttcattgatttatccagggaagatttgtcagcctaaaagaatttttcaattaaaaatgattctttcaatttttattatacaataatctttctaattttattattaaaaaaaaagaaatttaatttattttaaaaggaatggaagcaaaatttttgattattaaaattattatgctgctaattgccaagaattgtacacaaatg

SEQ ID NO: 113809 - DNA, 379 bp, Heterodera glycines
aaggacgggtatgccagtttccaaggacacaagggaaattccattaaattcaagggcatttaaaaattttatcatgtgcaatgaaaaataattaaattttataccctaaaccaagcggaaaatgcgtttttcatgcttatctgagcgtataaagtgcaaagtgcgcaaaattttcggcatttgccgaaaaaacgaagccctagtaattaatcaagaaatgccttttgatttatgaattgctaatgaatagagaccggatttttaagtttttacctattttttttgcggttagtacttgatgagagaagcacgaaaaacacattttctctgaacaatttttgatttagagcgactttttagcacctaaaagcctaaaatg

SEQ ID NO: 113810 - DNA, 116 bp, Heterodera glycines
aaaataaattaaataatgtaattaattaatcacttttttaattaggatggagctctgtttttgcgaaatttcccatcacaaacttttgtcgccccggcattttctacttcgaaatg

SEQ ID NO: 113811 - DNA, 1003 bp, Heterodera glycines
tgtaaatttattattgtatattttacctttttgtttttccattgaagcataatttgtcggttagataaatattttaattattttacatagcaattttcaatgaaatttactatttttagcatttttttcatccgggaatcaaaatgatgttaaatagtcgtcattatgtcatcggaaatctttttaattttttcatttttataaacatttggcattatatgtcacaacaaataatgataatgatgcttaatattgaaaatgtttaaccaaccaaatcaattaaaatggaaaaaaattaatgttgctcattaaaaattactaaaatgatcatttcgttaaccataaaaatattattattcatttgatgcttaatattgaaaatgtttaaccaaccaaatcaattaaaatggaaaaaaattaatgttgctcattaaaaattactaaaatgatcatttcgttaaccataaaaatattattattcatttcaattacttttttaatcgtgcggaaaaaaaaattggaacaaaaatcatttgataaaaagaaatattcaaaaaaaagaatgggataaaattgaagaaaaaatagcaaaaaaatgagctcattcgaaaataataaaaataaaataaattcacaatgtaaagagattttagaaaaattaaagagattttatgaaattttattataccagaaaattggtgtaaaatggccaaaaatgaaattttagcgccgaaaaatgttgctgttcacgaaaataatagaaacttgaatatttgaatttcttatttattcaaaaataaaaataaccaaaagaagggcattgctgccgcttacacttgaggtggaaatacgagaggtcaaatgggtagaagtgacatgattgttgaaattttaaaatttttaatttgatattttaaagtatttccttccaaacaatatttttaattaatttggtcatctaaattgacataaaagcaacttaatgttgagtgggatggaaatg

SEQ ID NO: 113812 - DNA, 207 bp, Heterodera glycines
ttttctgattttgtgcctttacacgaaagacctgcttttccgagtcgtacagcgactggtcgacccttttcaacacgctttccccccgtttaggagcagtacgggtggacggtccgtcacaacgacgacccaaacagcaaaggcagtggcggagggcatttcgctgctgccgtcgctggcgccgttggccccgccgatccgttgatg

SEQ ID NO: 113813 - DNA, 115 bp, Heterodera glycines
tggaaacgatgcagcaccaggcgatggaccccaatcagtcggagaaaagtcaacatcagccaacttttatcgcgcaaagagttgcgtgcccaaattgcatcgacaacggcaaatg

SEQ ID NO: 113814 - DNA, 312 bp, Heterodera glycines
acggactgacgatgattttgtattaggaaaatttgagaaattttggtcgaagtttttccgttttcaaaaattgccggcagaaaatccggcatatgccgagaaaataaaacccagattccggacagagctccggaaaaattggcgatcggaatttggcttaaatgcatttttagtgccatttttgcaaaaataaagcgtcgccggctttttagcagcccatttttgaacagaaattggctccaaaaatgaaaatttctataatttttgatcaaatcaaccgcattaaagagaaataaaattcagaaaattatg

SEQ ID NO: 113815 - DNA, 260 bp, Heterodera glycines
acttatgtagtgcgaagatttatcctgagcctataaaatttgtgtgaattttttagaaaaaaataaaacgccaagtgcctgtgcggtacaacgccaaaggcgcgctaattcaaaaaatcaatacaaaaaacattaattactgtgggcacaacgccagaggcacgcgcaaattcaaaaaaaaaatgcaattttccgtcaataacaacaagcagttggcggcgccgccatcactgcttctcccgtcctctctgctgatgatg

SEQ ID NO: 113816 - DNA, 162 bp, Heterodera glycines
  unsure (1)..(162): unsure at all n locations
cctccgtcctctcagcaggttcttctgatgagtgctctcctttcaaacggacgaattttatttgaaagngaacggncattgactttcgacgccttttagaatcagcctttggtcctccccgtctcttccgtccccactttccaattcgtccaacaacacatg

SEQ ID NO: 113817 - DNA, 557 bp, Heterodera glycines
tagtgaataggcttaatgaggctttgggtgagcatattaaacgtaaagatattgaaaatagacaagtatctgaagctgagaaaggaccacaaaaaagagagagactagccaatgaggatgttcaatttcaatatgacagcattgatcaaaaatttattgtctatctttctgctgctgtctcccacatagatttgtcaaaacacctcgcctatgtgcttggttttaagaacacaaggctatttcacgcggaagaggcgaattatatgccagatttgacgggaggcgtaaggcagctatacatttatgcaccaaatttaatagaaaacacaattatcgggaaccagatggctccactcttaagaatagttaacgtcgtcaatgacccagggtcgattagtgaagttatatatagcaccgagtactttcatcgtctacagtcgaaacgaatttcagaaattacaattgaaattcacacaccgtttggcgaattcgttaaatttcactggggaagttgtattctcacattacattttaagaaaagtatattttaaaaaatg

SEQ ID NO: 113818 - DNA, 160 bp, Heterodera glycines
agttttaaaaaaattttgccgtaataagttcgaccgccgacctttccaaccctcggtcgaccggttaaaggcgaattcaggaccctaaattaatttatttggctcttttttcgcagtcaggctttttgattatttttgtgactttattcccgtcctaatg

SEQ ID NO: 113819 - DNA, 217 bp, Heterodera glycines
tttcaatggataaattaactaaaaataattagattattctgttatcttcaataattggccattaaaaggatgtttgaatttgtttaataaaactaataaaattatgctctgtctatccaaagacatttttttaaaatagaggcaatttgaacaattaataaacaaaatataataattaaataaattatatttaagaagtgttgccgcttccgttatg

SEQ ID NO: 113820 - DNA, 61 bp, Heterodera glycines
tatccttaatcaatcaatcgccaattatgccaaggtctgtcgcacgccgccgctggaaatg

SEQ ID NO: 113821 - DNA, 175 bp, Heterodera glycines
aatgctgttgcgttgtttagccaattgtgacagtcaggccaccaatgcggaggaatgtttgcgattgtccaacggcgtgcgctgtgttttccacaacaaatcgtgcaccaaaactctgcccaattcgtccttcaggcagtcctttctctcaattgccaagggcgaaacggcgatg

SEQ ID NO: 113822 - DNA, 415 bp, Heterodera glycines
gtatatgaccaatagcattgtgagccggtgtgtcaacgaatgagggaaaattaggtggtgggaggaaagtgcttggtataaaagacaacatttccacccatttcttcatataccttaattcatttaaccaattgagctgaattcaaaagtttatgttttcaaaaatatgtatgtaaattttgtaacaaagcaaaaccgacacaaagattaaataaatgcaaggctcccatatgaaattttttttagaccagaccttatgatcattttttaaatgttattgaaaagcgcgagcaaaaatcatcaaatttgccccctttaaaagaaggaaaaacgctgataaatatatacatgacagccctgattaactgacataaaaataaaatattacattattttaatcaatttccaaaaaatg

SEQ ID NO: 113823 - DNA, 438 bp, Heterodera glycines
aatcagatttttaacattttttgcggcacatttccaaaaaacttggtgaatgtgcgaggggagaggtccggtggtgccgattggcgccgcaagcggaaaatttttaagactatatgaattttgttagaaattagccaaatttcttagaaatttcccttttttagatgaaaataaggtactaccccaaaaccaaaacatttcttagaataacaacatagaaaaaccctgtattatttggaaaaaaaaataaaatcacaagaaaacgtcaaccgatgtcgaactaataacaaaaagtttgttaatgttgaagcactaaccactaaaccacaaatattttaaaaaacataagcaaatttaatttatttcataaaaatttgtaaaagatggttaaaaaaattcaaaattgtataaatttttgcctttaatttcacgaatatg

SEQ ID NO: 113824 - DNA, 146 bp, Heterodera glycines
tgattagcgtgaactgattttcgcacttttgcgtttcctcacgttcgatctgtgaaggaactggaaatgattgaaggtcaaaggcttttctctttctttcccatcgttaaattgggtaaatctttttttcagaagaattgaaaatg

SEQ ID NO: 113825 - DNA, 251 bp, Heterodera glycines
atgaaaagccagtcgacaacaaaccaaagttgaacatcaatttcgaaagccaaaaatggaatgaaaggaaaaaggaattggacgcactgcaaaaattgttggtgcaatcgccgagacttactgattcgccaaattaccgggaggtcatcgaacgcttaacaaaggttataaattaaaaaaaaagtgaaatgaaaaaattggaatgaaaaatttataaaattaacattttgtaatttagattatggcaaatg

SEQ ID NO: 113826 - DNA, 152 bp, Heterodera glycines
agcatgctcctatgatgatttgaaatcagttattgatatgaatggtaatgcaaaagtttgtgaaactttttcagccgcatgtctagaaagaggattgattagaaatgatgaagagtggaaaaaagccctagaagaagcagagttttgagatg

SEQ ID NO: 113827 - DNA, 284 bp, Heterodera glycines
taaaatcggacggaagtaatgcggcttgagtggatgaatttggcagaacggaagacagttgtgtaggagatgaagtgggaataggatttaaatgtggaggaaatgaaggtgacgaatttggcggaatggaagaaaattgtgcaatggagggaccgggattgggatttaactgtggaggaattgaaggtgacgaatttggcggaatggaggccaattgtgtaatggagggaccggcattgggatttaactgtggatgaattgaaggtgacgaatttggcggaatg

SEQ ID NO: 113828 - DNA, 955 bp, Heterodera glycines
actgtaatttcctacgattttcgcttttttcaattctttcattgggattttttatctacttgtggtaaaaaaaagagagaagaaaatcattgctaaactgttactgctaattattcacagttacccatttccattcgtaaaagcaaaaactgtcgaaggaaagggtaaaaaagcgattggacttttgcgatggctttgccccccccccctataatggacatggctaacccaacagctcattgatattcaaccgatgcttccattcactccctttccgttctcctccaattactcctctccccccattctctgctcactttcattccagaaaatttctgttttcttgtcaattttccaatcactttggtctaatctaatcaattcaaaaaaagtccaatcaatcctacaaagtattcgggcattctgaagtgtttttcatgttggttgatgagtcatcgatgagacaatcaatatgtcagacacctcagagggcaaaagacactgaacaaatgtcgagattgaaagccacggtccaacatacgtaattagctcgaaatgatatgtattgcaagccaattattcaccaaaacatcgccacttttgttgttatgcgttgccgctgaacaaacatttgctcatttccaaaagtcgacatttccaatccttcagctttaaatttcggtgcatctgaaagtggtaaaagccatggaaaagccaagccaatctttttctaagctgagtaaatttattaaaccgtgaaaagtgatgacgaatgggcacataaaaatggaatggttaaaagtttccgatgaatcatttgaatctctcaaatgttcaaactgatgttttttttgcatctaatctcgacattccttctcttttcgcttatttctttgcctcgggggatgtcttcgtcccgtataaacttctttttccggaaatcctttccaaaatg

SEQ ID NO: 113829 - DNA, 1003 bp, Heterodera glycines
ggaaaatgagttttccctcaaattatgctgagctcacgggggaccaatgaatgttccgtccagttttgatgtgagaatgacttcacataaacatgcaattaaaattttttaatccgggggttgggggacatttgatatgctaatgagcttattatgtaggggcgggcagctgtccctattttgaaggtcttctccaattttttaaatatctaattaaaccaatgcctagatttttgttccagaaaataaagaggtcaatcagcaggtccaagtatttctcacaatgtgtggactaatgaccgaattcaacaataatgactgacatataacggactctattgtttggattggtctctgacctgttccattcacccgctctcaattaatggtctcgcaattccattgtcaactaaatccgccgcatacactttcaacgaccaaccaataaagacttgtttaattagcaccttaattatttgctgtttgcttttctgtctttgcctaatgcccccccggggaaagataggggcggtgggtcggcttccttttacctcttccactccattgtttaattttgaaaggtttatgaagagaataggggtgtggtcagcagatgaccgactactgatcatgcatgattcttgctcggtctatttgtaatgattatgccattggcggacggctaaatcgctttaaagccataaaaggaaaggatgaatgggatggcctgttgctggtagctcagcagacggtaagaccactggtttgggtgagaagccgatcgctacaccagcagaggatttcgagggttcgattccctcctttaattagcaaacaagaattaaagaaataaataaaagccaaaactttgaggggcggggggggggggacagaagcacggaaatcagttggaccaaagaccaaacagaaaaaggaaacaaataaaaaacatctgcgcaccgcacttcctgcttctgctgcggctccatcaaaattagaaatg

SEQ ID NO: 113830 - DNA, 181 bp, Heterodera glycines
ggggggtggggaggggtacatattgccgaatttttttatcctaatgtaagcttgagtatcagaacttcgcaaatttcaacaaaagtattgaccttttttgagtctcggtaaaaatctacaaagtgtgattagaccctcctatataagcaatagaaatccttttattcgaattcgccaaatg

SEQ ID NO: 113831 - DNA, 275 bp, Heterodera glycines
ctaatttttgttcttgttttgagatgcaaaaaaactttgcgaggcgcactggtggtgcgccttgtcatgaaaaacgaatcgcagcaagagtggccagcgaattgtttaaaaaagtttactttttttttatgtccaaaattatttcgattttttttcaacagattttcacaccgggaggcacagaaacaacagcggcaaacacctggcactcggtaaaaaaaataaaaaaataaattttcgaaaataaattttccctttcccattttagacaaatg

SEQ ID NO: 113832 - DNA, 165 bp, Heterodera glycines
tttggacaccagcagcagaaattcaaaagtcaaaagaaaattcatcgttgatgctaatatggtggtaaattttggggtacataattaaaaattaattaattacatgtttaactccccagggaaattcgattgaaaaggaatgtttggaaaagatgccaaaggatg

SEQ ID NO: 113833 - DNA, 650 bp, Heterodera glycines
  unsure (1)..(650): unsure at all n locations
atcatacntgaaagaaaaagaataaaaattgtgagaccgctgtgttttcctcaccaaaaagcagacatctttcggtccaaaaagtggacaaatcttcatcgcgagaggaaaggaaagcacgctaaaataaatgttaattagttttcagaaaggataaatggcaactcatacaataagcaattcgtacaataggcaatttacaataaccaatttaataaaaaggtctaactctaaggctaaagcttcggcctagccctatccctacatatgtacgagttgctttttgtacgcgttgtcatgacaccgtcaaaaggaaagaattaagaaaacaaataggtacatacatatgataaaaataaaacaaattttgaataaagtaaattctgaataatttttctgggttttgaggaatacaaaatttaatggttggtcttcgattgttggttttctttttttcctactacaacagaacagcagatggaagaaatgaaaagagaaaaaaacgcagagagaaagaaaataaagacattttcttgctgattgggtgacaaaaaacaagcgcctaaaaggcaaaacaaaaaatgggcattaaattagcataattttagaattttgaattttaaagtgcttttttgtccgcagaacgaatg

SEQ ID NO: 113834 - DNA, 477 bp, Heterodera glycines
tttatatcctttttttgcatataggtgcggtgtctgtattcatcgcaagcccgttacccaattcctgtggggggccttttcccattggcactgatggaaaaaagcgaacggggcgaattgagagagagaaattgggatatgtgggtcgttaaaaacgacagttatcccagggcgtcaaataaagaggtcagaacaaaaaaaagagccgcaataattaagtgtttaggaagcgaaggaactgcgcattgcgcaccaaaaacgccgccggacggaggacgaataccatctgtttctctggcggatcatctccagccgaattcgtggcgaatgttcatgcggaccgctttgtctgcacttcagtttgcgagacctggaggacatttgcatcggccaatttgggataatcgatgtaaaatttattttattcagtaatttccataatcccattccccctcattgttatagcggttggagatg

SEQ ID NO: 113835 - DNA, 1003 bp, Heterodera glycines
tgagaaatacttcttttttattaataacatttttaaagagtgaaaattatggttttagacatcaaaattagtcacaatttaccatgattaaagtctataataatatttaaaaacatcaaattttcagtcttttaggttaaaaataaccgcaacttgattttttaattaaaattttttgatgaaaaaattgatgaaaagcggataaaaatctactatagaattattttattaagaaaaaattattattaatataacatttttgaaaatattaggaaaatctaaccatgtactgtatacatattatttattatatctttcttttattttaacacaattttttataacctgttcactaaaagtctcaaaaacagtgtgactattgaaaattttcccgaaacaaataaatcactcatgaaaaaataaatatttggctcaaaaaaaaagaaatcatttttcaactcaaattattttaaagcaaatatggtttttgttataagaaataaaatgcgttcggatttgaaaacttttaaaaaatcaggaaggggtccggcggcggtaccttcataagccgaaagatttatttttataaaattttctatgaaaaaataaaaatttttcgggaatggaaaaaaactgaagaaaatatatgtaaattatttagaagccaatgctcttccaaagttttttttttgtcgtcttatgattttctctccgctgaaatatatgcacataaatataagtgttaaccattcatagtctaatatccactatttctgaagaaatacagtatatttttgaaaaacaccataaacatagtttatatcttattaatgtaaagtggtacatacgcacgcatttggcatctttggaaaaacaccttcagttcaatattttacttactaaattagtaccagaaattaatctccctcaggcattttcagacatcaccgtttgaaaaaaaatgataataagaaaattaaatcactccagggcaaaaaaaatg

SEQ ID NO: 113836 - DNA, 259 bp, Heterodera glycines
atcaaatgttaatagctaaacaaaacaatgaagggtaaacgaacctaacaatcttcttgttctcgactatttagtttttctatatgttcattatttttgctaaaatattttctgcggctatgctatttgtaagaattaggatttattaatttactttcgtcaaaggcggtaatggttggtccaaattcttttgaataattgttcctaaaattatgggttttccctatttttcaaataaaaatttaagcacagcaaaatg

SEQ ID NO: 113837 - DNA, 99 bp, Heterodera glycines
tattcgaactcaacatacccgatttaccttgtttaattaaattcagaatttccaaaaccacttttaaaacattatgttacttggtggtcttgaaaaatg

SEQ ID NO: 113838 - DNA, 93 bp, Heterodera glycines
tgtttggtcattggtcaaccaattctttgttttgtcattggctgtcccaatagccctcccttcccccttaggtggtcgttgtgaggaacgatg

SEQ ID NO: 113839 - DNA, 403 bp, Heterodera glycines
tgggaaaaacatatagaatttattactaaaaaagcaataggaacatcttttgctttactcaagtcactgtaaactaaaagcccaaaaattctcataaatatattcaatgtttattgtcgatcaattttggaatttggttctccgatttttaatccatatatgaaaaaagacattgatgctcttgaaaatgttcaaaaaacatttttacgtattgtttttagacgtaataataataaggatgatatacccgggtataacgaactcctccaactctttaaacaagaatccctcttaaaacgcagaataaaaatagatttaaaactcttccatgatataattttggaaaagatccatattcagcataatgattccttttcaaaaacatattcagaactgaaaaatg

SEQ ID NO: 113840 - DNA, 375 bp, Heterodera glycines
tgtattcgttttcgtttatttttgagaggtgaatgggatgggaagggaagggaagggaatggaacggaaagctcgggcgggcaggaatggcttttggtcgagacaaatctcgactttttggcaaatatggcgagactttcgtccgttcggtctctaggcttcaccagactgaattagcaggcttggagccgcctcagggcagaaagcaccggcacggggtctgcgtggacttccgggagagcgaccccctcgggtgctacgtcgccgcttactgtccctctcatcggtggcgcggggggagagtccgtttcgccggcatcgatcagtccgagtctgacagcggccgcaattaaaagtgcagagaaaggagcaatg

SEQ ID NO: 113841 - DNA, 537 bp, Heterodera glycines
aagaaagcaaaaagaatggaagaaggagaaattcatctaattgctgtcatttttactttatttatgtttattttttaaattctttttttcaattttcattttggctttataatactaattactattttatttgctattaatttcgtttattaaaacgtcgattttgtgactcagtttcaagtttcttcgaaaaaattcctatgaatcttaaaaattaatacgagaaacttcacaaaataatttaatttctcttaaataaggatggcatttcttgactcttggttttaaaattctgaattggggcattcttttttaggtcatcattttgccttaatttatgttaattgaccccgataaatatgttaatataagcaactgcagaatcagcagatgttcatttattacttctccaatttgttaataatttttctcatttattacttcttcaatttgtttaataatttatcatttattaaaatttacatcttttattgtgaactttcattttaggaacttaatgaaaagtttgtcaaaatg

SEQ ID NO: 113842 - DNA, 895 bp, Heterodera glycines
ttttgaattctagtcataatttttttgagcattaacgaaattttttgaaacttagcaggctaatagagaacacttagagctttcgaatgataccaataatattagatttggtggaaaaagaaaaaagttatagtccaaaaactgggctggcgccgaaacgagcggcgccgaaacgagggtgtcccctatcgaattctcttttgttttttgaaaacttattttgtaactcgagatcggttcttgctagagtgcagcgggaccgggaaattgggcaagaccgggaccgggactttttgggttgaaaaaccgggactttttggctgggaaaaccgggaaaaaagccgggaatttccggtcaaaaccgggaccttggtactcagttgtctgtgtccaggtcccggtcccgctgcactctagttcttgcctttttgcacgcgaaaatcccaaaattttttttaattttgcaaagttaaaataaaaaattgagccgctgtgttaaagaaaacctataaggagaaatatgtatatatgtacatatgcatatgtaataaaattaaaaaaataattacctattatcctttacaattacacttaatttcggtgattttccattattttttggcgcttgacaaatttttggctggcaatgacaacgaaaagtgagggggatgaaaataattctgtggatgagaatggcgagccctctggcaatcacgcggagaattgcagcaccgggttggagttataaaagaaatattgtaataaactccaaatgtacaaatgagtcaacgatttctcaaggccctcttcgcctgccccgtcagtgtcctgcgaggcgtgcggtaccaatttctcacaacttgagaaggatgcttttgccgcagtacgcgaaatg

SEQ ID NO: 113843 - DNA, 396 bp, Heterodera glycines
atgccttgtggtgaaaacaatatttcacatttcactccataactttgtgagttcggcacggatcgagaccgggataagaccattggaaagagcagctcgagctctacaagaaggtatggaaagaaaaaatagttatttctgggactttttcagaaatcagaattaattctccaatgtggcccaaattttaggcccccagccacagccccttgcttctcccagttttaagtcttggatttgtcaaataaattcaagacttcaaattaataatcaaaaattctcttaaaatttttttaaacccaattcaaaaaaggaaaaaaatttgcagtcaaaaaattattcgaatttctccaattttgtttccataatttccgaaagttattcggtatcataatg

SEQ ID NO: 113844 - DNA, 58 bp, Heterodera glycines
tttcatcaagcagtaaaaagtgctggattgaaaggggagagaaagatgatggagaatg

SEQ ID NO: 113845 - DNA, 77 bp, Heterodera glycines
aattaggatggcgctctgtttttgccaacttttccatcacaaacttttgtcgtcctggcattttctactttgttatg

SEQ ID NO: 113846 - DNA, 720 bp, Heterodera glycines
  unsure (1)..(720): unsure at all n locations
tcatcgcaaaaaactcattacaaattcattcatttctgaccatcgtntagcaccaaccgccaccattgatggaatgcacatccaaaagtgattcatccccaatccaatccaatgaatttgactgttatcgctgttagcgatcagcttacccccctaccccttagctaattgttgattcgaatttctttttgctcggctttcatgggggggggattggacaatttacgcgacgtgtcacagcgccacccaccgcccgcccatcccgcccatggggttgtgttggggacgggggacgagtgggatgtatgcggttcccgcccattagccgcgctgcttcgccgcagggaccgcccatttgggcactgtcggccaccgcatttaagcgctgtccaatcagtgaaaaatcagtcatttccaaaatttcattctgctcctaaccaaaaagcattcaactgacaaataagctggtggaaggaaataggaaaagccaaacaaaaacatttttgaaaatcagtcaacgattaaaaaattttaaataatttttttcgaaaaccgtttcaattttttgtatttcacttaaatttagaaatcaaaaaaatttttggtttaaaagccaatattttgatttcattgttttttaggaagtgattttttcctctatttctgatcccaaatctcattcttcaaagcaacccgtcccactctcgaccgtctaacatg

SEQ ID NO: 113847 - DNA, 189 bp, Heterodera glycines
ggtacataatcagtgatgattggacttgcttgaatgatttattttttttttcattcagttgagcattttgaacaatcattcagttatgaagggttagtgcaaccagcgaatttcgatgacatatgttcaacttcaaaaaatcaccatggaagctttggctctgccggatgcactccggtgaagaaaatg

SEQ ID NO: 113848 - DNA, 126 bp, Heterodera glycines
ttgttgttgtaaaagagttatgaaaagtgacagtgttttcaaggctgaaaataaatttatgtttacaatattttccaaaataagttaagtttaaacccaagggagttcattcccaaattagaaatg

SEQ ID NO: 113849 - DNA, 71 bp, Heterodera glycines
agagtaattaagcattaattaagcaatttaattttgtctttgatttatttggtagtaattagttgggaatg

SEQ ID NO: 113850 - DNA, 127 bp, Heterodera glycines
atttccgacagaattattgggatgccaatgcttgtcatgagaaactcgaaatcattggcgacaaaagtctaactgtccattttaagggaaatgatattggtatttttccctattttacttatttatg

SEQ ID NO: 113851 - DNA, 143 bp, Heterodera glycines
aggatgttatattcgtgatcagcgaccccgaaaatccgataagacatgttattacaaattttaaaacttataaaaaattttgtcaaaaaaggtgtgctaccatctaaacaattacccatttttctgttcatgcgccgtcaatg

SEQ ID NO: 113852 - DNA, 440 bp, Heterodera glycines
tggtcgatttttagtgtaaattttcggctttttattttaaaaattcataaaaaattcttaaatgatgataaagtcacaaattttgttaaattgtttttgaaaaataattaaaaacattttttaaaagaaattttctgtaagttctaattcaataattcactataataatgccaaatgaaagtgatcacttaatttctaattcaataattgacaatattttgccaaatcagagtgatcatttaataatttctaatcaatattagacaatattttgccaaatgaaagtgatcacttaatttgtaattcaataagtgactaaaactctgccccataaaaggctgtcccttgacagtggtgaagcaacggtcctcagattcattcattcattcatcgtaatacccttccctccatattcccattctttctaattacccccaatg

SEQ ID NO: 113853 - DNA, 215 bp, Heterodera glycines
ttttaacgcaaaatcaattaacaaatcagccaacactctccaaatttttccgacggcatcgtcggtcaccgatttccacaattttttggttccctcggaatgccaatttcagattgccgaaattttttttaggcgtctcggcacagctccctgatatgtgcaaccactttttaaaaacttttaccaaatttaattaaatttgttgccttaggatg

SEQ ID NO: 113854 - DNA, 1003 bp, Heterodera glycines
aaagcggtcaaattttggcgcaaattgcgcatttttatccaaataacaattgaagtccatccttttcctgctcccgataattgaccagcgggaccgagacttctgcgcgattttacgggattcccgctatttttattcaacaaaaccaagcattactcaccgccaactatttttctgcgcaagtccggcttagaaatgagaaatttatacatttccgaaaatcaattttatttttttaaattttttgggtataggtgagggaagagtccggcggtgtcgataggcgccgcagggaaattttttgaaaatttaatgcaattttttaacaagttctgtccaaaaaatgaccaaaatttgcgatcttgggctaattttaagaaaaaaataggagttttggggggccggcggtgccgataggcgccgctgggggaaaattttaagaattttaatgaattttgttaggaattagccaaatttttcagaaatttcctcttttaaatgaaaataaggcactaccccaaatcagaacatttcttagaaataagaacagatacacccctgctctaataggcgccgccggaaaaatttttgtaatttttaatacgaattcttaacgattttgttcaaaaaatgacaaaattacgattttgagccaattttttagagagaataagaaaccgccgagagaaaaatttgaatattaactgaatcttgttaagattttgcatattaattcgcttcaaaaaacatttctttcaaaaattaccattaaaaactaaatttctccctaaatccaaaaaataagacgaaaataaggacaaagagcttaaataaggacaaatcttacaaataaggacatttaaaatttctaagatttggaccctcaaaataaggacaaagggtaaccctggtctctagtatgcttaaatgtacattttgtggttgcctgtattcaatgtttgccacatttattaaccaggtttattacacacattgaacaatg

SEQ ID NO: 113855 - DNA, 1003 bp, Heterodera glycines
agtgccgcctcgaggcggcttaagcttcccagcggcgatgtgctgtcgccgacgcccgccgcagcccaaaacagcgtaaagcacacacaacaaatacagcctttattcatcatcaatccattgctctcatctcacagcccatcggcagcagcagagcaccacggccttttaggccaaacatatcatttcgcaagaaccatcccccgaaaaggcaaaattccctcaaccaataaaagtcggttggctttgaattaattaaaataaatgagactcagtcgttcaattatggaaaggaaagaattcttcattggattattaattatttgctctcattgtcagtctgatgaatgccgtgctgctgattttctcatgccccactttctttgtttgagccaaaaatcaaattggcataatttttaattaagatttattcaaaattattaataattttatttgtgcacaattttttgaatggatggatctctccggcagcatcagcatggacagcagcaatagaaatgtgccggatcagcccggcacgtcggctggcggtggcagcgacgcgctgtccagcacaaggcagcccagtctgatctcatcactttggtcattaattatttgggaaacaataaatcaaccaaattgattggactattatgaagttgggggaaatggtcgaaatatttataaaatgctttttgctgacattttttctaattttgcctaaattttcaggtcaatccaagtgcaggttcgttttatattagcgaaatttttcaaaaaaataaataatacacaaaactttggatttctatttttgtacgttaattaaaacaaattgactttgtgaggcggagggacgaaggacacacccaatttaattttgggccccatttaataataaagtttgtggcaattgaattttgccattttctgtgcttatggcaattcctaattgcctcccccctcttagcatgaggggtccaactcggacttcccaatg

SEQ ID NO: 113856 - DNA, 51 bp, Heterodera glycines
ccgtgactgatgataaatcatcaaatgttgacgattcttccgtgactgatg

SEQ ID NO: 113857 - DNA, 91 bp, Heterodera glycines
  unsure (1)..(91): unsure at all n locations
aaatcaaatgaaagaaattcggcaaaaatttgagaatttaattggcgtttcgggatttcaattaatttacaaaacattttnggaaaaaatg

SEQ ID NO: 113858 - DNA, 400 bp, Heterodera glycines
atataatgagtgagtaccatttatcttaatttgtgcttagaattttgtggtatattgaactaatagcgtcaacaataatttttctattgaattagtcttttgcataaagagaaaatttaatttttctaattttattaacctttggctgagagcaaacatttttcacgttcagatctttcgacgctatttagtgtttgtggtaacttatatctgccaatttgacaatttattatttgtataaattctcagaaattgataaattcttgcacaaaacccgtgaaaaatttccaattcttaaaaaaaaattttttaaggtggctctcggcatcggtggccattttctataaaaataacaaaaaatttacctttgtcaaaaatttatttgaaaaggcaaaaaatg

SEQ ID NO: 113859 - DNA, 84 bp, Heterodera glycines
tgagcaatttaaggtgtgattggaagaaatggtttttgattggctattgcgatcactaaattcagttctccgctcgccaaaatg

SEQ ID NO: 113860 - DNA, 362 bp, Heterodera glycines
tttttctgtttttatgaaggggcttggggaggtggaggactaagtgtgctcaattatccttaaatttaaatttactacataatggctttgatttatttttttaatttggacctaattaccattaattaggtaactaattaatttttaaggttcttccaattattcactttcaatttatttgtactaattaattttttgcttacatgtgatttttttaatttgacctaagtgtcaataaatcaccaattaatgagattttttggattttttttttcatttttaaattgccaaaatgtgttcatcccctttcaataaaacccgtccccatttatttgttcagatttccattcgaaaatactatg

SEQ ID NO: 113861 - DNA, 430 bp, Heterodera glycines
atcactgcgttctctctcgtttccaataaatgactgttcagtccgtcagatcagtctgttctctctctcacattgccattaatgcactgatcagtccgtccccatggatgggctgatcagttctttctctctcattgccattaatgcactgatcagtcctccccatttgttccctttgctctgtgttccttcgtcattcgcttgtgtcacctcaattcacttttttgcttcttacgccaagtgttcatcctccccaatgacagatgctgtggaggaaaaggaaggaaaaaggataaaatatttgaaaaaagaacaaaaaaaaacatatggccaaagcgtggtgatggcgaacattccctctgagccaatcgttttaagcgatcacttcgagtccctttcggtctcaatttttccgagtctctaaaaaatg

SEQ ID NO: 113862 - DNA, 334 bp, Heterodera glycines
aacatttgttcaacaactaaaagtctcagttggaaacactgaaatttacgacagcggaaatttgtacccatataaggtttacattacgaacacactttcgtttccgatgaacgtcaaaaaaagcttcctcgcttcaactggtcactatgcgacacgcacacacgacagcgtcgctgacgagggctttaaagctcggtgtaaaatttttgagggtgggaagcgagcccaatttctttcacgtctggactttgacctgggaaaccaataactttatttgttgaacaatttggatcttttatttacaatttacaaagctcgtgacactttcatcatg

SEQ ID NO: 113863 - DNA, 106 bp, Heterodera glycines
tttattagccccttttactgttgaattgagtttaatttttttttttggaaaatgtgccaaaaaaattatttaaaaaattctatttatcccccctggcacataaatg

SEQ ID NO: 113864 - DNA, 232 bp, Heterodera glycines
  unsure (1)..(232): unsure at all n locations
ttttaggcgctaatcaagaatctgaagtgaaaaatataaaacanccaagattttataggtgcttttcatcatacaaggttatcaggcaggattataagttgaatgcatttaaaaaatgccaactatgcactaaaaatccctcaaaaacgcctaaaaattctgaaagtttctaaatatgcactaaaatatgccttaaaactcacaaaaaatggctttgaacctttaaaaaatg

SEQ ID NO: 113865 - DNA, 99 bp, Heterodera glycines
tagttgtgctaataaataaaaacaaaatcgttgaatttaacaaattaaaaattttgcaaattttaaaattagaaaactagatataaacaaataaaaatg

SEQ ID NO: 113866 - DNA, 861 bp, Heterodera glycines
ttttccggcaaatttttagaatcaattgaagccaaaagagaattgtgcaagaattcggaattatttgcaaaaatttaacaaaaaattgtcatttgccgagaaaatctctgcattggaagaactggtcaatattttgggccaaatcattcgagattataaaaggttgcacaaagaaggcgtggccggatgtcgtggggggaaatttttttcagaatttaatgggttttttcgaattattaaatttaaatttttttcaccgaaagataaacggaaatctggaaaattggagagagacctgccaaataatattaaaataaaatataaaataaatacaatatggatttaggcaaagttagaaaaccaatttgtgccgacaagaagtcccagtgagaaaaaaaacataaaattattgcgatattataactagggctgctaattttatgtaattggcatccctaattataaccgaataacaaaaatttaaaaatttttttgtttcgtataaattttttttttaatttcgttcaaattgcaaaaattcccgacatcgcctgacgataaaattagatttaattttgcaaaattttgaaacaattatttataaaattgttcattttttcgacaaagactagtaaaaaaatattattttttcgcccacagacataattattgaaaaccgaaattggcgtcttcggattgcccccagattattttttatcgtgcctgtcctaagtcaatttttatttatttattctgccataggcaccccaaaaaaatgattcattcttcccaaatccgtcacgcctttcgtgccacgtaaatataaatgtagaaagagaatgtcaacaacagaacagaatg

SEQ ID NO: 113867 - DNA, 1003 bp, Heterodera glycines
aactaataaaaacaaattctttaaatcaatttaaaataaaacttaaagttcactagggtaatatgtaagaccgggaaagctagaatgtaacaaatttctaagtgatttggtatttcgacctcatttgactttgacctcaatttattattatttattttcacatatttttgtctttttttaattcctgtgatcatccatatattttgtcacttactctacgacacatttaccggaatagtcgtcagagtaagtggttttcgcccttctgatgacttttttattttttatgaataaataaataaatattatcaaaataaaataattttcgcatttttttctcatcataaaaaactcattaccaattcattcattttctgttcgtcaattggcaccaaccgccaccaccgaccatcaccaaaaatgaatcatccactggggggcttttatcgttaaaagcgatcggtttacccccggctaatttgtgaatggaattttctgttttgctgggcttttctccccccccccccccgggggggggggcggggaattggacaattttacgtgacgtgtcccatcccatccctgtgggctgtgtgcggtacggcggtgcgctgcccgcccattggccgcgccgcttctgtccgcagggaccgcccatttttggcacggcccaccagcgcatttaagcgctgctgggccagcgaaaacagtcactttcaaaaattttttccagctcacaattaaataaaattcaattaaaatagtgatagggaataggaaaagacaaaaagaaaaaacattttttaatgggacagcgattagaaaaagttaaatgattttttttttggaaattatttcaattttggactgaaaaatttttatgaaatttcatttttggttaattcctttcatttaatattattttttgttttaggaatcatttatttttgctcaatttctaatcccgacaaaatcaccaaagcactcatctcaatttaacatg

SEQ ID NO: 113868 - DNA, 346 bp, Heterodera glycines
ttctcaaaaactgagccaataattttaatgaaattgttcctcaaatgccaaagaattgaaaatttaaatgccacaaaaattaattgtctaaaaacgaattcatatgggacaaagatctcttaggcaaagaatttctagaaacagaacattatatatagtatttgtacctggaaacaaaatttaaaacaaggaattaaatttttatattgaaattcacattcacgttatatgtggtttgttttcggagaattgttacctatttaaacattaattgaatacctatctgcattgcaaataaattatagttcatttttggaaattcattatttatcaaaaactaaatatg

SEQ ID NO: 113869 - DNA, 771 bp, Heterodera glycines
ggccaaagtgacaacacttcatttccttgagagaaagcaaaaataataattaaaatgggaaaattcaattgaaagttgtggattaaaaaaacacatcgagaagaaagcccaaaataaggtaaccacaaccaaaacgtcgaaatatcttttaaattttcatcatccggagcaggggtgtgcgaaattccgtgtcgttttcatcgtcgtcccttttttgatcactttttgagtttcgttttcgtgtttcgttttcgtccaagaaaaaaattcgtttcgttttcgagttttttaattttcgtttcatgtttcgttttcgtgaaaaataaatattttcgtttcgttttcgaaatttttttttgtttttcgcacccatgggtcgggagatatcgtcccaaacccatatttaaatataatagtttgaattttcaataatttcatctataaaaaagagtcaaccttattttcgaaaaactctaaaacaattttcttttcatgtgttttctgggctccattccaacggattacaattgctgaagcatttaaagcttgtccatttgcccacctttctgctgcactgtgtggaaaaatatggttggcgtaacaaattctttcgccgagccctgaacattttttaaaagtgcaaatccgattcgctagaaaatgaacaaaagtcaactgggaaggaaataggggcaaaaaaaaataaaaaacggaccagaattttcaaaaaccgcggaccccctgttccccaaatttttttcttgaaaaatg

SEQ ID NO: 113870 - DNA, 247 bp, Heterodera glycines
aggtgttagcgaatggtgtggagctgaggaggaggtgggtattgatctgatttgggaagcccgacatcgatattcggcaccgacaacctcgggtgggggtgccgaacagcggtgcgggatgtttgatttataagaaagatggtgatactgggaaggaagcaatgagtacgaaaggcggggtaaataaagttagaaaaaatccatttataaataatataagtacttgaatgcaaaaggaaccaaaatg

SEQ ID NO: 113871 - DNA, 418 bp, Heterodera glycines
aatttcaatggcatttcaaccaatggaatctttttcgaaaaattgtttcgctttttacacatacaaaaatattttcattgcttttttaattgcttcactttcactctacacattttttaattttaacttcccaattgacaatagtccattccttactttttcttccattttaaaacttgttatttaatgatattttgctttccagcgaaaggatgaatctgatcctcgacaacgaccccatcccctttttcatggtctttttttgtcccttaattattcttatcccccctattggtagaacattgagcctgatgttgggtgccgtcttcatttatctggtctaaattgggaatggcacacattggacactttgcgttctcattttggccaatttggcacgatcgaacagctggaaatg

SEQ ID NO: 113872 - DNA, 656 bp, Heterodera glycines
tgccgaattgtttgccggtgccgaatttgagagtccaaagttgaaaaaccgcttattgcggaaccgcaacctttcttaggtctgttggtttttcggtgaattaactgcaatatatgcagacctcacccgcctagggactattggttttgttgatggcgaaaaactgcagtatttgcagacctcacccgtctagggactattggttttgttggtgtgcattccgggtgtcttcttgttggttgaagacgactgctgactgcgccaaatttgttgtgtctttgtccgagtgaataagaccaacaaatatttatttacgaagagacaataataataaataataaaaatggcgaatggtcggtgggagagaataatgaataaaaataataaattgaaggcaggagaagaagtgaacatgggggaagagtccagcctttaaatagacaatgtgagggggaaggaacggacgagagaatggacaaatgtaaagatcaataatcgataattgaacatgagcaaagtacatttgctttttctccaacacattggaagaatttcgtagaaacaaacaaattaaagaattgaaaaatttgccggaaaattttcaaaatggccaatgctttggcattttaattgagccagatgataatgccgaaatg

SEQ ID NO: 113873 - DNA, 76 bp, Heterodera glycines
taatttttcatttttctgaaaatttaatgggtttcattaagctacaaaaagttattgcagaaataaattagaaatg

SEQ ID NO: 113874 - DNA, 425 bp, Heterodera glycines
ttcttttgcccaattggttggcctttcaatccggcacaacactggttactattcaaggcactgcctacacagtggccgacatggccaacttattggcattggccaatgtgccaaatttggcaaccatttaccaaaactcggcatcacaaattaacgcacagcaatacacacccgtaataattaaatgattttaatgggcggggcgaaaaaaattaaaatgaaaataaaacaaattttaatagtgaaaaattaattttaaacgaagcataaaattttactcgatttcctattgatataattatttaatcgatttattaaatgatttaattttagttggtttttgaaacttcaacacaaattcattaattaaactttcgctaaaatagaaattattttcaaaattcactctcgggtttctaaagatg

SEQ ID NO: 113875 - DNA, 524 bp, Heterodera glycines
tttggaaaagtttaaaaaaaaaattaagaaatttgagaaatctttgtaattttcaacaatattttgattaaattatggcattatgtcaacaaaatgtaatttttttctcatggttgagaatttttgaaatttatggcataaagtttttcttaaaaaattagcccaaaatcgcaaattttggccatttttggacaaaaagctgtaaacaaatcgaattaaacattacaaatgtttcccggtggcgcctattggcgccgccggatcaccccccctgtcccacaaaatttttgaagaagcgcgccgcaaaaaaagcgtttttaaagcagaaaaaaaattcaatttaagtatcaaaattattagttgcatagcctattccaaaaaacttttaagaagatattttcttgataagaagccccgaaaacccccgggttggtcttttcatgagagaaaaataattttgggtgggacccagattctccaatatacgaattcattgatacagttattcttttctttaagttatg

SEQ ID NO: 113876 - DNA, 505 bp, Heterodera glycines
atttatttacaattaaccgcaaatgatatttgtcgaaaaagtttgttttttgaagagtacgagttgggaaaatatgtatgatgagtcgggcagtacgagttggcctatacacgttgagtttttacccaattcaaactgttttgtatgcatttaaaactagctcagctatgttttatccagctaacgcgttcttgctgttacttcctcccctcccccttccttttccattctctcctcgccttatattgctctcgcccatctcgctctatttttgcacttcaaattgcccttcaagggtgcacttcattcaccattactacacgttttccaccattcatatcaaactttcgccatggattttccacagcatcattcatcagaatgtttgttattggcacaatgaattccatccttatttctgtatccaattgctttcatttgtaacctcaactctcttcccttcctattccatcgaagaaaacaaaagggaataattggatgcatg

SEQ ID NO: 113877 - DNA, 126 bp, Heterodera glycines
tttctaatttgggaatgaactcccttgggtttaaacttaacttattttggaaaatattgtaaacataaatttattttcagccttgaaaacactgtcacttttcataactcttttacaacaacaatg

SEQ ID NO: 113878 - DNA, 868 bp, Heterodera glycines
  unsure (1)..(868): unsure at all n locations
taataaanagtagtgaaaaataattctatagaaatacactctcctatatttaattaatcattcggaataaagtaagaagcataaattatttaataaaactaaatttcaacaaaataaataataacaaatgaaactattaaaataaattcataatttacataaaaaatttttcaattaaagcaatacgacctcaattcaatgattcaaaatgctcaaaaactccaacttttattaaattattaaaatacttctactttcaaatcaagactaaattaaggactgggaaggaattaagatttttagaagagaaaaaataaaattatttataataatggctttgaaaaatggaaaattaatgtactcaaataattgaattgaacaattggataagaatttttcaaattttatatataaaaatcttattgggtcttttaatagacaaaaaattttcttattagatagaacataaattgaaagaaaaaatgtaaaaagaaaacaaaaaacttttttttcaagaaagtgaaaaaaatttaaaatattgcttacaaaaaaattctatagattttaaattaagaaatagttaaaatatgaagtagtaaaatgaatcatatacataattttataataattaaatagaataaatcaatgtcttggacaatcatatgtcaccgataaactttttgcaacagactaaaaataaaaatattcattatatcgttaaaatctgaataggaaattaattttatgaaggagacgccctcaattaataataatttatataaaagaaatatataatgaaggaaaaaagaaattggtattaaaatcaaaaaaaatttaaataatatttttacagttgaaatcaaatatg

SEQ ID NO: 113879 - DNA, 397 bp, Heterodera glycines
tttttttttttttaattttctcgggggggaaacgatgcgggggggaactgattcgggggggaaacggcgggggggaaacggctgggggggaaacggcggggggggggaaacggcggggggggaaacgagccgccccggtttagattagaattacggtaaatttagggattcaaattcaaaacttttgagcttggcatttcgttgttaaatcttaatctttaattatcttaatgaattggatcggctgatatattcgatgtaacaatacaaaattaaggctaagaaaaaagataaagatttacgcaacagaaacaaattcacacattttcactttctattaagcaccagctctgagtttttatttaatttcccacaattttgaaattaaacaacaatg

SEQ ID NO: 113880 - DNA, 794 bp, Heterodera glycines
atatatttacatttaaaataaattattttagttaaaattattaattttttaaaatttgaaagttcctttgccaatttggccaatcgcgtggacgctctgaatttcattttgggccaattgcgcgaaagtgtccaattggtgggcggccgaggcgaagcgatggaggccaatctgagcacattcacagtgatcttcttcttttttgcttactctgatgaaaagcataaattaaatttgaaatataaaaaaattgagggaaaattgcataaatttttgggaatttctttcatttttattgaaattcctttaaatttttttagactgatttgcgcaccacattagatgcccaacacagtgatcaatggaaacgattggagacagatcgccaacagtctgagaaaaaatctaaaaatttaaattaaattaaatttaacgatgggaaaatgcggtgaaaggcatggaaatggagctggacaaaatgcgtgaacagcacacaaaggcaagcaaaagcacggattttaattacagtggttaaatgtaaccgtttctgttcgcctcctcttccaataattaattactaattaatccccctgatttctgattaattcctaattaatccctctgattttccttttcaacaaaatgtatttcttttaaacggtaacaatgaaatttgaatttatttcatttaaatgtcaaaatgctttattttctttctttctcctgtgttgggctaaaattgaaacagaaaagtgatcactgatcacagaattaatttaagagcacaaaaaatg

SEQ ID NO: 113881 - DNA, 276 bp, Heterodera glycines
  unsure (1)..(276): unsure at all n locations
tgttttgatttttacnncaataaatatatcanctgatcattatcatttttcntatgagctgacgtatttataaaggctgtgatcacttcanctcgagggtttaacagacntaaaaaatggtctgatcaattctttccttcgggttttaactgatcccccatattgaattgatcataaaaatagcagtgttttaatcatttacgtgaattaggactcctaattatatggtcgcaggcttaataaacccatttatttcagcataagctgaactcgatg

SEQ ID NO: 113882 - DNA, 576 bp, Heterodera glycines
ggtcgacgaggcattcacaacactcaaattcctgggtcatgcacccgcacggagtgtcttggtcagtttttttgaaaaatttaaatatcgaaaataatttgaaattacgataattaggaaattgaaaaaatttcgggaaatcaataaaaattcgaaaaaataatatttaaccaataaaattcccattcaacttaaaagttcctacattaaataccttatttaaatgaaaacagttttgaaaattcaccaaaatattatgatttaattttgaaaaaacatttcaatattaagaatgcaaaaaattttgatgcattaatttttagtttgaaaaaaaatgtgtttaataatatttttcaaaaaactgaaaaattcaaaccattttaattaagggttaattataatttaaaaattttaattcgaagaagaagtcaattttgggaaaattctcagaaatattaatttaaaaattccaattgaatttgaaaattatcattattttttaaaaataaataattaaggtatttactgttttaattaaatatttaatttaccaggttcgaggcagacaatttaatg

SEQ ID NO: 113883 - DNA, 100 bp, Heterodera glycines
ttttgcattttttttaaaatattttcttcaaaaaagttacaaaagcatacattctaaagcccgatggtctaatccgtgtgtttgaatttagcacaaaatg

SEQ ID NO: 113884 - DNA, 343 bp, Heterodera glycines
ttgcaaaaaaattaattaatattcgggaaaactgagaatgttttgcggattgacattggcaccaaaaaactctcacaaaaaagaaaattaaataaatgtaagaatcaacaaaaagcatttcttagaaaaaagagagcatcaaatccattttcaattggtgcgataagttcatttccaattgggattatttttcaaacccctcctagactgggggataattggatattgggggattaatggagatttggggataattagagcaaatacggtagtgagatttggccatgcctcaaatataattagtagggagtccaaaaatatggatataaaatcgcgaaatatg

SEQ ID NO: 113885 - DNA, 1003 bp, Heterodera glycines
gggacttgccgggaccagaaaagtcgggatcgggaccgggaccaagtttttcgaccaggaccgggaccgcgagaaaagccgggaccgggaccaccgggaattttcccaatagaaaattttttgaaaaaattttgaaaatagcattataagatggaaaaaacagttttgagaagaaacttcgtcgaaaaaagaatgatccaggctatttaacgcgataaagaaataaaaattccgatcaaatttgttttcccatataaatccaacaagaaattgttttattaattttggttttttgaggcaatatgtccggctgtatgttcggtacataattttatgagatttattataagattatacaacaatatttggtcatattttcccaatgtgacattttttcattttgtaatttttgacggtgtcgtaaatggcaaagattgacttgaatttgtaaatacctaacaccacttttcatgttcttatgagcaaatgtgatagcaaaatctagtctaattcgaactgaagctgaataatctccaaactgtatgttggaaaaggacatttaaatgatgtttgttatcattcctcttttccatgtcctttgtactattgattttgcccattctgctcattaagtctcttcccctcttttcccccaattcattctctttttggctctcctctggactcgcctaaatattgtgctccgctaaatattgaccccaaattattctccaaattctgctttttattttgttgttgttttaataaatatcttgtgttcaacaacatttgtttgtgaccctaaaagcacaacattggcgacgcccgaactcatcaattttcaagcaattctcgtgttgaattgctagttttgggaaatttaaaaatctcgtgctgatttttaaatttcgcggaatcatcaaaaaccaagatacctatgcggttgcggttccactatctgtggttttaattcgtcaacaatttcaaatcgtcaatcaagatg

SEQ ID NO: 113886 - DNA, 553 bp, Heterodera glycines
agtggatgaacaagaattggaaacagaccattggaatgtgatttcgaatttagacaattcttaaacccagtaattgtcgggaattttaacgggagaaagttcacgccgttatttgaacaaatgttggacttcgccacgggttcttacgcttaccaggcaaacccaacggaatcttctatcttatattgtacaccatttaagggatttcgcgactcaatcagtggcgagtctttgctcgtcggatggcttgggaattgggccgattataacggcgtccaaaatttccctacggcgctcactttgccgcgagtgctcaaattggccccgagcagaaactttcttttgacccctccccacccatccgtcgtccaactgagggtccttaaaaacgatttaattggcaattaaaacaatttttaaggaaaaagaattgaacatggacgacttccgaacatttaaaattacgcaattgccgaaaaacggtgccgtagaaattttcttcgaaatttactattggcgactgcaaatttacggttcgatagtgctagaaatg

SEQ ID NO: 113887 - DNA, 85 bp, Heterodera glycines
ttccacaaaaaatcaattaaaataataataataaattattatttttattattgttattgtacatatgtatatgtagaacaaaatg

SEQ ID NO: 113888 - DNA, 527 bp, Heterodera glycines
  unsure (1)..(527): unsure at all n locations
tttaattagcaatttatgccttgaaatgatttgctacnctatgtaaatgcgtcgtatttgtgcttcacaccgtcgccaatgtctttcccccgccctccctctcttctctgctcccttctccgatcactctttcttttactctcctcctccttttgttcaccgccgcttcagtcccggctaattcgtcttcgtccaattccccacccgtcgccgtttcgaaatgcgtcgccgtcgtccggccaaagtgcggcgccgttgctgcgttttgagcctttccgcgcctcggagccctaccgttgcggaatgttcgcggaacagacaaacccaagcggacccggcgatgcgcgtgttgcaacgggcacagaacgcactgatccgcacactgtcgcgcccatttccgcaccaaagttcgaaattggcacattaaactgaactgatcagatcgcattgaagagcattgatcagagcagttcattgttttccatctctgaacattttgctttttccagaacttctttctgacgatg

SEQ ID NO: 113889 - DNA, 121 bp, Heterodera glycines
attccatgatactgtatttattctactataccccctaaaatatttatatcgtgtttttatggattgaaaatttttaatttatgaaacggattcccaatttttagccaaaaatgtgctgatg

SEQ ID NO: 113890 - DNA, 618 bp, Heterodera glycines
acattaatttttataaaataaaaaaaggctctctattatattaagatggtcgctgatcaagaccgtgaaacgccaaccatttttattttaaactcttcaaatcactttgaagtgatacttgaaccaactcgaatttgaatgctaattataaaatcttatatcgatcacacaatcatgtatttgtaagagtaaactatgcttatgaatattatttctctcttaaaaatgtaatttggttgggaaatattaaatataaagctaaattataattagggccagcaaatataattaacatattaaaatagttatattattaattaattaaaatattattcggtactgaaatgacccgcctcttctgatcaccactcatttgcctttttgtcacttcgcccacatttgcctttttgtcacttcgcccacatttgcctttttgtcacttcgcccacatttgcctttttgtcacttcgcccacatttgcctttttgtcacttcgcccacatttgcctttttgtcacttcgactcaccacgaaaatgacctaattcatcagtgatcaaatgcattttatgaagaaaaacctctcaatttcggtaaataaatcagatgcataaaaatg

SEQ ID NO: 113891 - DNA, 427 bp, Heterodera glycines
gagaaagtgggataaaggacctgagagaacctctataagtagcgcccgtagctcagttggttagagcacggcacggattgctggggtcgtgggttcgagccccaccgggcgagttaccttttatgttctacaaatttcctaaaaaacgcaggttccttgatattttaacccaggttccggtctgtatgcacaaaaattctgaggaaaaaaattcgtaacactttaattttttgaaattgctttcctgcaaaagcaaaataattaatttggtaaacaaacccaaaaaagccttaaaacaatcacagataatagccaaaaattaattaccccagcagaaataattttttgctgctattgaaaactaaagtatcccttaattgtcccagccgtggctataaaaacaaaatttttctcagccctaattatg

SEQ ID NO: 113892 - DNA, 175 bp, Heterodera glycines
ttatgcgcgcgcgtgttaatacatttctttaaacatggccaaataatctgaatcggttttttgagtatttcagcaataactttaaaatttgtaatttaatagtcaatgatcgtacagtaccaaaaatgcttaaaatttgtttaaagaaataaaaaagttatgttacaaaaaaatg

SEQ ID NO: 113893 - DNA, 660 bp, Heterodera glycines
tgcccgacagaattagaagcattagctgtgagattcggcgtcaaaaaatctttcacaatcacatcaacaatggattcccaccaaagttctaaccgatcataaagcgttggttccgacgtttaaaagcaaaagtgaaaccggaaacgcacgtgtcgataaacggataacggaattcgagtgcacgatttatcttcggaaattcgagtatcaacccaggaaaggcaaacataattcgcggatcgtgctttcacgttctcggcgcactcgaagccacgtgaattcggcggagaaaatttttagagttgagcaagtcgatcggaaatataagtgcttctcgtgccaaaaatcggaaatcgattgagtgggtcaacgcaattaaggaaagtgagctcggaaacctttaccaattcctcggaaaaaaggaaattgcctgaagataagcgggaatgtcagcgactttttgacaccattcataaattcacactgattgagggattactgtatttccatgattcgaattacggtaatcttcgacttttcgtgccacaaaaattccgcaataaactgatcgaagaaaggcacgaaggcaaatgtgcgggacatttaagcggcaaaaagattttcgggcaattagcagaaagatatttttggccaaacatg

SEQ ID NO: 113894 - DNA, 122 bp, Heterodera glycines
actaaaacaatgaaacagaagacaacaatgaaggcatttttcaatcaattacagcttccccacgtgtaaattaaaaaaattttttttttttacataaacataagaattttcaggaaaaaatg

SEQ ID NO: 113895 - DNA, 209 bp, Heterodera glycines
tctgaaatttttttttttcaagaatgtttgaattccgggttaggggtccggaaattcgtcaaatagagttcatattcatgatcagcggccccgaaaacccctggaaacactttttatcattaaaagcaaaaaattttatgtgggtcaaactgtataattacccatgaatgtactttattaattagaaatttaattatatacagtatatg

SEQ ID NO: 113896 - DNA, 1003 bp, Heterodera glycines
gttttgaaatttcaattttaaaagaaactatttggattaactcaggtaaattctcgattttttatggggttcaatttatagttaattttttttttcgtttaggctaataatttctgatttccaatatttcaaacattatttttgggcatttaaattactaaatattaaaattttaaaatctttagtttaacctttgtgaatattattttgaaatttaaacataccatgctaattttgaacttcttgtacatccaaatcacaatttttatattcgttcactataatttaattatttataatttttaaatcatatttgggaaatttgttcttttacacttgaatttaatgggtgaaatttgaaattgataaaatatttctacgtatttatgtaacttataattccgaattatatttaagcaatcaaaaaaattgaaaaaaaatttgttggaatttcataaatatatttttaagcaattgcgtcatttccgcacactatacgaatattattattctttttttgcccattgtctgaaaaatattttcattttcgcacattgcctcaggcaatatttgtccaaaactttccttaaaaaattaatcgtctcaaaatttggcaaatattttcacagatttttaattaaaaatttttccaggctatcattttgcactataaaaagcattcggccacaacacacaaccgcttattatttcagtgaaaaaataaaacattttttcccattgcccatcagttattatcgggaaaacaaacgaaaaagagatacggtaatgggaaatcataaacaagaaaaatatttattattttatcagaaaagatagccattttttgttgtcaaataaccacaaataatttaaaaatgcttaattttatgggtaggctaaataaaatgccaaaaaagttaaccttaaaatttttcaattaataaattttttaaatgagtaacaatgccaatttaaatttgtcgtatttcagtattacgaaatg

SEQ ID NO: 113897 - DNA, 568 bp, Heterodera glycines
atccaacaactgtctggggtaatccgttgacaaataaaacccaaggtattataaaaggcttgttttctacaagtcacaaaaattatggattccataaaataaaaagttttggccaaattcttgaagccagaaccgagtttggcatttttggcacctgaaattcggattttggtaccaaaaaactgacccggcaattcaacgctggcaatttctgccagcattttccaaccataatctcagctcacagaggacaacactttggttaattccggcaaaaacagaaaatggcaaaatatgactgaaaaatgccaacatgaatttaaacttactcaattttcatttcatttccttacggaaatgaaatgaaattgataaaaaaattcacgtgaatttattttgtttttatgtttttcatattataataaagaacggaagttgaattagtctgatgtaatttcaacaaatttctgtatgaattttgcatataaatttggcaaattttctcaaataaattcattaaatattttaatttatatatttttttaatttttagtgtttgaaaaaaatg

SEQ ID NO: 113898 - DNA, 303 bp, Heterodera glycines
tagttttatctattagctgaaaatacatatttatatttttagtattttaatttttttttcttttttttaatattttgttatttaaccttttggaaaccgtctaagtttttcatttcaaagttttcgcatttcaatttttggattaaaaaggtgactgatgacttttttattaatacccatttttatggatagttaatatttcttcatccatagagcctgttcattttttggcattttgccgacccttacaataaaaatatctgtttataaaagacacaaacggccgaacattttggtaccatg

SEQ ID NO: 113899 - DNA, 198 bp, Heterodera glycines
aaatgtttgaagtcggctgcctttttctggattgtcattttatgttaactcatcttttgttgagttaggaatattttacttccaagtaaattgtctcgacatttgccataacattaattatttggtaggatgagctctttaaatattttttttcaattctcaatttatcgtttattttattgaaacggttttattatg

SEQ ID NO: 113900 - DNA, 614 bp, Heterodera glycines
ttttggcgccgcgaactttaaagtgttataacttttttcttatccaaccaaataaaataattttgataccattaaatagacctaagtgttctttattagcttgtaaaatattagaaaaaataaattctgtttgacaaaagatatagcgtgcggcgccaaaatggccagaaaaagtcagttttttgaggttttttggccataacttttttgtgtttcaattaaattttttgaaattttgcaggctattagggactatcaagcgctttaaaatgatatcaagcttatttaatttgaatgagaaataaaaatgttatagcgtttggcgccaaaatggctggcgccaaagtggccggttcccggagacagacgcttattatgtcagtaaaggacaaatgaagaatgattgtttctgcgcttaaatcgtcccttttatacaaacattttcctacccgtcaattccgtgtaaaaattctctataaaaagggatgaaatttgcgagatccactcattcttcgcatttgcgacttttactctctgctgaacaatttcttctctcgacgacactttgcgcattcaatccgagcacacttcttcacccattggctggtcccatg

SEQ ID NO: 113901 - DNA, 848 bp, Heterodera glycines
  unsure (1)..(848): unsure at all n locations
acgcgggcgtgcgcggcctgtcgcagcagccgcgcctgtaaanagcggtgttgaaagcaaaaaaggtcattgatttacattaatttacatggccggagaccccttcgcaaaattggaaaattggccgctgatcccttgttttgcaataatctgaattttgagctctacatctgaattttagtgttctttatcctgaatttgaaaaaaaaacttggtcaccctcaatatacatatacttctgaacaattctaatgctaaaaacaggcactcgcgcgaaaactgaataaaaattttgtatttgaaaaatttccaaaaatttttacgttggaaaattaccggtttttaccggtaccggtaccggtggaaaaagttggtaccggtaccggtttttgcattaccggtcagtaccggtactggtttttttacaattaccgattaccgctcaactctagtcgaattgatttatttggggtaaagtaaaactccccgaaatctcatcatttgcaaaatattctcctatttggtggtcctcttatgtgcgttccctttttcttccgatccgtcgtcattttatgtcaaaatgtttccgcgccttccgtttttggcaatgatttttcgcctcctattggcacttgtccaacccctcgagcccattggcaacagttgaagctgaactggttcaaaattgttttaataaaatgcgattctcgtgtttttctcatcaagtattatccgtaaaaaataggaaaaccctaaaaatccaggctttatccaacgcaattatttttctgctatttgtgtgacatcattcgaaattcaacagcaaattgtgctaattgccaaaaatg

SEQ ID NO: 113902 - DNA, 76 bp, Heterodera glycines
ttctctccctcatcaaaagcattccgaattcgccgaactgctcaagagtctcatctgtccccaagtgatcaaaatg

SEQ ID NO: 113903 - DNA, 338 bp, Heterodera glycines
ggggcggcggcacatgaaatatgtcatttaacgccatcaaaaattgagcgcaaacatttaattaaaaaatgtcgtaaaaataggagacaaaaagtaaacaaaaatttgtgggccaggctgatttattgtttgttttgatttcaatttaattaatttttttcgattgagagcaaataaaaatctttaaatgattagttttttttcaaatttgagagcaaacaaataattcttttattttaagtgattaattaattacctcatattcgcttcaacaacttctcattttatcaaagcgcaaattggctaattaacaaaaaaaaatttataacataataatg

SEQ ID NO: 113904 - DNA, 396 bp, Heterodera glycines
aaccgagatggcacaccacgatataaggacgatctcattttgaagaatttatacttgttgatcaaatgacaaactctttctttgtaattttgccgagcaatacgccaggctttgttggaaataaaacaaacaaattcaaagtgcacttgccaaagaagttggtgttcgatggggccgggtggatggttggcctgtcaggcataatttacccaaacaggtgggcgaaaatcatggctattgggttcgatttttgacttaagttgggcaaagctgggtacatcagaccgacaatatgtgattgttcacctgcacgacggccgaaaataccgtttccgtgtgccaaagggaagttttctctcgccacagcagcttgagaggggaattcatcatggcatg

SEQ ID NO: 113905 - DNA, 153 bp, Heterodera glycines
cgctaaaattatcagagtgcggaaaatcgcatgtgatctaaccctagcaaaaaaatgtggtaagtaaaaaatcgtaattacgctcaaaaagcttctcaaacaattttagcgcatccaattccttctacaatcgcctttatacatcccattatg

SEQ ID NO: 113906 - DNA, 727 bp, Heterodera glycines
cgtatgtttgctgtaaagttgtcctaaaaatcgttttgaaaaaataatttccttaattttcaaacgttaaaattttattttaataaaaaatttaaaaaaagtaaaaatttattttgtgaaataacaaagtttttaaaaaagtcaaatattttattaaaaaacagcctgagaacatcacctttttaaaatatattctaaatttaaaattattttttctgaaaaatattgtaaaataaaatttttaaaaatattatttttaataatctaaaattttttgtaaaagccaattaaaacttttaaaaaaaactattaattttgctttttttaacaaactttttgtgaaaaataattattagggttgtaaattaagatattatattttctgatttctaagtgctctgaataggtgtttgtgaatggttcttttatttacatatttttaaatatttcccactttttttacatattttttaaataaaaaattcaaaaaatatttttttaaatgtcaccttgttatcaaaaattaaattaaagtattaaaacattattctaggcctaataagttcatttttatggcattttggtcttattcattcttttcaaagattttttgtgaaaaaaaatattataaaaaatttgtattttgagatttctttttcatacaattccagctttaataattataattaaaaaggaataattaattcaaattcatttgaaggtgatg

SEQ ID NO: 113907 - DNA, 85 bp, Heterodera glycines
  unsure (1)..(85): unsure at all n locations
taatgcccgtaaaaatttgatgagcgactcctcnttccctctcgtgagaagtgcgccaaaacattccaccattaacacccgaatg

SEQ ID NO: 113908 - DNA, 91 bp, Heterodera glycines
aggaaatcgacgaattcgacttaaaatgggtataattggctttgcaacggtgcccaaatggggaagcggcgatggtgccagcaattaaatg

SEQ ID NO: 113909 - DNA, 89 bp, Heterodera glycines
tattggaggccttgtaacttttgaactaggcggaatgcaccgctaaaattaaaaattcacactagaagtcgaccctgctctatccaatg

SEQ ID NO: 113910 - DNA, 129 bp, Heterodera glycines
aaagattaactgatttacgccaaaatgccaacaaaattatcattttttattatttaataccaaaagtttaaaataaataaataaaattaatttttaaataaatatttataacagtttatttcaaaaatg

SEQ ID NO: 113911 - DNA, 192 bp, Heterodera glycines
attattaggcgctagaaaaattccagattatactaatattccaaatagtgtaaccccacccgtgattcgtattcagcaagttcacccattaaggatgtcggcgccggaattggtcgttactatgccgtcaattttccattgagagacggaattgacgatgaaacttacgagcgcatttttgcgcctgtcatg

SEQ ID NO: 113912 - DNA, 307 bp, Heterodera glycines
aaacatttttaattgttatttcaaaaaatggaatattaatatggttgagattttttatcttttttcttgagcattttcggtagaagcattttcttcatccaatttgaacttagaaatttaaaagtatgctaaaaatacatattttgggatttgggacataaatcctatttttggactttttcataagttttactaatttcccaatatttcaaaaaaccgtcgcttcataaaaataattagctcgcaaatttaaaaattttagagattaaaatttatttcttattttttacaggctgcaaaattgatg

SEQ ID NO: 113913 - DNA, 690 bp, Heterodera glycines
attgtaaaaattggattggtcggaaccggggatttcgtcaaaaccgagacgggacctgggaagaccgggagacttcctggctcggtcaggtcccatcaactttaatattaaaaaaaaataataatttcaatgctttttgctaatttttatataaaattatttttgaaaatttaatagatgaagctcaactccattaaaccgtccttcaattgttccgtttgcagtcgaccgtgccaacatagcaagtatggcgtcaaatcttgtgaaagtaaacaatttttaaagaatggaatgaaaaaataataaattaaaaaacgctgaaaggaataaaattgtttgatgattaataataaatcggaaattaacataattattgaaaaataaatttacttaatacatttattagttttgacattataaaattatcaaaggtaatttgcttttttgtcgtattttttgaaaaaaaaaaaaaattttcaaacaaccaattattgatcctaatgaacaaaaagaccgtgttttcttaattttaatgctgattaggctatcagagtttgaaaaaattcaactttgagtccgattttggacataggcgcaaatgtcggggctccctacagatgaccttttttgcttttgaaaccactttttggagtgccttcttttcaaaaaaaacttttggggaagagcatg

SEQ ID NO: 113914 - DNA, 545 bp, Heterodera glycines
atcactcatatcagtctgaacatttaagttgagcaaaccgtacatcgcaagaaaaagcgaagggatcgaaacagcggagaaaggcagcggaatgaccgtaagtacgccctcgtgatatactgtaccaatataaaaataaatgtaaaaaatgccgaaataccgaaataccgtaacccgggcaaccaaaaaagcaaaaatataacagtaattaattccctcatgagcagaacagaggagaaaaaatgttggacggaatttcgatgcaaaagcctctgaaggcgccgctgtccaggagaataacgcccgattttttgcgtgctgtggtgcaagacgggtgcgagctgacgcgttgccaattgatttggtaattcggcacaatgccaaacgatgggaaaagcctttctacttttgaacaaattcacaagaaacaaataataaatgggctaaatttgtaaagaaatcccggggaatgctttttccgcgttttaattgtgaaaagtcagttcgcttttcttcagttatcgcgtcaaattcgatgcaaaatg

SEQ ID NO: 113915 - DNA, 321 bp, Heterodera glycines
gaagagaaatattgtgtggaaaacattgaaagggacgaaaaagttttaatggaacgaattcgcgacgcgaaagattgggcactgactaatgggctgacttttccgatgccaagaaggaaactgaaatgtgacgcatgtgacaaaatcaatgaggtggatatatataaatacggcacaaatcccttaaaacttggcaaatgccataggccattaattagggtaattgttaccatgggctcgagttatattaaattcaattttttgatttaaatgccaaaagtggtcaattcctttgcttagaatgttgttttggacgacatg

SEQ ID NO: 113916 - DNA, 244 bp, Heterodera glycines
tagcaatttgcgaatggccctcaagtatataatagaccggagagcgggccgccccaccattaaaccacctggagcgaacctattggaagagcggcttaggaaggacccaattttgtattcatggacggccccaccaaagagaccgtcacagagcaaaaccacccggacggaacggacaatcaagaaggaatttcgcccgaaaaaatggagctgatcaacaccactcttgacaaaatgtacaatg

SEQ ID NO: 113917 - DNA, 202 bp, Heterodera glycines
agaaaaaagttattcattttaaattatttgagcacttctccatttatgattatcccttttatgacaacgttcttaaggtgaaaacaaaataataatgaaaaaaataaaataaaaatcattgaaaataagcatttattatttcatttgtttcaaatctcttaaaattttgattagaaaagaaaaaattttctcgttcagtatg

SEQ ID NO: 113918 - DNA, 260 bp, Heterodera glycines
aaaatatgtttattatttacgaatgagctccagtagaaagtaataaaatttatttaatcattaatttaccaattggcaattattttgtcattaagataaaattattattattatttctttgaaattaaacaggatttccttattttattaagtaaaataatgatttattcagttttctaataagaaaaaaaatcatttaaatgcctcaaaaaatgaattgccatttaattgaagaaaaataaaataaaatattgaaaatg

SEQ ID NO: 113919 - DNA, 93 bp, Heterodera glycines
actgaagaggacagacagacagcgtaaaagaaaggaagagaaagcggacgaagcgaagaggggaataatcccatggcaaaaggcaaaataatg

SEQ ID NO: 113920 - DNA, 393 bp, Heterodera glycines
tctagagtcaaaaaataaaaattggaatatttttttattaattaaaatttaattacatcaaaatgatcaagaaaatatgcaaaatattgtatcccagctgggaattgaacccaagcgaaaaataatgaaaggcagaaagtttagccaatagaccacattccttctcttttctcacccagaccctccctttcttaccagtgcttatttagtcccgcaggacggactggcaaaaccggggccggaatttcaatttttccaaaaacctggaccgggacttacaaaaaccgggaattcccgtccaagtcccgtgcaactctaaataaacacaaacatgacattttaaaatgatcattagaattaatatttatttaggtattgtagaataaattaatg

SEQ ID NO: 113921 - DNA, 362 bp, Heterodera glycines
tgctgttgtgtcccgatttgctctttctgggcactgtacaaatcaatgttggttttatacgatgatattggtttatcaaaaatgaagttacagagttacactgtctttgggcttttgaaaacattgacaaaaacgttgggttccatagtcgaaattaattaattaccgcggataatttgggactaagtttttgtttctatatactaacagctttcgaatgttccagaaatgtaggcttttttccaacatgaaaaacttttaaaagatgtttagttttgagccggacgcataaaatatatcccaataatagagccataccccaatactccaatactagagccatttctatctttttatagatg

SEQ ID NO: 113922 - DNA, 277 bp, Heterodera glycines
ttcactgctgtccaattaaaaaggagactattaaaaacgtatggaataaattggctttgtcacagaagtacagtaaggcggaagataaaaagtaattatcagtcactttctaagtcacctatcccgtggccctgtggcataatggataaggcgttagacttcgaatcaaaagattgcaggttcgagtcctgccagggtcgaaaaatttttttctatagtaattaaaaaataaaatttttctttttggttattaaaatcgagagaaaaatgaaacatg

SEQ ID NO: 113923 - DNA, 740 bp, Heterodera glycines
  unsure (1)..(740): unsure at all n locations
ttttttttgaacccaattactaaatttgncgctaaatgcacatttacgcgatagtgacaaagctgtcaccnatgagggcgcttaaatttttataagttntataatatattcatntaattacaatgtttaaaagaatctgtggaacgaatatgcgcggatcaaagggtggaggaatttggcgaaacggaaacattttttaaagtatcaatttcgtgaatgaactttttgctgtgcttcgcgctactttaaatacacaaattagtctgccctctgccgcgctctttgccgcgcggacttttactcataaaaaatgctttttttggtaaacaggcgggcccggggatccttccaagaccataaaaaatttttggacgaaattttgtgcgcaaaagacagatcaacgaacgatcataaaaatttaagccggcccaatttagcctgataatagaagggcacaaatctgatgtttgattcgtcgaattaaaaatatatttagaaagcctaaatttggattttctttaaatttcaaaaattttaatctttgaacccaataaaaaaagtaaatttctaaatttaattttagttagatcaaattggtctttgatcatttatgaaagagcatttaaaatggtatttaaggatgtctttttcctcaaataaatgcacaaaagaattaataaatatattctaaatttccttacttcacccttaaaatttaatttgctcttattttaatgatg

SEQ ID NO: 113924 - DNA, 221 bp, Heterodera glycines
ggtgggcatttattgcaatttatgccattgatcggaccaaaacttcaattaggggacgaatgggtggagaaagaaacaaattgtcattgttagacaattcaatggtcgtttagttaaatgccttcaaactgaacaactcgcccgaattcgcgttgcattcgcgctttgaccttcagacgggcgccgggttggaaaatgcgctctttccgcacttgcaaatg

SEQ ID NO: 113925 - DNA, 189 bp, Heterodera glycines
aagaggttttgctcactggataagaaagcaaattttgcacagggggaggaggagtaaatcaattcggccgcgtcagaggattttgccaacgcttaacctgtggattgagataatggcgtttaaatttgggctgaaaagctcaaacaaagcattattttattaataaaaattgaaaaacgaatgcaaatg

SEQ ID NO: 113926 - DNA, 543 bp, Heterodera glycines
aagttcagattagcactcacctccctttaaaaccgcttaaagttagttttgagccgaaaataaaaaataaatccgggaccacaattctttaccattgccaagcaaatcatgtcacctaccgcaagagaaggtcttttctttggcattcctccgagtgttggcgaattagaaaccaaaaggaagcgggtactaatgcactttaccagacataatttttttgttgttgtcttaattcatgtaaaatagcttccaggagttttcagcatcgctgaagagcgtatttaaaagaaagcctagtccgaaccaaaaagtttccttttctttaaaattgtatgcgagcattgagtttgttgatttttcactattgcatctttttgaaccatatttgactaggatttttaaaattttcgatgttcgatcataagttcgatttcgggttctggagtacgaaattagttgaaatgaacgccagattcttaatcagcgatgctgaaaactcccggaagctattttatatgaattgacaaaaaaaaaaattttatg

SEQ ID NO: 113927 - DNA, 54 bp, Heterodera glycines
gcattgggactgtacggggcgacggtgctcagcggctattttttggtgcccatg

SEQ ID NO: 113928 - DNA, 609 bp, Heterodera glycines
agagaagtagcgagagagagagaggagataaaggagaagagaaatgatattggaaagaaaataaattaaatcgttagatttatcaaaataatttcttttcagaataaaacagagcggttggtgcctgcgaaagcggcgcccccccaagcgctcgtttataatacttacatacatcagtaaattttttgaatttttctattattttggcgttaaaatttattttataaatttaaattttaaattgataaatcaaaatcatcatttttaaagcccctgttaatgaggaaaattcaagttaaaagcaagctttgttatggcctggatccgggcctggtctggattcttcaaatttgttttaaaaatcaaataatttgaaaaaacaaatactaataatggcttatgaaaatctaaacagattttgaccaaaaaagaatcatgcagtgcgccaggaagatttcggaaaacattaaaatgaccaatttccttaaaaattccgaaaagtaaacttttaaggtggaataagaatactattagaaaataaatatacttcttaattaaccattttttaattcattaattttagaaagaaaaaataaactagttaaaatg

SEQ ID NO: 113929 - DNA, 491 bp, Heterodera glycines
tatttcgcgattttatatccatatttttggatgccctatttatgatgggtgcaggaatgagaataagaggaaaactatagagagatgaaaaaagaagcaagagaggggacagaatgaagaaattctgagaagaaattagagaaccgtgagagagagacagaggtgagaggacgtgagagagagaagggaaagagaaggaaagagagagataaagagcagagagagagagaagagagagggcagagaaagcgaagagagagaaagcagagagataaagagataaaaagagaaagcagagagagagaagagagagtaaaagagaaagtgagaaaaaattagagtcgtgagagagagagagagagagaggtgagaggacgtgagagagagagaagagagaggacagagaaagcgaagagagagaaagaaaataaatttaaattttcttaaaaattaataaattttagcttttatgttttttttcttttaaaatg

SEQ ID NO: 113930 - DNA, 58 bp, Heterodera glycines
gaggtttccgtcctctctgagctcgccttaggacaccttcgttacgctttgacagatg

SEQ ID NO: 113931 - DNA, 1003 bp, Heterodera glycines
  unsure (1)..(1003): unsure at all n locations
gaattttcggggactgggaaacgatccgctccggggtcagtggcaggtgaccattggtcatcaatgcatcctatggctgctcaattgtaaagtgtattattttttacagattgttgcacaagaagaggaggaccaaactgttggtgaagtttctcctataacggtcggttgttttccattaaaattaataattgttggtcactaatttttatgggcccgctttcccgtcgcaaaagcaaaaaaataaaaggtcctcaaactcgaagttgagaccacttactaattgacctcccatgacattctttcgtaaacggtctgacagacagactgcatatgaatgcgttaatcgttatgagaaaaacaaatttgtccccatttttggtctttccattggaattgatgaccactggtcattggttaatccgatgcacttagtacgaatctggcctttagcaaactcaatttcgaacccgaacccggattcaaacattttttgaaaatttaaaattctcattttttataaatattgcttgttgaatgcagcctatgtctttttccgtttttatatctgaatcccttggttttttcttcatctttattgtacaattcggtcaattccttggtaatagtatcggtggtagcaaatttccaaattgttttctcgagtgttggaatcagggttcggggtttgatattgagcctaaagaaggtcagattcttaataagcgcctcggattacccctgaaaataattttctaaaaacttatttaaatttttttcgggaccaataatctctatcacttgcgtaatcgtttatgagaaaaaaattgtccccgtttttctttccattgggaattgatttttgcatttgttccatttgctcttttccaacccgcagaaggngaggagacccattcaccatctctgctgctatagccaccatttacccaaaccaaagctaaaattattcccattttcgtataattgttaccctgaagccatg

SEQ ID NO: 113932 - DNA, 1003 bp, Heterodera glycines
tcagttaacaaattgattatactcctctgatcaattgatcaatgaggcaaatgcgcaatcagaaaaagaagtgggaatcgaaagaatttttgttattaaaatttaattgtgccgaaagcaccgcaggaaaatacttaactgaagaaaagataatcacgaaattggacttcaaattcgtaaacaaattaagtttttgataaaaaaaacgaaaaagcaaataaaatatgcgaaaagtgatgcaaatttaattaataattaatttattacacttttaaaattcaagcgttaagcatttatttgctgcctttcaatcaccccaatttcaaaaaactttgtgtttgtaatagtttttgggctgcaatctttgcgaacttttgccgttttttatttcgttttatccgatcagtcatcacacaattgacacttttatggtgacatttcgtgttttattaatccatttaaatgattactaatggccattttgcacctttctgctgcttactaatgcattttggtgaacaaagtcttttggggggaggccaaaacagcgcttaaaaagggcacaaattgcagcgtcaaccaatcaaaatcaaagaaattagtccaaaattgtccccaaacattttacttgacggaaattggtaaaaccccgcaaaattatgcaactctccgcaaatgcgaagctttcgacgacgtcgctttttgctgtgattttttgtttggtatattaatttgaaaaaaaacatttgtcggcttttcgttttttgtttaggcatcacttgccgtctgttttgaatggaagccgccggatgtaaaatggggggggggggggaggaagggaggaagggagttgataaaactcacaaaaatgcatgtccccgtttttcgtccattttccacgcattttaagcttggcttattaagtttccttctaaacaattcggctaattaactattaattgtttattattttttaattaggcgtgtaatcatcccaaagatg

SEQ ID NO: 113933 - DNA, 320 bp, Heterodera glycines
aaaagtcaatgatttttaaaatttgagttcatattcgtgaccagcgtattttttaaccccaaattcattgctaaacttttttaaaaaaataaatttaaaaaaatcaattatgtagttgacaaaaaatcttagataaaaatcgatgattttcaaaatctgagctcagattcgtgatcagcgccttttttaagcctagaaaaaatacctagaaaatttttaacatttttcgtcgggacaccaattctagaccattgcctcagattcgttatcagcgaccctgaaaatccccgtaaacatgtttccatgactttttagacatg

SEQ ID NO: 113934 - DNA, 601 bp, Heterodera glycines
  unsure (1)..(601): unsure at all n locations
tagtttaaatattttttggactgagcgcgcaagcaatgaatgtgggtagaattttcgcgaatgaatgggagaaatgcacttttaggtggaaatggacggctatttatactctntaaagtgggcggggctaaggtaaaaatggtctttggcaggttgccaactaaattgttcatgctatgccacactacactaaaatgagtcgccttctgatcaacattttatgccatccacggtcagtcattagcggttaaatgaccaccagcgggcgctcagatagcctctgcggcgcttaggtgacacgtgcgagcgctcaaaaaaataacgaaaaattaaagtttccgcgccaaattcaaaattttgaccccggttattatttggtaagacttggactcagcccacccgaaaaaatgacatgaatttgttataaaactgtttaatattgaatattattcacaaaaatgtatgaaaaagtggcgatatatagtgaaaatttttttatcaacatttgaaatttttcaaaaaacgtcatttttgagtgaatttatcaagaaatatgctgttacacatctatttaatactgtatttttagcaataatggatg

SEQ ID NO: 113935 - DNA, 360 bp, Heterodera glycines
gcgagcgaaaggaatgacctactaaaaaaaaggcaaattgcgggaggcgggatgcaatggcataaatatataatatttatagattaaaaatatttcaaatgtgtcattgaaattagcacacattgaccggcattaaattgtatgtaattttaacccttgccttttgtgtgccccatcggatgtaacaattactatttttccgcccttattatgctatccaaatttttttaataaattaaatttcctacgaaaaatggcttcgcttgtacactaaatacataattttccaaaaatctttcatacaaattttttaatttttggtattttaatttttattgtatttttatttcagcaaaaatg

SEQ ID NO: 113936 - DNA, 1003 bp, Heterodera glycines
ataagagaaatgaaatacaatctgccaagggagtacctgatagtggatcatgaatgtactgtaacttattggtcaagaagaaacgtgatgtatcaaaataaagttttttgccccccggtggaaaaatgtgattcaataaaaattttgagttgggacatggttttaaatccagaatgctggacgaaatggacagaattattaattggtgtaataatgttatttatgttaattattatttcttgtatttattggtgtgtaaaatcaatttatgctattttgaaatttgctgggtcatgtttatgctttccattcaagataatgagaaaattttgtttaaataaaaattttaaaactgaatcggaaatgagtctactcgcatcaaatgaggaggataacgagaccaagaccaaagagtggataaaaaaaagagaaaccggcggttaaaaaggttgagtctaagtacaaaaatgggttctacaatgttatttatgttaataattatcataatatcgattaaaaatgttaatgctggggctgaagtagcagtaattcaagcatcatctgaagattgtattaaaaactctaatggcactttgtgtcgggttaggggagcagcagaaatgacaatcctaccagcgggccaagagatatcattagcattgaaaaatgataaggctcaagtaaaaggttcaattaaagtcagactaaaatcattaacattaaaatgtgtccaagagacagttgcttggctaagggaatataaaataaaagttaaatcagcaagaagatgccctacgatggggtcgtgcaaaaaagggagatgcgcaaacatccgactaagtgaaaaactaagagaattaaaaaattattggaattatcctggtaatacttattgtatggagggagagtcaatttggggttcaaaatgtgctttaccatcactgggtataaatgaatgcttcttttataaaataattgcgataccaagtacaaatacagtatg

SEQ ID NO: 113937 - DNA, 935 bp, Heterodera glycines
  unsure (1)..(935): unsure at all n locations
tcaccaaattccaccttcctttcttacttcccctgtcgggggctagggggagggggggggggggggggagagggttgactgtgacttgactgacgggctctgctgctgtgctgctctgaacatggtgtggatgtgatggaatggggttgggggcggttggggtagtccnccttctcccgtcttcccccattgactgtccttccctctcctcttccttccctttcctccctgtccgccattcaaaatcattaatcgcttagggctctgctgctgggtccctcccttcccctccctcccctccctcttctctccctgtgctttctcctcccttccattccattccctcatcaccaatgggatgatgatgataaaacaaaaagatagttgttggattgttttgtacatatatgtatgtgtgtagagttaggttgtggtgtggtggagtggtgtggatagggaggaggaggcaaaaaaataacacacatttagaaaattttcttcactttgattgtgactgactgactgcttgcatcatttgtctttctcgaccaccattcgaccgacccctccttttccctccccttttctccccttttctttgctccctgtctgctcccccttttccatcactcccaatgtattagcaatgcttgtctttttaagtgaaaaaatcatttttttcgattcattgctttgcttacattacacgaccattcagtgccagccaacaccattgccaccactcattctcattcattttttccacttcgatttttaatttgacaatttttttaatgcgcttttctgattgctttgtgtttaatatgttttttaatgctatttgctatttcattttgaatttcattcctttcatttttagtttttgtttgattttacgcaacattaattcatcccaagttgtgcgaacgaaaatg

SEQ ID NO: 113938 - DNA, 135 bp, Heterodera glycines
ggttcgtttttcagaaacaccacaatcccttggttttttcataattttcgttacggccctgcgtcattaaagcaaaaattaatttagagcaaattttttcatttctatgaatttaagatcgacacactttgcatg

SEQ ID NO: 113939 - DNA, 1003 bp, Heterodera glycines
ttatagggcccggattggctacacctcttttgagattatcccattccgagactcagtgagaatgccaccttacggagcctcgacatttgcggccccgacatttgcacctatgtccaaaatcggattcgaagtaaaattttttcaagccctgatagccgaaatagcattaaatttaaaacacattaccttctagtttattaggaacattaattcatgatcaaatgatcggatactgtggaatctgccattcgtaattttaaaccatttttgtttttcgcctttttgtcccatcccaggccttctggccgtccatcatcctattcatccaaaatttccttccttttccaattacctatttttatgacatttccccaatctctcttggattcccttcactcacatctcactcacaatttgctatgtaatatccttctgttcgcccctcccaatttgtggcactatttaagcctttgcttctctcattcagcacctttttttccccacacattcccaacttcagacaaatcctaaaagcgatctttttcaactgttaattaatttctttgcatttaatcacatttaacctttcgttttacctttgctttctgacttaaataaactcttttccaaaaacccttggtcaaaggaaaaagggttaagaaccgggaagtccaagtggtttggacacaacaactttttggtgccacgacccgggacccctaaaaaggaatttaggggaagcaaaggccaagagccgaaaaaaggctaagtgccggaaattttgagctggtaagagctgtgtgcttccagccgggctaagtgccaacaaacgagtgaatttgagctggtcaagctgcgtgcttccagccgggctgagtgccaataaaaacaacaggaaaagagctggtaaaagtgtgtctttccagccgggctgtgtgccgtacttttgaaaaaaaagtaaattacgctgtgtgcgcataaaaagtaaaagagagagaaaatg

SEQ ID NO: 113940 - DNA, 1003 bp, Heterodera glycines
gacatttatttccattttatatttttcatttttttccttttaaatttttccattttaaattttacattttacattttttccattttatatattttttattttactaggctgccattgtttgtgttcttctgcttggcgagtgctgattcattcttccgttcattcattcgttcttcccccccccccccactccgcctctgttttctccaatcattgcgcaattggccctcattttgatgggattttgggacaataaaaattttaatggaattgaaaaacgtaaaaatgaaattaaaaacctgtttttcccctccaatttcccattcagtgtgtttttaatacctcaacaatcttttcagtctccgccacaatcacctcaaacaattgtgaaaataaaacaaaatttggttaatttggccaattgtctgttttactttgtccaaattgttggccaaatgatgagaaaaggcggggaacaatccttttaaatacaacgaaacatttaaatttttaaataaaataattttggcatttatttaaatcagacatttggggcggagtcgttatttaaaaaaccatcaatattatttgatgaaaatttatttatatcttagctcaaaaccaaccaaatttttaattcttatatcattcgaaagccctaaccgttctctatcagtctacaaaatttcaaaaaatttcgttaagtttcaaaaaagttagggccaaagatgctcgaaaaacaaggtttttttgagttcctctagccaaaacttttttgaaacctaacaaatctttttgaaattttgtatactgaatagagaacacttagggctatcgaatgatatcaagaattaaaaatttggttgcttttgagctaagttataaataatttttcatcaaatcatattgatggatttttaaataacgacataacaccagccatttccccattttaatttcaattctaattttatttaatctatctgaatttaattagagaatg

SEQ ID NO: 113941 - DNA, 434 bp, Heterodera glycines
aattgttttaaagatattttcgaatagataataattgtttaaccccaaactttttatgaagaaatcataattattttttggggccgagttgttgcggaaaattttttttcaattcttaggggggtgtattttctgaattttttcagggcgtttcgtaagggtgtatgttctgaatttttttttcatttttattaaggatttttccgaaaatcctgaaaaattcgtcaaaaatggcgaaataggcacaaaagcgtttttcgtgcttatccaagcgtattagtgcgcaaaaattttaggcatttgcataaaaatcggatccctacttattatcatttaattattttttgcttttgcgtagctctacccggacaaatgcgaacagttgggcgatgactgtgagccgactcgagaacttttactgaaaattcaagatg

SEQ ID NO: 113942 - DNA, 144 bp, Heterodera glycines
caacaaccgattgtgtacagggctttccatctggtgagcaaagctcaacaaattcagcaaggcgaactgccagagacgcaatgttctgcctattggaaacaatggcaaaatgaatggaagcatgatccgaagctcaaggacatg

SEQ ID NO: 113943 - DNA, 1003 bp, Heterodera glycines
tttctagtttggttcttgttggtcggaacggaaagttgttgcctttcaaaagaagaaaaagagcaatttaccagtgcccgaagaactgtagaaggcgtatttagagacataattaggttagataacgaagcaaaagaattttctttttctgcacataataccatgattgaagcccaaaatataaaaaataaaaaccctgataaacctggtgtaaatttttggcatagcaaattattagatggagttttaaaaattcatgccctatttgacaaaataaaaaaagaagaaaaaaatatgaaaaatattaaaaaaggtatggaaaaatgtctagacagaaaagatttaaaacaatgcgcgaaaaccaaatacggtttgaaaggcaaagacctcttgaagaatttagggatgaatttattgcttataaaatttaagaaaaaaataaaaattcgagaaaaggaaactgcatgagaatcaaaggttgtgggacataaaccaaaaacaggtgaaaagggaaacaggtgaaaatagatgaaaaggaaacaggtaaaaacaggtgaaaataggtgaaatttcacctaaaaatatataggggcgtgcatttaatggggcatattagagaatgtctcaactagtatcaataaaaagtgccaaaggaaaattttgtgatggttatcgctattacaaacataaaacgaccaagttcaaactttggtggaaatgtgaacttaattcacatgggtgccagggctggggttttgaaaaggaagggttctttacaatgacgcgccgacacaatcatcatcctgacactatattgattgaaatcgaagaggacataaaatatcataatttttctgcgggggcaaaatgctttttgggtggcaacaagaaatagttgatgatgctaagaaaaatccgagactccaaactgaatttagagatgaatttattgtttgtaaactataaataggatcaagaaaaaaataccaattaaataaaaatg

SEQ ID NO: 113944 - DNA, 1003 bp, Heterodera glycines
accctattagtgctttgctgtgccgagaaccggcaggcaatggatagctttaaatctgcaagaaattagattggcaataagtggttgtaaaaaacttttgggtaatgaattattttttgaagtgagtcaaacaccctattagtgctttgctgtgccgagaaccggtatgcaatggatggctttcaatctgcaagaaattagattggcaatatgtggttgtaaaaaacttttgggtaatgaattattttttgaagtgagtcaaacaccgtattagtgctttgctgtgccgagaaccggcaggcatcaagtggttagtgtgcttgcctttggtcattgggtgttgtgggttcgagtcccattaatttatgggcttttcccgtcaaatattatatttaaattattcggtttaaaattttattttttaaatgtttttcttataagaattttatgagtgagttaaaagagaaagaaaggcataataaaaaatatggaggagcaaagtacttttggataaaaattgattactttcctttctttcctttttttatatgtaatgcacactcacaagtggtctttaacctcgccttttcaataagcaaaaaatgtctcctccttttctttccccagttcattatcaattgtttccatttacatcatcagttttttactgctcctacttttattcaataaatatttccaactaaattattgctgttttaatagcataaatttttagtttttgcctttggtggtgggcgacggttcgggtcccaccttttctgggtgttttcatccattattttattacattttttgaatgattttacttttttttaattaattaagtttattaaaaataatttattttaaatattaaaaatattaattctttcttcctaatttaacccaaaaatctattgtttgaccttttttgtgcaaaatcatttaaaaaatggagacaaattaataagttacctaaacataaaattataaatattttatg

SEQ ID NO: 113945 - DNA, 1003 bp, Heterodera glycines
tttttacgattttctatgcatatagatagcccttcttactaatcatccatcattcaatgattagaacaaaatttttttttgatcaatttacaaaaatgctggagggaaggatggactgatcaaacattgcccaatgattgacgactgactgattgttggcattacaaaaatttccccctcattttgttcattttccggcaacaaaatttttggcgactgtgctgttctttcattcttcattcagcgtcccgagaagtttctcaagagttttactacattattttctgtttgtttgtttgttttttgttaattcccgccacttaaaattgtcgtacattgccctccctcacccatcagcagcatgtaaaattggcttttccttctgcttcaacataatgctttttgcttgcttcaatctttacattagcgcaggtcgccgacttccaatttgtttaaatttgaaattttgaactttcattggatagcggcactgttaagtgccgtcattgtgtttcgaattaaaagggggttccaaaatttgccgcttttaccagtcttgattaaaatttgtgcgattgcggactgcggcaaatttttggaaaattcgaaaccattttttgggatttgctccaaatttcggcatttgattttcatggaaagttctttttaatttatgatactccatcactattctcaagaatattaataaagtcccgataataagttatctgagcgagtaatacattattctggcgcaaaaatttctggaataaataatgccgcaatttcggtccccaacggaataaataatgccgaaatttcggtccccgaaaattggcgtaatgcgggatgcaaatctggattatgagcattcactggtcccataaaccggttttaatcaaaattaaaatttaaaaataagaaaataaattttgagttataaacattttggaacaagtcgtgccgtgcccttcattatttaatggaagcaacagcaccaatg

SEQ ID NO: 113946 - DNA, 398 bp, Heterodera glycines
tttttttttttttaattcagatttgcctatctgatgaagcgctattggatgccttctctttattggatgtttttgctcaatggctattgggaggggcccgctaacttaaggaaagccttcggattattctcaagaagaccaagtggaaaatgaggaaccgtgaaatcagattaaaatagatatttcgaaccaaaaattattttaaaaaacgcatcaagattttattttttaaatgattgataaattttttaaagtttctgttgtgctgctgctgcaacttgccactttagagcattggaatgcgattagtattaatacattgtgatctgtgattttacttctttttactttcctctcctcattttttgtgtgggcttttgatttgcatttccaaaatg

SEQ ID NO: 113947 - DNA, 166 bp, Heterodera glycines
  unsure (1)..(166): unsure at all n locations
gatggacggcgtgggtcagcgacacgtacggccccatctgtcaatggcgccgggtgtgtcgtgcgtgtggacgtatcgcctacgtggccacacatcagtgcccacatgaccagccagccgacgatggaatctgtcggcgctgcaatgggccncacacccgtcgatg

SEQ ID NO: 113948 - DNA, 60 bp, Heterodera glycines
ggtttgtgccaattgtccgttgtggcgatatttcgtcgtttttcaattttagtccaaatg

SEQ ID NO: 113949 - DNA, 368 bp, Heterodera glycines
attttaaatagaatttttattttgaattacaaaaacagttaattaaatttgtcactgcattaagaaaatctcgattttttaaatttaatttattttttattttaaatttaataaaacatttaacgtaaaacattaaaaagggtagtgtactgtcaattcatgttgagtcaataacgtaaattgaataataaatttactaacgcttagtaaatgaaaagccgtttcaaatttaattatcattttcagaatattaaattagtgagacttatgttatttagcattcagcattaaaacaaatatttattgggacacaataacacaaatatatttttaaaaatcagctaaaccttaccaaaagcattgaaatg

SEQ ID NO: 113950 - DNA, 791 bp, Heterodera glycines
tttcccttgccaaagttaaaaaaatgaaaaaattttaaattttcaaaatttaaaaggatgaaatgtagaacaattaaaaaatgtaaaatttcctttttttaaattgaatctttgttttggaaaaacgaattttaatttcactaaaatttgcaaaattttacacaaattattggacaaattgcgatttggaaaatttttatggccaaaaattttaattttttaatttttttttgagaaattcattcttcccgcaaattatttaaaaggtttataattatagttttagcaacaaaattttgcacaaaattttttattttcgtttactccgccgtttccctccccccaccgatttgtgtacgtccgccgccgtcgcctcgtcggcttcgtttatctctgctgttttgctggcccatgcgcacgcactttttgctgataagggccaagcgatggaaatgatgataatgatgataatttgataaagaaatgaccaaaaaagagagagagttggggatgatgaagaatcaatgaagaaattttggattagagaaggcaaaaagcaaatggcacagatttgcttatgcaatgaaagtcaaaagcgggcgtatttggttgtttttaattttattagacaaaaaatggccaaattttgggtttgttactttcaattacaatttgaaaattgcgttgggaaatcaaatttatggcgttttattttaaacttatttaaaattttcaactttttttcgaccttttttgttttcaataatcatttgctaattagagccgggatg

SEQ ID NO: 113951 - DNA, 145 bp, Heterodera glycines
agtaccgtatcgggcgtacccgcagaacaatgcggatgttattatgcaggaaattaataagttggggcagagcggggacggagatgaaaataaaatgctgttgctctcggagcctattacgatgaaaattacttgcgttacaatg

SEQ ID NO: 113952 - DNA, 258 bp, Heterodera glycines
tatggtaaaaaagcaaattctgtaacaaaataaacaaaaaaaaaatatgaaaaaaaaggtgaaaaaattttcaaaatagtgctctttgcaagtagcgccgaaaggcgagttttgaagaatgaataattttattttaaataattttaattaattttattttatgtattttatttatttttttcctacattagttcctttaagcttgtgccagcacataaactcattttgaaacacgcgtccgaagtatttgaggcaatg

SEQ ID NO: 113953 - DNA, 430 bp, Heterodera glycines
ttgtaagaaacactgaaacaatttgagagagaatgaaaaacagtttggaaagaacaattgaggggagaagcataactaactgagtagaacaaatggaggtgaattggctttaataaggcattcgggaatgaccttgagaggaggggaaggacccgggaatggttttaagtgcgggagcttcggggggggggagggaaggggaaagttgagaatgagtccgcccattctttgccagtccttggaaagcaaacattaatctgtgcgttttgcaacgtctaaagtactgtactcccggggagggtctttttctacgcggattttgtcattatccgttcttttccctccgggtttttcgcattttgtactaatctctgattcagcgccgcccaaagggattcattccgttgcattaaagcgaaggagcaaaatg

SEQ ID NO: 113954 - DNA, 283 bp, Heterodera glycines
accaattttttaattaattaatataaataaacttttaaaaaatatattttttttataaatctatgaataaccattaaaatttattttgagtttcgcaattttgcctaataaattagaaattttttataatatttaacgtgccttgaagcttttaaatcagtttttataatagtacttttgtcaccgctttttcattttaacaaaaatggttttatttcatttgataaattaaatatgtaatccttgttaattatataattaatgttttagttacaaaacaatg

SEQ ID NO: 113955 - DNA, 166 bp, Heterodera glycines
aattattaagctatacattgggagcaggaaaacggctttctctgcttttcgaatggaataaactgtttaagccattctctcgcttttctttggaggaaaatggtgataatttaattatttatgttttaatatttcaaatttggcattctccacaattctcaaaatg

SEQ ID NO: 113956 - DNA, 782 bp, Heterodera glycines
  unsure (1)..(782): unsure at all n locations
gaacgaaaatttaattaaaaaaattcctgcacacgcctcccaggttaacannctttgattgtttgagatgaaatcttcttacttaattttnattttatttaaaaaatagnaaaantttttngatataaaagntangaaaaaatnttaaattaaatataaattttattgaaaaatgataaaaaaaanttaaaggttngtttnaataaaatttaaaaaaatgaagaattggnnaattattntnnnaatatttttgtggnttntggtggttttnanatnannannattngntggnagtnaaaatttgtggnaatggganaangtnaanggnaaatgtnaaaantttgggtggnnaagnggttggnnttataananggaagnagngtgtgagtgggntananttgaggtttnggttttgattttttggnaatatttaaaaaaaantggattaagggntatgannnggtttttttntttggnanaaaanaaatttttttttaaagcgcaaaaaaattcacaaatgaacagaggcggttgctggcctttttaaaagcaattttatttttgaacatgtctcgattaaataaaattgaaaatttgctctaagcatatagagagttagttatttttgagaaaattttcaaaatttttcattgtgtacttttcgatttgcataactcgcaagcaggatgaatctgtgccaaaagcccagtccaagccttagtcaaaattaagaatttttatttcctcttgtctaatgttttttgttttgtttcagaaatatg

SEQ ID NO: 113957 - DNA, 1003 bp, Heterodera glycines
aaaacctctattagaacggcccccagcagctaaattagcctttttgagcccaaaacccgaaaaatttttcaaaaaatcattttttcgccaaaatttctcgagaatattgaataaatttaaattttcctaaaaattggttaatttatgtgaaagataagcaaaaaatggaaaatttcggttttttggtcgggtttttttgaaaatttacccctcaatttagaaaaatttatgtccatatttttgccattttatgtccatattttgagatttttaccattttatgtccatatttcgcgatttttagtccatattttatggccatatttcgcgattttatatccatatttttaccatccctagttatgaaaaagtcaaactatctaaacgattaaaatggaaaatcatacataattcgtgctatgccaactcgtaaggctccctgatgtttcgtcactgaaataaaaaaaataaaaataaacactatgccatatacttaataaaatttttgaacaaaaaagcattaaatttgtgttaagtggtgtgatatttcacatacataacacaccatcccgaaaatgagctcttgtaagagtttttggaaattggcaacaatttgaaaattttggtatcattcgaaagcaattgatgagaagaagctttttctcattaaatgctaaccgattggatgagttagaaaaaagatatgggcgttcgaaaattagttttttgaataaattttcaatgggtcttgtcccgcaggtttttgaatccggcaaagagttgttacaaattgttgtgttgcagataaatggactttcttaaggccttttcacataatcccgttgaccgttacattatagtaatcggatacaatgtgctgccagcgaccaaatctttaaacattcgcttaacaaatgcttaacactgggggtacttccttgttttgctacgcctccctccccaaaatattttaaaaaatcacagatattttgtccagtctatg

SEQ ID NO: 113958 - DNA, 292 bp, Heterodera glycines
taaaacctggacaaagaaaaccaaatgtgctgagaattgaaccaacaagaaggccgaatttggaagaggtcaaattgctgaaatcgccacgacaacccgtccaactattactaccactaatattccaccgacaattcgtcccgtctctacaacgcgtattccatcgacaattcccacaatcgccactcatactccaccgacaacccgcccaatcgctaccactaatattcctccgacgattcgcccaattattacgactaatattccttcgacgattcgcccaattactatg

SEQ ID NO: 113959 - DNA, 848 bp, Heterodera glycines
ggacctgatttttaaggaattcattttaaaaaccaaacgaatttttaaaaatcttattttattacattaacaaaaaattgtattgagtaaaattagttaagccattgttttttgaaatatcggaattgcacatggattttcggtaaaaaatgtattgaaaggatattcagagatttatcccggactgatagaaaagtccccaagtttgaactccccctgctggaggaatgttagtatcctcaggcttttttcggcctcctatttagctcctgttgtttacgaatttaaaagtttacatcgactaaattaaatttttggcgtgaatttgaaaaaaaaatgccattttgcgctcaagccgactccaactgaatgcaagcgccacatggcatcattgccttgccggacttgtgccggacatgcccaaccctcgacctaggccgatcggctggcacaccctttacaatgcgaatgggggcgcgaaacagcgccggcgagcagacaacgaaactgcgttgtcagccattatatatgctgaaaatttgttgttcttttttccgttggggtgtaaaagacgcgaggaatgggtggcagagggacccaagtcatgcactatttctccactgcgctgttttctttggttctggtcggttttatgcgtcccatgaatgttcatcctcagcttcgtaggccataacttttttctaacttagtcaaatcttacattattggtatcaactataagaaaataaataattaagacattaagaaagaattacggtaatagttacggtggttgcccccctttttcgaagagttttttttttgttttctgaagtcataaaaacatg

SEQ ID NO: 113960 - DNA, 95 bp, Heterodera glycines
atacatcttgaatgcctaaaggctggggtaaaatttcaaatattttttctagatttacagaattatttttatttagccttgacaaattatctatg

SEQ ID NO: 113961 - DNA, 70 bp, Heterodera glycines
aaccaaaaaatcaattttttaatgtgttagggagtccatgtttgacaaattcataggcaaacgcaaaatg

SEQ ID NO: 113962 - DNA, 90 bp, Heterodera glycines
taggggaacgaattgccgtgccttggcaaacttggcctgcccaagccgttggagtgccaactgtggcagcggtggtgcacgcgcgtaatg

SEQ ID NO: 113963 - DNA, 596 bp, Heterodera glycines
gcaatttgctgcaaatgcagctcccctcgtccaaattcgagctgttgacccaccagttttgccgtactttgttgtgcataaaattttaagtggttcagttttgttcagggataaaaacattgccaatagtctaagcaataacaaatttacactccttgaacttatttgttagctttatttcaaatgccgataatttttttgtttgaaatgtttaatcctaaacccgtagcgaaatccccaaatatggttttttgtgcgggatcccgcaggagccgcccattgtatttttttattcaaagaacattaagccaagtacctattttttgaatacctatgtatttgccataaataaaatttagtcattaatcggcaacccagcagttcttccctcactagcgtgggaagagtatataagtaagaaattgttagggtttcttccatttgccttattctccaatatcagaatttgcctccctatttggctcttccatttgccttattctccaatatcagaatttgcctccctatttggctcttccattgccttattctccaatatcagcacttgcctccctctgccgatattcgtccaaatg

SEQ ID NO: 113964 - DNA, 138 bp, Heterodera glycines
tttgcaagtacgcttgctgaccttggcccagtctctggttgatggtcaatttaatcgtggtgaattgaccaaacaacggagacttttgaaactttgcacacacggtcaatgacctctatcaccgtgttgtgaagcatg

SEQ ID NO: 113965 - DNA, 168 bp, Heterodera glycines
tcttcaaaattaacaacaatgacaactattgccttttttatgcactggaactgatgcgctactactcattatatatcaggggagtaatttcaaggaaacaatttagatggctcaaagataatcaaacaactgttctttgtcaaaaagtactacttttactccgcgatg

SEQ ID NO: 113966 - DNA, 132 bp, Heterodera glycines
ttttcttgaaaattataaaaaatttttcattttctaaaaaatatttaattgtaaatttgaaaaaagattttgggttggtggtgtggaaatgtagttaattacttatacatttagtttctagaacatttaatg

SEQ ID NO: 113967 - DNA, 857 bp, Heterodera glycines
agccatgtggagacggacaaatggcatattagtgaaaactgtggttaaatggcataagttaaggctctattacagtttacacggccataaaataatttggcaattttaatgaaccatattaatattcgagacattatttgatagcccaaagagtcttctctattagtcatacaatggaacattcccaactgatgagtgtccaaatcactttaaaaccacttatcgtgtagagcatagtcgatttgctactgtaaattttcggcttttttttttttgctcttacccccaattcatcagaaaaattgatcaaatgttttttagttatttattttgttatatgatagaaaatttgaacgatttttgctgatcagttttggcgatcagggccaaaaaagccgataatttacaataaccaatcacctctatacttatggttaacatttttaaaattcaattttttgaggttttctgaccataacttttttgaacataacggaattctttgcaattttgcaggctaatggaggaatataagagctaccaaatcatattcatccaacaaattttatagtcgtgtctctttttttatgctcgcaatagagccataactttatgttttttcaatcatcattgtgatcaatcaccttctgcatcaagaaatatttgaaatgaaatactttttggatttaaaaggcggaaatgggaaaagaatttgctttatccaaatccaatcgcttaatttaaattttggatttcaagcaaactaattggaccaatattcccgacaaaattattgcgcagtaaaaacatacttctacacatttacaatcaaaaagtaccgtaaagtgtgacggatg

SEQ ID NO: 113968 - DNA, 382 bp, Heterodera glycines
atttgtgaaaaaatgcaaaaatttttttcgcagagttttattgtttgggcgcgaatcatttggacgctttgcggacagaatgactgagtgtttcggtgacggaactttctcgctcgcgccaacccaattttatcaaatttatacgatcctggcaaagtctgttcgtcttaaatcggttttcaaatttgtaaattaaaatatttagacgtgaaaaatggattttcccagtgtgccatgccctaatgacttccaaatcgcaaacatcgtacgaaagaatgtttacacttttgcgtgctgcgtggccaaattttgctcccatttctttttccgtggcttttgaaatggccatgtcaaatgccgttacgacaatctttcccggatg

SEQ ID NO: 113969 - DNA, 602 bp, Heterodera glycines
aaaatgtaaaataaacattttaaaaataaattcaacaataattttaacaataaaaaatgtaaaaattaacagaaattcacgggttcataaggtaatttggacaataaaacaaaaaatcacgggttcattcgatagttgcgagaaattccccggagaaactccaaaataatgtgaaattgattttttgaattcgcatctccaaaattttgtcatcccatcagaactcatttagcgaaggtgtaaaagtggccttcgtaagacaattttactttttgttttttgtgttggatgtgttgatatttaatattattaagtttcgacacgaatacttttattgattagttatttgttgatgggtccactccgaacgggtccactgcgtttcggcgccggcgtttcggcgctggcgtttcggcgctggcgtttcggcgccagcatgtttttggctataacttttttctatgtaatccaaatccaacattgttgatatcattcgaaagcttaacatgtttagaagctttttctaagcgattgcttcgcgattagacaattgccttcgagcaggcgatggtcaacgccctccgtgccaaacatccacaatg

SEQ ID NO: 113970 - DNA, 629 bp, Heterodera glycines
ttgggttgcactgtatattccgcgtttgaacaccatatggtattttgatagtttggcccttcctgttgcttttaacgtacagaaatttctgtcccacttccctcatgtcagtaaaaacaaaatggcatttcaatctcccacctcagacgtttgtgggcactattgcatattttttatttatttggcttcaaccggaatgttatatgatgaaattttgaaacaactgaaattgtattgtgtggattataattgtgacattgcaattaaaaactacgtgaataaaattttgttttatcttcttggggggagccttcaattagtaaaggtggatgattccgaatcatgatttaaaaatataccagctagtgccagtctctgggcattggggtcaaaaggcgtcagctgacacatttctcctgtgtctatctcattttgatgcgtcagctgtctagcattttagtccttaatttattagagaaaaagaggcattgagtatcgtaaaaagagaggtattgagtatcgaaacgattcattcataattttatggaaattactgctagtacggggtataaattaagtgaaaaattcaatacaacctcatttattggccaattccaaaaatcatcatg

SEQ ID NO: 113971 - DNA, 397 bp, Heterodera glycines
  unsure (1)..(397): unsure at all n locations
gagaanatagcatttttaattgggaagaaacaatttgtggggagatgtgatgtagatttggaatttaagtttcatttggaaactatcaagttttcatcaaaataaatttcatttatttgtagcaaaatatttggactttctttattgctctattgacaatcaatttgaaattataaagaaataaatttttaataaatttctatgcatataatgaataaaaaatatatattccagcgaaaacatacacaaaaattcatatcctaggtagaataaagcatttgagataaattttgctttaaataaaaataaattaattgagattcaaatattattttattttatatgcagaataataaatcataacatagctcaaaatttaattcagtttttagtgatg

SEQ ID NO: 113972 - DNA, 467 bp, Heterodera glycines
aaatttccgactttttatcaaaaatttctgaaattggaaatcggaattccgacgtccaaaattttttcggaagtcggaaatcggaattccgtgccatccctggtataatgtacctaaatgattagatttcgactgtatacattagaatcgatgtcaaagtagacagtgattgggttaattaattttttttaatcacccgaaacaaaactttgattttatatccggtaggtgagtaatgtcattgttcatctaatcatatcacaaaaattggcacatttttagggtctgacggtgccgataggcgcaagggaatttgaaagttccagtataatttttgacaaatttatgaaattgcctcctatttttggtcacatttaaaaaccagatttaaaatatatcaaattttatgaaaaattttcagatagttacagaaattactgctaataaattttctcagcaaaagaatg

SEQ ID NO: 113973 - DNA, 376 bp, Heterodera glycines
atcggatcggtcaaccactgatcaggattggaccgaaccacaggaaaccccaaatagtcagaactcggattttggtccgagtcaaatcgagaggtcgggaagcctgagcagcattccgactatttacattatttttttcactattttttattgaaaatgtaatgtcaattacggacactttggaatgtccgcttaatcatataattaacaagcaaatggttgcctgtgttcctcagaaatgattcagtgaatcatctcatacttactggaaacaccagtgagctcctccttcattcagagggtcgggagcaatcggaccgtatttaagcagaaaagtgaggagggagaaatcacttctcctttatttccaaaaatg

SEQ ID NO: 113974 - DNA, 126 bp, Heterodera glycines
ttgccccgattttaaaaatgagatttgatagatcactgataaaatttgatcagatccctaagaaattttggtcaaagcactgataaccattctgatcaggttgctgtgtccgcccattggctgatg

SEQ ID NO: 113975 - DNA, 365 bp, Heterodera glycines
gagagagagagagagagagagctgtttgatattccccatcctttccgaggcaatccctccattgttctcttcctccctctccatgtccactctagcgcaccattgtgcggaaagctatcgacggcaatcataggattggattgcactggtcaggggggagggggcggcaagtggggcgcggggggcgacttgccatgtccgccggaagaggcggggccaagccgacggccggcgatttaagagagcccggagactgcgcactttgcatcggaggagtggccaagcaaagaatgcgtaggactgtgtctggcaaaacaattcccaaccaaaagaacactcggcccagcacaaattccatcagaatg

SEQ ID NO: 113976 - DNA, 351 bp, Heterodera glycines
  unsure (1)..(351): unsure at all n locations
ttttgttttttccaatttcaaattgcccaaaagacgatctactaagaagcgacacacaatacaatacaaaatagntaattatccattattcgatcgggttacatttttcgattttgcataccgatgtgttgttacagttacatataagcattgaaaaaaccatttgtctccaaataaacaaattttaatgttcagagccaaagtcaatagtgacagattttatgaaatccgcctttttgattatttttaaatttatttgtgatgagataaatataatttaataataacattgatctattgtatgacaagtacaacaaattaaattgttcttcgctgttcagcaaagaaatg

SEQ ID NO: 113977 - DNA, 405 bp, Heterodera glycines
ttcatctgtcgtcccgttgccttttctatcctccctttttttcttcaggccacactctcttccgcaatgagtgccttccgcctcgggcattgccaataagcattgagaaaattcacactcattctgccctttttgcgccccaatcagcagtgatggacagtccatcttcagtcggcacaaatttcgaccccaatttacaggatccaatcccatccaaaaccgtttcgcccggggcaatgtgtcggttggtatttagtctgccgatgtttcacgtttattttcctccctttttgtctgtcattggagtgtccctatcgtacggaatgtgtccgtggcgtgtgccgttgtcagaaggatgaaaccatcgtaaatggaatgtgtcggaagaccatacacgaggtaatg

SEQ ID NO: 113978 - DNA, 884 bp, Heterodera glycines
tctggaaaaaattttgttgtcatttgtagatttaccaagggtaggatcattcattattaatggtgtatcaatcgagtttttgaatgggaaggcttttaaagcggtgccgaacggttgcgccgggcaaaatttgaaaatttttgggatttattaacaaatattaaatctatttttaagaaaattaagtctcagtcagttatagtctcgttaacgaaaaaaaaaattaaaaataaccaaatttcttagaaatgttatctcaaaagctattcatgatctttttctatgcataatgacagaaaatttagcaccaccgctaactcttgggctaccgtacaccaaccaaaacaacagcaataatgccgaaaacggcaaaggtgccgaaattggtgatgagggcattgtttcggatggaactcggcgaaacaatgccaaatgaacagatcaaatgaaatctgatgagagaaccactccactcattaaagtcatttattttttaattttaaacaatttcattaaaattttccatttctttaatattatcatttcaaattatatttgccattttaccaatttagcaattgattgttggccaaaataactaatttatcaatgggcgccgtagagaaattaaaattgtaaaatataaaaaatttctatattacgcatatcatttgcgtatatccaattgatttacaaaattattcaaaattattcattcttttacattttctctttctaatttattaattttttttagattttatttttagaaagcattttattatattttttttataaaaattatacatgtttaaaaatatagttgtttaataatctataaaatgtcattaagagatatccaacttttttttattacagagatg

SEQ ID NO: 113979 - DNA, 106 bp, Heterodera glycines
gatacattcgacatgagccgtgtccgtgccgatgggaaaattttgccagagggtctgaagtgcttgcgtgcctggatttttactcaaatcccacgattccctgatg

SEQ ID NO: 113980 - DNA, 1003 bp, Heterodera glycines
ttaagatgaatttttagaaaaaacaaaatactttcaaaaataaattaccgacaattaaaaatttgtaaattccacacttgaacttttcgtatttcgaccaatcaacagtcccacaaattggtgacaaaccatttcactcaatcagatcacagacaaaattcgccctttgctcccccaattcattaatcattaaattccggtgaatgaatggctaataaatgggtcactaacagctcacccgctcaatgtcccctggggggaaaagcggcgacaaatcatgaggaaaagcacgccgggggcgcgtcgaataggaagcacagcagtcagcagcagctaatcgctttgttctctcgccttttgaaaacggatgaaagtgataaattttggttgggcgccgccgtatcgaaaaaatgggaatttataaaagaggaagttaatggaagcattttcccttcaatttcgcttttttcttcatcattcatgcattttgtattagtgagtgccctccgtcaaatcgtaaagcttatgaaggaattggaaaatgggccgaatggatgataataagctggcatatttcttaaattccgccacgcgatcattttttgacaaattgtcataatttttttcaatacaaatttggtagctatgaatgttgttctctaaaaacagttttgttctcaaaagctcacaaaatttcatcactaggcaataccaaatataaaatgtgcttagaaaaaaaaaagttaaaacattttttgttgaacaaacgttctaaatggcagatttaagaaatctgccagtattaaatcccgtcttattttaaatctcgttttactaatgatccaggctttggctcgggattaatctcgtgtaattctttgttgtttttaaaagaaaaggaatgggaagaacaacatattcagagatgcaatattgttcatcatcatcttcatcttctgcttctcctccttggcccaagtcctcccatttgttcgcctcgatg

SEQ ID NO: 113981 - DNA, 131 bp, Heterodera glycines
ttttgatggtttttgactaacgtcccagcaccgaatgaacgtgtgtaagacaattaaaagatgatgacaaaataataattaatgcgttgacaatgtgataatgaatgagagttaactataaaataacaatg

SEQ ID NO: 113982 - DNA, 864 bp, Heterodera glycines
ttgactaacgcccgttttgatcagctacgcataaaattattttgatggtttttgactaacgtcccgtcaccgttctgtccgtcccttttcaactgatattttcctttttaaacttttcgttttcattctttttgagattaaaagataatcacttactgataaatttatgagggttccaagtaaatatttaagataatatggggattttcaaaattttttggaatttttacccatgttaattattatttatttttttacggaattgcaaatgagtgaaaccttttaatttacaattcttaaggtatgcaaaaaataaacactttttacaaaaataataatcaataaataacataaatgatacatatataaattgtaataattattaaacccttaaaaattggtcacatttttttggtactttctcaaaattttggcactgtttgttcttgcgcagcaaaagcgtcgtccaatgtccattctcaaaagccgacttcgatgaaaagggacaaaaattcaattagtacaaaataaggtaattaaacttttggcggcatggatcgcaaacacagcgaccaacaacggcaccacaagtgcgatcacctgctgtccggcacgcatcgcagcggtgttaggactcaaaaatagtttggaaacatctcgaatttatattccttatgctctcggtttattaagaatgaatgcattactaattattcaatttttacattaaaacggtcaaaaaagattggatgacgtaagcggtcagcttcctcccattctcactaattgctgatcattaactttcgttccatttaaaattaccctttccccacataaataaatgttcggttgccggtcacaatg

SEQ ID NO: 113983 - DNA, 267 bp, Heterodera glycines
tttgaatggaataagcagaaaaaatcaattgctaaattaattttaaaagagtgttaattttattattaacaatttgcgtgcatttttaatcctcacaattaaaaattaaacatttaatggataaattgaacaaatcaaaggcgaagggtgattgcagagaaatgttaagtagtgacatgaaagtgtgattggctgacgaatggttgagaataaaaatttgaaaggggagaaaagtgccgaactgacaaatgaggggacaaattgatg

SEQ ID NO: 113984 - DNA, 1003 bp, Heterodera glycines
  unsure (1)..(1003): unsure at all n locations
cgatttttttttaaatgacgccttctatatcgataaagatttatgtgtgtattatgattctaatccattgggaagaggatattatggtacaaatttaccagaggtacaagtggtttagaaaagcattgtacagtcaattagcatggatagaggagttaataatgtcaaatgaaaattccgggtcagattttcgagtcattaaaaatttggacgaaaaagcaaaagtaaaaattcactaattggttgtccaaggccttaaaatttgaagaagataaacttcaaagcattaaaaacggaaatgtcatttcaaggcctcaaaaaagaaaaacgaatctttggggcctaattgaaattccaaaacttttaaacattttgtaaatgaattcacgttaagttccgaaattggatagacggaatttccggtctttaatacttggaatttaaaattcgtccaatttgtgccctaaataggccaagtgccatagccaaaaattcactttcccccccccccncctccatccacccattttttataacgcattcaaaactcaattcacttaagcatcccaaccgaagctttcacttcagtgtcccctcatgaggatgtgccaaattcggcataatgtgtgcccactaagttaagatggcactccttccccgcgcttttgacgtgccattcccccctccccctctctctcccggcacttccgttttgccttctccgctctccttttcggcttcctcctccggtgccgtctttcccaatttgtgctcatcgcccgttgaaagtcccgagcgttaaaaggcttctttttttacggtcgcgaagcatttgaccagtcaacagtctcatttatcccttcattttttgttctttgcctctggcgtccaattttattgaaatttcgaaactattatttcttcatccctctcataatttcgttaatttaccatcaattaccgttaattggcccattaatcattacacagtaatttggcaatg

SEQ ID NO: 113985 - DNA, 829 bp, Heterodera glycines
gacatgcacagcacaaaaagcagattcactcagttcgcctcatacgggtaaagttggcattgccaaactcattttttggcacatactttttgacccttgcgaaacattgaccattttcttctaagaaattgacgcttatttgagattattaaaaaacattttacaaattaacactaacttttgttttaaaataattttttatgaaaaaaggtgtaaacatttggcccctaatttgtgtattttcggcttaggcgatcacttacaaattagttgagagtgactgcggtgttcaataaagtttaagtgacagtaattatatttgtgattatatgggattgtgttttttatttttgaaatcccctcaaggcactttctccgctgcggaaaggcgtgccagcgcggccactttcaattgctccatcgcctcctcaacggtcaatgaatgtgccgtgatgattgtacgccgtcaaagcgaagagtgcaccacgacatcagtgatgacaggtgctacagtactttactacaagcaattaccgtttttcgccattattctcccgccgcaacggattccgctggagggagagttttttaaaaagacggctaataaaaattagtaaattgaaatagacattaatattactaggggctgtgatgacaaagtagtgtattgtcaagtcactgttcacattgttccaaaaatgatcgcttacaattagagagagaaacggcgccggacccgcgcccaatcggccgcaggggttgtacctgtccctgcccatgcccttggcactgttgttgctcccttcgctttgccgtcgttttgctaatg

SEQ ID NO: 113986 - DNA, 980 bp, Heterodera glycines
ttgttttgttttggtcacagcgccaataaattaattcccttcgtgcttctttttttggtacatatggccttcgaaaacgagtttgtagccgcccatttgtgaaggaaaaacgtagccattatatttaatgaattttgtaaatttagttcagcttttatagcacttattgtatttcaggctattcgggcaaatccattggcaaaatttaattctaattagttaagattagtggtttttggtcatatagaattttctcattaataggaatagtgatttttgatcatatagcatttggtcatgtaacatttttctcattaagattagtgattttttgtcatatagcatttttctcagtccaatttgaataaatttagtaactggcatttctctcacagcttattttaaatcttttaatacattttaattaattatatttttgggggtcctttgtccgtgggtcctctgtctttgtgggtcccttgtctgtgggtcctttgtccgtgggtcctctgtctttgtgggtcccttgtctgtgggtcctttgagagtacaccgacgaaatcaaaacaaaaacgcttaagtattgacaaaaagtacgaaaatatagacaaaaatttctgaaaattggtttgaatttttgaaaaattcgcaacccataaaaatttttaggccgaaataagttaacaaaaaaatagggcttccattcatataaaatagacataattacaatttaaataaaccaattttttgtactttttgaccaaggtgcgtcaaggaaaaatataattaattctaaaactagagaccgcaagcattacatttgttataaatttattattttttaataaatgattttttatcttttcgtggctttctggaaaattcttatgcaaatcattgattttttgttggcattttcttcttcagcctaattaaggcagaaaattattactaatatttgttattaaatttttcaaatg

SEQ ID NO: 113987 - DNA, 98 bp, Heterodera glycines
agtgggacgggtcgcagcaataatgggaatggagattcccgaaggcactcaaattacttggaattatcaatttacatgcaaaataatttataggaatg

SEQ ID NO: 113988 - DNA, 341 bp, Heterodera glycines
attttttcatcatataatcccttaaggagcgaccaaatttttaaagattatgttcgacttatgattaagttgaaggtttattttatttatcttctatgtacgtgaaaaattttaaaacaggttgaatcaagcggattcccggatggcgttcaaacggaactgcagaaacaaatgttcgcagatgaatatatgaggcgatacactgttgagttggatttaacacatgtgcgaagaaaccccggcctacgtttcattgcaaagctgatgctaaacagtttatggtgtgtttttctccaactaaattggacagaatcagccattttagggggaaattcagcatg

SEQ ID NO: 113989 - DNA, 84 bp, Heterodera glycines
  unsure (1)..(84): unsure at all n locations
gcacagccgcgctgtgcncaaaaagtcaaacttagttgggtaaatttcgaagttttntaaaattattttaaataaaaacagatg

SEQ ID NO: 113990 - DNA, 66 bp, Heterodera glycines
actatttggagaccaatcgaaattagcaaggacaaaggaccagaaccgaaactatctgtgtggatg

SEQ ID NO: 113991 - DNA, 965 bp, Heterodera glycines
atcagagcacaatcaatggatgtcttctgtcccccccccccctctttggtcccctttttcattcatttccaattgtgtcccaaataccctcgcgtccattcaattcatacgcatggccccgcctcccattgtccctcccgccttcctattgttcaaaattgggttgatgggggggggggggcgtcagtgatcgaagtcgtcgataagcgaagggcccttcactgtgttctttctctgccattactcgcgccgcgcatttttcaaaaataaaatttaaaacgacaaattgcctcaaattcaattagcagcggcagtctctcccccccccttttctcaattcctttttttccgttcattcgttccccatatttataagttcgtaattattgacttaccaagttttgtaatttttttatcctccaattgtcaaatgagaagctttaaaaatgttttttgatccgactatttttttctgattcaatttgtccaataaatgtgggcctatcattcacagaacaggtaattaacactaaacgcgggtccaaattggaccaaaacacgattcaatgacacctttctgtctgaatggtgagaaagagcacaaattcgcccaattctcagacccgcgtcgtgggcccattactacggccactcggccgcggaagagcaacgccgggcagcgaccaattcggggatcgccgccggcctcactttgatccttttcctcgtggttttcctgattagtttaggctgcagacattacaacaacaaaagacacaatcagcaaagttggaaacgattgagtgctaaaagtgtcctcctccgcacagattcgctgccttttgtctgtccttcgtccccagtgggaccttccgtcgatgcgtcccctcccccttcctatgaaaatgcacttcgactgcccgcctttccattggcttcttcggcccctcctccgtacataaatg

SEQ ID NO: 113992 - DNA, 337 bp, Heterodera glycines
aatttttaataaatttaataaataaattttaatattaaaataattttaatttgaaagaatttgaatattatgacaaatttcggaatattaatttataaaaatagatgtacaaattattaatatttaaattttaattcatttttatttgtaattttcctaaattaattggattaatttaattaattagttaaattagattctgcaacctgttcaacaaacggcaactaaacgcggtcttaataaatttgcaaatccaaatgaatcagttatggaacataaaactgaatatattcaagcaaataaaaatgttttgaaaaatgggacaaaaaatacaatg

SEQ ID NO: 113993 - DNA, 124 bp, Heterodera glycines
cctctctaatatttgcataaattcatatccatatacattctaattttatcctttcatcataattaatatatttaaaaaatattttttctttttgcctatcgcatattatatcaatctatagatg

SEQ ID NO: 113994 - DNA, 110 bp, Heterodera glycines; identical to SEQ ID NO: 98226

SEQ ID NO: 113995 - DNA, 706 bp, Heterodera glycines
gagacagtgcttaaagacgactgaagggaggagaccaattaaaaaacaaagatggcactgagacagtgcttaaagacgacttgaagaaggagaccaattaaaaaacaaagatggcactgagacagtgcttaaagacgacttgaaggaggagaccaattaaaaaacaaagatggcactgagacagtgcttaaagacgacttgaaggaggagaccaattaaaaaacaaagatggcactgagacagtgcttaaagacgacttgaaggaggagaccaattaaaaaacaaagatggcactgagacagtgcttaaagacgacttgaaggaggagaccaattaaaaaacaaagatggcactgagacagtgcttaaagacgacttgaaggaggagaccaattaaaaaacaaagatggcactgagacagtgcttaaagacgacttgaaggaggagaccaattaaaaaacaaagatggcactgagacagtgcttaaagacgacttgaaggaggagaccaattaaaaaacaaagatgtcactgagacagtgcttaaagacgacttgaaggaggagaccaattcatgggttggcactccgtttaaattgaaattaaaaaacaaagatggcactgagacagtgcttaaagacgacttgaaggaggagaccaattcatgggttggcactccgtttaaattgaaattaaaaaacaaagatg

SEQ ID NO: 113996 - DNA, 295 bp, Heterodera glycines
  unsure (1)..(295): unsure at all n locations
ttttttttttatcaaaaaatattgtataatttaattatttttttttgccatataattntaattatcctttccctcctcccncaaggcacgccaatcggctntcatcgaagtgcttagtcatgtgccgtcccagccctcgtccgatcaaacggtgccggatcgtccccgggctgttttggcaccgggcaaagatcgccccaactttcacattgaattgcgctcccaagagctgtttgtggggcagccgcttcgtctggagacaaaactgacgccgatcagtagcgacccgtcaatg

SEQ ID NO: 113997 - DNA, 254 bp, Heterodera glycines
ttttgaagttcattttgcaattttttttcggtgtaagcggagacgaagggaaaggcaattaatttaacaattaaaaagcgaaaagaaaaggaggaaaggcggcgcatcatcgatcaaaagttcatctgatcaattcactgaaatgttttggaccaaacggtggaattaattaatttaaatggattttttatgtgtaaatgagaattaattgaacaattattatttattgagaatgtgcagatgctattaaaatg

SEQ ID NO: 113998 - DNA, 519 bp, Heterodera glycines
aattccgactccaaaaagttgggacattgggaattccgactccaaaaatgtgggacatcggaatttcgcctccaaaaatgtcggacatcggaattccgactccaaaatgtccggaaccggaattccgtgccacccctgcgttatatcaaccaaggggaaaattcataacatgacttaattttaatgttaaaaaattctggtttggttcaagattctttgaaattttataataaaatttttttttaatatatttttctaaaaatagttttagcataaatattattaaagataaccttaaaaaaattttaattttttgttctcatatttcagaaggccttataaacaaattgtaattgaagaatgaagggttgtgcggaaaattatgctcaaaaatggccatttttcatttttgaagcacattataaattccggcttttcttgtaattttgtcaaaaaatctaggtttccggcctaaatggccacagggccctgtttccatcagaaggactgtatataatg

SEQ ID NO: 113999 - DNA, 1003 bp, Heterodera glycines
aaattaacaaattttcccacttcaatttgttacattccgaatttgtattgtgcccgcaggcattctcagtagattgttttagaagattaagtcaaaattaatgtgaaggagagaaaaaataataatagaaaaaaaattgtaaaaattgggtgaggtgctttcaagcctttctcatatttgtacatgaatgatggacataaaacgacagatcgggccaatatgtcggccgacatgtggtttaaatcaacgcaaaaagttgatttggcgatgtgtaaattttaattgttttccataagagtcccattggtgacttttatttcctctattttggtcatttaggcgattaaaatgaatatttaattattattattgtactatttattaattaaagatttctaaaatataaatggttaatgataaaaattaataatagatgaataaaaggcaaaaaatgattttccgtcggacgacagacggtttaaatttagtgaatttattgaaacgaaaagttttggcgaaatgtgataattaaaataaaataaaagtaaaaaaaaaaaaaaaaaaaaaaaaatttggattgtaattaattaggtgtataagcataagtaagtgtgagaaatgaaagagaatataatgaggaagaaaaaatagaaaaataaattggcgagaaacgcagtccaattagcattttctgccgatattggactcgcgctggggtattgcgagggggaggcactgcattggcgctgcacatgtggttcttcaactcttcctatcaggttttttttttgtaaaaaggtttttgaaagtaagagaaaaataaatgtttagttggtaaaagggcaattgaggtttggtagagttaactcaatcttaaagatttttttttttggaataaaccatttttaacaattgtaaaaaaataaacttttttttggcaaaaaaaaaaaaaaatataatttggtatgaactataggttctttcccattatagacaatctatg

SEQ ID NO: 114000 - DNA, 448 bp, Heterodera glycines
  unsure (1)..(448): unsure at all n locations
attttgattatgnattagatatttgttttgtgaccgctctcatggccagcaaccccattgtgcggccaaagttcggcctggtggaaattgcacaggatttgttaatggttgtcaataataatttgcttatttacgaattaattaattcattatacctttttaatgactaaattttcaggtaatttaactttgtaggatttgaaattttgcaagaaaatatacaattacctaattaattatgaacattctgagccattcttacaaattccaattaatgaataaatatattttagtaattaaaagtctttcccaaataatacgatgaatatttattaaattaattatacccatagttatcgatattataattattatgtcgttgttaataggcatttaaaattcaaaatatattaatgataattttcaggtgaagatgtttgtcataatg

SEQ ID NO: 114001 - DNA, 55 bp, Heterodera glycines
ttgaaagtgaaattgctattgaaattggaattagtcgggataaaatttacaaatg

SEQ ID NO: 114002 - DNA, 418 bp, Heterodera glycines
aatgataccaagattatggttgtcaaataaaaaagttatggtccaaaaacaagacgcggcgccgaaacgacctagtccccagttacagacccggtactgaaatgtccaactacccccgggactaaatcgtctaatggcttttttaggaagcataaaaaaggcgcaatttatttattaatttgtcaaaaagaaaaataatcgatgaaagggaagcaaagctccaagactttttgaattactatttcttcggatgtccaatatcccattccgcccggttcttcaagtgtatccgaatatataaagcggaccaaatccccttccagtcatatccttcatcacttttattccatttgtttgataaattttgttttttcagttaatttctttttaattttctgtgcttaccaattcaaaaatg

SEQ ID NO: 114003 - DNA, 837 bp, Heterodera glycines
aagcattaaaatcattgcaccaaccaacaaaattgttcaccaaattaatcgctcgaaaaacaacaccttcatcttttcaataaatagttctgtcagacctccaaaaatttccttaaaaaaatacattattccagtacttacaatttctcaccaaaatttttctcaaaaaaagaattttataaacttttgcattttagttaatttttttgtcttaaatttttcttgcaaaactactataaaaataaatttcatattttgaaattttaaatttttcgcattaagttaaattttattgtagttacattgataatttttaatttgccgcttaatatttttttggtaatccttaaaaactgaattaataacataagtattataaatttaaatgatatatttaaaagaacgagttctttataattttatccataaataaaaatcggatagaacctttaaaataattgctgtactgtgtcgggttcttttacattaatgtaacaatttttaataatatgagaaataatttataaaatttaattataatataaaatatatttatctatattgaaattcttaaaatgtaataataatacaaaaacaaaatcattaaatgaacatattaaaatttataatgaaaaatgaatatttattagttttttgtttatactctttgtttcaaataattgttaattttttaaatattttcttctatttaaatatgtttttcatttgattctcatgataccattaattgtattttacatataaattactggcataaatttacttctattaaatttgtataattttaattatagctactatttatattcataaatg

SEQ ID NO: 114004 - DNA, 75 bp, Heterodera glycines
tcggacatcaataaaaactgatcacctgggtggtgtaaagttccgctgggtgcggtttaatcaacaatcaaaatg

SEQ ID NO: 114005 - DNA, 239 bp, Heterodera glycines
acttttgcgtagagaaacattttttcatggcaaaacaggtggctgataatctaaactaatataaacatttgttggtttgatatttttatctcattgacacattcatttagactaaaatcggtcctttccatgaacattcaaatcaactttacaacatcagtgctgtgaatacttggttcttttgccctcttttattattatttttgtttgtttgtagggatcggatcaatgaaggaatg

SEQ ID NO: 114006 - DNA, 208 bp, Heterodera glycines
ttcggatatcaacggttttttaacatggcttcaaaaatatactaaaatgttttatatatgcttgaaaatttccttaagagcaatagactaggatttagaaaagaattgtttagacaatcatcgagaaattgtcggagtcaaggaaacagtgtcaataattattttagtcctgataataaattataaatattttagtataattttcatg

SEQ ID NO: 114007 - DNA, 528 bp, Heterodera glycines
tagttcggcctcacgaattttttgtaattcgtgtcgcttgccttccccagggtttggccccacggattttttgtaatccgaggcgcttccccggtcccatagttcggcctcacgaattttttgtaattcgtgtcgcttgccttccccagggtttggcccctcggattttttgtaatccgaggcgtctttttccttgctcagttggcccctcgggtttttcgtaacccgaggcgtgttcctttctccagtgaccgacccctcgggttttttgtaacccaaggcgtcccccattgtgagcaggtcgctcctagggttttttgtgacccaaggcgcctcccgcttacacggtcggacccatcgagtttttcgtaactcgtagcgtccttcttcatacactgtaagactcttggtgggtctgaagtcaaactcacttagtccactgtttgttcatactgctattttgtgaccccgaaccccacacaatttgttcggaagtcgggtagcagaacccaaaagtgagcaaaaatg

SEQ ID NO: 114008 - DNA, 98 bp, Heterodera glycines
ctttttttgtcttcataaaaactaagaaaataataaatttaaaaattaattaaaataattaaatctttccatttgcttggattgatcactattgaatg

SEQ ID NO: 114009 - DNA, 482 bp, Heterodera glycines
atattttcgtcagtaagcattttcgtcagtgaacgatttcgtcagtgattttcgtcagcggataatttcgtcagtgaacattttcgtcagtgtactatttttatttattttgctgttttccatttttttcgtcagtgttccaattcgtcagtgaacattttcgtcagtggatgcataaaattaaaaatttttcatttttatcaacttctttaatacagtatttatcgctttttgcgtatggtaactctagataaaataagtgattatttgtactttaataaatgatttacataaaagaaattgtactttaaaactgttgaatattattagtaaatttacttctcaaacttcttatctcgccatcgttcccatgcgttctcgagtgcctgcctatttgcatatttgtttagtccttatctagtttttgcaatgcataaaaatgaacgatatgaaaattcattcgtttactgcaaccaaaaatg

SEQ ID NO: 114010 - DNA, 70 bp, Heterodera glycines
aaatcaaaacaattattatgaaaataaaaagcaggaatttattaaacgaattgatgagattaaaagaatg

SEQ ID NO: 114011 - DNA, 454 bp, Heterodera glycines
  unsure (1)..(454): unsure at all n locations
ccatagtagctaccnttcttctttaaaaaaattgaaaataacatacaacaaaatgaggactcgaacctgagaccccccttttggtgactaactcacagaccactaagacgaaaaaaccaacttatttgcgcttggagcccaaaattgaatcgccgtgttaacccatccttccttaccctttttccaattttcaattcagcccccaaagttagataacaaaattattattgattattttttgaatttttaaaacttttgtccgacggcattctaatgtagtttggaatttgctagttttgcaaagctttttaaaattttgagacaaaagtaaaaaaaaagctgaaaaattacaattgcaattgtatttacttgaaatggttaacgtttcacacagttttgattttcagatttcgtgtattattatcttaacaaattaagggtgaacatctaaatg

SEQ ID NO: 114012 - DNA, 1003 bp, Heterodera glycines
ttttgttgttaaatttattgctttttaattggatataaacggaaaaaaggacattgtaaaattgtcataaatttcaaaaaaggtgacaaaaatgccacaaaaaaacattgtatttttgagaattttagaaatgaatggcttttctttatttaatgtcgttttttggttttttacttttattttccaataaatttaaattgatcaattcggaatttgttcaacaacttcaattttgatggtcaatgatttttttcaaatttatgcccaaatcgtttttgccaaaattattatgctcaactaataattacataatttgtttaaaataaattttatttatatgttttttcgctttttattataaaatgcaatttatatttgaaatgatttaaaaataataatattgggagtatatttatttataataaaatttaaaaaaaaatcattctttaaatagcacagaaatattttcaaaaatttatgctaaattttgtcgaataaataaataattataggcacgaatagtgaaagagaggcataattttattttatcattattttcttcacattttttcttcctccattcttttaaaggaaaatatattagaaaataagtccaacaaattttgttgaaaatgaatagacaaattaaaatccacaaataaaattttttttttatttagatgtcgatttaaaatttttgttttaacatattctctcaggacagcatatactgtaccggaaataaaatgaaggaaaacttttacataaaatatacttttaacatatttgtaaaatttttaaaattttgcaggcttgtaaagatatttctatgagctattgaataataatatcttgatcagttaattttgttgattccaagaaaattttcatcagaaagtggcacttacgtcgagaataaaaatagacaggccccaaaattattgcaacaatttattagattaatatagttattattttaacaattatttttaattctagaatg

SEQ ID NO: 114013 - DNA, 333 bp, Heterodera glycines
aaaaaagcgggacaaagagctggaacctaggtaaaacaacagtccacgcaagaagacaatttgttagaaaaagcaaaaaaggaaatagaccaaacagcacagaatgcagccctaaaagctgaatatattcgcacactagttgccaactcaaaacataatagaggcgttgcagaaggtaggcttaacacatattcaggtgtccctcaattcaacgaatggcttgaccaaattgttgaattagataagaagatagacgaattggcaaaaaaggtaggaaatgaaccgtcaaaggtaataaacgctaagcaacaatttgataaaccttatcgaatg

SEQ ID NO: 114014 - DNA, 150 bp, Heterodera glycines
ttcatcaccattgacctcggactgtgcaatcaataaataaacataaaaaaaaggcccaccgctgacttgcacacattcattcaattcacacaaagttctatctttttttttttttctttgaaatctctgtcaattcacatcatcaccatg

SEQ ID NO: 114015 - DNA, 1003 bp, Heterodera glycines
ccttcaaatgcaatatttcccccccccccccatttattgtaaatttcttcaacaatctcacattttctttctctttttttgttagttccaatctgttaatgataaattgagcctatttagtaaagcaattagataaataattttcattttgaataaattacataattttcgcaaaatttcagtttccccccccccccccgcattttaacatgaatggcaaatgtttacttacataaataaatggccaaacttccaaagagaaaggatgtctcgagagggcacttatgagaaaaatgattgggatgggacgtacggaagggaaaggggaaagagaggggaaaaaaggggggggggagggttatcaccgaacggtggggagaggggaggggtcgatgatcagacgcacgccacgcttttaattgattaattaaccaatcgctgtgaagacaaaagtttctgtgcttttgatcaattttaattaaaaattgaattaattccttaaaattgaaacaaagcaaaagaatagtcatctatttctctgtttccgtcgcttttcagtttaagggaatgcctttcattaatcacaactttttaacattttatcaccttttttacagtaaacctttcttatttgctttcaaccatttttatgaaatgaattcgactccattaaaaatagattaaataataatttcatgttactacaataatatattttgatttaggcatttattaaagtgaattccgaaaggaaagggaagcttttttgtcgaaaaatttaattaacgaccataagggcatcattatgttggttaatgattgccattaataaacctattaaaatgtttttaactgctatacaattcgagacaaatttaaattttaaatgaattaaaagaattataaaaaaagataagaaagtccagcactaaatgcattccatttgctgtatcatcccatttgacaatgtttcacttcactaattaacaaatgggcaataatg

SEQ ID NO: 114016 - DNA, 141 bp, Heterodera glycines
gtgtcggattttcctagagccagaatggcggggggggggtgaggattaacaaacatttttattttgtatcatggtttaacaacacatacacaggcgggcagggatttggcatttgaagggatcaacaaaagtgccaaaatg

SEQ ID NO: 114017 - DNA, 255 bp, Heterodera glycines
cccccctccggcggtatttgtcatcatcactcttccaccagcctaccgcccactgacctaaacaaccgctgataatccatcccatcatcacacggccgaaaccctactaaattgcccgtgggatggtttttggaaggaatctttgggaagtgatcaatgaaaatgaccacctaatgggactaattattagggagggattctcaagttgatttatggggtctttcttaaattgcaattttcgagaaaagccaaatg

SEQ ID NO: 114018 - DNA, 226 bp, Heterodera glycines
atgcctaagtttataatgactaaataacaagaaataattatttacacccttcctcagtggccggtggcgtagtgggtttcgcctctaccgcaccttttttctgtcctaggttcaaatccccgttatgtaaatattttttcccatttatttttgcactttatgcaaattatttggccgaggaaaattgattcccgtccaataacattttcattcattttttcaaatg

SEQ ID NO: 114019 - DNA, 463 bp, Heterodera glycines
  unsure (1)..(463): unsure at all n locations
tttagtttatataatnttgtttaataaaaaataaatattttttgcacatttttgccaatttaattgattttaatttaattttttgttccacatttcaatcacatgtccataaattatcacattttgtcaatttttgaccatttttgttatcatcattcttgccccattttattagttgcaatttttaataaatccaaattccgataattaaattaattaatcaatcatttcttcctatgtttccaaattttatgcactgattaaatacttgaaattttatttttgttttttggttattaatttttcggctataatccttcaataatgatcagtatttcactaatttttgcgggaacaggaattaattagcttaatttgtttccgatcaatttgccaatggcaattttaattttaatttctatttttattatttcaactttaaatgtttgttattgtagtgatg

SEQ ID NO: 114020 - DNA, 284 bp, Heterodera glycines
attttgcgtttatcgaaacttagctcctaaatttaattttcgtatgttccgttgccttgcgctaaaaatctttgtgctttaatcatttgatcccttcttatgatactcattctttattaactcaaaataattaatgtttgtattttgctcatttcttccgtgtaaataattttttatttaattcacacctgttcatgtaagcgtaacaatgggttttgtcgcattactttttgtatattattatacataagcagctaatgtaattttagtgttttaaacgcatg

SEQ ID NO: 114021 - DNA, 231 bp, Heterodera glycines
agcctaaatctcgatctctggatccaaatcagtaccaaatctcgggtctctgggtccaattcagtatcttggacctaagtctcgagaaaggccaatattttgcccaattctcgagtatcttaggccgaaatctcgcgagagggggtgattgtgcaaaacaattaaatatttaaaaataaaagattaaattattatttaattaacgaatttgccgaaatatcggaggacatg

SEQ ID NO: 114022 - DNA, 345 bp, Heterodera glycines
gattttgtatgaataattatactttagaattttttaaatattattgtggtaacaattgccaagtctgcaattgataatccgaaattgtcgtaacaacaaaatagtatacatatatcatataaataaataaaaataaagccaaaatcaattttttcattttaaaaaagcttttcctcaactctttcaaacagaaatgtcttatttatttcttttgtagctaatcaaggcgtaaaggcatttatttaaattagttgaccgtttttatttttttgacttttaacaattaaaaaatccattcacagaactgggaatatgtagcaacaacgattgcgtcaaaaccgcatg

SEQ ID NO: 114023 - DNA, 76 bp, Heterodera glycines
  unsure (1)..(76): unsure at all n locations
ttttggggctcacccgcccccgcgaaaaagctacccccgcncacggggtccaaaccctagtttaaattagaaaatg

SEQ ID NO: 114024 - DNA, 262 bp, Heterodera glycines
aatattatttcttcgttcggtttcgaatttgtaattttgcctaatttagtaatcacattgctcaatttgcccccgtttcgcttcttccgtctccctttccaagagaagcgtttgagaaagcaattgctgttcaggaggtcaacgaataaaaatgcataacaaccgtcaattttataaaatatttaatttaattagattaattaattaattgattaattaattttataattaaatgattaattaattttctttccaggccatg

SEQ ID NO: 114025 - DNA, 127 bp, Heterodera glycines
acgtgattgtaaatcgttttttagattattgccaaaaaatgaaatttcacgggttttagtattaatttttaaattacagccgaaaaacagattttatcgctcaaattgccaaatcgacacaaaaatg

SEQ ID NO: 114026 - DNA, 516 bp, Heterodera glycines
ttttggttgcaaattttcaaaaaattcgcaggtctttgctcggccacctccactcggtctgctcgagctcggcacggctccggccaaagtttgttttttgttgttggcatattgacggagattgactaacaaaaaaattataagaaaatattaaaaaaaaaaaaattttttttcaacgattttttttggaagaattctataaaaatttagtaattcatcatttactttttccaaaaaaaaaattttcttgtaattcttttgtaaaaaattaagaatttttttgaaaattaaaaaaaattggaggtggtgggaaaacggaaggctcccctcaattacagcacctatgccccaggaaatttacgacgtgaaaaaattgggattttcagggggttgctggtcacgaatcaggccccaattttttttagtcagaaatctcaaaaagatttttcattttttataaaaattgtttggtaattttttttttgttgcaaaataacattttccggagaagagatg

SEQ ID NO: 114027 - DNA, 133 bp, Heterodera glycines
  unsure (1)..(133): unsure at all n locations
caatttggtcacaatattttcttagattgtgacgtccaatgatgctaattgactgcaaagtgtttaaattgttttatttcaattaatntaatttatcatactaaatattcaagattaagtgccgtagaaaatg

SEQ ID NO: 114028 - DNA, 196 bp, Heterodera glycines
gcattttatagcaaaaacaataaatcttttagcagtttgaatgacttctgcggttaatccattaaaggcatttggacaaattggtgcgcggctcgggattcgcgagaagagaagccaatttgtgcagaaggcgtggccatacattgaccccggcacgcattttggttcgttgtttcgtaaacatatttgagatatg

SEQ ID NO: 114029 - DNA, 116 bp, Heterodera glycines; identical to SEQ ID NO: 105272

SEQ ID NO: 114030 - DNA, 176 bp, Heterodera glycines
cggggactctaagcaggatctgttattttttctttttcaaaaatggcacataatctgtaaattttacatgatttgccaaaataaaacaattaaattatttataattaccaacacagacttgttctcatttgtactgattcacattttttgctcattttcaggtgattggtcgcatg

SEQ ID NO: 114031 - DNA, 339 bp, Heterodera glycines
  unsure (1)..(339): unsure at all n locations
tatcggaatttgcacgagaaatcgtttggagtgaacgtaaatgtgaaactgcntgtgtacataaagggaatgccatggaaaatatgggcaggaattaatacgaaaaatgaaagcactgagaaatggttgggctttttccttttgtgcgatgcttctaaaaaaggttttggttatcaaattattaatagaaataaaaattattttttctataaaattggtgtaattaattattgaaaaaacttatgtaaacagtaatttttaacataaaattaaaagtgattttttaaaggaaatgcgttaaaatataaatttgattattatttaatttgctttaagatg

SEQ ID NO: 114032 - DNA, 90 bp, Heterodera glycines; identical to SEQ ID NO: 109661

SEQ ID NO: 114033 - DNA, 232 bp, Heterodera glycines
attggcccattggtataagcgtatcaacatttttcaaaaagcgcataacccactctgattttccacttcccgtactgccagatatggtcaatgtaaatgggtgtcgaaattttgtgtcatccacattgaatatttgaaaattttgctccattaaaaaaagttgtttttcttaaatctaaacatttatatatattctggttcaatttttattgtctaaatggaccaaatcatg

SEQ ID NO: 114034 - DNA, 1003 bp, Heterodera glycines
acagaaaatcccgcgattgcggatacaatttgccacgaatagagaaatgttagggctatccaatgatatcaagaatgtttaagttagttgacactagacaaaatgaaccaagagaaaatttaagaattttggtaagcgaaccgactggagaaaattggaatttcgaaattctttggggaaaataatccaaatccataattctctaataaataattttctttttaaaaattttatccataattgccacaaactcccaaaaattcagcggaacgcggaaaaatcaacaaatggaaaaattttgacagaaaattattcataacgttgtccaaaatgaactaaattgttaattatttatatcgttcgatggccttaagacttttctaatatcatccaaaatttcaaaaaataaaaaacaaacgctaattaattaaactcatttctgttaggctatccatttagtagttaattatggtgctatgtcattatttaaaacatcattatgtgcgttatttaaaaaacaccaaaataaaaatttttgcttataactttgctctaaaacaaataaaattttcttaatgatggctttttaaataacgccctttatgatgtttgtttttttaaataacgactccgccccgttaattatgttagccacataattgcaaccaaaaaaatatctgaattcgtggtgtggtcaatgaagtgagagatgatcaaaattttgaccaaaaaaaagtctttgaatatacataacatgaatctcgaaattgagagcaaagaaaaatttgaaataatttatatttgcttatgttttgatgctgatcagaaaagtctcttacagcaacttgatcagatcacgcattattcatggcgaacggaacaacggcgggaaaccccaaaatatatgcaataaaaagcgaggaaatttccgaaaaaatttccaaattttgccttttagatttttccaacaattctctacctgttgtcaagtatcccaaccatg

SEQ ID NO: 114035 - DNA, 66 bp, Heterodera glycines
ttgggtgggcattagcctgttctcctcctggacactcatctcaatcatttaccgcacttacctatg

SEQ ID NO: 114036 - DNA, 1003 bp, Heterodera glycines
cacggccaaaactcaaaataattttttccataggatagtaagaaactggaataaccttccagttttagcggtgcaaattaataaggcaaaggaattcaagggtttactaaaagcaatgagttctgagtaggaaattttctgtgccacatatacactatattttaatcacctgtgaatttttaacatttgatttatttttattcatttttattacggtattcattttgtattttttatttgatcatttttatttgtttgtttttggcaccatataagagcactaatgtgcctttggtttgctcgataaattaaattaaattaaattgatgaagaattgatagcaaaaaatttttttaccataaccattttttttgtttgtttaaataataaatttaaaaaatttaaataaataaaaattccatgaaaaaattattcaaaagcatatatcaaagacaacttttattgctgtttttaaagttaggtttttttccgcgaagctttgcacaatgattgacagcaatttacccccgagggatttattcaatgggctttgccccattttttgaatttggcactaaatatgccattttttggcattttatcactcccattattttcctgaaataataatcaaagaaattgtttttttttattaaaaactttttactcggataagaattggtttatttttacagaaactgaaaatttttattattttatcaccaatttaaattttaaaaatttaattttcgatttaaaaaattttatttaaattgactttttaatttttaaatttcttttggctttaattttttaaatttcttttgacttttaaattgaataaaaaatgctaaaataatttttgaatttacgaaattttaaattattctaaagccctacgattccatcaatcattttgattcactttttaatccctcaaggccggccaactcattagagcattattcattggcgttttgccttttgccattgtgcaataatg

SEQ ID NO: 114037 - DNA, 194 bp, Heterodera glycines
ttttcgtaccgccgttttcgtaccgccgttttcgtaccggagacgttttcgtaccgccgttttcgtaccggagacgttttcgtaccgccgttttcgtacgagtgagtatggaaaaaattgcattcaaataatttgttaattttttaaattacttttaatgttttgacagttaagcttttattaactacaaaatg

SEQ ID NO: 114038 - DNA, 797 bp, Heterodera glycines
tggtcgcctcctgttgacgaagagggaagggggatttagagccaggtgcgggggatcccgcgcgggatttatccctgcggaatgccgtccgcaaaatttttgagtttcaatcccatagcgggatcttttttaaaaaaagtttagaaagtcagtttttgattctttgacttcgaaagtcggtttttgaattttttggttcaatctttttgaagctaagaaattttttgaattatgtagccattagcgaattcttcgagcgattgaatgattccaagaatgttaaatttgaatgtttctagaacagttaattgattgagtaaagtgaaacccgcaactgtgtattttttgtttgtttgtgatcctaagaaatacttcttgaatgccaaacagatgaagcccaagattcggtggcgggtgagttgtttttcgaaacgtctcgcttgcacgcattgtcaggctttggctcgctccgccgagtattggccatgagtcgctaaacgacgtgttgtcatggcgagttggcaacaactgcagctgactcggcgtggggacattttgttgttgcggctgcacctggcagagaagcgattgagtggggggttaagaaaatgggtggaaaatgcaaaacgtcccgaaaaagaatgaaaacactcgaaacttgagacccaaaaacacatacaaaaccgccgaaaggtagaggattacatttttaggaaaacttgggtgttgatgagaaaatttctaccgacaaaggataaatttgggaagtactcggattcctgtcccggaaacaaatg

SEQ ID NO: 114039 - DNA, 728 bp, Heterodera glycines
attaaagatcatttttgtcaaattacacgatttttaaaatccaaaattaattttcattatcaaaaacaaatttgcttaatcaattttcaattttgattctcataattaaattgtttttttacacactttttgtcaaaaattaaaaaaaaaaaattaatacattttaccctgaaattataaatttgttccacaatatttggctttttatgtcaatatttcagcgatttttcccttattttgccattttttcttccaccatgtttctttccacattaagaattttctttccgcgctctattaatttatgaatttgaagcgaaactaattagtgcaattaaatgcaatttctttgattgatagtgtatttttaaaatttttcttaatttattaaaaattgtaaaaacaaataacaaatatataattttaagaaaatattgtggagaattggaaagaagatgtgatttatttgatcacctatccacgccttagcgcaataaaaaaagggtaaaaaacaatggcacccgatgggatttgaacccagccatcctgggtaacactagcacttatataccagaaatttcaaatttgcggattccgctgcgggattggaattcaaatttttttttttacgggacggttccaacggtattaatcccgcaaatcccgtatttaaaatttgcagaatcccgcgcgggattttggaaactcgaattgtggttacataaatg

SEQ ID NO: 114040 - DNA, 177 bp, Heterodera glycines
gtatacaatccggaaaacccaaaactttccaaaaaagttttggtattcttcgacagcggatccgaacgctcttacgtcgaaaaggcactggcctcatttctcaagctggaagccaaaaatccagcagagataaccctgaccgggtttgcaggtgtcgacttaggcacctacaccatg

SEQ ID NO: 114041 - DNA, 90 bp, Heterodera glycines
aaaataattcataattaaattttaaataaaataatttttatattaaaaattaaaattttttctcgtatagtcgagaatattaaaacaatg

SEQ ID NO: 114042 - DNA, 282 bp, Heterodera glycines
  unsure (1)..(282): unsure at all n locations
gcaggtcacattttttaaaantccgaaagcaaattgatagtacgcggaaatgccaatttttttttgtttataatttgttaattaagttttgtgaatttagacaattgtagagtcaaatggtgccaatggcgaaaatagggacaaaatgaaaaccctaaacgtactggattacattaaatttgcaattattacttgtattttgctatatgtactggaactgaccttaacgatagcataaacgatgtcatattttatttaggtcaagtttccgccacttcaatg

SEQ ID NO: 114043 - DNA, 111 bp, Heterodera glycines
atttgcgaaaggatcctcatccatttgatgagcctcgatgagggggaggaggaggcggggaggggccatttcctgcgactttaccccgtcgtcctttgctgttacgtcatg

SEQ ID NO: 114044 - DNA, 204 bp, Heterodera glycines
aatttgtggtatgcaaatgtgagtgtgtaggggggaagatacggtattttaatatgttttgcaaattataccaagatagtctaacttttcttatatttagctaatttgacccaacccggacaattccgctaaatcaaggtagaaaattccccactccttcaccctatacatatttaaaacttttagttcgcccacatttctatg

SEQ ID NO: 114045 - DNA, 378 bp, Heterodera glycines
  unsure (1)..(378): unsure at all n locations
aaaaaaaaaatcaaagtacttgatgagaaaaatcatagacaaaatcaacgattttgcaaatccgagcttggagtcgtatcagtgccttttttacccctgaaaaagctcaaagaaaatttctatctcttttctatcgggacaccnaattcnccgatggatttcccattttttttgacatgttcgtcacttttgctgataaatttgggggtagagcaaaaaatgccgaaatttgaatattctttaggtcccccaaaacccgngtcacgtctcttcccccggttcaatccctgtttttaattgcttatttaccgaattcaaataattttttgcaaggtgatccgactcgctgccacaccggaagagcctgacgagcccatg

SEQ ID NO: 114046 - DNA, 393 bp, Heterodera glycines
caaaaaatctttcaaataattttaatttgtaaattgctggatatgtatgaattaataaaaaggtatctctataataatttttacaattcaaaataaaagaaaaggagaatcaaattttttggacattttatacatttgttataccacatttaaatcattcatgttcaaaaaaatgtccttaaaaggtacagaaatatttaaaaaaatcatttcactaattttatatagttcatgcattccggctatttataaattaaaattaatatttgctctacagattgtatatagttataggtgggtcctacccccgcgcgtagttttaaaggtaaaggtaaaaaggtaatgttatatcaaaatttgcattgttaaacaaaaaagttttgcttaacaatg

SEQ ID NO: 114047 - DNA, 293 bp, Heterodera glycines
  unsure (1)..(293): unsure at all n locations
ttattatagtcgcgagaattaaangcagcaatagtgcgaacggaaatttactcaaaaatatattacgggtaaaaacaaagaagaagcgcaaagtnntagttgcactnttccacncagaagcatgtcaatgccacggaggtgattccgttgtacattgtgaatgtgaaaaaagtccacttaccgaaatatttgctaggcaagagaaccttttacccattaaaacacagggaagttacgtatacttcgattcccaaattaaagctaaaatacaacaaacaacttctcttcaaatg

SEQ ID NO: 114048 - DNA, 413 bp, Heterodera glycines
gtcaacagcagcacacaaaaataggacagctaataaaagacaattcggactggttgtgtgcattggcaaggaccagatcctctaaaaagtgtagaaagatggtgtgtcacgcaaccagcgaacagctgttagcactcgtggaaatttgtctaaatcttgtcgcttcgcgtttccaactgactagccgacagaaaagaagactgatgccctacgtggaaactgtgcgacggatgagcagagcgagaagtgaacgcggtgcgagacgtgtgcttgtgcagaaaggatcaggattcgtggggttgtttgccgccctcctaacacccgtgctaattgaagtagcaaaatcatttgtcaccaaaaacgcataaatacccgacaattttgttgttttcgtttacattttttgcaaaatg

SEQ ID NO: 114049 - DNA, 112 bp, Heterodera glycines
tctgagaaacggcgcccgagccagagaaaggcggtggttgaccccattgaacattgccgttcttaggggtgggggccgaagtaggggtgtggtgggggtcaccaaatcgatg

SEQ ID NO: 114050 - DNA, 93 bp, Heterodera glycines
tcatccacttccgctaatgatgatgatgatccctccgtgtttgagcatctttgttcgccctcggccatacggaggcaaggcgaagaagcaatg

SEQ ID NO: 114051 - DNA, 76 bp, Heterodera glycines
ggtaaaaaatctcaattcctcccttaacattaacaatctttcacctacagcaccggacaaaggcgactgcgaaatg

SEQ ID NO: 114052 - DNA, 460 bp, Heterodera glycines
actaattcaaaatttacactggtaaatgccttttttgtattgaatgatttctcatttctcagttacaaatttcttcattttttgctttctttttgctccttttctctccccattttatttctcaaaaagtgacattttcttcagttaaaaacatttaaatgttctgctgatgactgacacttctcaaaatacaaatgcatttgctttttgtttttcccttttcttttctcttttctcttttctcttatgctcaatttcccatttctccgtcccatcgatttgctaagtgaataaaataaacaacacagccaaagaaaggactttcgactttcgcttttccttattttttaatttaaaatatttttgtagttaaatttcaaacattcttttaataccatgtaaaataattaatgcaaatttcaaattttagctgaataaatattattttagctgcgaaatg

SEQ ID NO: 114053 - DNA, 958 bp, Heterodera glycines
aaggcggagtgagagctgcttttgacagtcaatcgcgtgttttgacatgtccagcagatgacaattgtccagaggggtacaaatgtgtaaacgaacattgttgtcctgctaataaaggtattaattaatttattaaagaggtcgggaccgggatcagtcaagttttttaccgagataagtcccggttcatgggtttatagctggatttcccggtttttctttttgtttgactgattcgccggtccataacctggatcctgaccccgggttccagaattctccaatctttttacctaccctggataagtgatttccaatgataatttttgccagcaaaaaggcgagaagtaatcctatgcgggaatctcgcgttttcccgttatcccgcagaatttgcgggaatccggcacttaaaacgggaaaattctttctgagaaaaatgattttttttttctggtggattaattccacaaaaatgccatcctaagcaatggttgttgcgtttattatgttaattatttaacaattttcagacattgtctgcaaggttcaaagtgatagtgggaaatatgtgtttcaacagaatcatacacaagttaattaatgatttttcagaattaaaattgatttcaaaaaaatttagcgttatttttacaaagctttggctggaaattgtgtggtgttctcttattttggtgcacttggcaatgcgaataattttgagtaatttaagaaaaatatccatttattattttgaaaagttttattttagaacttacgaagaatgcatcaattattgcaaaaatgcttagaagacattttttgaatttctaaatttttctacttaaaataaatttttctcagaatttgttataataaaatattgttatatcaaatcatactaacattttattatttttatttatgttaaaaaaataatattttttttggcaatatg

SEQ ID NO: 114054 - DNA, 120 bp, Heterodera glycines
gttatctgatgagtcattcatttgccaaaacctgttggtcctcacaaaaaaacaactaaactaaaacagcgttcctccggcacttttgttgcgaccgactcatcgggcggcgctcagatg

SEQ ID NO: 114055 - DNA, 1003 bp, Heterodera glycines
aattccgatgccccaaaaattttcggaagtcggaagtcggaattccgatgccccaaaaattttcggaagtcggaatttttcaaaaaaaaatataataaatttttaaaaaaatatttaataggctaaatttttaaatttttaaccatgtaaaaggtaatttcaaactgtttttagtttatttctatgttttttaaaaagatcaaaatattttaagtaattttacattattttggattttttttgggaaagttacaccctttttttgcggcgcgctttatccaaagagaatttgagaaactgtggggaaggaagggtccggcggtgccgatatgcgccgccgggaaaaattttgtaattttaatgtaaattgttaacaaattttgtccaaaaaatggaaaatttagcgattttgagcaaattttcaagaaaattaagtttttttttgagtccggcggtgccgataggtgccgtcggaaaaaaaattgaaaatttctatgcaatttattaacataaattgtacaaaaattgctaattttttgaaaaaaaaactcaaaaaaattccgaaaaattccgacttttcatcaaaaatttcggaagtcggaagtcgggattccgaggccccaaaaattttcggaagtcggaattccgtgccatccctggtatgagtgactgaatcccattagtggggggggggataaataagcattggaattgcagtagatttggcttaagtataaataaatgtttaatgcatgcggtaataatttaaaaaaaaaaactttttttctatctgtcattttccctttattttggggtcatcatttagcctcatttattatatttccatttgccctcacaaataagtgacctctaatacacaaaaagtgcttttatgcagcaatttctcagtttctcaaccaaactaacaataaggaatataataaataattattattttattttagaaaaaaaaataaaataaatttcaacagaaattcaaatg

SEQ ID NO: 114056 - DNA, 272 bp, Heterodera glycines
tttttgaccaaaattcgttaacaaatcgcattaaaaattaaaacattttcccggtggcgcctatcggcaccgccggaccccctgtttccaaaaagtcttttggaataaccgccgcaaaaaaagtggaatgaaagcaacaaaaaaaaaatcgtcacccgtggggaggtaggaggtacccccctcccacccaagccgaaatcttgggaccgtccctggcctttatttgaacaaaatttattgttgtatacttttacaattgcaggcgcagaatg

SEQ ID NO: 114057 - DNA, 132 bp, Heterodera glycines
tctgtagtgagacgtggccaaactgagtcgacgcggcccggtactagtgcagtttgagtccgccttttgggtcaaattttttcaaaattttttttttcttttttattgtcgcaattgttttttagattaatg

SEQ ID NO: 114058 - DNA, 463 bp, Heterodera glycines
attgctctccaataatttaagaaatcatccaaattttgttggccattttattaaattgactagatttattggtaattgattggtaaatggcctcataaattgcaattcattgattgatttataattcctttctgctgccatcagattggtgttgtgcttcttgggagacaatcggtcgacattctccaagctgtacagctttcgtgtcaacgtctccatggaaatctgcacagtgtgtttttattgcctaatttgggtccaaatggccagagggcgatcaaaaaagtcaaaagtaagaagggcaaacgacaatctaataaataataatttatttattaattaattgtttaaataattattgttaattgtttaaataatatttattcttaaataaaactaattaaataattgattattaattgcttcattccttaatggctaagtcacttcgaccagcaacatg

SEQ ID NO: 114059 - DNA, 582 bp, Heterodera glycines
ggtgcgaagctggtcccgcactttgtcaagaccagtggactggtgagaagtaacgtaggaaatctgagttcatcgaatgaatgtggactgccttttgaggattgtggttcaatggccagtcccttaaaggacgaccatggctaggctggtctgctttgcgaccatagccatcagtgtcggtctgctttgcgaccatgacacagtgtaaaattggttcgctgactggcccttcggggcttggtcgcactaatgtggttcgctgacaggcccttcggggcttggtcgcactaatgtggttcgctgacaggcccttcggggcattgtcgcatcaatgtggttcgcagacaggcccttcggggaatgtatcgcaccaacttttgcatctgcattcttattgagatgtgtgagccctggctgatggatttcagcacaggacgactacactccacggcgaagaatgatgacagaataacctttttgcgcaattttaaataaatatttttattttatgtgcatcatatggttattttcctcatactttgtgccacatttgcaacactttctgatttgttgtttcagatg

SEQ ID NO: 114060 - DNA, 207 bp, Heterodera glycines
tggtactctcatgtcatcaacgtcaacatccaaacggctcactcccgctacggtgaatatgtgttcaagcgcgaaggtcaggtatatcaagtggacagctacatcaaaggcacaaatgggaagcgggacaaaataatagaggtgaatgggtgtctgtggcacggttgcgaggagtgtttttgtaatattgacgaagaaactaaaatg

SEQ ID NO: 114061 - DNA, 846 bp, Heterodera glycines
ttggccatcgatggtactcaagaatgtaaaatttgattgcctttaagcaaagttatgccatgttttgtcgaaaaaattgctaaaattggcggattttatgaaacgacctagcaccttcataagcaatcaagaaaaagtttaactaacgataattaacgaaaaactcacaacatttagacacttctacttttgaatcggcccaagacgtctttagtgccgtcaaagaaatgatgttcaaggaggatgacgagcccatacaaaattcaatgtgttaaattaatattaaaatttagctatttttaaaataataacttttttgccaattagtcagttaaaattttccaaaaagattttcaaaatttctgaaatattcagtgaaatacaaaaaaatattagatttatactggtaatgaataatttattatgtttgcatttgctcgtcagcatgataaaataggatgagagaaaaattaaaagtatatcctggtaacatcattaattttaggtgtttgctacaagacataattacgggaaaaaattttcatcgcaaatcggtggaagagctccaaaacataatcagactcgacacacttcaattggtttgtaagaaaaaatcattgttatcatgccattgatgaaagacattttgaaattttttagctaaatattttttacttatttttgatttttagagcatatttttgtttttttttatgatctgaaggctacctattttggcagtttttagagactaaaaatcgtgtcctttagtcaaagtgccatgaccaaattttctgaaggctttactaacaataaaaatgtattttttattttttgtagatgatg

SEQ ID NO: 114062 - DNA, 93 bp, Heterodera glycines
taattaaagtgatttttgataggatggcattctgtgtttgcgaaatttcccatctccaaatgttgtcgtcccttaattttctactttgaaatg

SEQ ID NO: 114063 - DNA, 359 bp, Heterodera glycines
ttttgctgtttcatttgatttatttcagcattttcacatatattaattttctatgattaatcttaattttattttacttaagccattttttaaataagacaaaattatatgagataatagattcaataattttaaagaaataatatatcctttttttgttgcataattaattaaatttaattttttcatatttcgatttggtaattttttatttttttttatttttcattatgtctccatctcttcgaatcgaaacgattgataattatttgatttttctgatttgtgctttgagattttcttttttattaaatttttcagtcgatatttattatttttgaaggttttcctcgagaatg

SEQ ID NO: 114064 - DNA, 226 bp, Heterodera glycines
agtacaaatgccgcgcgaatggcgactgtccaattgacaaaggtgagagagagaaagccaagagtatgaatggcaagtggttattttgataacacttgtttcatctttggattaggtcgatcattttcaatacttatacttttgtgctgttttctttctgtactcagatggcatgcgcaattgttgtcgtgcctgccgccttcggcgctgttttgaggccggcatg

SEQ ID NO: 114065 - DNA, 82 bp, Heterodera glycines
attttcgctttttattattttttttttaattataaatcatatttatttgttaaacgattttagaaactacaaagaatgcatg

SEQ ID NO: 114066 - DNA, 137 bp, Heterodera glycines
atggcaccgaaaatcatttcgaattttgaaaaggcaccttttatcgggcagggaaagcctttggccttggaagtgcgggccgagtcgaggccaaaaggcaagcgaaaggcgaaaagacgcaaattgagatgaaaatg

SEQ ID NO: 114067 - DNA, 216 bp, Heterodera glycines
tacagattgggatcagttcacatgggatcagtgtgttcagtgaggtagggttttctcacttttgtcttatatagcgaagatcagagcagttttgcaaaaaaaaaagaggaaaaacttttatttatttgaaaaaaattaaataaaacactcaaaaatgaaatgcgtaacaaataaacgagtgaattttaataaattttgaaattcattcagcaaatg

SEQ ID NO: 114068 - DNA, 204 bp, Heterodera glycines
tttaagctcgcagggcgcatgaagaaaatgatatttgaaaaaacagaaaaatttttcataccaaagaaaacaaaattttaattttttttcttttcattttaaattaattttaaaacttcgaattcttcttgagattaaaataaacaaaaataaaaatattttttagatattatatatttaattgttttattttgatttataatg

SEQ ID NO: 114069 - DNA, 64 bp, Heterodera glycines
ggggcgactgagcaaaccacctaaaagtttaaatttaaactcagaaaaagcaattagcaaaatg

SEQ ID NO: 114070 - DNA, 1003 bp, Heterodera glycines
taaaaagagtatatacggtattctttgcttgttttttttgttatgtttttactgaaaattgtatttttgactacttttggctcataattttgccattttttgtcaccttttcggatttttgtcaaactattttcgcgtattttcttcactgtttcgttaactatgctgagatttttggcttcaagaagctaattatatccaaaaatgatcatttttttcgttaccctaatgcggaatattggcttgacagccatgcacatgttataacctttttggtaattgcctaatcgcgaagcaataatttaaatacagcttctaaacaagataataaattgtgaatgtaattccgactacaaacctttcgaggaaatggtcatttataaatttagaaatagaaattctaattaaaaccttcatttagttccctggctattaggtcaatatttagtattaggttattcatttcaataaaattatagaaagtaatttcatcagtaaaaacataacaaaaaacaaacaaagaataatcgaggtttggcaaaatctttgaaatttgcttaatgtagaatattttttcgaaatttcgatttctccacttcggccatctccaattggaaatatttttagacgatttttttaaaaaagaaaaaataataatttccttaaaaaatttaaaaagaccgttttttagggttacctttttaatttttattactttaaaataattggtcagtagatgtaaaaaataatgaaaatcaattttcatgtgtatattcgtcgctcaacgaataaattgagttgctaaaatcaataaattggcgtaacgcactgtcatattgattattttatacaattcattggcactaaaaatttagttttagaaaaaaaattttcattgaaatcattattttgcaaaaatgaattattataattaacattttttaataatataatttataaatttttgcatttaattttttgagatttaattctttagataatg

SEQ ID NO: 114071 - DNA, 81 bp, Heterodera glycines
agtaatgttaattaattttaatggcatgccatttagaatgatggcatcggctccattctcaaagacattgcgccgcaaatg

SEQ ID NO: 114072 - DNA, 206 bp, Heterodera glycines
  unsure (1)..(206): unsure at all n locations
aaaagctcgggaatatgtttcattacttttgatgacataaaatgaanattttntcgacaataggagatgccnaaggcttacggttactcgctctaattttggtttttccatctccaaaaacattgcatttcccgaaaattgccttttttttatcccatctctaaaaaatgccatcaattttcaggcgcagaatttgtgagcgcatg

SEQ ID NO: 114073 - DNA, 1003 bp, Heterodera glycines
atgtcccgcgccaaagtgaccccgaccccaaaaaattgtggtagaaaaaaatcaaaaacatgcaaaaagtgctatgaaattgagttggactctctgatccgaatttaatgtgtgaatttcccataatttcctcatctttatcctcttcggttgcacaatgtaaattaaacacatttgaagatatgtagtattcaagcgtcaaaatgtttgatcgtccgccaaatcatggtccaggatctttgctttttgaaaaatcgattctgaggggtgcattttttgaaaaaaagtaacgccaattttttgttttgtttttttattgctttttcataataatgtttctgttgaaaagcagaaatatttaaaagttttttaaaaatttcacaagtcataataattgtttaaaagtcgctctaaatcgaaaagtgatcgaagaaaatgtgtttttgcgcttatctcagcatatgttatccccccaaaaaagtaggtgaaaacctaaaaatccgttccctgctaatatcgatgattgaaaaattgttaattgctaggaaactgaggcggactctctgatcgggtttttccggatttggtaattctcaccgatcgatgcacgttcaaatgcacgaaagcttgcctttgatttgaatgttgcttgcttatttgttagctcggattcgtatgtacttgaatggcaagtacgtacttgaaattgactctcatgcgagaaaatttagaaaaactctcgagatttttcgtcactaaaaatcgcaacctttcttattaccctagtgaatttttaattatttttttctaagcggggggatgagtgaacccttaactacttaatggatttccaaattctctagataatcgtttcaatcgaaaattcatttctcaaatacaattaatcaatttaattattcatttccgtacacttaatcagcagacgacatttttgttgctttgatccgcttcttcttcgtctttttgaaaggttaccaaaatg

SEQ ID NO: 114074 - DNA, 62 bp, Heterodera glycines
tgtatttttgtttttattttatatattattaaaaaaacaagcaataattttcagaagtgatg

SEQ ID NO: 114075 - DNA, 131 bp, Heterodera glycines
aaaccccacaaaaggccatcaagtttttcaaaaacccggcaccgaaccccaaaagccggcaaatcccggcttttccattcaaaattgcgatcctgcagaccaaccctgctgatggcctgctgctggagatg

SEQ ID NO: 114076 - DNA, 1003 bp, Heterodera glycines
aaaaaatgttaccgtgggaaaattttctgtttgctcgtttttgacaaccataaaatcaatcaatgttttaaatcacatttaagggatgtaatttttaaattaaattgtaaaaaaaattttaaaaatcacttcaatagaaaaaaggatatttaaatttaaaaataatacaaaaatgacgggtccggattcggaattggaatcttgcagcctgggttggattgccgagattaaaatcccaattttggcggaatttgaatcctgcccgggacaatcctgttttttgggatcccgatcctgacccttaaaataaattaaatttgtcgtttattctcgttttcgaccgagaaagtgaaataaataatagaacctaaaaagggcaaaaatatttggcggtttaatttatggcacagctgttaactcccgaaagatttttttttaaattttaaaaatgtcataaatttttatttttataaatggattaaagaattaggattatacaaatatcacagcaaatcaaaaacggatgaacaaaaaattgaaattgtgcaaaaatatataaataattcggaatgaatggaaaaagattaacggagaaagaaaaaatggagaaagtgaaaatatattggcaaataaaaggagaaaatccaaaaatgagtgacgagaaaatttcaaaaataatgaaaattaatgaaaacgctcagagatttcttgtgatcagtaggattggaattttaattaacgatgaaatttttttatttacactattttttaaaattattgtctagcgaccaatcagtagaaaagagaaaaatataaaaatatttttgagaaataaattattatttatatctctaattatattgaataaatatcaattttaattaaaaaaaatatcaacaatgaaactgtccatattattctttttaattgttcaaattgaaattggagcagaaaagaaaaatttgaacaaaaaagcatttgaagaaatatttggagaaaaatg

SEQ ID NO: 114077 - DNA, 1003 bp, Heterodera glycines
  unsure (1)..(1003): unsure at all n locations
acatactgtacataattagtaattacaagctctagttatggcctatgttaagaaacgcgattgaaagcgcttaaaaataagctaacgagcgcatgaattcctcggtgtgcggacatctcgcctactgtcattttgtgtaatgacatttccaaaatcggacgtttcgcctactaacctaaaatcggacgttttgcctactaaccaaaaagcggacgttttgcctactaagccgattcggacatttcgcccacttaaccaaaaacatcatcaaaaaaatcattgatatgtatagggcaccgaactggctgcgccgaaaaaacccgcgccgaatggcccgtcgaactgggcgattcccgttttcgatcattttcccttgaaatacggtagaaatcagtcatttttgagttgtccaacttctcaccctctcttgctctctgggtataagtcatagacccaccacccaanaaggcaattcggtagagaattttgtgctctttccaatgggtttatttattttctctaaaagaattttcccaacctcctaagaatttttttcgaaaattttcctgatttttagtgtattttagggtaactctttccctatgcaggagtgatcactgatcagataagttggtgtaaaagacttttttgaaagtttagtccgtagtccggggcccaaaacatgataaaaatttgaaagactcgaaacttttttcatatgagttaaattgcttagcattcgcttagagaaagattctcttttcaaaacttttcgaatgatatcaatattcgatttacttggtgggaatgaagtgaattatggctgatctaaataaacaatacaataaatggcaatgatcagtgtaaattttgaaatagcgcacaaaattacgaaaattggcgttatgtatttattcattttgtctattttaattttctgttcctgacaaatgagccttgagcttttgaaatttttgagtttgggtaattttggcaaacaatg

SEQ ID NO: 114078 - DNA, 768 bp, Heterodera glycines
  unsure (1)..(768): unsure at all n locations
gcacattttgggtaaaaaataataaaaataaaaataattaattaaaatntaagtgaaattgaatacagtaggacagattttgatgaaaaactggagagattgtggaaattatttgggggaattctgtccaatgcgacggagggatttttggacaatgaaaaaagcgaaaatgaggcgaatttggcgaaggcattggccgatttgagcggttatttggagagggaatttggcaaaattggcgaaagtgccaaaaattacactgtcaattttacagtgaccacaattaacagctttttactgttttgcttaaatgaaaataatttggaaaaagtgcaaaaaatggcgcaaaaccggcaaattttgaaggaaattttccaagaagtaggggaagggattgaaaattttgaaagaattttcggacgcttttggcagtggctagaagagaaagcggccgcggaaaatactgggggtaattaattaattactatttattaattgattttataaattgagttgaacgaaacagtttaaattttacatttaaaaatttctctttttctcaatttttatgcttttttgtcatttgatacattttgccatttttaaaataaataatttaaataaataatttttatatattctttttaattagaaaatgacagcaaaaaaataccaatagaatttgtaattgaacaaaaagccaaagagaaaaaattagaaaatgcaaaaattataaaaacttacgaacaatgcccaagggcaaaaatg

SEQ ID NO: 114079 - DNA, 361 bp, Heterodera glycines
attacctattttataacagactaataattttgctaaatagttcattgcatttaatcaccatttcatattgttctaataaatttaaatattaatcattataaatttctttaatcccctttggtgtttgaatacacccgtaaatgtgacaagcgcatcgccggtagcggcatgatgcattagtttctcttttgtgccggttcagaaatgccgcacatccctttgttatttgaatttgaccccgttcgcatcggtcaccgaagcgtcggaccttggctacacagatggccacgatcccgtctcatataaaagggcacatgggaaagtcgccctctttttttttcaccattcacccccaaaaatg

SEQ ID NO: 114080 - DNA, 535 bp, Heterodera glycines
agtgagcgaatgaatggaggcaaaaaagggggaattttttttttttttttgatgggaaggttagttttttttatcagaaagaatggaaaaaaacactttgtccttgtgagcgtattattgtaaagcctggggccagcgtgggccgccgcgttaaattcgcgaaatgcgaaaaatttgaaaaatttccattctcttgaacattcaaacagcatttatgtatgtacaataccataaatagaaattgaaaacaaaaaggaaattgtaaaattattccgggtgaatgaatgcggcgaaaaatggtaagatttgggcaaccctaactgggcctttccaagaagaaatttcatcggtttagacattttttgtcacattccttttgtacccaccgccctctaaaaaaaaaaaaatttttttttgtttttttttcgagggtaatttatgcggtgaacatttaggaatttatcatgaaaaattgtcaaaaaaatttttcaagcgaacataaaagaaccaaatttttaggttagttgccaaaatg

SEQ ID NO: 114081 - DNA, 110 bp, Heterodera glycines
ttggactgagaacgcgtgtggccaaatacgcggaagcaaacgaaaaatgtttattgaccaagtccggacccgaagaatttaaagaacacacaattccgattcggcgaatg

SEQ ID NO: 114082 - DNA, 77 bp, Heterodera glycines
ggtcagttaagggggagcagtgccgttatttcttgggcggggacagttttccattggtgtactgtatgtaacacatg

SEQ ID NO: 114083 - DNA, 743 bp, Heterodera glycines
ttggctttacttcgccgtttttcaatttctctcccaaattcaatttgaagtgccaatgtcggatatcgaagcggggaattactttaccgttttgataaaactcagctttgtagacggttttactttaccgagctgataactgtcgaatctttccgcttttctccaccaaatgtgatttgatttcacttttacactccttccaactcgtgagttacttttcactttttggagacgctgtcggacttatagtctacaaattccccggatagtaccgcgttgatcgtcacctttttccaggagcgccacgtcgtaaaattagccgcctttttgccggggtccttctctgctcttttgccgaattccaaaacggggcgaaggagaagaatgagaaggaagacttttaaaatcacttaaagccacagcaatccaaatcaattaaatttaaacaacacaacaattaaaagcaccattaaaattaccacacaaaaatccacatcaaaaattaagtccggggcgatgcaaaaaaacaaaaatgaaaatgaaagacacaaaaaaataaaacaaaatgccaaattaattaaaactttaaaagtcaaatgaggtcattatttaattatcacacttatgtaatttcttattataaatcatatattaaaataaattgttatattaaaattgataaaatgattaaaaaataaatgcataaaaaaggctgaaaaataattttattaaatgagcaaatg

SEQ ID NO: 114084 - DNA, 719 bp, Heterodera glycines
tctttaattattgacttattcttttcctgtcaaataatttttcattttttctttttttaattttttgttcattcaataattattgattcgaatttgatctttattaattttttagttaagatgtgatgttctcgttccaaaaatatttcgagaaggctctcgaaaaggaagagtttttctggccgaaaaccagaaaaaagtggaggcgttgttaattgagtcatcaaattataaaattgctgtacatagagactatgaaagccgcttttctgatttattgcaacatatcgccgcatctctttcttctttttctgtaagattgtgagaaatttaagatttttacgactcggaaaaaggtacgcctatgctaagagcaatgggcaaagcctggggcagagagctacttttgaaccctgttgattttttaattgacaacaaacgtgtagataggaggaaacaaaaaagaaaacaaaatttcaaaattttttagagatttggttcgatcatgggacctactctatagacttccgccttcacttttcgacacttcacgccgtgtgattgctgagaataaactggaagaatttttaaattacaagcattattctcatgattttttataataaatattaaatgcaaagttctttttaaagtgaaggttttgaccaaactattgatacaattttaatttactatttttttagaaatttcaaaatatg

SEQ ID NO: 114085 - DNA, 100 bp, Heterodera glycines
ggcgagtcgacaacaataattatttttcactgaccaatgtcaatttatttcatttgcaatattttttttcaagtttttcggaggacgaaatttttacatg

SEQ ID NO: 114086 - DNA, 749 bp, Heterodera glycines
tttttaaattgctaaagaaataagaatttaaacaaatgtacatattttctttaaataaaaatagaaaaaaattcattttataaaaaataatcttacaagaaatcgtctcgaaaaataatccaatagtcaaattacggatcaaaatttcggataaatcccaaaaatacgcaacccgcaatccgcaattacgggggtccaaaaaccccgcaatttccgtaatccgcaatccgcaatccgcaattgcgtccagccctggtgctgtcacagagtgtcctttatgactcgaaaagtttcttttatttgtaagcggcaattacttttttaagacaattaattaatttatttattttttgaatttatttgtgtaattaatagggcggaaatttatttatttaaacttttttctgccaggtttatttgatgaaaaatgcaagaaaattacttcattttttgccgtaaatgtttcatttgaaactttaatatccataatataaattaaatgtttggagctttcataaataaaatattaatttatggaaaatatttttattaatattttatccatatttgataaatattttgtagtttcattcgtaattcatttaaatattttgatatttttcataaatataaatgccggccttattaattaatcatgtaaatcagagaaaaaaagagatttccaaaattaatcatttaaatttttaattttttcataaaaagtgcccgaagtgaaaggaagtccaatg

SEQ ID NO: 114087 - DNA, 613 bp, Heterodera glycines
taatttaggtggtatacgccggcaatgttttcactggcattgatcgattgattgtgatattttcaatgaaatgtaaattcacaaagaaatccctcaaaaatttattgtttttcaggcactccaaattcaaaattcgcctgtatttaggctcaatgacaattttttctgtattatatggttgctgtaactgtatcaatgtgttttatttcgcaaaattagatggtgatcagttgatcactggttgccttgctgacttttatttggtacaaattaaaaaaagggaatttttagcatttttttcgccaaaatgacaaattttcagcttttttgatcaaattttaaaaaaaattcagtcaatgtagtgttcgactatgccgacaaatgcagccaggaaaaatatgaaaattcaacaaaatcttgataataaaattagctcaatattttataaataaacaataggttttttcattcgagtttaattttacaaaaactgcgaaatttaactcacattttgggaaaaatatgtttaattttggatttttagtcgtcacttttttatggccacatttacaattttattaaattttagcataccaattcattctttaacatg

SEQ ID NO: 114088 - DNA, 1003 bp, Heterodera glycines
atcggtcttcaatttggaaagataatcccccaaaggaagtggccaattgtgccgccgtgccgcccctcgggcggcgcccggcggctccgttcccttttcggtgaggagaagggggggggggagaataatgcgccaattttgcccaattatattacgatgatggcacttaagtgggaagcgtttaattacggtgctgaatgctgttgggatggtggtcggcaaacaccaaaaataattttgggacaaacatttgccaaatttggcagagcgcgaggtgccgaaaatagggaattttattttttggcattttggaacagtatttggcaatatttaattggaccaggcaatcaaaaaaataattgacagattcaatgttcgaatttaacatttttcaaatgtatatttattgaggaaatatttcttgaaaaacagcaaatgcctaaactaacatttgaaaatttaatttgaatttaattaatcccaaaaaattggcattttgcccatcttttacgcgctcattgttcaccagcagcagcagttcccattatttttgttatttttgttttgcacaaatatgcaactcctcagcctccttcactaatctcattaagtaattgttttttttttttgacttttttgttttcccataaacccccgaggggttaaatgttttttttgcccccagcaaagtccccataactaaagtcacaaagtcaattcatcatcatcttcatcgtccctgagaggaccccaaaatcctctccatgctgatccaatttttgggagcacacatgggagagaatcgcgtgatgagacgcccccccccccgtccccgttaattcggtagccaattatccccccgccgccccaagccttccaaatttgatgatggccgataattatgcgttacggtattacggtaacaaatgcgcacgcccaattttggcattttcccctcgggggtcaacaaaaaggtgacgacgatgatgatgatattataatg

SEQ ID NO: 114089 - DNA, 455 bp, Heterodera glycines
taatcacccaaaactgttcatacgtttttttagaaagtcgaaactttagaccaaaactctcgaacagcgctaacaattattgagtgttctatgcattattcatttctttttaattatttcaattaattaattgcattttttgtccatttggctgtacgtccagccagggtcaaaagtattgcatcaaaaaaatatttttttgaaaaatacgattttctctaaaatgaatggagggaaaaaagtattgtttacgccaaaagaaacgtcaattaatgcactaacaaatacccaaaaactgggcccgataactctctttgtcgtcgagaattggtcatgaccaaaaaaaccctttttttgatgggacaaaagtaatgtatcaaaatattttatgattgttctcttggtttcatacgatcaaaatagcgtaatacttctctgattagagtcttaatatg

SEQ ID NO: 114090 - DNA, 81 bp, Heterodera glycines
ggttggccaagcacattttgcacctgatggttaattttcattgattgtttcaaatgatagggcaaatggactcatccgatg

SEQ ID NO: 114091 - DNA, 321 bp, Heterodera glycines
aaaatgtgtcatttcaatactaaatcgtttcgattcgattcgtcgctcaattataacgtcttttcgtgactgccttatgttaaccgaaaattttaataaataacaaaaaatgataaggacaaaggtgagaaattgattttgaactgggctttttgagcaagaaaagaaagaatcgataaatcggtagaaatgcaaaaaaagaagacataaatctagggatttggcttttgttttgaaagaggcaaaatttgtatcactgatcatctgattcattatcaccatcattttcgtgacgaagaacgggaattgcttgtacatatg

SEQ ID NO: 114092 - DNA, 62 bp, Heterodera glycines
ggtggggaaggggggaagacaggtcgagactctcgactgaattaattggaaacaaaggaatg

SEQ ID NO: 114093 - DNA, 1003 bp, Heterodera glycines
attgtatttgagaaatgaattttcgattgaaacgattatctagagaatttggaaatccattaagtagttaagggttcactcatccccccgcttagaaaaaaataattaaaaattcactagggtaataagaaaggttgcgatttttagtgacgaaaaatctcgagagtttttctaaattttctcgcatgagagtcaatttcaagtacgtacttgccattcaagtacatacgaatccgagctaacaaataagcaagcaacattcaaatcaaaggcaagctttcgtgcatttgaacgtgcatcgatcggtgagaattaccaaatccggaaaaacccgatcagagagtccgcctcagtttcctagcaattaacaatttttcaatcatcgatattagcagggaacggatttttaggttttcacctacttttttggggggataacatatgctgagataagcgcaaaaacacattttcttcgatcacttttcgatttagagcgacttttaaacaattattatgacttgtgaaatttttaaaaaacttttaaatatttctgcttttcaacagaaacattattatgaaaaagcaataaaaaaacaaaacaaaaaattggcgttactttttttcaaaaaatgcacccctcagaatcgatttttcaaaaagcaaagatcctggaccatgatttggcggacgatcaaacattttgacgcttgaatactacatatcttcaaatgtgtttaatttacattgtgcaaccgaagaggataaagatgaggaaattatgggaaattcacacattaaattcggatcagagagtccaactcaatttcatagcactttttgcatgtttttgatttttttctaccacaattttttggggtcggggtcactttggcgcgggacattttggcgccgcaaaataggtctaagtgttctctaatagcctgcaagatgctagaaaaatatattcgttttaacaaaagatatggcgtgctgcgccaaaatg

SEQ ID NO: 114094 - DNA, 201 bp, Heterodera glycines
tcataggcgggatgttgtatattcccagcagcggtgccgcaaaattatccgaaaccgacccttttccggtcggcattttttttcattcacctttatggcacatcatcaattcatttccaatttaaattcttcaatttttaatggggcaaagtgcacctctctttctctctctcactttctgaaaatgccattttaattatg

SEQ ID NO: 114095 - DNA, 1003 bp, Heterodera glycines
tacaaaaattcttttctatttaaagttgtgcttctcattgcttttaagtcccaccatttccagactcaaaattgcataagatgactaaattgatcagaattttcattgccaaaatgtccttttttggtgaaaatctgttaataaatcaggacgaagttacaaaatttttccggcgtcggattctcttccctcgcccattcaataaaagtcttttttttgtaaaaatgcgccgtaaaaatattggtaaaaatctgattttttcatcccgaacagtgatgccaacccgaacccgaaacccgaggtttttctcaaccagaaacccgaacccaaaattttttgagtgaattggacggagaaaacgcaatggcagtgctttacgcaggtaaaaattttcttttagggtttttgtggtaactaatgaaattttatttcgaactagggtctggctggccccgaccccgaacccctacatttttctgggttaacacgacgcttccgacccttaaccccgactcgtggtcggggttaaatatacactcataagaatggcattttcgaaaaggcaaaagaatttataaaaattttgaatttttttaaactattttgccaaaattttattaaataaagtaaatttactatgtttagtcatatgtagagcccggacatgcacgaaaaatgtgaaaaaaggcataaaaaaataacaataacatcaaaaaaggcacgaaaaattgaaaaaggcagcaaaaatcaacatttttctagcaaaaaatctttcaagaaacctttttttttgctcttcgggcctaatttttttttctccatgttatatcaacaatttcagcaccggagcgaaaaaaaaaagaattttttataaatggggtccggcggtgccgataggcgccgctgggaatttttttttggaaattgtaagaaatgtgataaaaaaaatagcaaaaaatttaagaaaaaggcatatgtttcaaaatccaggcttagtcatatg

SEQ ID NO: 114096 - DNA, 54 bp, Heterodera glycines
attcatgacccaaagaaattatgttttatgcaaaaattgaaaatcaaaaaaatg

SEQ ID NO: 114097 - DNA, 76 bp, Heterodera glycines
aagaggtacaaaagtgattagaagaggtaccaaagtgattagaagaggtacaaaagtgattagaagaggtacaatg

SEQ ID NO: 114098 - DNA, 54 bp, Heterodera glycines
ttttgacaccttaaattataattaaatgttcagttggtcttccaacaaaaaatg

SEQ ID NO: 114099 - DNA, 361 bp, Heterodera glycines
agtgagcagcagagggaacttgtaataaccatttaattggaggagggggtggggttcgagcagttcgtttcaaaaaaaatattaaataactaacaaaaacggactcaaaaaacactcacaaattggcaattttttaaggaaaaatcaattttctcaatttgattttttggcaatttgaaaaacaattagattatttatggctttcactaattgccaatttttaggggaattttttctcacaaaacatgcaacaaaaaaaaaaaatttcgaaaaatcatggttttttcattccttttttttcaaccattagtcggatgtgttcgtcgattatgtgaatgatggcacccgcaacgacacaatg

SEQ ID NO: 114100 - DNA, 122 bp, Heterodera glycines
agttatttttgttttaaattatgaacaaacatttccttacattcagacattggaaattaagtccgtcattttcctgtcggttttttattcgcgcacttttttaaaatatttcagtaggaatg

SEQ ID NO: 114101 - DNA, 997 bp, Heterodera glycines
tcgaggactagctgcagcaaatcgactctgctctagactttgccgcaccgaatttgcaggacgtgctgaaagtgaaggttctcatgacgaagctcagcaaggaagcgtttgccgaatacaaaaagtcctgcatgccgaaaaatgtgacagagttcgactttgcggagactgtggagcagctgaagcgtttgtttgccaggcttcaatccatttggattgacagatatgattgcctgagagcatccaaactggaagacgaggaattcagagcatttgtgaaccgacacaaaaggaaaaacattttaaatttttattggattttcttgaattttcatcttttttccggcgttaccgctggtgcaataaaacaaaaaataaacagaaaatataaaccttgaatttgtgtgttaatgtttgattattggcattttatttagtaattatgttgtcccttcttaatttttgtctcattgtctgtcattgtagtctctcgcctaatctatattttgccatcccttcccagcagaaaatgttcccccgtcttcccttcaattcattctgttggcagtgcactttttatattgttgtcgtcagttattttcctcggactttcccccatttttattgttgctgatttaaataaaattaattgtccccgactttggaaatatttgttgaggaaagcaattaataggccccgacccaaacagcattatttagcacgtggcgctcctggcgaagagttagctgtgccggtattgtggatttttggctgctgaggagaagctgatttggagaagcgaccagaacaaacgcattgctgcggttctgttgttttaacgcattgctgcgaatttcaccaattttcgtaccactgcaaacgcattactgcgataagtgtggatatcgacaaaccaccgacaaatcgtgccgtttttcaaggattcgccgtttctttgttgtttagtagtacctctgcggtaactcaaacaaaatg

SEQ ID NO: 114102 - DNA, 545 bp, Heterodera glycines
aggacatcgcttgtcggagggcgaggatgtcgtaattaataatgacctcattttatttttgattttatgatatttttggcattttgttttaatgtttgtgatttcgtttttgttttcttttttgttggcagactttaatttggaattgcctgacataaaataataaggctttattctgtgtgctttaattgtgtgcaagtgctgaactgttcgacgtgctgctgagtaaaattaaattatttgtacgttgcgctcctgcaaaaaggtgtggtcgacgcgatttttatacggggaattgtagaagtaggaaattctacaaagtcttcaactactgcggcgacaaaaaagtaaaaagtgaaaagaaattcaccaacgatttgtcagctcggtaaagtaattccgtctacaaagctgattcgacaaaaagggtaaagtaattcccatcgacatttcatcttctacagaacggaaattttgtgaaattcatcagttttcttctcaccgaattcgacaagtgaaattttgtggaaaagggcgaagtaatg

SEQ ID NO: 114103 - DNA, 419 bp, Heterodera glycines
tgataagtacggtgcgtgcagctcgcgcctccttcgatttgttttggaatttatctaaatttcagattcttacgattagaggtttctctagttaaaataaaactaaaaaattcgattttttaaatttacaacaagttttttaattggttttctttgcaaattgtaatagtaaaaaaaaaaatctattccctcaaaaaacagaattaaaatttctcattaaaaaaattaagagtaaaaaaaaaattcttatccccaaaaacagactttaaattttcatttttaaaatttttttcggcgtggcgatgaaaagctgctccttggtatttcaagagggataattatgccccatcattgtcaagctgttcgacccatcctctgacttcattgtccatgccgactttcgtctgttcgcctgtatg

SEQ ID NO: 114104 - DNA, 119 bp, Heterodera glycines
ggttcttttccgattcccctaaattttggataaacgaactttaatgatatatttaaaaattatttgttttgcctttttaagggcacgccaaaactttctttttgagcaatatttgaatg

SEQ ID NO: 114105 - DNA, 604 bp, Heterodera glycines
ttttcccacaatttcgcttcatccaaaaaaggcattgcaaatttgccgctgtgattttcggggttgctgattatgaaaatctgatataaattttgatttgaccaatccctaactcgaaccgaaagccgaaaattcaacttttttgaatttcattttgttcaaattagtttgaaattggtcataatttatgacttattcgtgatcactgatcatcgacaccaaaaacccctctgaacaagctcacgacttatgtattattatgacaaaaaaaatttcaaaccaaaagggtccttccttttttcgggggttcccaactgtaagaattgggtggttcccatttacaaaagtgccctttttaatttgggttttttcaaatacttttccaattatgacaacagacgccttcaaattgactaaataaattgtgccgtttttcaaattgtccaaaattgtgccgttttatataattcgcatttttcaatcttttttcaatttgaggccctccaaactgttcgaactttaatttttcttctccatttttagattgtttactctattttaattacaacttttatttgcattcattgcatttaaaaaaaaaatg

SEQ ID NO: 114106 - DNA, 783 bp, Heterodera glycines
  unsure (1)..(783): unsure at all n locations
ccccccgcccactttttccatatatggctttttccatatatggccctaaacttggctggttctgagttgacccgcttcgaccggtgaccggacatttggacagtggacatctggacagtgaatgcaaaattttgaaaataaaatacgtaaaacatacagtcatggtcatatttcaataaattttagacaccgaaactgaagttgccatatctcagcgagtataaatcgtataaatttttggtcttacataagtattgtagagtattttgtgttctttttgattgcttactcattatttccaaaaatttgccaattccctaggaattttttttttcaaaaatttctccgtttttcagtgtattttggggtgttcagatcatcatgacgaactgatctgttcaagtttgaagaaaatacttttgatcgctaacataagcaggaagttttcaggaatttgactaaaattgtctgttttatcaccagctaccaaaaccatgaccatgacagtatgatttacgtattttattttaaaaatttacattcannctgttcgtaaatgccnactgtccccaatttccacttctgtccatatgactttcattgtcctaatgtccactgtcgaaatgtccactgtccaaatgtccgggacatattttggcgtttggccatttaaaaaatgttttttttttcgccaaaatttgcctactgtagtttaaataaattataacgtaataataaacataaaaattaaaacaaaaaattccaggcctgcttttcttcatg

SEQ ID NO: 114107 - DNA, 207 bp, Heterodera glycines
ggtgagtttatgtgagcaggagtgttgaatgtcatgcgtagctcagttggttagagaatccacgggttggaagggtcgtgggttcgttttccaccgcgagtcaatattttatccagcttcatcattacaccaatatgacaagaaggattgtgcactaacggattgtccacttattgtttatatactacggattctccttcactgatg

SEQ ID NO: 114108 - DNA, 1003 bp, Heterodera glycines
gtatgaatgtaaattttaatttaaaaataataaataaaatgataattaaaatattaattaataatttaaaaaatcaaaaaatttgttcagataaggagtacctcaaactttttttccccatcaaattttcgtttggcgaccgcgaaatttcaattgatttggaaaactttaacaatgaatttttgtttcgaaaaattggtgaaatgtggtccatgccaaatttggatgagatttgtttttttggtatgaaagaactgataaaaaaccacataaatcagccttcctttcagatttaaatcgaacaaaaagacgccacactcgatcgggacaaattgaaatatttttattttatctgtcaaaaaatggaattgcctgtttcactgaattcttgttgattgctattttttctcgttagcccttgagaaaggcgaataaatttaaataaaaatttcattgaaaataggttaaataatatttgtatatgaaaattggttgaataaaatagaatttaaaaaattaaaaaaaataataattgttattgataataataaataatttataatgtaaaaaaaagacaaaaatggtagaacataaaataaaaatcaaaaatcaaaaaaaacgaagaactgtgtatacagaaagtatttctatgtgtgaattttcaataaaaaggtttctttttaaaagagggttttttatataacgccctttttgacggttttttatataacgcccaaaacacaaggaaaaatcaataaaaacacaaaaaaaaccatttgaggattttttatataacgccctttttgagggtttttatataacgactcagcacccatatttttctaattgtattcattactttgttttccgctataagtgcaactatgttgccttgcggtttgttcaaataaataaaaataaataaataagtctgaattttagagaaatttagtcagaagaccagaaaattgaaaataacattaaaataaaataatttacaatg

SEQ ID NO: 114109 - DNA, 127 bp, Heterodera glycines
agtaacacagaatattgactccaatttgacttttccattgtttctcctaaggtgtcgctttgaattgtcctcctttgatctgatgcccgatcactttgagccctgcggcgtcgtcgaatttacaatg

SEQ ID NO: 114110 - DNA, 409 bp, Heterodera glycines
attaaatatgtttgcctcagatggcaaactaaaacatttaatgaatttttcattatttttatggggcatcagggctgtatctaaggccgaaaaaagcccatatcccgattacctttgtggcacacaactgaattgacctcctaaatttaaaagtttactaggtaaaattatttatgaaaaatagctataaaaatgccataaaaattattaatttatttatttattttatttttatctttgttttctgctatgacatttggcttaaagatgatatttatctgcttattctgatgacactggtaatcacagaaaaggccattaccacaattattcatttctcatttcacattctttgctgcagtttgggagaaaattcatttacataatttggtgcaaaaatgacataatg

SEQ ID NO: 114111 - DNA, 74 bp, Heterodera glycines; identical to SEQ ID NO: 113194

SEQ ID NO: 114112 - DNA, 108 bp, Heterodera glycines
acggtgtcaccattcctgctcaataccacattacgggaacacctcgcgctattcgactccgacctagcaaggcggatcgaagagaatctgtacgtcgacaacatcatg

SEQ ID NO: 114113 - DNA, 1003 bp, Heterodera glycines
ccggtctgatattttcagaagcaaccggtttccgggcccggcctctcaaaaaccggtcaaccggaaaaccggattttcaaattgccgggcccggaaccggtttccggtttggtaaaaatttaaattttcacatgtatttcacccaaaattaccataaatcgtgccagatgtaaaatttcggctctatttcactttaggcgtcaataaatgacctcttcaataataaaatttcaaaaaaataaaaaaaatttaaagaattttttgaaaaattttttgtaaagtgcattagtaccggaaaacctagtaagtaattctccataaaaagaaaaaaaatttctttcttagatatttgtggaaaattttttaagattttgaaatttctgtttggaaataaaaaaaaattgcgattttgagcaaatttttctaagaaaattaaggatttttagggtccggcgttgccgataggcgccgccgagaaatttttgaaaatttcgatgcaatttattaacagaaattgtataaaaatgaagaatttttggctatatcataaaccggtaaaaaccggtacaaaatgtcagtttccggaacggtttggcattttcaaaatgaccggtttccggtgccggcctctcaaaaaccggtcaaaccggaattttccctaaaatcgccggaccggtttccgggcccggtccggtccgttctctactaatttttaataaaaattagtaaatcgacccaaacccagcaaatgcgtgggaaaccgccaacttaatttttaaattagcgctatttggcaaaaaaaaaagatggaatcggtgaaaaaaccctcgcaaatttcttcaatcctaaaaacaaaattctccaaaattctgtgccaaatcccttccccagcaattcgctaacttttgcaaaaatttactaaaaattgtatataaacaataaaattaaatttagatttatttacataaattttgctcattttcttttcgttctaccaaaaatg

SEQ ID NO: 114114 - DNA, 245 bp, Heterodera glycines
tttttaggaaaaaattgaagaataataatacaaagaactaaaaattttgcattttatacctttcaatgtttatttaacccataaaataaatttggctcattcgaaatcattataaatagcattatacttgcttaattttttcattttgttgtcttcatctcattaatatttcagttttaccctataaattgcagtcttccattcgctaatttttccaaaattgtagcttccaaattgtctaaatg

SEQ ID NO: 114115 - DNA, 362 bp, Heterodera glycines
ggtgacaaaaaatgcgccgattgcggtgcacatctcttctcacattaagacagtagcatttgctgccggaagggaagagttgtgctgccaatgcttaactcgcatcctgatgagctcaaagagctgattgtggggaataagcaatcccgtgaagggaaagaatttgtgcgaaacatgtcgcgttataacaacctgttccaatttgcaagcgtttccgctggcaacaaaccaagccctgctggcggtccgatggccgttattcttaacggagaattccatcgccgcataagcagcatgcaggctggtacaactcagattcctggctttggcagttgtacattctggacccagtcgaggctatg

SEQ ID NO: 114116 - DNA, 1003 bp, Heterodera glycines
ttcaatcccaaaaactaactcaattttcaattatttattttatttaaaataaaattttcatttatttacaattaaatatttgcattccaagcaatttccgtttaatagaatgaaaaatggatttcccaacaactatttgtcatccatccttcctttttttctaaattattcattcatcagccatttttgttgttgacgttcacattgctgttaaattacaaaaaatttaattgaatttatttattcaaaaaataatttcattttgcttaatggcacactttaaaagcaatttttccttatttggtccttttttccaagacttgcccttaattttaggttttatgtgattgatttcatgagatttctttattttctgtttatgaattttatgattccctctaaatcattaagaatgacttttttgaataaaattatcaaattttggtcattaattgtttgaaaaaaaatattttagccgcttttaaaccgctttgttgaacgcaattaaattttagatgcattaaaatttgaaaaaaaagtaaagggaaagcaaataaattgccgaaaaatgcttcctttccaatatatttaattagaataattcaaatttgaatttgccagatcacagctttgatcaattccattctgcgtttttatatttccaatcacttttcaatcagcgaaagcacaccaaaaacggattaaacactggcattgatcacagtgttcaataacaggttaagcatgaaaattcaattttttcaatcaatttccaatttagcagtatccgatcacaacaacgaacggtgatcacaaattcagctggtcggttagagtgatcagaattcttacaaattagcaacataagagttctaaattttacaaactctttcagatcagtttcaccctgtgactcaaaagcgcgacttcttcatccctttgatcagtgcagttatgaacctaattaaatcctttcaataatttaaattccagttttttgatg

SEQ ID NO: 114117 - DNA, 121 bp, Heterodera glycines
tggtggatttgtgcatcggagcaccccgggggtgccttagcgccgtccggacgaagtacgcggagaccgagaaaagctatttgtgcaaatttgccttgaccaaaattccatgccacaaatg

SEQ ID NO: 114118 - DNA, 106 bp, Heterodera glycines
tgctgttgggaggtgggaggggagagacaaaagggggaaaggggagaaaaggaggaacgagggaggcaaaaagggagaaaaaaggggggaggcaaacgaaggaatg

SEQ ID NO: 114119 - DNA, 309 bp, Heterodera glycines
aaaaataactgcaaattccaaccccctgctttagaccgattaaaaaagaaattgacggcgaccaattccattcagtttccgattacgcacattttagcgtgaaggagtgcatcgaccaatttgatgggtggcttttttattatttatattttgttatttaggaattttaaattctctaaaattataacttttttgtttttcaaatttttcctctttttaattaaacattttggtataaaatgcatttatttagtaaataaatatttaaatcattttcaacaatttttcagctacattgacttgtgcatg

SEQ ID NO: 114120 - DNA, 626 bp, Heterodera glycines
cgagagttaatcattcattcattcaactggtttttgatcatgacattcgaggaatagcagttgatcaagtcaatgggaatgaatgtgtttaaaaagtgaagtttttgatgcatttgacacacttatttttttgggaatggatatattcaaatgcaatgaccaagtttttcatgggtttttgcgattgatcaaaacgtcgaatttccatccatttatttatttttataagtctgaaattcggtttttaaatttcgacaactttcgacatcatcaattaagggtgcaattttaaattttttatttcaattttttatgtgcagtttttgggctataattaaaagttttaaaattcacttaactatttaaaaaaaacaattaatacttccaaaattgttccactcaataatattatttcattttttctaaattaaacatttatttatatttgccacattaacacataattggggcaattttaaagcaattaattataatttaattacggcctaatgtttactcataatgaacggcatggcgtttttttggccagcgttttgtccaccgtttcactgatggccgttgttgtgctgctcccgatcgcgcatcagcattttcagcacaaaatg

SEQ ID NO: 114121 - DNA, 197 bp, Heterodera glycines
taattaattttctaatagtatttcattttagagtccactctttaacatcttcgaaatttaaaatgctttttttttgtctttttatccttttaaaattgattaaataattactaaaaatattgtaaattatatttatttcattataataaatgatcgatttgagttcataattattattttaaaggttattcgttatg

SEQ ID NO: 114122 - DNA, 299 bp, Heterodera glycines
tctgaaaaatatacagatttattgtaagtatttgcatgacttaaagaaatataattttaactaccaaataaatcaaaaacaactatataaattcgtaaaaaacattatagatgaaaaaatatatgtatataaatatttgttctgaaatttaaaaaaaaaaaattcatcatgattacttttatcaacatagaaaaataaatactccttaatagcaaatcaaaaattaaaatcgccatttaaatttattaactaatcaaaacattctaaatttcccgttggtgctttcggcaccaataatg

SEQ ID NO: 114123 - DNA, 627 bp, Heterodera glycines
cgattaattaaaggtaattaaaattaatgaatgataacggagagaaaacggacaattaaaatgagcagagaaataaaataaaccaagtaaaaaataatcattttcattcacattcaatataaataaattccttttgtgttaataattgataagcaaatacaaataaattgcatactgtccaacaaggagtaagaccaattgtaagaaattcaaacttgaagacaaaacgccaaataattcggatgggaagagaaagaaaaacattcaattggaaataggagaacagagaaaaggccaaaaaagcgtaggcggccagacgcgaacggagaaaaattcattttctgtatggtttctcttctttttttctccacaagtacaggtcacagactaaacaaattccgccgcttgaaaacgaattgattcaattcctttctttcttccaattttcactctttttaagcgttctttaaataactaaaaatcatttttaattcctttgttatttttttttaattttaattttttgcattttgtctattcatttttccctctttttttctttcagtttccgccttaatttgcccttgataatttgttatttctctctgctgaccaaaaacaataatg

SEQ ID NO: 114124 - DNA, 1003 bp, Heterodera glycines
ccccaaaccttttagcattttattttcacaaatcctgagatttttatgatgggttttcggatcctgaaatttcatttttgaaaatgtgccaaaacagtgcgggtttttttttgcatttcctccccgctcgccccgcgccgcgatgccgccgccgcgaaaaaaaaatcgataacggaatttggaagaagtgcaaattaattgatattggcagcaaataatatcaattataaattggacaataaaattaattatttaaattgtgtttaaaaataaaaatcgaaaatgaataaataaatcggatgaaaaaccttttcaaaagtaggtcacctgtcaaccaaaattgattgatgggtttttatttctcttccattattccgcaatctgcacgtgactttttgttccaattatttcgcagtgtggaccattaattaggtcaactgtcaataaaatgggattgattggtttcttattgaaatttctccatatttttagtttttttgttccaattatttcgcaatagggcccctaattttgcaaacctgtcacaaaaaatgattgatgactttcgaaataaagaatatccagacgatttttttttttgcagttttgaataaaatgtgacagttgtctacggaaatgattgattaccctcaaaattaaggcagacccagacagtcacgtgactagcccctcctcttttttacccatttcgtacacccggcccaaatcgaaaatcattcaactaaatagttggatttcattaaactctctcttcacgctctaattttatttctctccgctctatttttatttgcattaattaaatctattactatttacctacgtctttttcttttcaaatctctgctctctttaattcttctgtttcaatttcttgttttaaaatgtcttttaaacgcgtgaactccttccaacccgccgtgccaatggccaaaaaatgggatttccgatcaatcgggtaagtattacatgcgttacaatg

SEQ ID NO: 114125 - DNA, 720 bp, Heterodera glycines
attcttttttttcatatatttttgttttgtcacccccaacggctgtccccattgggacgggcgggtgggtggtggccggcgggtggccgaatgttttgaaaattaaaattgcgatcaacaggcgcctcaatagcgaggcgtctctaacccaaacggccctctttagggccgtaagagtgaaggaatacagtctgcccgccgtccacaaatttataactcatatatttgttctccacttagccatagctgggggatatgctagtgtaagcataactatttcggtaaaatgtgtattttacattagtattaaacgcttacactagcccgtctcccagccagcaaagacccctgccgtttttcctcaaatctttgaggttttttacccggcgggtcttcttctcaccccccccccacttcatcatttattcttttttattgtgtcagcaataaatttacctgtaaattaggttacatgtttttagtaaaatgtttttaaaaaataactatgatttttacttaatttttataccactttgctaagcttttttcccttagtcggcatgcctctctctaatcaaaagctcaacacaataatcaaacatgtggccatttggtgaaagggaaagcaagatcttcgtcttcaggttgagcaaaggcgtcagcagctggaaggagaactagctggactggtaaaagcatgtggacgccgcaaaagtaatg

SEQ ID NO: 114126 - DNA, 1003 bp, Heterodera glycines
caccacccaattttgctccaaactcagtcagcccgtactcaattgtcccggctcccagttttacgattatttttcaaccacttttttgctgttcacacaatttcatttactaacctaatttacataattatgtttatgttttgttaatcgtcaaatgtccgtccgtccgatccgccgcttttgccgtcacattccatcccatcccaccactttcccagttgatgtgatgagtaatcactgttgatcagcggataatcaaatagtttttttttattttctgctgggggttgggccaattcattgtggttggctctgattggctgctgcttttccagaggcaaagctccgccccttgccaatgttagccgaacaaccgcagaattcattcattcaatcatttgttttcaaatgaaataaattttctaataaaatatttttaataataaaaataaattagggataagaattaagttagttctctgatagagccaagttcctaaggacactaaatgggattagtcggtcattagagggaagttacaatttaattagcacgactccgggtcggtcaagtctgctaattgagctccattagtactggcctgaacacaaaaacattaattagggaggataaaattgtcagcttaaggcaattagccctgtggcttaatgatccttaactggggaaccaagtgcaattagcctaacacctgtgggtaataaaaacgattagttgaatagcgggtgaaaatgagtgtgttgtacgtacgatctcaatgccaaacctcgggccaattagcttacactgatggcaatgactaattaagacattaaattagccccgtggcttaatgcctcttaactggggaacaagtacaattagcttaacacctgagggtaataaaaacgattagcttaattaattagtgtatgctttggacgatatcattgccaagctttttacacttatggctaattgagacttttgttgcctttcagaatg

SEQ ID NO: 114127 - DNA, 143 bp, Heterodera glycines
ttcgccgaccgaactgtcctcctccacacgactctgaacggcgttaagaatttcgcacgggtgagcacaggccaactgagtccatcccccgttcaatccacgcataaaagttgtcccattgctttggcaaccgaactgtgatg

SEQ ID NO: 114128 - DNA, 111 bp, Heterodera glycines
  unsure (1)..(111): unsure at all n locations
tatgcgcttggtataaactctactgaatttntgtcattttcaatcaatgttttaggttgtgaagcgtgtccggcacaaggaaaacgctccaaccggtcattccagacaatg

SEQ ID NO: 114129 - DNA, 84 bp, Heterodera glycines
attgtttttatggcatttaattgggtttagcgaagtcgtccgtcaaaggctgtgccgggccgtctgacgaagaaccggtcaatg

SEQ ID NO: 114130 - DNA, 173 bp, Heterodera glycines
ccttatccgatctctaatgccaatggttgaaaagatttcgaggaatttagaaaatactcaaaattaaatgggacccattggcctaattggatgatgatttattgccaatacttttttcgtttgttttttaaagagtgcttccattctcagctcctcccatgcagtcgaaaatg

SEQ ID NO: 114131 - DNA, 452 bp, Heterodera glycines
ttttagacgctcaaatttttatgacgctatacctaattataacgaattgctttcaatttataacatggaatctctccaaaaaaggagattaaaaattgatttaagacttttccatgaaataactaatggttttgttcaaattaaacataatgaacatcaaacccatttttctaatagactgggtaatttaattaagcctagctttccattcgacatggataaggtacaaaaaatatgagacctaaattataataaaggaacgaaaagattggacaccaaatcacgctgtttttgttgtccatcaacagtgtaataaccaacgaacgggtcgaagaaccaatcgaagaaaacgctgctgtacacggcgggtttgatgaacacggcccagcctaggatgtacagggaacaagcgaaaaaccatgcgaaaatgagatggcggagaacaaaagatg

SEQ ID NO: 114132 - DNA, 1003 bp, Heterodera glycines
ttcagtgtcgatcagaacaccatcaaggtcgaagaccacgtgcgtaatagtagaagccatttattcggagcagaacttaatattcaaaggaaaaaaggcgctagttaaaggttgagctatttgaaattataatgatcagttttttaaatccttttgaatggcaaatttttaaattttcactaattatttacttttaaatagattcatttcattgtttcgattccctttgacgtattgtcctctttttcaaatttatttgttttgatcattttgattttttttggacaaatctgtttttctctccttccctcccatctcaccttctatctccctcccccctacgttttgtatgtttgtcatttccttttgccccaccatatacctatctcttcacattatcgtaaattgtggcggacgaccgtattcaaacgtctctttctttccatcgtttaaaaaaaatgtaaaagcatttagttgtatagtatgtatttgagcatatgagtggaatgaaagagagaggaaaaagggcatgggggagagcaagactttttttgttgatttttttatgaaattatcacagtactctccttttcgtcgacaaaatgcatacgatcgttttctgatttttgatttcgctcaaaatccaaattaaagttaaaattttggcgttctttctttaaaaaaataatattgtcgaacagacccaaattgagttgctttctgcaatagagaaagccctacattttgcaatttagttcaatattgcgagagttacaatttgactgccctattcaaaaataacaattttacttaaaatctgttaacaaatgtgactcgaatttgaaattccaggcgacgcctataaattaaataattctttgttttgtttcgttcttcagtttctatgtccaaacaaattcgaacttgttgggtgtggcgtaagaacaaccgttggtggcgttatttgccgcgacgtaacgactcccacaatatcatcgacatg

SEQ ID NO: 114133 - DNA, 1003 bp, Heterodera glycines
ataaaaacatttcatttttaaaatatttacctatttaaataatgaaagctgctaaaattaattgttctttgcttttcacaggcttaataaatttttacgtcccaattgacaaggaatggttggagggaatcacgggcttggaatgtcccacctgagaatgaatgaaagaatgaatgatgaacacatgtttaaatgccatttatgtattattaaccattttaaaaaagatcatttttatttaaaaataaataaataagaaaaatcgaaaaataatttacgagttgttaaatgaatttatatatttttacatttttgaggttaacattttacgagagaagcacggaagttttgatttaatatttaatttctgaagggacaacgaacagaaaaatagacaattggaaattgaataagtgatggattaattaataattttttattttaacaattttaaatttcgctacataattgaaatatatttttattaatcatatacgtggtgaaccgaagtttaaaattgaattttcttatatggtttgctttttgattttggcatttcggactatgaagacttccttaaaaaccaataagaatcattcataaattttggcaacaaatgcaaaaaaattcaaaaaaatttccgtctttttatcaaaattaatggcaatggtaaacaacccgaaagaaaatttttacttttatatacctaaactttttcaagaaacttttaagaatttttgcagctaatttttgaaaaataatataaactaaaaatacattgataaaattttttcataaaattttttaaggcactcccggccgattaattcaaatcctctcaagtaatcagtaatgaccaaatttttggttgctacctccaactcaggacaaatgtgacaaattaggacaaatctaatccctaactaatttttcatattttttaaatcttgacattttagaacacaaaattgaattgaaggagccattcccccctccaataatg

SEQ ID NO: 114134 - DNA, 317 bp, Heterodera glycines
tcaaagatacggcgaaagacgacgaattggcggaggagggagacgaaacggcgacgcacagaccccccgggttggcacagagcgatgccgagttggccaaacccacgcccgtctccggttccgatttgctgtcggccccatcgttagccaatgccaacgcagtctccgccccgaatggtgccgtccgcttcccctccctccgcgcgtgtcctccgttttgctgctgcggcgggtgtctcttcctcgccgactgcaattttgccacttcctctcctccttaaccattttaaaggccattttaacaaaatgccaagatg

SEQ ID NO: 114135 - DNA, 89 bp, Heterodera glycines; identical to SEQ ID NO: 102642

SEQ ID NO: 114136 - DNA, 933 bp, Heterodera glycines
gatcccgcgggattaatcccgcatttaaaaaaaaatgtaagtgttaatttgctgctgttcctctctcttttctgcttcattcttctctcatcctcctcttccttccgtcgaatttttccttttcctctctttctcttccgtctctcctccttccccaatgctatttccctcctcttcccttgtttctccatttttgctaccaacaaatgttggatttggttgacaaagaaaatttctaactttttacaaatgaaagttggataaaaattatccatcgaattgattgatttggggataaggtaaaacgcccggcaaatgtcatcattagggatcggatttttaagtttttgcttatttttctgcggctttaactcgacgagaaatgcacgaaaaacacatttttcgctcggaaattcttcgttttgacgcatttattcgaaaatttttcttgacgagatcacattttttgcaaattttcaaaaaattttccacataaatttattttttcattgaccaaaatttttgtaatttattttctttcttgaccaaattttggttttttcgcccttatttaaggccttagtttggactttttcgcgcttaaaaatccgttccctagtcatcattttgcaaaatattctcctctgttgcgttccctttttcttccaatccgtcgtcattttatgccaaaatgtttccgcgccttccgtttttgtcaattggttttcgcctcccattggcaacaatttaagacgaacaaaattcaaaaattttttggataaaatgtgattttagtgcttctttcatccaaagtacaatccgtaaaaaataggaaaccctaaaaatccaggctttatccaacgcattaattcttctgctatttgtgtgacatcattcggaactcggcccaattgtgctaattgccaaaaaatg

SEQ ID NO: 114137 - DNA, 197 bp, Heterodera glycines
tttttgtagatagaactatgaatgatttgcaaaatttggcggaagttcaaaagcgtgccgattttatatgttttcattcgattaggctccgcccacttttcgacagttcgaagctccgcccatttttcgcttcccaaccttcacccacccaaaatcaggattcatttgcaaaattttcaaaaaattctatcgaaatg

SEQ ID NO: 114138 - DNA, 345 bp, Heterodera glycines
aatgaattaatgagctgctgatgaaccatatgaaacaaatttttggggtttttaactttttttttcatttttaaatgcaaataaattaattatttggaaatgttcaacttttttataaacaaatttaaataaatcaaatttcttgtctaatttttatttaatataggaatacatgcttttattggtgttgggtcgttactacaaaactacccaaaatgggcattactcaaaaaagcacaaatggaaattttgacaaaacgcttaatccttatggcataagtagccaaataaattaatcattgattgctatgatctaattttttatagtacaaagttttaaaaatg

SEQ ID NO: 114139 - DNA, 127 bp, Heterodera glycines
ttttcaccgctttttcacttcaattacaacatatacatatttgcgcattaagaatgaaaatgttcgcatttcggagttcttcgtgtccaccatttggccaatgttcggcgattccattcggcacatg

SEQ ID NO: 114140 - DNA, 86 bp, Heterodera glycines
tgctgattttcacataatttttcatctttgctaagccaattgaaatccgacgaaaactgtcttaataatttcccctcaacaaaatg

SEQ ID NO: 114141 - DNA, 448 bp, Heterodera glycines
tgaattgatctgtcccatttttcacgcaaaattatcggaatatttggattcagattatcggttttacctatgttgcagaattataaattacttttagaatgactcttaatacataaaatttccccgatcgtcccctcgtttaatcataatttcaccagtttttataacgcacattaaattcaaattttttccgccaccaaatcatgtcagtggggcgcctaaagttgcttattcttttgtgcacaatattcctagcactaatctttgctgatcgccccgagccaaacaaaggaagataacatctgttgtatggccattctgacaatgaaaagacgacaaattgacaaaagaaacaaatttttggagaactaaagtggatggggaaggggggggggtttagcgatcgggccatattccgctggtcatttctccgaatattcgcgccatg

SEQ ID NO: 114142 - DNA, 66 bp, Heterodera glycines; identical to SEQ ID NO: 105850

SEQ ID NO: 114143 - DNA, 1003 bp, Heterodera glycines
ttaagaaataaaaaaaattattattttttttattttaccaattttctgaacaataaaaatatccttttcgattttataaactaaggtcttgcaaaaaaatcctgaataaatgttttaacccataaaaaaaaaatttttttttccactatgccaattttgtttttaattaattttccatcaataaaaaacgtaattttgtctagggattcaattccacaaattttatgatgattgaatttgggttcagtggttggtgtgaaaaaaaagttttgagcacatttactaaaatggctttcaatatttccgaaaaaatagcagataaaatgattatataaattatttcaatttcagcattcaattaacagcgtttcaaaatcgtaagccatcccgtcaaattttgtatttttataactaaaattaaaatcataattataattaatatataatataatatacttaaaaagtccgacaagcttttcttactaatgatgtgtacaaaattttgaattgattgggacaaaaaacttaattttgaaaaaaaattcgtcatcattgcgcacaaagtgacattgaccacgctggtgaagcattggagaatttctttttttgtttattcgaaaaatgacacttaactgaacttctcaaatgccataactaacgggcaggctttatctgtgccggttatgccatcagaagaaagctctgtccgtctttgctaatccgcttttaatcattaggcgccatgtttgacaatagattttttgacaagtcaacttcgtgttggcgcgtttgtattgtaaatttctacactcatattataaatagcgctaaatgaataaaaatataaaataaataaaattcggcagttgaccttttaattaaaataatgaattatttttccattttctgattatttggcggaattatgtaagtcattaacccggtcagctagccgaaccaagttttttttttttaatatttatcacttataatagccattatg

SEQ ID NO: 114144 - DNA, 80 bp, Heterodera glycines
tatatatatatatatatatatatataacgtgtcaaatgtctctagtttttattttggggcaagagataagcggcataatg

SEQ ID NO: 114145 - DNA, 173 bp, Heterodera glycines
atgaagcaatgcaaaattgtttgcatatatttcaaataatctaaaataaagtatttagctatttttcagactattatacgcttttttgtttcgttgaataatttgaaagaatataaatatttattttttagttataatttattattacaatatttttagattatacattaatg

SEQ ID NO: 114146 - DNA, 452 bp, Heterodera glycines
agcaatggaagcgccaacggatgggcatcgacacgagcactccgccgattaaaaaagttagaaaaaaagcatctaacttataaaatctaattagtacagtatccaactaaattaactaaggggggaggaaggctagctgaaaagaagagagagatatagtagatagtgtgggaaatgaatattaaacgatctgagaagttattgtaatactatttaaattatttttaagcgtcgcctgtcccccgtttcttcttccatttcaaaagtaagaagggatttaattttaacatgacgcttgtacattatttttattagaaaatacttaaatgatttactataatccttttttatccctttcccacggcctctctctttttttctttccgcctcatttttctatttgaaaagtacaaaatgcgccattttctcccatgatttccattcaaaaaatg

SEQ ID NO: 114147 - DNA, 651 bp, Heterodera glycines
tcaaaaaatagttgctaaatggattgaaagcttttaccccatgaaaaatataacctcataaaaaaattttcaactttttgttcgaattcgggtccggggttttgaattaggtaaaaccgggttaagactcgtaatcatcaccctcgaaaaccccttaaagttggtttctagcccaaaatttagaaaaatattttttaaaaattaattagggatcacaattctttaccattgccaaagataaacatttatcagaaattctgtgagccctcaaaaatccacagagttcaagtcatccgtatttgtttgacaaaaaatccgcaaagaataacaaaacaactttttgaatgttttttttttgttgttattataaacattatgccaaaattttatttaacaataaaaatgaagtaaactgaggaacaaatttagcctgtcaaaaagttgtagcttgtagtcataagaattttctgaataacaagttatggcacaactgtaagagcccttttgtggattgtgaaatgcatgcaatagagcccaagtttttaagatattttagcccctaatattcacatattatgcaatttttgtttaagtccattttattcaatcactttttttagcaacatatttgttttaatataagcagcaatg

SEQ ID NO: 114148 - DNA, 453 bp, Heterodera glycines
ttaatctcggaagttgtaacgaagaatgtgcagaggttggcaaaccgttaattaaattagaaaatgcttaaatctaaatgaatatttgcaattaaattttttaataaattgatagaaattttcaaaatggacccaatcctaaccccacccgccctttcattcaccactaactacgggcttggatgtatgaatgtaaatgaccacattaaacgaaatcaaaagttatttgattgatgaatcgatctttagttcttgttggttaggttgatctaaatgccaattatccaaaaacataatgccatgaaaaataattcaaatctttttaattacctaactttaatctgtacgtgtttgggctaacaataagctgacacttatgtacagcgagtaaagaaaggattaacagaaataattaatttatatacaaaataaaatttaggtgaaaacttaatg

SEQ ID NO: 114149 - DNA, 574 bp, Heterodera glycines
ttttttgattttattattttgttatgtaattcaagcataaaatcttatgcttttttgtgcttattgacattatttttttaatttgactaaaacatcgtcgcccagcaatgaaaaaaaatacccctatgaaataaaaaatttccttgaaaacttcaaggacattcagcacgtgtataattaagcctaaaagataaatatatattataaaactttcttcataaaaaatctttctcaaaataaaaatataaataaaaatttaatgttctttaatttatttgtattaatcggcttttttaataattttgatcaaattaatgaattatataatttatataattaattttttttttgtaaatcttttggttaaatatgttaatataattgattaatattaagtaatatagaaatattttgggtgtaaaattcatttgtatttttttcttgtttattaaacaagtaattttgatgatcaaaatatgtcaatgtgttttcagcagcccagttttaccaaaagtatttaatgaaactaatattttgaagcatcactcacagcccaataagcattccaataatg

SEQ ID NO: 114150 - DNA, 500 bp, Heterodera glycines
aatttgaatttaaaaaaatattcaaaaatttgagaaatcttttgctgaaaaattaaacaaatttaacgtggtgatcacttatctcgaatatgaaaatcaatttaaaactttgttggcaaaattggcctaaatatgcccgaaaactattcaaaaaaaaaaaaaaattgactaatccactcataattgttttaagaaaacactaatttaaatcacttttttaatattttataaaatattttactaaccctctcataattgtttatttttaaaccacaataatttaatttttaagaattttttaatctaattattttcccaattttataaatatatttattacattgccgcaggcattatttaatttttttttcaattgtttggcatttttgtcatatttggcaatttcccattagtttttggccatgcttttccatcggtttggcacattggcccatatcattgcctccaccgagttgtggtgctgttcccgtcggccaatg

SEQ ID NO: 114151 - DNA, 166 bp, Heterodera glycines
gatttattcaagcaaatcattgttattgtttatgaatattaaacggattgctttttttcatttattcatttaatttcgtcctagaattaaccatttaaagtacatagtgtttttaaattttattgtttgtttctatgtaatgtttgcctttttgagaaataaaatg

SEQ ID NO: 114152 - DNA, 178 bp, Heterodera glycines
aggggaatttcaaataactgtgttatggatccgtgatttgttattttcattttttcgtgtattattttttataataaatgatttatcaatgtgcaagaactgaaaattttttgagatttttgaccattggcgccaaaaaacactttatagcgtgcgccaaaatggccgcgccaaaatg

SEQ ID NO: 114153 - DNA, 61 bp, Heterodera glycines
ggtcagtccctccccccccccccctcattaattaatttgccttccttctgattttgggatg

SEQ ID NO: 114154 - DNA, 232 bp, Heterodera glycines
tttggggaaaagggataaaaatgaatgaaaaataaggaacgagagtctcgaacatcggcgattgcatttgtttacccaatcctttgacccgtagcaatattttggtcgataaacggaaaggatgagggaacattttttaaataaactatggaacggaagagaatgaaaaagggtatataaaacgattcgattttaaatttggtaacattcatgatcaaagctccaaaaaatg

SEQ ID NO: 114155 - DNA, 152 bp, Heterodera glycines
ttcaagcgcttttatatgtgcgtaggagcaccgtaactttgtctttcacgtagcgcgcagcactgtaccttttcgctatataaaagcacgcaaatatgacgcaaaacttcattttaatcacaaaaattttttttttttgcaaaataaaaatg

SEQ ID NO: 114156 - DNA, 196 bp, Heterodera glycines
ctgaaatttctgaaaatttccgaattttatcaaatttcggaaatcggaattccatgccatccctggtgtggccccacatttttggcaaatcactgttttttgtttccaaattgtttagcattttcttcgtgccaatgccatttcttccgtcagttacgaaattcatttttctgttcgcgtgccgtcaatgcaaatg

SEQ ID NO: 114157 - DNA, 53 bp, Heterodera glycines
ctggggaaagaatttaattgttcgtttaaaatttaggtattgacggcggcatg

SEQ ID NO: 114158 - DNA, 189 bp, Heterodera glycines
ttagcattgattaaatttgcgcctagttctgatccgatcactcgatttcggctaattatacttaatcgatcacattaggctaattaccccttaattgatcacccaaatctactcggtctcatattagtattaattatccaaatttctcccccttccctcgtagagcaagagctggtgaagaagcggatg

SEQ ID NO: 114159 - DNA, 889 bp, Heterodera glycines
tttgggctgatattactgattcttcgactttttcacactatattctcagaaatagggtcaacaattaaagtgtctaacgctatgtaccacgcatgttacaaattaacaagtggttaagaaaaaaccattcttctcaagttttcgttaattatacacatttttttgtgtgcatttggcgacggttttatgtttgaccaatttgaaatagttattatttaggcactgaacatcgccgaaatggccgaatcgaacatgaacgcatgccccgcattcggagtgtgtcccacatgccaatggcattgcccttgcagtaagtcaaattcataatttttttttccctcttcgatttttcgctgaaattcgatctctaattttttttttttcaattcacttcaaatatcgtttattcacatactcattttcaattccgaattaagtatccaaagttactgtattattatagcagcatttccatatgaactttgctcattacagtcacttaatgttgatgatttctaagccgcggccgatattatcgcgatgggaaaatggggcgtaaaaaatttattacaacccgcataaagcattccgtctctccagccacaaatcattttcatttccaagcgctttctaatcgcaaaacaatttcccagctactacttctactgcacacagccaaaaaactttcatacataagtatccgcgcagcctaaattgcacgcttcctttcccgtattactcaccactgcgcaaatctatctcattcccactgattagtcgtaagactataagaaaagtttttggtttgttttttttttgagtgctcatttaactcattcatctaattaatctaagccaaatagtagaagtctaatacactgaaattatg

SEQ ID NO: 114160 - DNA, 262 bp, Heterodera glycines
ggtccgtttttttttctctcctttaaattgccctttgtgaggcattcacgtatcatttagaattttcattttatccattttttaatctaatgaaaaaattagttgcaaaaatatacactcccatcccgaaaccaaaaaaaaaatagttttttttttgcgtcttttaattttcaatttttgaaacggcatgatgatgagatttgtattttttttttgtttctgtcttccaatttaaactttccaggcctacccgcttaaaatg

SEQ ID NO: 114161 - DNA, 62 bp, Heterodera glycines
tatgaaaaaggggttcattttaaaattaacaaaaaaaaaatacaagcaattaattaattatg

SEQ ID NO: 114162 - DNA, 321 bp, Heterodera glycines
  unsure (1)..(321): unsure at all n locations
agtcatggccttacaaaaatantgacatttgggtacgacccttttgttccggcagaagttatacttttgccagtacatttccctggacattggactctcattgtccatgatgtgcaatttggcactcattttgccgattctttgcctaccacatatggcaggttggatccgcaactgacggataaaattaaaaatatcatttcggatattttgccgtcagcactgttgacagggattgttgatgtcgaaaatctgacggtccaacacgatggtaatagttgtgggtacttcgtgtgcctgtatgctgagtcatggcttatg

SEQ ID NO: 114163 - DNA, 331 bp, Heterodera glycines
  unsure (1)..(331): unsure at all n locations
cgtccaaaaaanatttcggaaaatccgaagctttcatcaataataaaaaaactaaaataaagaattgattgcataaaacgacaattttttgatcattttttttcatgtctaatcgttaatcagcgaaaatcggtgattgaccgaattcacttttccgattcaagcagtacacccaacgaccgctttcttctgcgcacaaaaaatcctccaattgaacaattccatacacacacacacacataatgaatgacctggaattttaattgggtgctgcaaaaactttaaaccctattttaaataagaaaaaatgaatataattttttagaaaatg

SEQ ID NO: 114164 - DNA, 243 bp, Heterodera glycines
cctttaaaaattttaaataaaaaaggtctcaagtttcgcaaaaattgtatgtatgctcattaaaactaatttaaaatgattatttttaatcacttaattatttaaattcaaaattttaagcaaaaattcaaataaaatattttttactaatatttaaagaccggatttttcatcaccaaaaaatgatgattaagcacttaattcagcatcaaaaaatgctaaattcagcacgaaatcagcatg

SEQ ID NO: 114165 - DNA, 325 bp, Heterodera glycines
agccgtgtcgcccaatttttttgtgtttttaattataaacaccctaacaatgaaaaaatttatttttaagcaaaatgttgaaccttttattgtttcatacccaaagaggaaatttttaggtaatttttacattgattttattcttaattaacggaaatatttgaatacggataattaaaaataaatctagattttatattcaattttatatttaattttgattcattcagataaatattttaattaaaaaattgttatcatacaaaaaaataatatttctttttaaataaaaaaaaatttgaatttatccaaaaagcacaaaatg

SEQ ID NO: 114166 - DNA, 596 bp, Heterodera glycines
tttttgtgctttatacttaaattattattttatttttaatatttttatgaatttccattctcctgatcattgtgatttgtcattttatgctttatttttaaaattttatcattataattttctatttttattctcctgagcattgtgatttgtcattttatgctttattttaaatttttaaaatataattttatatttttatgaatttccattcttctgatcattgtgatttgcctgttttctgtagttacactgatctgtagtttgtttgcacttactgatgagtgaatgctatttaaacccgacgatgctcaacaaaagcacacttcataaaaaaagctgaaacaatcccatgacaaacccaaaccctactccccgaaaaatgattttctcaccaattatcctttttctaagcattctgtgcttaccgtcgattgtggaaacggtacaaattaataaaataaaattataataaaaaaataaagaatatttaaaattgcaaaaattttgtaggatccaaacgaccccaacgctgtgttcgagaaaagtgaacaataccaaagcgaagcattcccactgaaatatgcgaatgaatg

SEQ ID NO: 114167 - DNA, 99 bp, Heterodera glycines
aaaaataaattttttttgatgaaaaaggatgtttttatttaatgttttatacgcttgtattttaaaaattatttagctaattatttttagttttaaatg

SEQ ID NO: 114168 - DNA, 303 bp, Heterodera glycines
aaaatttgaatcgattttggacaataaaaggtgaattttggtgagaaatgagttttcttcgaattcgggtccgagattcgaaattggtcaaaatgtcagattcctgatcagcgaccctcaaaactgcccataaacatgtttccatgactttttagaacaaaaaaatttttttttctaaaaagggggcgcaccatctatagtattaccaattatattactaattaataatccttttacttacaattagtgtttttttaaatttatatttctttgctctgcatataacaatcaacgagagaaatg

SEQ ID NO: 114169 - DNA, 53 bp, Heterodera glycines
caccagccagtgatcagcgatcggaaggtactgtggagaaaagcccatcgatg

SEQ ID NO: 114170 - DNA, 414 bp, Heterodera glycines
tctgaatggggcagaaaggatttttttgttgttgtttataaaattaatttcgcccagtaacggcatattttaatgtatgcctttcaaactcaaaaaacgccgcgcaattttcaaaaaaaaaaagtgggaaaacattgctgaattgagggccagggggggcggagtgtgatttttgggctatggatgccaataggcgttgcgagaaaggcaaaatttttatggtatatttttttcaacaaaaattgagaaaaaaatttggcaaaacccaaaaaaaaaaaaaaaaaattgtttttgcccttcaatttgattcccgccgggaccactactctgatacaaatttctacggttactttgaccatccataaagaaacattagaggtcggacttactgtaagttccgtgtccaaacgcatg

SEQ ID NO: 114171 - DNA, 173 bp, Heterodera glycines
aacattgttaagttgtcataaaattatagcatgtattacataggaaacccaacgggggctcatcatcagcgagaggcgctcctccgccaacattttttaaccagcaacttcagacaccaatcgctccaaatccaatctctgcaaaattagtggctaaagccacacatcagatg

SEQ ID NO: 114172 - DNA, 141 bp, Heterodera glycines
tgccacaggacactttaggagtacaaaaacaaaatccgccccctccgggtgcgcactttggacggaggggcaatcaaaacagtttttgtggacgaatcgcagcccgtttcgcagctgatggtggtgatctgctccaaaatg

SEQ ID NO: 114173 - DNA, 1003 bp, Heterodera glycines
ctgtataaaactgaatacccgtccatttttgcttgggagatcagggaccggctgaagcaggacagtttgtgcacggcggagactttgccaagcgtgggttgccacaacccctcgggggaggacggtagcgccggaccggccattcatttatcgtcattaaaattgttttgttaccgattgtaaaggtgttcaatatttttgtaagcatgaattggtactggaacatacatgtaatccatttacagtatgtttgcatttcttggatttcgtgacttcctgttgtttttgaacgttcaaaaaaacagaattattgaattcaaacaaatttccttaaatttgggtcctttatactacaataagtaatgatacagtatcaaaaaataaatggacaataaaaaaatacttttggtagtgaaaggccggttcttcgcgaaagtaccgtataccctcgtccaactatgctactgtattggttataccattataatgtttaaagatctcgtcaatcaacactgtgcttcgttcccatgcaatattgtgaaagcagcagatgaaaagcaaatttgacgaaatcatgaaagaaaggagagggatgaatcggcaaacaaatgatggagacaattatttgattatttttttttgtttatttaatcgtcgcttgggtggtaaacgccatcataattttcttttacattttgtagcaatcaaatatggtgctctttcattcattttgaaatgaaaaaagaatgattgtttggcgttccgttggcccatcggtttgggccgaaaatgtccggtttttttcttttttgcttccacattagcatgttcgtttcgtatcgagttggctccgcggcaagaaaattagaaaatgactcttcactcataaaaaaccgtttgaatataaagcaaaatcaataaataaaacgagtcaaagagatttttcaattactgtgctctttcgaattttgaatatctaacaaaaggctatatttttccgatg

SEQ ID NO: 114174 - DNA, 184 bp, Heterodera glycines
gtcagtcagtaagcactggattgtgtgaatgatcacaaaaaagtcatcagtccgttcttatttttaaattgtttccttttttaattttttttaaaacacaaataatttatttatttaaatttatttttaattctcgatgattaaaaataaaactttcaattataatcaatcaacctcaacaatg

SEQ ID NO: 114175 - DNA, 514 bp, Heterodera glycines
tttatgaaatggccttttttggattggaattcggaaatatgcgacaaaacatccaaaaaaattattcatttttagaggtgggcttagttgaaatgataaaatattctattttaaaaatttaactttagaagaatcgacaaaatttcatccgatggctttggattttttacacacaaaacgatgacaaaatgttgaggaaagaaatggagcattgggacgacttctacacacttttcttcacgattttgtgcattcgactgcaatttccacgcattttccatctgatcactgtcactttgaaaacaaaaattatattttaaattttatttaattattttatttatatatttttaccgattattcaatttaattatccgtttctccacaggcaattttggtctatgagcccgagaagaggccgaccgcgaatggcattttggcctttttggacggaaagtgtcatttcgagttaatgcgcagtaaaacttcgcggcttttcccttggcttggcatg

SEQ ID NO: 114176 - DNA, 1003 bp, Heterodera glycines
  unsure (1)..(1003): unsure at all n locations
ttttatcgcataattaggcacggggggcttaattttgatgcttaattaggttttttgaaaatttctcgtacacattcattaaaaataaaagaacacacttaagtaacaaccattcaaattttctcaaaaatacaccgctttgaatgtaaaatttaaaaaaaaattaaaatttgtttatcgaataaatttttatgcttatttttttatccctattttgcttttttaggcttactcatacatgaattttgatgctcaattaaataaatttattcattcattaattatactgattttttgtcgaacaagtattttaatggtggatttatcaaagaaatgacctaataatatttaaagaaataaaaaaatgacaattttttgatagcaaatttaaggaatgggaatttgaacaacgaaaaccgtccagcaaattcccacaaatttgaacaaataacaaattattggggatgacgagaatggacggcctgatgagtttaatgaattgcccgacaaccagcttttgcatgtgagtgatgtcccggctgtttaaaaattaaccaagggcgtacttgaaaatttttttacatgaattaatcactaatgttatgccaaattttaattcattaatttatcagcatactcaaaaaaaaaactttaaatcccagccaaaaaaaatattattggtttcatgtccttaaataaaggaatttgatttttggtaatgaaatcacaaaatatgaaaaaatttgattggcctgcatatctcatattcatttttnaaaaagataatatgacaaacagattggttcttaaatatacataccactcacattaaaacggcaaaagataaaatttcctctaataaaaataactaatcgaatattggattaagtttttatttgtagaataatcctcaaaaaaaatatatttaaataaataaaatttggcaaaaaaaaatgtgtcaattgttgaacgtcaaaactttgtttagctcaaacaggacatg

SEQ ID NO: 114177 - DNA, 499 bp, Heterodera glycines
tcattaagcaaaagttatgaacatattagctctgctgctcgcagtatttatttagtctcaggcccatattaccagaaaaaaaagtttcaaagtgggaaaactgaaaaaagatgctttaaaatgttttttccggtgcaaatttccaaaaaagtttgggcgccaacgaaatgtgcgaatttttctacccccccccccctgattatgggcctgataaaatgccatttttatgtattgtttgttgcattgtttttttgttgtttttattgctgcaattcataaaaattggctggtaaattgaaaaactgctgatcattgagggaagaaaaatgaaaaattttgttttttatgttttaagtaaattcaataaaatatattttacttaaaaataaaaataaagaattatttttccaatttactctttttaaaataggtttttgtcaattttattataatcaaaaaatgttttgtttaatattttagtaaaaaaatcaataaaatg

SEQ ID NO: 114178 - DNA, 177 bp, Heterodera glycines
tttaggagaggagggtattttggctgatttatttagcccgaaaatgtgacacatttatcgctaattggctccctgacattttcgaggtgttaaacgaatgtctttactggttttggcgaaacatcttttccagctctattgcccaaagatttgttactcaaactgatcaaagcaatg

SEQ ID NO: 114179 - DNA, 66 bp, Heterodera glycines
acgaaaactgaccaaaatatgcgcataaatatgcaaataaagtcgtgaaaatatacaccaaatatg

SEQ ID NO: 114180 - DNA, 825 bp, Heterodera glycines
aaacgatgcttttgcgcatcaaatcgtggatcaccgaccaatgattggaggagcatgcacgcttgaacacagaccaattcgtcctccaaattcaccgcccgtcgcctcttttgtattaacggctcgaacattttctttaacgcatttggcctcacgtggttcagcaccaaccatttgagcttctccgcctcattaccaatgcaaagaaagttgaaattggacgaagtggcagaggaagaggaagaagcctcaattggggaatgaaagggaagagcggacgaagaggacaaagtggaatcatccatttgacaataaaacagcaaaattagaaaaaacggattttgtaaaagtaattgacaaaaacaaaacacaaaaagtaaaaatcaagcagtataattttatcaaaaaatcagactattatgacaacccggcaaatgaaagaattttgcaacaaaaaatgcagtgaatatgattcaaaaatgtattaattgcactaactatcgaacataaacaatcgagatttggtcacaaggtcaatgagcaattgtcacgtgtttggataattaaagcttcactaattaaaggcgtcatcaaatgcttcggcttcttcttccgtatcaaaaacatcggccaaggttgaacagctcgccctcatctcgccaattttcaactagtaaataaaaatcgtttttttcaattagcattgccaaatagcaaaatgaaacacacattttcactaactgccgcagccacttggaggatgaaacggtcaagccaagttatcgagcgaggcctcagagaattgccctcgagaaagcccaaatg

SEQ ID NO: 114181 - DNA, 119 bp, Heterodera glycines
tctcgcagccccctacggggaaattggatggacttatatactcgcacaatggggatggactttggataggatgaggggtaatgacggcaaaacacaaaagggaataagagaaatggatg

SEQ ID NO: 114182 - DNA, 311 bp, Heterodera glycines
accgtccctgggtgcacaatcaaaaatataacgtttaaacatttgaagacgtgttttgaataaatttttatgaagctttttgatcaaaaatgaggcttttgaaaattttaatctgggagccctgagtaaaattgtcctaaatatttgaaattgattagggtaccaacagattcaatctgaaaaacactgtccaccatttgttcggcattaaaattcttataacggattaaatattattttccgtccattttaataaataattcatttatgtttttaagctggcgaggaaaatctctcgcaattacaaaatg

SEQ ID NO: 114183 - DNA, 403 bp, Heterodera glycines
tttcagttcaatttattaacagaaattataccaaaatttttttttttgaaaaaaaaatttaaaaaatttccgaaaatttccgactttcatcaaaaatttcggaaatcggaagtcggaattccgacgaccaaaatttttcggaaatcggaattccggccccaaaaacgtcggaaatcggaattccgtgccatccctggtgcaaatgttgcgcaatttgacaatgccatcagagcacaacataggtaactctgttttgcttttatttcattattttaaattaactttatattataatatttttttcagtgtgacgtgtgactttggactgtgcacttacaaattagcgcactctaaattttaaaccggctttattaaattatttgagttaataaagtgttagatg

SEQ ID NO: 114184 - DNA, 1003 bp, Heterodera glycines
aaaaattgggataagaaatctaaacaaagtcgcatcagatgaaaaaaaataggtcataacaggtggaaaaaaaaaggtcagacagatgaaaaaaaagtcagaaaaggtgaaaatggtgataaaacaggtgaaacaattcataacaaatgtgaaacaagtgaaaaaaataggtgaagaacaggcataccagtgtaaaacagctgaaaacaaggtgaaaaaaggtcaaaggccaaaatagaccaaaaaaaaacgaaataatgtgaaaaacagatgaaaatggtgtaaaattttcatgatgtaaaggtatggggtgactggtattgttgcgttatgatgcgatttgtcagttttttcaatcacatttcaaaagcggcattttgcgcccgtgccagccaaaaaaaaaatcgtgccagcaaaaaaaatacgcagtacgcagcagttaaataatgtgacggcttccttttgcattcgtcgccgaccaaattaaatttgactctctagcataccgttttccctctcacctgtcaatcaaatttccatcgtttgggacaggcttccttttcccttctagtctgatcatacaccaaaaaacttcccctctctgcgtgccattccccttcccacctgtcaatcaaatttcgtagccaaccaaaattcaaattttggttctctccgtgccagttcccttctcgttgtcattcaaattggttctttcgctagtcttctcccttctttcgccacataccgcactgaaaatcgatcacgcttcgctaattgttccgccccttcacattttgccggaattggcgtcctttcattcactcttctctcaataatcagcttttcaacaaaccttctcctattacttcaatttattccttttttattacttcaatttcttcctttttcaatttttcttatctctatcctttttcgtcgtgacttttttttctcctattgaatttatttcattttttctgctcaactttcttctcgaaaaatg

SEQ ID NO: 114185 - DNA, 358 bp, Heterodera glycines
accatcataaaagccgattcgacaggaatgggtcgttttcattggaaaccgtggcaatttgctcccatcaacggctttgccaacgacctgtgaagttcgcaccgcattggaatgccaaattgtgaattgtaaagttgctaatcaggcactggcacttagcaatttcactaatttgatgttggaaccgccggtgatgccattcgaaggggcagagagtgaaaaatggctgcaaatatttggtcaggctccctggattctagagaccatccgggccaagatcgtgcaccgtttgccgatgttggagacgccgcgggtcataatcggtgactttacggcccaacaacttaactccgaaatg

SEQ ID NO: 114186 - DNA, 87 bp, Heterodera glycines
atttttatttattttcaaattcccctcccctccccgaaacgacgtgttgctgagacggtgcacatgccccccatcttagccgaaatg

SEQ ID NO: 114187 - DNA, 1003 bp, Heterodera glycines
tttggtcagcttttgaaattcggcaacacgatggcggagtgttcttatttgtcacagctaatttcccggcacaaacgattgtcctctcgtgttggtcaaaatgtttcaattttcttggcaatatgtagatagacagagtgagtgcctttgatgccactgactaattcttgttgttttactctatgattcgtattttatatattattcggaatgacttaatggatatccttattcttatgtcggataacttttgatgtataataaatgtctagacagaacaacgcggattttacacataatctgattcaacacgataaacaattttttttttttgcgcacgattaaaaatactacgattcgtggtacattaaggagataattaattgtttagccgctccgtttttttctcaaaaatgcggccgccgacttaaattcatggttattaattgccttaactgtcaaaatgcaataggagacaatctccgctttgatcttcgcaacaattttacattcgttccgtgtttggctctcgaaaacttgctctcacattttgactgccatcgaaaggttgtctgcatttttagggtgaaacagtgaacagatttctgtatatattttggcggctataattacaccgttcacatatccaataaaaataatgcgtaggactaaatctgaaccatccgtccaaaaatttttggctgcaatgtcacaaaattccaaatcagaaggaggtggtgaaaacggtagacaacatcatccagtggatgttttctaccgttttttccaacgtttgcacgatgcccgcgggggtcgtcgtcttgttacgacccctgcgacatcgattttccatgacaacagggtcccgattttgtgtaggttttcctaagatatttaaaatttcaacattaaaaaaaaaattatgtagaaatgagttactgtaacctttttatattaatttataagttaagtgccaaaaatatttcttgcgggttcaaaaatg

SEQ ID NO: 114188 - DNA, 478 bp, Heterodera glycines
taataacaccccaaactggctgctcatctgctgttgcaaacggaacagtcaagcgcaaattggtgactttgttccacacggcgattcaattttgggctccaagtacaattaccgtatttgctctttttatatgccagtctccattagtctgccagtctccaattatatacccccttctgagaaggttgaaaaataatataccatggtatataaaaagagcaaatacggtaagttggttttttcgtcttagtggtctgtgagttagtcaccaaaaggggggtcccaggttcaagtcctccctatgttgtgtgttaatttcaatttcttcttttaacggcataatttcgtgctgcgcaagaagacatcagtttgtcagaaaccgccgtccaactatgcagaagcggtggcaaaattcatcaattttgttgaacaaaggcgaaaggcgaagaacaattttcccggcggcatctttgcaatg

SEQ ID NO: 114189 - DNA, 965 bp, Heterodera glycines
agggaaccaagagcaaaagtgttaaatgggtggtgatggtggtgagattattttttcttataatttaagtttttttttaaagttttttttttggtgaaggtttaatacaataatttttatctgcgatattatttctcaatttgtgataaatcatttttatacgaattggtttatgttaattaattatagattgaattagctcaatctataatgtaattttcctttgaaccttttttaagtcattactgtggttaagtggctgtacaatgagtttaactgatacatataaagttccaattcgttagccttaaattattttcgtttaattaaaataattaaaattacaaatttttaaaaagattgtcgcgttttggataactagatggttggccggttggtagtgttgtgtatttgaccctctggatgttcgagtccgtttgcttgtaaatgaattaaatccatccttgttaaatgggtgctgaatggaagcaagtatatggacccctgctctagggatattgggttcgagtccctctgcctctggatgaattaatttaattaattctctcatggatttggaccccggcacctgggacaaaatcatgaagaacaaaaatgggtgtttttttaagcaggggcaggggtctggaccccggcccctgggactttatactactcatttcaatctctgggactcaattctcaggctttccaatcactggaactcaaatctctggcattccaaacactgggactcaaatctccggcattccaaacactgggactcaaatctgcggcattctaaacattgggactcagcacaccaactttcaatgacattccaatcactgaaaatcaggccaccagcattccaatactgggactcaattctccggcattccaatctctgggactaaaatctccggcattccagacaatgggactcaacccaccaactttcaatg

SEQ ID NO: 114190 - DNA, 52 bp, Heterodera glycines
ccataatttatgctaaaatatgtgtccaataattaagcacacattaaaaatg

SEQ ID NO: 114191 - DNA, 143 bp, Heterodera glycines
agtgggcaccttaattaataattagcaattgccttagggggacacggaggaaaaagcaaaaaattgcaaatggcaccgatggaaagtattttagcccatccacgggtcaatattacgggacgaacgtgccgggcgcttacatg

SEQ ID NO: 114192 - DNA, 117 bp, Heterodera glycines
tttttggaaactgatgatcctttgggtatcggttacgccattctttttctgcaaattgcacccttttcaaatatttttcattctggtttttcaaatgtttccccctaaaaaggaatg

SEQ ID NO: 114193 - DNA, 52 bp, Heterodera glycines
ggttcgttagtcgtttcgtaaattttaattgtttttactttcagcgattatg

SEQ ID NO: 114194 - DNA, 631 bp, Heterodera glycines
tctgaatattcgatattgtggtgagtgatgtgaggcattaaaagcaaattaattccttttatacggcttaatggaaaagatcacgcggcttaaacttcactctgggcactatggttgttgatctaatatcgtccagatcgatcattgaaaaaaaaatcgtaaacccataatttttgtcaagaaggaaaaaatcattttaatacatgaattatataattcgataattgagccctccttcttaatttcatttgatatccctaatttttttctatttgtttgtctacccaatttcaaaaattttattcttaaatttataaaaagtatgatcaaaatatttgaaaaaacctgtttttttgcgttcttctggctataacttttttgaaaggcaacaaaaatgtttttgaaattttataggctaatagaaaacatttagggctattgaatgataccaagaattaaggttgtttttaagttatgttatgaataattttttcaaaaagtttccatttgatgctttttgaataacgatagtttctccagtcccacctttttcaaaatatgccaatttttttttcgttttcaatttggaagcctttttaattccatattttttgaattttagacagccatg

SEQ ID NO: 114195 - DNA, 111 bp, Heterodera glycines
cctgaaaaaatgacaattgtaattggttttaaatttttttagaaattctcgagtttttaactgtttatttattttttgaaaaattaatcataaatattttttcagaaaatg

SEQ ID NO: 114196 - DNA, 178 bp, Heterodera glycines
ggtcagtgtttttcatccgcaaatattgttaattacgaacaatttgtgccgttttcagggtcaagatcgcttcggagagaactgtggccaaggcaaatgtgcctttctgaatgtctcctgcaactttcttcaaatgactccggtcgaaggcttgccgaatgcgcgtcatttcacaatg

SEQ ID NO: 114197 - DNA, 121 bp, Heterodera glycines
cattttggcatattggattttgcaatctctaattgcccaattaaaattaccaatttataatttgactttttccaccgtaaatttaaaaaaaattcgtttcaagtttttttaaactaaaatg

SEQ ID NO: 114198 - DNA, 886 bp, Heterodera glycines
  unsure (1)..(886): unsure at all n locations
agtagggctgaggatctttaagcgcgaaaaagtccaaaacaaggccttaaataagtgcgaaaatatcgcgaaataagtgcgaaaatatgcatgaaaacattccaaatttaggggaattttttaaattgctttttttatatgaaaataatttcaaattaaggctaaaaattttatccnttattgcaggtactaatagggtacatttcagattttcgggattaaatggtcgattcttcggaccggctcagttcggccccagcatgtttttgcattataacttttttctttgtcaaccaaattcaacattcttggtatcattcgaaagctctttacatactctattagccttacaaaaagcaaaaattttcaaacctggaaaaaatttatgaagaaaaaaatttcaaaaaaaaaattgattttttcagttttcatgttataacttttttgaaatttgtctgtttgccaagcaatagcttagaaaagcttctaaacacattaagctttgaatgatatcaagattgttggatttggttgacaaagaaaaaagttatagtcaaaaaatttgctggggccgaactgtttgcaatgtaattcagccaaccttgggtatttttggcaaaaacaattgttgcaactttattttaaaccaacaaatataaataattttacttagtttttcaaaagttctagccaaaaaacgggaaaaattgtcataacttttgaaaaacaataaaattttttgaaatttagcaggctgataaagcaattcaagggctatcatatgatatcaagattgtacaatatcggttgcgtctaagaaaatttatgagcagatttagtcaaaatttagcaaatttgcacttttttccttcgacccaccacgatg

SEQ ID NO: 114199 - DNA, 371 bp, Heterodera glycines
atcgatttttttgttttcggcgtagtccccccgaccctctgcgcccagatttatggggagaccgaatccttccggaatatcttccctatagcctgtactttaattctgcgttggatttttgctccccataattgtttgagtaccccaaacggacacttgaaaaaatcgatttttttgttttcggggcagtccccccgaaccgatgcgcccagatttatggggagaccgaatccttcgggaatagcttccctatagcctgtactttaattctgcgttggatttttgctccccataaatgtttgagtaccccaaacggacacttgaaaaaatcgatttttttgtttcataaatatttttttcagaaagtcatg

SEQ ID NO: 114200 - DNA, 502 bp, Heterodera glycines
tttattgtgccaacaaaaatgggttggcaaaaaaaacataaacagtgccgtcaccactttgtcttgagaggggacccaatttttcggttgggtgccacccgcctccccgccccctcctaaatgaagaggtgtgacccagcaaagcagagaagaagcaagcatgttgatgaatttgaaattgataggaaagcaaattggcattggcacttctcgtaaaagtgccaaatatggaaaggaggcggcttattaatattcttgatgttatgacgtcactctaaaaccatcaaaatgggcgttgctcaaaaaaaaattaaaataaaaaatctatgcttataaatctttgcaaaaaaaaaacaaccgcaaccatatttttaattcttgtaatcattcaataggcttaagtcataaaatttcgttaagttccaaaaatttatgttccattattttggataccaaaatcccttcttttgaataatgaacaatttaaaaagatgtgaaaatg

SEQ ID NO: 114201 - DNA, 419 bp, Heterodera glycines
cctattttataaaagcataatgtgccctatttgttaccgcgccgaatcctactattatttcactatttaattggaaatctatatttttggcactcatttgcaatttaaatttgaacattggcgttccgacaaatcttgaagaatgggaaacaaaagttcaggaaccgatcacaattattgagccggaaggcaagcttttttctatacaaatctcaattattaattctgaaattcataaaataaataatccacaaaaatccacgtctaattaggaaccaaaatattgaggtttttgaatttttaaaatcggataaaatcccaacgtctataatcagccggttctattttatcccatttttttccaatagtttatttcagcagatctgcacgttttggaaggccatttacagaaattgatg

SEQ ID NO: 114202 - DNA, 135 bp, Heterodera glycines
gctgaatttggcattgtgccaaagttaatggacaaaacattcaaaaaatagttttgacccgtttttggcatccaaagaaccatggaataatttgatggcaaaattgcgccaagagctgccctcgtcgacgcaatg

SEQ ID NO: 114203 - DNA, 406 bp, Heterodera glycines
acggaaaacacaatgataaaaatgccgaaatacaccgttgtaatattcactttttgcgtgctttttttgcaataccaaatttcacacgttttttgtagctttgtattttttgtctgtgttttttaactcaattttacaaaccacttaaagtgtgctgcttttgtttggtgtttgaacaataataaaacaattgaaagtgcacggattggataaaataaaaattaaaaaaaaattattgaatcaaaaatggaaaatttgaaaaaacaattaacagaattataaatctattaaataatacaagtttattaattaataaaatttcaaaaaatttctattataaattaaaagaaaaatttgaaaagcaattaaattgaattaagaaaatatttaaattaaatatcaaatg

SEQ ID NO: 114204 - DNA, 846 bp, Heterodera glycines
atcgacaaaatcccatttggaacaacgccaatttgtgccggaatcggtcggaatttgcgtgttgtgcgccatttactttgtatataattagcaatgaaatgagtgaaacaaaaaattcgcgtcacttatccattagcgggaggggttaagagaaaagtgaaaagaaatagagcgaaagagagagggaggagagaaggcgagcgagggggagaaaaaagagagatggagaaagagagaaagtaagagaaataaataagaaattagtaaaatagagagaaagaaaaacaaacagagagcgagcaaatgagagagagagagaggaggaggaggagaaggcgatagagtgtgcggaaaacaacagggcagacagttagatagtgatggttagctaattagatgctgtatgtgccctgcatatactccatttggaagcatttacgtgacaattcaaaaaacacagttaatgagcacgtcaatttccaatttcatctttaaaatttatcgattacttctcagcaattcattcacttctgtcgataactttggccgagagctgcgttagaaccagggctgcacgcaattacggattacggattgcggaaattacggggttttgggagttacggattacggatttttccgtaattttgatccgtaatttgacttttggattattttttcgagacgatttcttgtaagattatttttataaaaaacaaatttttctattttttatttaaagggctacccgtatttcgatttatttaagaattaaaatagatttataattttttatttgttgttgttaaggctatttgggtatttttaaattttgactacaaaatg

SEQ ID NO: 114205 - DNA, 329 bp, Heterodera glycines
tttctaaaaaaaaatatttttttttaattttcaagcaaatattaaaattaaattacctatgtattaaactactaaaaactaaacctgattccgtacccttaaaaattccgtacagggtccggtccgacgccgggcactagcactttacttggatttttagcaaattttaaaaatttgtctatttttcatttttcgaaaagcccggatttctatccgacaataagccctagcaccataaaatactaattttccaaaaagaatcgcaattatactgtccattatacataatttctttttaggcgtttattggactttcttttatcattatg

SEQ ID NO: 114206 - DNA, 322 bp, Heterodera glycines
tggttcattatgatcaataatttttggtttgaaaattttattattttttcaaatttttttgaagatcaaatgatcggatacaatcacttttaatcgcttatttaaagctatttatgcgatcattgattgaaaaaaacttagttttgaaccagattttggacaaaggcgcaaatgtcgggccgcaaaagtcggggccgcaaatgtcgggacacgaaacagagggggttggaggagggctaagaaccgctagaaatttcaaaataaatttttagaggcttgaaaaggggcaaaaaaatttcaaaattttaacgccttacgaatg

SEQ ID NO: 114207 - DNA, 242 bp, Heterodera glycines
taattaaaaaaaaatttgttatacttctcgtgtaccataatttattaaatctatattgtctatctttatatattaagcaatatttggttacttattaataatgtctgaagttgaaacaaatcgtcacaaggataaattaattaacgatggattcctttacattttcgacaaatttaatgttgatattagtttgaaattctggcgaaagggacgaatgtcgagggcgaattcacaccgacatg

SEQ ID NO: 114208 - DNA, 439 bp, Heterodera glycines
ttcctcctccatcattccctttgtgtttttgccgtcattatcccactcatcctatccaaagtccctccccattatgccccagtatttaattcctcccactttccccctcgggggctgcgagatttctgcggtggtcagtctgctcatttgtcagtgctgttctatgcctttggtcaacaatccttttccaaataacaaattccactgatcccaccaaaacagaggtcgttgttattgaacaaacttattccccccccccttttatttaatacatattattttgtaaatgcttttccttattataaattcatctctttaaaatggtaattagaaatggcttaaaagctttaaatccgggggacataacatctcctttacccattactacataaatcttgatcacattgacattttttaaccgcagcaggaaaaaaaaatg

SEQ ID NO: 114209 - DNA, 79 bp, Heterodera glycines
ttgtctggataaaaatggtaagcatttggaataggtttttgtaatattatggaatgccaaagattgttttctcaacatg

SEQ ID NO: 114210 - DNA, 469 bp, Heterodera glycines
agactggggggattatttttcaacctcctcagaaaggggggggataattggagactacgggattaatagagactgggcgataattagagaatatatcgtatgtttattagtaaattgctccgaaaattaaaaaaatattaaattgggactaatccgggaaaatcccgaatttccgaccagagtcgagattcagctttacgcatttgacaagggaatcattccaaacagttgttagatagaaaataagaatttaaattagacaccatcggatggagcgaagctgattcctattgtaaatttttaaagtttttcccataaccgaaaacccagggggattttatgaggcctcgaaaacgggattttttgactgctgataaaaaatctctgtattatatgcttaaatgatttcctaaaatgagtgctgtttttaaccaaattagaaactattttaactaaaacagaagaaatg

SEQ ID NO: 114211 - DNA, 1003 bp, Heterodera glycines
tttgttccctgacaaaatttgccatttgaaaaaatatatttttcttttgcctttgaatttctgatggaaatgtcttcgctaaagcattggccaatgaatgaatgattaatgggttcctttcttcctctgatcactcactgtcatattcattcaaatcaaatctcttttttcctgtaattttgaatttatttaaatttaaatttaaacaattcgatttattttcttaggatttcctttttaaggcaattctttcgtctttaattggttttttaataaaacaatttctataatgcttaaattaattaaactctaaattaattagttaaagtcattggtgccataattcttcataatattattcgtcaaaattggattttcccattgttttttttgtttatttttggtattaatttaattcatattcaaatgccaatgttattcgcgtgccgtgccgtctttcacatttgaatttgcccattttagctttggtttggcagggtgttgggaggtgatttggcattcatttcccatttggtcgcactttttgctacaaattcattttaaaatattaatttatccttagcctcctttttggagcaacaactataatcacttttattcagcgtttgtttcatttttcattttgccattgcttccggcctcccaactcatccgtcataatccctcaggaaattaggaaatctctgttgagggagtccgaggcaacaacagaaagaaacggcaacaaaaacaacccttggcaaagcgttcgttggcattttgccttttcgccgtttgccctttcctccgacatttctcttctgctgatgaatgagtgagtgctgcttcgtcttcgtcttcgtctccgtcttcctcttctgccactgcttctgatactgctccgtcttttcttttccttttgctccgctgctgaacaaaaatcacaacgacgcctcacatactgaaatcggcagaatcgttcactttgtgtttcggcaaaatg

SEQ ID NO: 114212 - DNA, 732 bp, Heterodera glycines
  unsure (1)..(732): unsure at all n locations
tctcaggtgataacnttttttgaaacttaatgaatttttttgaaatttcgcaggataatagaaaacacttagggctagctaaaaataccaagataataaaatttgattcattttgggtgaagttatgaataattttctgtcaaaaaatttccatttgatggttttttgactaacgcccattttgatgggttttgactaacgtcccagcaccgttttactgatacattttaaacacataatttattttactcttcttccgtttaaaaaataaataaatgtttatttctaaatttgtttgctgaattgacctttgcttcctttgcttttttttgtaaaattgcgaagttatctttccacagataattttgtagcaattaaattgaaacaaaagatcggaaaatgatattttgtcaattagatgatggaatggcgatttaatcgaattagtggcggatgacgatgaccataatcagatttatcaaccaatcactacgctataagaaaaccaaattcttgcaaaagatgagcataaattacatcaaggtttaaaaaagtgataatcggaataataaattaataatttaattgaacaatttcacagaatatgcccacatttgcgatttaataaattcattaataataattagcgaattgagaaaaaagtggcaatttctgcgataatatggtccaaattggcatgttagttctttgaaacgaaaatgttcagaaatg

SEQ ID NO: 114213 - DNA, 57 bp, Heterodera glycines
agcagcccaaggcgccgtgaggatgagcagcggcggcgatcaccaagcgtgatcatg

SEQ ID NO: 114214 - DNA, 195 bp, Heterodera glycines
ttccggcgatcacttcgccgtggtggagacggaaaatgaacggcttaaatggggatgggatgagtgagggtaattaaatgaacaattttggctcaattaaaaaaataattaagttttgggccagagaatgtaattttttggcattgcgattcgtttagtgtgtattaaaagtcaaacaaaaattttaaccaaatg

SEQ ID NO: 114215 - DNA, 127 bp, Heterodera glycines
tgaggagggcgggcaggggacgaatccaagacattccttcttggattgttacccaagccttacaaatagacacaaaaactagatcgggtaaattaccgttttatttggaaaatatttttaaaaaatg

SEQ ID NO: 114216 - DNA, 127 bp, Heterodera glycines
tctgaaaaaatacttatgaattaattttgcaaaaaataaataattaatgaaaaagtcagaatttcgaaaaattttaaaaacaacaagcgttggccattttttcaggttaagttagtcctttacaatg

SEQ ID NO: 114217 - DNA, 466 bp, Heterodera glycines
tttgtcggattttgcccccagcggaaatagcctctgcttggcgaggattatccctcccccggccggcgccggagggagcaccaccgctgactaactgacaacgtgaatgtgcgcagcgggcgcgcacggcctgcgcccgcccgtaatcaatcaaaaccgccgccaaccaaaccaaacgctgcagcacagtggcagcggcggcgggtgatgtccgctctgccgccctttgtgaggcacgcagcgcggtgcatgcacacaaatgatgtgtgtttgtttgtgtatgtgtttcagtgcggcgcatgcatccggcgtgcatgtacatgtgaaaccggaagcgcacactgagaaaggaagccagtgcacgcaagttgattatatttagagaaaaagaagaagtaacggaaagtgtagaaaaaactaattggggttattaattgttggtccggaaaggacacgccataaaatg

SEQ ID NO: 114218 - DNA, 214 bp, Heterodera glycines
tccgcccggtatcgaagcctaatttttaaaaattttatagccgaactccttcaattttcgtcaccaattttaactcgaattttaaattttggccgaaaatgtgaaacataattacctaggtatccattttggttgtttccggcacaaaattgagtgaaaaataatgattttgtcatgataaaaccgataatttgcaggcggtggcctcaagatg

SEQ ID NO: 114219 - DNA, 145 bp, Heterodera glycines
ttattcattcattccctggcccttttacagcttggcgatgacaaccaacgtggccaacccaattctgtacgcatggctcaatccgaccttcaaagagttgtttttacgcaccgcaaatgtgttggtgttgcggcgcaacaaaatg

SEQ ID NO: 114220 - DNA, 351 bp, Heterodera glycines
taattaagggtcaaaaagaatcgttattttattttaagttttaaaatcaacaactgtttttaataccgaagttaacgcttttgaaactcccgcatttcttttcatgacgcacgaaaagtaatcatcgtttaatgaactaataattattgatacaatgattggtagacaatttaaaatttgcgcttgacagaatccatcattttaattgcgagaaatatgtcacgaacaaaatcaattttaaaatgaaatgtgtcacaaactttggagaaatcaataacggctgtttaataccaaatgtttttttaatactcattttataacacacgacacatttttagtttgacaaatatg

SEQ ID NO: 114221 - DNA, 277 bp, Heterodera glycines
ttcatgtttaaattgcgtcaattagcaactgttggatgaattaaattgtacttaaaattgcaaatatttaaaattttatttttcagaaattgtcaataagattttgccagtaattaatggctttttttaattattttgatgatttgtactacatatttacaccagcagcagtaaaaaaatatataaagaaatttcactttgtttttcgcaagcgatctgaaacaacaatacgaccactgttgggtataccatcggatgtagttcgttgatccaaatg

SEQ ID NO: 114222 - DNA, 190 bp, Heterodera glycines
tttttttattttccaaccgctttttcggctctttcttccaaaaaaaacttttggaggacagtgagggtcagacggcgccgataggcgctgttgggaaaattttgtagtttttaatgcaatttgttcacagattttattcaaaaaatgaccaaattttagggtttttagccaattttttaataccaaaatg

SEQ ID NO: 114223 - DNA, 704 bp, Heterodera glycines
atatataattcaatgccattaaataaaatcttttaaatgaaatttaaatgtttgcaaaacagagaaacaaataaaatttatttcatttacataaatcaaccgatttggcctatattattttgaaaatattaaataaaaaaagagaaatcaataaaattaattcaaaatgtatgcaaaacaacccaacagatggtactattacactgcattgaatacgacgagagattaaaaaaattaacaataataaataatttaaacatttaaaaaagccgaatttaaaagaaatgaaaagggcattttttaaaacaaattaaattaactatatttcccttaagatcgaagtatatatgcataatattatttattgtttatctaaaaaatggaaaaatatgtccgatgaaaattgtgaaagaattgcaaaacatccaatttaaattggttaaaaatattagatcacaataattgattacatataggctgccccaataaaaaaagaataaagaaattaaataaataaaacaaattaattttttagctcaacagaaaaaattaaaaatatatctcttgtcgacgtgaacttcttgtaaaccacaacatgaaataaaacaacaaatcataattttataagaatttaagttttaaattctatttaaatttccattaatttaggcattaaaattaaaagaatataaaatttgaaaatg

SEQ ID NO: 114224 - DNA, 103 bp, Heterodera glycines
agtttagcttagaactgatgcttctaggatattttttctaaaattttcattatattttttccccatttttaatatttttttagataaggctggagaaaacatg

SEQ ID NO: 114225 - DNA, 98 bp, Heterodera glycines
atgtcaagttgttttttttgaaattgactcgaaaaaccgaatttaggcctacggtagttgacaatgacccgcacattcaaatcagtgcagtaaatatg

SEQ ID NO: 114226 - DNA, 84 bp, Heterodera glycines
tttttggatcaatcaaagcttaagaattcctttcacttttttataatttcgtttctagcgtaattcagattctagcaagaaatg

SEQ ID NO: 114227 - DNA, 608 bp, Heterodera glycines
  unsure (1)..(608): unsure at all n locations
tttaaggcattcaccattcacaccagcagataaaaactaacgcgaancgctcacaacatttcattatgatttcgtttttttttgtattaaatgttttcttntgaggccttagaaacggatcaaaacctattctcctccaattttttgttgttgttttactgttactcattcattcataacaaacatttgaataagttgtttaaaggaatggactaattgcttacttttgttctgttgcgatattttgaatgtcataatgaccaattacggtgattaaatttcgaatggtcgcaattccaccctatcaaaaatcaatttgtcgttaatctatacattggggacgccatttgattgctatataaaatcgggttggatacctatttgtggtgggaattgaatttgggggaagatttggctttatgacaataaaagctacaaaaaattggttttctgttttgatcttaggtgaatttttttttcaaccttcgtaacagagaacttttgaggcaattgaatgggcaaaggttagtttactcgatttttctctgtgtttataagggagtttatgaaacaaaaacaacaacagcaattggtcatcgtctcacatg

SEQ ID NO: 114228 - DNA, 833 bp, Heterodera glycines
tattttgtgaatccttttttctgttatttttttaatgtaataaattcttcacttttttatttacacttctttttgccgcaaataatttctaaacaaatagaattggtccgctaaaaaccgcctaaaactagttgcaatcaatctctaatgacctctaagcatcacaataatagtccctaggcgcggaaaataaaaaaatggttttttaatcggtttaaatcacgaaaaatgaaccaaaatcaaccataaaaacattagtacggccttcgcttccgatcacgactttttagggactggcagaatacatgaaaagggttggtgggttgatcaagatttttagaaggggtctgagggttgaagagcgacggtcaaatttgttaaccattccaccaaattagagtttttatattgctcttcacctgacttttttgcgaagcgcttttttcgttttatttgaaatttattcagaaaatttttggcattctgtttgtaaaattcaaaaaaaaatcaatttgcggatcctgtagcgggatgaaactcaattttttcgaggtctcgcgggataatccctcaaaccccaaaatttttgcggggttgcgaactggaattccacaaaacacaaaatcccgcgcctggctctaatttatattgttcatattagagccagaaaattacacaaaaaaagtctattttttaatttttaaggtcctgtaatttgtatggtcttgcaaactaaagagtctaaactttgcatataagagcaatttgttcattgaaaatggaaaagcatttataaattctatgtattttttcctttcttttttacagaaatg

SEQ ID NO: 114229 - DNA, 538 bp, Heterodera glycines
tttttctaataaaatttataattttcagatatcgtttttcgcttgtatgaatttatattaggagagggacagtattccgggttcggaaccccgtatctttttaggaccgcggcggaactccggattctttgattaaaatttctgaaccgtaattttattttaaaaactagcggttttgataagtaccaattcttctgcattgtttttattggacttacctaaatctaatcaaatcatgattctctttttaataatttaaaaattcacaaaatgactatttttaatgcagtttgtaaacttgcatcgcaccgcagtcgcatatttaaaaatttccgggttatggatttttatgggacctgatgaattccggaaactttcacaacctagggtcccaccccgaatatttatgtatttcctaaaaattctcatccaagtcagaatggcgactaagtcttgtaaattctccattttttattttcttgctataaatagattttaggagaattctttcatttgctttcaacttttgactgaaatg

SEQ ID NO: 114230 - DNA, 971 bp, Heterodera glycines
tgggctgaccattactaatttggacactgatccgattatcatagtcgagtctggcgacaaatcattttatatctgttcaaatatgagacaaaagaaattaaagaaaatttgaccttaaagcatctttctgaaaagcccaaccgattggaatgcatcattagcaattttggctacaatttgcttcaacggatggaaaaatttgcagaagaattttttacagaaattgttccaaattgcgacacattaaacattaaagaatggctttttaaaatattttcatataattcattcattttttactcaaacgaatgatcaattatgtaaatttgaaatatttaataatgacagccaaaaattatttaatgagtcaataacctttaagctacaagagtagtaatgggttacaggggcaggggtccagggctttaccacaaacctaatccaattagccatcctcctcaggaatctcgcgcagttttttaaattatttaaatgcgggagaattttaataaaaattaaattcgccgcggggtgggggactcgaacccttggaaacgggagctctaaccactcggccacggaggcggttgaaatgatcggagcaaatgttggatatgtgccgataattttcctcccgatcctgccccaaggcggcggcgatgatcggacccctgcccctctccccggaaacccctccccctctcccggacccctgccccctcttcttcatcatcgttttaatcacttcaatcccccttctgccgcgccatttttcctccgttcggattattcccacgtctaacattgatcggccgaccggtagaagcaattaataaaatttgaagcatttcaaagttttttttcatttataaaataactttgtaaatggctttttctttttttaattcgcactttttccctttttccgcttatttcaccacattctgcccctaatctttactcctaaaatg

SEQ ID NO: 114231 - DNA, 421 bp, Heterodera glycines
  unsure (1)..(421): unsure at all n locations
ttaaagggtcaggagccccccttttcctcaatttttccattattaaacncggttcaaaaaccggttttttgccatttccgaacctcaggagtatttttcctgagcattacaggccacgagagaacaaatggtatcaattttattcattttgtttgtgggtggtagactatagtacagcccatttttccataaattttttctcaaaaacttgaataaaagtacgattgttgaaaacattttttcgagaattgatacaattcataaattaatgtctgtttttgccggttctgttaaaactgcttattttaaaataatcaatcccgaaaattaattttattaatttttttttaaatttttgaccttaataaaagcagttttaatcatcatttatatagatgatagcgtacgcctattaccaatg

SEQ ID NO: 114232 - DNA, 1003 bp, Heterodera glycines
tccgttaattgatttgtttattaggccttattgcagcactcttccccttcttcattgatttgtttattttgttcatcttaaggggtcctgtaattaatttggtttagttaaaataattatgcaaaaaaataaataaataaaaaaataaaatattgggctcataaattaaatttagataaaaaaaacattcaaagccaaagagttagaaaaaataaatttgcatcaaagtataaaatttcattgaaattttaattgtttgaaatttaaaaaaatatttgttattattttaataataattaactaattaattaattagaacattttttaaaatttataaataaatattatttaattatacggtcccccatttctttttcgctttaagtcaaaaattgggaaattccgttaattgatttgtttatttgaccccccttcccttcccgccacccgaactcgccatttcccttatccctcgctgcaacccttcctcgccactctcgctgccgagcaatttctcgccatttttctcgttgcaatgtactctcgccacactctcgcccccctgccaatcgctgctgcctactctcgcccccactgccactcgctgttgcctgctctcgcccccctttccctgctggtgacgtcaaattttccctttatgagagcaaattaatgtttatcatcaattgccaatgtggccgagtggttagtgcgtcagtctggccgcccccctggggttcggatccgcttggtgcggggaatttttggagaattttaaatgaatttaaattcaacgtctttgacctttaagacgtttaaaataatttaaaattaaataaatttaattaaaataatttgcataaagtcgcgcagtcaaaaaagtcgcgcacccccctgcaataggtttgggtttgcaagaaaaagtcgcgcaataggtttgggtttcaaaaaaagtcgcgcaataggttttggcttcagtactgaaaagtctggcgctcaaatg

SEQ ID NO: 114233 - DNA, 215 bp, Heterodera glycines
  unsure (1)..(215): unsure at all n locations
aaaaaatatatgcctaaaaagtagtatagattgaanttaggttcagatttttgaaaatttatgtattttaccgccttccgttaccaacaaattagaaaaaaagttacgttttgtcaaaatctcaggttttggacatttagcgaatttaaaaatataatttgtttttaccaaattttccctacattatgcaatcccttccccggattaggacaatg

SEQ ID NO: 114234 - DNA, 1003 bp, Heterodera glycines
  unsure (1)..(1003): unsure at all n locations
atgcatctctttatgtatagatcctgaaggtgtaatgcgttcaccccgtcgctggtatgtctgtgagtgttatgtgtagggatgtcaaaaatatgtacaaaaattggtaaaaatatgtatataaatcagggttcggatctgtccttatttataagatttgtccttatttggagggtccaaatcttacaaaataaaaatgtccttatttgtaagatttgtccttatttcgggctattgttcttattttgttcttatttcttaaatatattcaaaattttgaaattttatggcagaatgtcactattttatcaagaaaatatagggtttgctcaaaatttagttattttttgacaaaaaagcaatcgcattaaaaattacaaaatttntccccggcggcgcctatcggcgccaccggaccatctccccccttgttccccaaaagtagttcttttttcttctaattttcaaaattattcccttttcggtgggaattcaatcacaattttaacaattaaaatgagaaaatattgttatttttggactaaatttgttcacaaagtgcactaaaaatttcaaaattntcccccggcgaaaatttgaaaaacccaaatgaaaattcacttttttcaaattttaaagccaattccattacatatgtttaataaaatccacaagtttttttttcatattcattattgcagtctgtaaaggaattataaagcctcaatttttttttcttcatttatcatagtggactttttgatcagcacaaaaagttatgcttacatgaatttttccagatttttatgatgtctttgaaaaaagttttttgtgttttatgaagtagcctgataatttctttacagcaaatttgggcaaaattttggaattaaattcataaaaataaaatttcttttacatttttaattttttagtgtgtgattcttaatatttatagggggagggtaaaattggtaaaaaatttcagctcggttgggacatg

SEQ ID NO: 114235 - DNA, 723 bp, Heterodera glycines
tgattaatctctccggccggcgcttggaggggtggcaaaaatcattgtctgcccacctcagcggcagcagaaggaaggcccaaaaagtgagtgctgctgctgctattggtggatgagctaattaatgatgatggcaaagattggtggcgcaatttttggcacaaaaatcacggaaatgcatttaaaattaaatatgcattcaaaattgaaaaataggtgggcacattttctagtcaaacaaaaactttgaaagtgaaaatgatttagaatcagattctaacctttaaaagttttattttagagcacgaatatactccgttcattaaggataatgattatcttaatccttggggtatatttcaaattgactaattaattattgagtaatttaaaaaaataatttgggttgttttttgcaacatttgactctttaatgagcatttgtggtgaataatttatgtaattttggggtactcattaactttttaagtttttttttggggcaaatgggcggcgatgtgtccatggccacgtccgtcggcaacggttgaactttgagtaaaagaaaaaagagttattcggcccaatagaatttgaaaaaatgataattaataagcaatttttcttaattagatatgtgcttaattacctattttccatatgctttcactcttctcgaaaaatgattgccttgcgcccaaaattggccgcctaaaggcaatg

SEQ ID NO: 114236 - DNA, 187 bp, Heterodera glycines
cgctcaaccctactttaaacacagggggggggggtaggggaggggtacaaattgccgaatttttctatcttaatgtaagtttgagtatcagaaatttgcaaattttcaaaaaagtattgaccttttttgagtcttggtaaaaattttaaaagtgtacttagaacctcctatataagcaatagaaatg

SEQ ID NO: 114237 - DNA, 126 bp, Heterodera glycines
ttagtttcttttttccgcctcaattttttttgctatttaaccacagtttttttaaataaaaatcatttgtgttccattttttaaaaaattccatcctccttcgttttttccgatcttcctgcaatg

SEQ ID NO: 114238 - DNA, 440 bp, Heterodera glycines
aaaaaaaatgccacgactaagaccgcacaatcaaaaaaaatacacacgactaaaccgcacaatcaaaaaatgccacgacgacgattcgcaatgtgtaatggatgagtgggtatggatgagttgggcgtgactcatcattgatcacagatagatcagttgactgattaagagcaatttgaagtgattaaccttttgcttttaactataattgataagcgctttccaaactgatcacagatttttgatcacaaatttgatcggctggaaaaatttttcttcatgccgacctgcacattctaattagtaccaaactaattaattggtactgcattaaatactacaactattatattcgcaatccgtaaaatttctaaaaaaattttttttttctgacgggacgacggggagccaattacatcagcggcggcaacggtggcatg

SEQ ID NO: 114239 - DNA, 62 bp, Heterodera glycines
aaaaaacaaaaattatgcgccaacctcataaaaaaaatttgcgatagttttaaaaaaaaatg

SEQ ID NO: 114240 - DNA, 929 bp, Heterodera glycines
aataaagataataaataatttactatttaattttttctctccaagtggcacgccgcaagggaattaaaaaaaactcattagttatgcataattagtttcctatgtagacaaaatgggagttatttcataaaatccacaaatctaccaaaaatacggaaagaatagtaaatttaaaatttaacatgctgtctcgcaatatctcacactgtctctctctctctctcacacagtctctctctctctcctctttctatctttccctcgctctgtttctcttctctttatctttactttatatcactcattctttgccaaatagaaagcgacacaaagcgacgctaacatttcgcacaattgtcattattacggatgatacttttagtgacgaaaaatcccgaaagagttaactaaaatagttacgaaaaagtgccaaaataatgacaaaatagtgaaaaaatccaaaatagtgacgaatagagacataattttcagccaaaaattgagcaaaaataatttttattcactatttgcagttgcaaatgagttggactgagatttttaagagcaaaaaacccaaaatagttacctaaataaagtttttaaacttaaaaatttttgccaagaaagtaaatttttgaataaaaattttttcatttcataggaggagtatattttgaaaaattttagctcgattctgaggggtgtatttttttgaagtttttttaggtcgattcttagaggtgtattttttatagtgacaaaaagccaaaatagtgatttttaactattttagtgacaaaaccctcaaaattgtgatttctattgaccgataatggcctcagaatcaaaaatttttaatgcagaaatgcgttttttgagcccctttcttcaaatcaattgagcaaaaaatttaggtatccctacaaatg

SEQ ID NO: 114241 - DNA, 292 bp, Heterodera glycines
agtaaatgaatttttttcatgcagaggctgcagaaatactcaataaagcagcaaaaaggaggatctcttcgcagattcattacgagagcaaatgaaggttttttaattaaaaagagggcaacccaatggcaaattttatgagagataatcaagtaacacgtatttcacttaatttgttattacttacctatattacttttttgtaatttgatatgcaatgacaacgacaaatagcgcctccaataattacactggtgaggtgagcaaaatcgagaaaaggcagcaaacgatg

SEQ ID NO: 114242 - DNA, 527 bp, Heterodera glycines
taatgttcaaggtaataataatattgctgaattggcctccctggcggaaaataaattaattttttttcaattttacttgtgtaaaaatgcattgattaaagaatttgagctgattgtcagaatttgtaagtttttcatcaagcacatgatcttttggcatttttattttaaaattaaggtacttttcggttttgtgtacacatcccaaaatgttaaaaaatatgtgaggatgcacacttttttgacgggacaaaagaaataatttttccaagacaaaacagagggtttttttgccattttatggcaaattattccttttgttccatcaaaaactccgtgcgtcatttgtacatattttttaaaattttggaatgtgtacacaaaaccgaaattttcgactttttgttcgaattcgggtccgtagctcgggagcagcttgtcccccccccccctcccgcatcgttccccccgtgaattttttaaaaaatttactaacttagaaatttttcaagaaaaaactcagtatg

SEQ ID NO: 114243 - DNA, 350 bp, Heterodera glycines
ttttacaccccctaaaaatgaggtttttagagcctattttccattttttagtgcctatttttggggttttttagagcctaaagcctacctattttggcagtttttagcgcctaaaaattgcatccccagtaatttaatgagctcaacaaatttctgaattttttctctttttcttgccatttcgcacgactcaatgaaataattgagaatttatttattttttcctttatttacactttgtgttgcattattttttagtttggattacaacttggatgaactgatttcatgcattttttgtgatgcattttttgccgtttagataaaaagaaattagacttacctcaatg

SEQ ID NO: 114244 - DNA, 855 bp, Heterodera glycines
atgaaaagaattttggcaaagagacggcaacagatgtcgccatccttgaggcccggagtatgtcgccaaagcgacacaaatttctttgaaatttcttttatttttgatccttttcgtcgatcaattttctcccttcgctcgctcctttaattatgactcatcttttcttttctccatattttcgctatgagtcatcatttttgagggaattttttccctttgcttgtgcacatttcttcacgtgcctggccccgcccccatcgattgtgagggtataaaagcccggcccattctccattttcttcactctgatcactttttgattaagtcagtcgtgacagttttctgtccaagcatttgcattaaattgtaattgtgcaattgaattgaataaagattaagaaagagtcttagtcttttctctatctgtaaaagggacgctcaggagccctttcatacagaccattaagccgttgacccccgttgggtcaaagaaaaggcttacaaaaggaaaggagaaacattttcctcctttcaaattgtcccttcagtaaaggagaggaatttcctcctttaatttgtccctttggacattcagtgaatttctgtcttttggacagaaattcgctttgcttaaaagactccccccttctgccgtgagagtctgcttccccttctgccgggaagtgcaaatttttgtggccttttgcccacaaaattggagccccgtaggggtcgacttccagtcgtaagcctaccctccaaccaaaccaatccaaagcgcggcctgagcgcttggatcaaacacacaacccaaaggggtttattgtgttttcattaagcgtaagagcaatg

SEQ ID NO: 114245 - DNA, 67 bp, Heterodera glycines
tatagaattagccccttggcaaaacggagcaattgaacgccttaatcagaatgtcaaaacagcaatg

SEQ ID NO: 114246 - DNA, 101 bp, Heterodera glycines
tccccgatcgccatcccttggtttttttcttgagtctgatcacttacgggcgcattagtgtctgtgtggcatttcagcgaatttttgatcatcgggtgatg

SEQ ID NO: 114247 - DNA, 166 bp, Heterodera glycines
tattttaggttttatgaaatttttccgcttttttcttcatttatgatgttttagacttcaaatactgaattaattagatgacatacaattagcagcagagcagaaacagtttcctaaattattttagggctatggcttctttttcaggtacgtcccttatgaaatg

SEQ ID NO: 114248 - DNA, 72 bp, Heterodera glycines; identical to SEQ ID NO: 101114

SEQ ID NO: 114249 - DNA, 597 bp, Heterodera glycines
  unsure (1)..(597): unsure at all n locations
atccggctcccattggatgcagcttaaatattntagaatattataacattattttttagactccaaaattttcaagaagatcgcaaattacacactttttataacggatgaaaatatttttaaattaccgtggcactaaatgtcgaaaagttcaactgagaattcgttttttaataccaagcacatttaaatagatagaaatgagtgtttttgtgccaatatttataggaattcttaaatatttttttaaattttgtaaaaccttaaggaagaccatttgagagtggaaatgaatttgtgtatcatgagcaagaaatggaggaatttgaaccttcttccttaaaaaaatttgggccattaacaggcaaaaatttatattaattttatttaattttacacaattacatatgagcaaattcatgtacaaatttaaaaaaaacaattaaaatttatcaaatgacattcatatattatcatattatgaaaataaaaaattaaatgatcaacaataaaaattttttagtcattaaaaataatttagacaaaaatttctctgaaaggttcaaaaattcatatgcagaactttctaagacaatg

SEQ ID NO: 114250 - DNA, 163 bp, Heterodera glycines
gaaagtgaactccgcttcgcttttcaaaaccgacgtggcggtagatggcaaagaaatcaaattcgtactcgacagcggggctgaaataattgtgatcgatgaactatcacatgaagtcatcggcagcccccgactccgcaaatgcaccgaaagtggatgcatg

SEQ ID NO: 114251 - DNA, 301 bp, Heterodera glycines
aaaaaatatttttacgtattttggcgttttcccaaaacatataacaaaaatgcaataaaaacgaaaaaatatacccctaaaaccgatcgcttcagaaaaatacatctctaaaaatcgacataatttttttccaaaaatacaaccctaagaatggaccaaaaaatttctgaaatacacatccataatatgaaactttttgttacctattttccattttagcaactattttaggagttttttagaaactaaaaactaactattttggcactcatccctaattaacatatttttcagtccgatg

SEQ ID NO: 114252 - DNA, 601 bp, Heterodera glycines
ccccccccccctccgaagccctacgcttttttattaccttgaaaatgccgcattcggcacgctctgcgcacctgcgtacgactttgaatggcatggctcgtcttccgcttcgttgtgtgccatccgcggcaccgttgcgcgtgtgcgattggaccatacacaatgcttttggactctcacaacgcacgttagtgcccgcgtcacgcgaagcgtcagcagcagtcaaagaaatgcaactggggtccgtgtcggaagagcacacgtggcaaagcagtggaactgaggcggaagggaaaatggcgaaaataaattaataaaaaaacatttattcgatttgcaaaataaaatatttaatgaatttacataaatattcacccttttccgcgcattttccatttgcgtttattttctgaccatttggacattggcaaccaaaaaaggacgactaaaagaacgaaaattaatttatttgtttattattttattagctcttttttcgaactccgttctctggcagaagccaattgccgcttggcgaacagatcagttgcatcgttttgccggattggcattttgccgaaattgtccgattttcaaaatg

SEQ ID NO: 114253 - DNA, 67 bp, Heterodera glycines
ttcctgctgagactggtaacacaataaataaattgtaataatataattgcaggtactggttgggatg

SEQ ID NO: 114254 - DNA, 427 bp, Heterodera glycines
cttttggccataaatttgttcaaaattgacgaaattttttggaattatgcaagataatagagcatctgaaggacactcgaatgataccaacaatgttagattttgttgacaaaaaaaaagttatagtccaaagttccttcaaaattgtcattccttcaaaattgtcattacaaatgtgcccgaaagcaaatcggacaaagcgacggagagagcccgggaggaccgtgccgttgtggacgaaattttgaatgccacggacgttgatcaggcaccaattgtcttccgtgtcggcaaacgaatggatggtcgaccgcgccccctcaaaatggaattcccgagcaaacacgcagcgcggcacgtcatccgcatgcgcggaaaggtgcaagcgttgaatggtctacacactgtacgcatccgcgaaagcatg

SEQ ID NO: 114255 - DNA, 200 bp, Heterodera glycines
tgaaaaatttcttgtatgttttcttataaacagtttaaatttttctaactttctgacacaggcgccggcacggccctagtcctagtaatagtatatttgttcatcagtttggatgcaatttttgaataaaatttgttaaaagtaaaatattttaagaaagggataaatttttatctttttttagcgaggccaacataatg

SEQ ID NO: 114256 - DNA, 1003 bp, Heterodera glycines
gacaattgggcgaaagggtggccaaatccaatgaataatccgacggataattgggcaaagggccaattttgacaattctaccgccaaaaagcccataaagcgtggggacggactcgaaaacagctcctcgcagtgtctctgaatgagttcgacgtcgctgggctgtgtgctttcccccgcaatgtccgccgtcgcttcgccttcgttttccctctcaaattcgactccaatttcgtaacttggattcatcaagaaatttgaaaaattaagctttaaatcattttctatgcacataaatatttctaaatgaactataaaattataattaatttaaaggaaaatttaatacgcaaaataattattcgaaatgaaaatgaaacaaacaaacaaaaatagggtaatacatagtttggtttgttcccccccccctcctttttcaaaaaaataataataattacaaaaaatcatgcaatacaactttttattaggttttcattgtcagcattcactgatcggtgttcggtttttgctggcgattgattcttttttttttatttatttccttttcatttgatttttacgaggcctttgtttttttaatttcgtttttctctttcctcatttgtttttctgagaatatctttttcccttctccgatttttatgattctctgccgaccaacaaaattattattctcttttcgcttattttattttgttgattaatttgagaaggtaaacaaatttcattgaagagaattacattgaaagcctaaatattctagatcgtgataactctatgaatggcgtatgggcgaattaattgataacatgtaccgatattcttcctgttctagttatgcgaccacacgcacacaacttgcgtcataacagcgactcacggttccaccgcgcgcaaccgatttcaaatggaagaattccaaaacttccgtgccaacaatttcttcgaggcattgctcttcaactggctaacacgcaacatg

SEQ ID NO: 114257 - DNA, 294 bp, Heterodera glycines
ttttgtcgcttcgagcacactcatacttttgtcactttcgataatccacgcggaaataggggactgataagatccatataagaaagggcggatgtgcctcggtagattaatagtaaacctgccctcggaaagggtacttgaatggattccattcccacccgaggcttatcatttcatccatttcgtactgtagtgataaatagggatgtcaacaataagtacaaaaattggtcaaaatagattcataaaaacgtaaaaaagaatatccacatatgtataaaatcacaaaatatg

SEQ ID NO: 114258 - DNA, 812 bp, Heterodera glycines
  unsure (1)..(812): unsure at all n locations
cagggatggagttccgaggcactaaaaatnttcggaagtcggaagtcggaattccgaggccccaaaaattttggaagtcggaagtcggaattccgatgccccaaaaattttcggaagtcggaagtcggaattccgatgccccaaaaattttcggaagtcggaagtcggaattccgaccccaaaaaatgtcggaagtcggaactcggaagtcggaatttttcaaaaaaaaatataataaattttttaaaaaatatttaataggctaaatttttaaatttttaaccatgtaaaaggtaatttcaaactgtttttagtttatttctatattttttaaaaagatcaaaatattttaagtaattttacattattttggattttttttttgggaaagttacaccctttttttgcggcgcgctttatccaaagagaatttgagaaactgtggggaaggaagggtccggcggtgccgatatgcgccgccgggaaaaattttgtaatttttaatgtaaattgttaacaaattttgtccaaaaaatggaaaatttagcgattttgagcaaattttcaagaaaattaagtttttttttgagtccggcggtgccgataggtgccgtcggaaaaaaaaaattgaaaatttctatgcaatttattaacataaattgtacaaaaattgctaattttttgaaaaaaaaactcaaaaaaattccgaaaaattccgacttttcatcaaaaatttcggaagtcggaagtcggaattccgaggccccaaaaattttcggaagtcggaagtcggaattccgaccccaaaaatg

SEQ ID NO: 114259 - DNA, 748 bp, Heterodera glycines
ttgccgtccgtccctcacatttccctccattttctccctcgcgtttgcccaactaaacaacgccaccaccccatttactatcgacgacgacggaggaggattcgaaggcagggaggagaagagaagaaatggaggggagcgccctctttcactcatcagcagaggcaaccactgactgactgactgagtgtgttccctcccccccccccgccctcccccattcattcgcctctccccattcagcagcagcagttctcctctgctcaacatcgtcagcagccccacagccctaaatcgacgacaaaatccttctccaatcgcagaaatctcttccaattcattcccgaaacggacacaattaagcgaaaacttgaacagagtgagtgagcggtttaatttgtaaaattcatgcctcaatgtgttttaaactacaagatttgctcccaactttctaaactattttctctgtcttttttctattatttttttttttgttttccatttctaacgcccctctcactctttccttctcattttagccacaccatacgccgccactgccttttttgtccatggtattattttccgtgttaatcatcaacaaaaaaagaagcagtagcaatccaaccaccaccaccatcatcaacaccatcatttgtattaactctcaccagtgatagggccaaaaatagaaaaagtgtgtcgtccttccgagcaattcgcagcagtttcgaaacgcctgcgcatg

SEQ ID NO: 114260 - DNA, 133 bp, Heterodera glycines
aaaatagacattttaaaaataaaaaattataatttactcgcttaaaacacaggtgttgcctgagccggttgtcaagtactcggtgccaagccagccggacaaaccccgtggtgcgcaactttggccgaacatg

SEQ ID NO: 114261 - DNA, 59 bp, Heterodera glycines
agtgcatttaatacttttttcggttgaccaattccccttgcctaaattgttttcagatg

SEQ ID NO: 114262 - DNA, 1003 bp, Heterodera glycines
aattactttaaatttatttacgaaatttttggaaaatttgaaacaatttaaattttttgaaattgttggccaagtcatatgaaaaagtttcggacgaattccgtttttttgattggaaacattttttatacaataaattgaaaaatctaaaaaaaatcaattaaaatttaaggcggatttcatttttttgcctgcataaaatttgagacatggcccgaaatttgagaagtatttgttggccaacaaccatcatcattaatgcatacaatttctaaggctttctttgtgtaaacaaaaattttttagtccgtatttttataagtgtgtgggaggtacgccgctctctccgccgtgtttctcctctcattgctatatatatataatatattgttgctaattttgataatgtttttgaaatgaacaggcatggggaacgtgggacagttttaaaatatgaaaaatggccaaatatggacactaaaaatgaactaaaactgccaaaaaatgcatttaacaaaaaactaaaaaaaaaaatctgattttcgggcaaaatgcggtgccgtcaaagttgaaacttgatcatttcaaacaaaaaaattgttgccgtttcccatgattaacgctttttaaattgcaattttaggcggggaggagggggcatttttctattttaagcacatgggaacagctggcataaacatagtaaacgctaactattttaggtttcgacagaggaacaaaaaacgattttatatttttttctttgtggtaattgacggatatttaaaaaaaatttaacaaaaaaaaaaaaaaaaaaaattcgcaggccaaacgaattatggatgaaggactaaaactatacatatttaacgcttttaaaagcagcatcaaaaaacgtacatatgattttgtactatttattgtacatgtgattggagtccagttgaaataattttgtgtaaataatggaccgaccgactcaacccaaatcaataataaaatg

SEQ ID NO: 114263 - DNA, 824 bp, Heterodera glycines
tcttaaaaaatatctgtttttaatcattttcccttgaaatacggtagaaatcaatcatttttgaggtgtccaattttgaccccaacctatctcagcgagtataaatcgtagcctaaccatccaaaaggcaattctgtagtgaattttgtgctctatccaatgagcctattcaaaatttccaaaaaaattttcctaaccccctaggaatttttttctaaaatttccccaatttcaagccatttttgacattcctggtcaccatgaaagagtgatctgatcaagttgatgtaagagacttttttgatcagtatcaaaagataagcaagcatgaattatttcaggtttttagattaattttaaggtggtttttcatgttctgagtaaagacttttttccgccctttttttgagtaaagagtgatcaaacgactcatgctcagaatgaatgagtggatcaaaataatgtggtgcataaaaagcacataaataggggtaaataaaaacacaaaaaataatcaattaaattttctagtcgaaatcttaattttttctaatttgatcggcttgagtaaagacttttttccaccagtgtatcttcaaactttgaaataaaggcatttcgccaaaataattttttttttcaaatttgggtagttttacaaatttagttcccgttattagtcccggtccatcgaaattcttttttgtgggactagtaaaagcgtacgattaccaagatttgatcttgcccggggaagtattggaaattttgtctctacaattttttttaacactttacccaaaaattgtcattttttaagaatg

SEQ ID NO: 114264 - DNA, 1003 bp, Heterodera glycines
aaatatatttattaatgaacgatttcaacgattgaacgataaaaaaatggtgattttacaatggtttaaatacggcaattttacataggcgggctgacagaaatttaaatgtaaacaatgctgactaataaaaaggcttaaaatcacaaaggttatgaatttggcgtaaaattattttaaacagatgaatcataaaattttaaattttcgtcgctaaggatgaaattagagacacactgcctccctcttccctatccccaaaacgagttaacaattccaattaatttccaacttcacttcacacatcccctcctcctcctcttcctcctcctcttccttctccttcccccgccaccaaatttcgcgcatcccaaccgcagcccatcaaattcgcttcctaaattgtcgttcttctgagtatgtttgtgtctgtcgtgctattagcaacggcggaatgaatatatctcctctctctttctctctcccctctctctctctccccctctctctctttctctttctttccccctctctctctttctctcactttccccctctctctctttctctctctctcccctctctctctctccccctctctctttatttcttgctaattattcgacatgaagcgaaccaacgcatcaaacatcactccgcctcgcgcaaaacgttcgatggcacccccactggacctggacccaaacactgtcgcactcgcagagcaagaacgccaacgcacattggtcttcattggtctcccggaaagcaatgccgttcgcccatcggagcgcgttcaggaagacagggaagccaccaccaaaatcttggaccatcttgaagttgaggccgaaccaaccgccgtctttcgactcggacggttcgacccccagcgaacaacacctcgtccgctcaaggtggtcatgccaacagctacacatcaacacgtggcactcgggggatggaagcacgagcgtgctcgactccttctcaacagaacatg

SEQ ID NO: 114265 - DNA, 757 bp, Heterodera glycines
tctcaagcctttaatagtagattaattttaaaaaagtaaatagctgttgtttgtgctaaattatttataacttaattgggtaattattttcaaaatcctttataatttttttttcaaatattgccgtacataccctcttaaattaatccaattaaatatattatcgttcattaccgtccgttcctccataatattgggttaaaaaataattaatttaataattaaatattgtatgggagcgaaataacagatattacaatatatgatgtcaccaaaaataagaaatgtttattatgctgaaaaggtccttaaaagcgatcacttaagaggaattttttaaataaaatatttaaatgaagaaaacaaaaatgaatgaaacgaaaatggaaataaattatgctggtgatgggggaggaatagatgacgggagcggatttattactatttaaggactcgggaatggctgggaaatgtattccgattttaatagaaagccgtctttccgagtttaactatgttctagattaatccaaaaaattttatcttcgacctgatatcccatctctgaaacatttataaaaataaagtccccatcccccacctctaacaaagaacctttttagttttgtttaaaaatgtcggttcctatgtataaattacttattaaagcaaaactaaattgcaaaattttagccccagctgacattgatcaccaccgaacacaaagtaaaaaatcgtctctgcccctctgaacatg

SEQ ID NO: 114266 - DNA, 73 bp, Heterodera glycines
tttgacgcctccctaccatccgatgagtaatggagaagccgaaaggtttgtacaaaccttcaagcacaagatg

SEQ ID NO: 114267 - DNA, 1003 bp, Heterodera glycines
aaggcatcgctcggccacggcttttgcctttggttggcttttgcgtggacagcaattgcaatttgcagaatatttggcgaattcagcggccgatagcataatgaattaacaattaatttatgtgattttgttgtattatttgcacaaatatgggtattattatttcattttatttttaatctatattattgtattaaaatattaataaaattaattaaaatattgtgaatcattcacttttcaacaaatttttaatgacataattggcatggcaattaactaattatttgttaataaaattaatgaaaaaagaaatgggcagaaaaaagaaagaatttgaaaaaatgagttgggtcgtataattgtcaaaatgaaataatcttcgcctgtcctaaattaagaggcaaaaaccaatcattcaacaatttccatgcccaattaattcaatccgacgatccgttggcaaattgaaattgttttacctctccaacccatgtgatatgcccccaactcacccccttctcattccccccccatcattcacctcaccattttcatcccatccaaataattaattttgttcatagaatcttaccatttattggttacataatgtcggttaagaatgaaaaatgccataaaaacaaaagaaaatgccgtaatttttcataaaagcaaccatttcaaacattgttcgtatcagttgacagttctctgttgtctcagactgcaaaattaaatttcacggtaatttaactactccaaaatcttaaatttattaattgtttgtttaaaaaattcgtcgcgagtgtccgtcttttttttccatatttcgctgtcgcatcaatggcattttttcagacttccttccattttgccttgttttttctttcctctttccttctgtttatttgctttttcttccgttttcattttacagtatcctccctgtcaccgtatctaataccatctccgtccgccgtgccactctccgcttgcaatg

SEQ ID NO: 114268 - DNA, 875 bp, Heterodera glycines
gaaaattggcacatgccacggcactgcgacgcacgcgacaccattagcattgagaaaagaacggacgaattgcaatttattattatttattagttaattaatgataaagacggaagaggataatttgccaaaagatgtcatcattaaaaaagagcgaaatttgttttaatttttaattaaacaattttggcgcgtcttcgtttggctgtgcgttggcaaatgaaatgccgtgcctttcgctttacttccgcgcgcccctcccatggcttttcctgccaaaatccacgtaaaccaacaaaaaattgttggcttaatgatgcatataatgaatgaaagcaataaataacattcattcatttgccaattcgaataacaaacattccttaatttattattattattattttattatttataattaatatttttatttcccacagttcgttccttttccatgcgtttttcttcattttcctccccttttctccccctctttttcctttctttgccaattgcgtttgttttgtccggccgaactttgccgttcaccggttcgcaattggccaatgaagtggccagggcattttttaattccgtcaacacttgggacatgtcaattttcggagccgggactaagcagggcgaggaccgttacaagatcagcttggacggcctggacagaatgaagaacagattcagagtgccgttgccggcggggcaggggttggaaaagctgctcagatcgtacagagtggagcctctcagagaggattaccttggggtgaacaaaggtatgccaacctgacaaagtttaaaattacgggacggataattggaaacaattaaaacggaaacctaattatgttactaatatg

SEQ ID NO: 114269 - DNA, 262 bp, Heterodera glycines
tttttgacacaaggaagaaggttttgaattttaattgaaatcaacagtgccattactcgttgctttgcccaaagactggggagcgacgaattattttcttgttgtgtgagcccaaagactgggaacaacactcgccaattttgagtgaaacccagcagaaccaagacggttgagaaaagtggtttttgaattcgccagaaccaagacggttaaaccaaagatttttgtgtgaaaaattcgagaaccaagacggttaaaaatg

SEQ ID NO: 114270 - DNA, 352 bp, Heterodera glycines
ttttcagtcacccttctcgtggagagtggcgccaacgccaatctcgggacagcgaaggagcaacaccgataatgaccgcttctcgtgccggatgggtgataaaaaaccaaaacttgaaaaaatgagtttttagtttagtcagtagtgattaaagaccggaaatttcaaatttgcggatcccgctgcgggttcggaatccaaaatttttttcgggacgggatcccgcgggattaatcccgcatttaaaatttgcgggatcccgtgcgggattttggaaattttgaaaaaattcaattaaagcaaactagcgagaaaacgtgttcgatctgacgcatttggtctttactaaatg

SEQ ID NO: 114271 - DNA, 219 bp, Heterodera glycines
  unsure (1)..(219): unsure at all n locations
gtcaaagagagagtgttnttcttccccaatttttgttcaatgttttgctattatgacaaaacncaaagaaaaaagtgtgtttttggtgtactttgtttcgtaactatggttcggatgaattactttctttcctccgtttttctccaagccctcacaaaatacatttactcaaacattcattcgctgtgtcaagatttgttcgtttttagcccgaaaatg

SEQ ID NO: 114272 - DNA, 514 bp, Heterodera glycines
tacaattgagaatctactgagccaattgaagtcatttatgtaagcaatctcgacgaggcatatgcaaatgtttttgaacaaaacgaggcttgaaatgttgcgaattttatggaaaaatatttattgtattattcatttgaatttacccaataaacattttgtcagacacatatgtaacattttaatgtagtggtgcaattcatacttattgattttgctattgttttgttttgtcatttctttcacgagaaaaaaaacaagaacgagagagaagagaaagaaagagagttgttcattctcattgacttgaagttttttcacgtgaagtaaaaaagaggagggttggccgaccgatagattctcctttatcacaaaaatgttcaactttacttaacaataaaccccaactttttgttaattgctacagatgaacttttttaaaaattcatttttgaccatagctttgcatattcccttttcaggtagtgtaataattcttattgtaataaaaatg

SEQ ID NO: 114273 - DNA, 666 bp, Heterodera glycines
ttttaagccgtgggagatcacaatccttgagtaggcctcccaagcagtgtcagtctgtttagttgttattcttcttcttttttcatatctttgatgaacctatcaatgttaagataataattaatttttataattatttcattaatataatttaaattaaagataatttactttttatatcattaaatattcatttgttattcatataaaaattaatctctcagtttactctccattagtccccatccgttaatgtatgcttctccacttttgaacttttctgtgtattagagggttaagcttatatatatatatatatgcttggggataaagatatgggcggatttttatagttttcccatgtctcagttgtttcgagtatatccacggttttgaaaaaacaataaaaattagagggttaagctatatataatattttactatagtcaaagaaaatttttaaactttttaattcgttacattttgatttgtttcatgtttttatggtaatgccacgccaattgatcacataacattggcattatgtattattttgatcaatgctcactgtgtttttgtaactgatcagaaactgtgccattcgcttaagcagaaagtgatcaaatacaacacatacacgaattgttgaccattttttgtggaatg

SEQ ID NO: 114274 - DNA, 120 bp, Heterodera glycines
agaatttatgccttttgttttaatttaattccccccacccccttaaggcagcaggagatcaaaatacagagactggaaagggcgaatacgcaaaaatcggacagccttaaacgcaaaatg

SEQ ID NO: 114275 - DNA, 522 bp, Heterodera glycines
ttttcaaaataaggcaaaagaagttaacaggtcttaaatggtaaattaaacaatggttttcctaaaattgatacattaattgcttttgacatgagacttatttctgaagcacggaattttgaaaaagtcgggattcgggaatggcggggtagaattacagagattcaaattcctaagagtagcaaatatttaatctctatacctaatattatttcgcaaagcatgaaagtgccgataagcgccactgaatttactgcctgacgagggatgtcactcaccgacaattttaaatttctctatttttcgaagaggataaaaaattttttagtaaataacgccaaaacatttaaattttaaaaatttatgaaacaaagtttttgtgcctacaaatcaatggaggcactgtccctttccctttggtttatcgctatctatagagagcctatatgtatacatacatataactaatgaatttttagatatttccttaattccatcagaaattttttgcggataaaaatg

SEQ ID NO: 114276 - DNA, 87 bp, Heterodera glycines
aaatcaaacaggtaaaaaatacaaaatataaattataaaagacaaaattaattaattaaaatatttttgcaaaaatatttgaaaatg

SEQ ID NO: 114277 - DNA, 255 bp, Heterodera glycines
atttttgaaattgtttgtgttattttgatatgttgtattgctataccattttctagtttaagaaattgtaaaatattccaaaatcaaataattaaatatcaagtgcaataacccaaatatacgggccattttctaaattttttacctattttttgtgtggatagcattttacgcggtaaacacaaggctcggatctgtccttatttataagatttgtccttatttggagggtccaaatcttagaaaataaaaatg

SEQ ID NO: 114278 - DNA, 132 bp, Heterodera glycines
gcggacgacgcgtcgctgccgacgccgttggaggagaacagcaacgggagcagcagcagccccggcggcctttttcagtgcccaacggccgaacaccacgcgaacgtggaacagaagcagcaacagacgatg

SEQ ID NO: 114279 - DNA, 843 bp, Heterodera glycines
taagtatgattctaaataaaatttttttgacttattgctattaaacgaccatgaaataatatgacatttttagaaaaaatggcgattgcctaataattggtggagtcgttgattggacgtataaacaagaagagagagagatagagccgaaaatcactgctcaacatttggtgcaaaaaaaataatttagctcccagtttaaagtcacaatcagaacgccaaattatgctctttcactttggcgtactatctcttcattttttatagaaaaaacagcatttagtgtttctttccctctcatgttggcgtactattttcacacctcacacacgaaaaaaaaatcaaattcgcaaattctaataattttggttatatgggtataaaatcactttgaacatttagaatcaataaaaaaagcaaaaattttcgcattttggttgaaacagcggcctaggatttgagttatacgtaatgaaaatttgaaactcctacaacttttttctgagatgtcaaattgcttagcattcgcttagaaaaatattctccttttcaaaaacctttttaaatattcggtttgattgggaatgaagcgagttatggcagatcaaaataaaaaaatacaaaaatggcattttctagtgcaaatttcgaaatagcgcgaaaaaattatgccaattacactttttggcgttatgactatttaaattttgaaaaccatccaactttaattaagtgctctgctgaagttcgacaaatttttgctctcattcattttttttattttgtaattaattctattctaacttaagctttgtcaaatatcatataaattcatctcatatg

SEQ ID NO: 114280 - DNA, 164 bp, Heterodera glycines
taaatgcggtagaaaaaggcgagaagaaagagcagattttccggatcttcgctagccaagaaaaatatttggtaatttaattaattaatattttaatcattttatttattttaattttttaaataatttcaaattccttcagaacccggaagggaagcaaaatg

SEQ ID NO: 114281 - DNA, 1003 bp, Heterodera glycines
aaattgtacattttaaatttaaaaggcaaaaaaatgcaaaaaaaaagtaagcttacattaaagtgaatgcgtaaaagccgaatctacgtggcgtgatttcgagagatgcaaaacttttgaccaggcaacaaagctcgaggaacaatcgcaaattcattaatggaagcccggagattacatttcgagtcccggagggtgcagagccaaatgttaaattatgaaaataggctccaaacaattgtcttgggagcatatgggtatataagaacaaaaaaataatgatatagcaaaatggaaaaatgtaccataattgagacatattgtcataaaaacttaaaatttggctttaaaaaactattatgcatgattatggaaaccaagcattagctatgcaaaaattagaaattggacaaagaaataaatatatttaaatgtcaagaagcagagaatttatcggacctttctttttcaaagataaatgaattccgagaacaagtgcaaaattatagatttgacacgaaaatattgtataataaaattaggataactgctttaagacatttatttaaacccgaaaaagaaaatttttttagcccatatcgtacggaaagaaaaagagaaattttttattcagtatttcggcagatctaataaaatcgcaacttttttgcaaaaaaaacgaaacattttcgttactaatagaatcgcatgatttttagtgtaatatttgagccttacttgtgcaaaagaccaaaaagtttttgcaagtttgaaggccattcactaatttcgtttgttgaatctgaactaaattagggttacgtcatgcattacaacccaaaatttgagtatttaagaagataaaaatacacataactcatctgccgttttacaacttttgaacgggtatgggttccagggggggggggggggacttggattaatatcccccgctaacttatatttaatattattttagatgtaagcccaacaaaacgacatg

SEQ ID NO: 114282 - DNA, 581 bp, Heterodera glycines
gtaataattacgtttgcgatttttaggcaaatgcctaagatttttgcgcacttaatacgtgtaaataagcatgaaaaacgcattttccgcttggtttggggtgtctacgatgattttataatgcctaactttgcctatttcggggttttcgtgcctaaggtgcctattttaagatttttgaaaaaatctttaacaaaaatgcaataaaaacggaaaatacacccctaagaaatggcccgaaacatttttcggaaaatacacccctaagaattgaaaatttttcacaaaaattgatccacaaaatttaatatttttctcttaaaaaaatatttggtttttaaatttgtctttattcgaaaaaagttttaaataatttcatttacttttgaaaattttaaaattttatatgttttgctacctaaaaagcgttaataaaaaaaaattttgcctatttttatgcctatttggtgcctatttcgtgatttttttttctgcctttttagttgcctatttcgcgattttgtgtgcctaaaaatcgcatccctagtaatttgtcaatttgattccattccaagagcatg

SEQ ID NO: 114283 - DNA, 553 bp, Heterodera glycines
aacccaccaaaataggtaggctttaggctctaaaagcagcctcaaatttgggggtgtaaaatgataaaatttattcaaaaaagtaaaaaaattctaccaaaatcagtattgagataaataatttttaaaaccaaaacccatgtcaagaaaataaaaaaattgtggagatgaatttttgagaaatttttcatgtgttaggggtgctttagaaaatttttcggtgcttaaggggtgtatttttgaaaaaatttttaggtcgattcttaggagtgtattttgagtttataattcttggttcctccagagctttgaatatccacgtaatttgtttcataataataagagcgacattttataattgctacgacaggaaatataaaattgaacatcgattttatataaaaattaaatataatatgtgtaataaaaatttttatttctcatccgaaagacatagaataatcctatatcttaatattctatattgcatattaaaaatatttatttaaaacttttttttttgctttaatttgactgataaaattcgacgatg

SEQ ID NO: 114284 - DNA, 125 bp, Heterodera glycines
aaaaaaagattctcaaataatgagtttttcaggatgagatttaccccggtaaataccgggttgttgcatttgaaaagtcagctgatccacggaaatcaatccgtgttttgtggaagggccctatg

SEQ ID NO: 114285 - DNA, 168 bp, Heterodera glycines
tttatttttaaaaaatttcaacccttttttttaaattttctaaaaaatttaagaaaattcttcattcaaacattgaaatttttaaatttgattttttaaaaaccattttggcatttttagaaaaaatttgaaattttattggataaaaaatatatacaggatgttatg

SEQ ID NO: 114286 - DNA, 263 bp, Heterodera glycines
ctttattgcccaaaaagcgattctattagactgaaatgaatagaaaataggggattcatggccattctatgcatttgaatcgtttttgggcatcaaggtgaattagggtgaaaaatgaattttcgacttttgttcgaattagggttcgggttcgatatggatgtgatattcgtgttcatcaccccctaaacccccaagagcacctcaaaatcgctcaaaatctcttttttacctctttttttatgggaccagtaaaaccgatg

SEQ ID NO: 114287 - DNA, 1003 bp, Heterodera glycines
ttttgcggtagaaacccaactcgtttttgacccaactcgttttttgggtcgaaacccgaaaatcgaggccaaatcgcctaaattacctaatttaattcgggaatacttttatgtcattttaagtgatttttaagtttaaagccaaaatttagttgaaatccgaattttctaacttttcgaacttacttttcaaatgcctgtccaatttcgaagcccggattcaaattcgactaaaaagaaagaaaattcaaaaaagtgcaaaaattcatttccacctcaatttaattataacgtaaaactaagaaatgatcaaattttaacaactccagtggaagcaattttcaaacacggtaagaccgcactaacttgaaaaatttttcgagggaaacgaatatccgggtttttgcggtatgctggaaatcggacattggctgccaacggaacgacagattatcatttaaaaaaaaatttaattatacccaacaatatacaattccgacatccatttcgaacctctgacccgaatttgtaattcgaaaattcaatttttaacaaaatctaagtgtacaacgaaactggctcaactgcaggaaatttatgtcttgcctttattttgagtgtttctggcttgtttattgtattaattacaatctgaaaagaaattttagctcgaataattttatttctcaaattttcccatggtctaatccaaaattcgcataaaattatacccattagatggtcaatcattcccaaaatttcacactcggccaatcttttccacaataaccattttcaaattttattaatgcattttgttgtaaattcgaaattcgttcaaaattgaattttcaaattttgattcgatcacgggtcggcattcgaagtgggttaaatattctgaaagctcaagataaaagagacacgggtggatacaagacgctaattaaatttcaactggtgaatcattaaggaattaaatcatttacattcttttaaaatg

SEQ ID NO: 114288 - DNA, 1003 bp, Heterodera glycines
ttaaatgattattaaacatttaataattttttttgaataaggaaaatttttaaaccgaaaatttattatcaagaaaaaaaaatgaattttggcgatcaatttttgagaaaatttttcaattcttcggggtatattttcagaaattttttcaattcttagggatgtattttctgaaaatttttcaagtcatttcttaggggtgtattttcccgattttattccatttttaatggaattttccggaaaaaaaggccaaaaaaggcaccaaaatctgaaaaaagcgccaaaaaaggcaccaaaacagcaaaatgccaaaaaaggcatttaaggcacgaaaatccgaaaaaggcaaaaaaaggcaaaataaaagtcaacgtagaaagctcaaatcaagtggaaaatgtgttatttatgcttaatatatcgaaactagtgcgcagaaaaaaggcatatgcctcaaaatgcggtctctaatcatgttcttctccaaagtcttcatcgcggtcattgttgttgtcgttatgctcacattgttcagaagttgtcgcgttttcgccgtcgttgttgttcagaaacttgcgtttacgacatttttgaagaatttcaattttttcgattaattttgtttataaggcaattatgatatatttatatatatgtataatatacatgtaaatagatgtaccaaaataaataaatttatattttttaatttgtcgggattatgactcattttggcttagtcgggatttcgacgcgtcgggattttgacagcgcgcccccacattgattattctaatttgtacttacttttggttaattttataactttttttttgcagtttttcgtgacttgaattcccatctcctttcatcaattccactttttcatgactataaaaatggttgtttttttgatttgcctctcatatctaataaaaaaatatttctaaacacaaattattctgtcctttgtgaaattgtgctaattgcctcaaaaatg

SEQ ID NO: 114289 - DNA, 91 bp, Heterodera glycines
  unsure (1)..(91): unsure at all n locations
aaatagcttctgagataataaggtttatcataaaattcaaattaaaaataaccctcaannttattggtatgaacgatactttccaaacatg

SEQ ID NO: 114290 - DNA, 801 bp, Heterodera glycines
tattttttttcttaaccaaaaatttttcggccaagaattgtgatgtttaaaagtaaaattttgtagattttccccaattgtttggcgcttttccccccgcttcttccccctctctgctgctctgttggactgtttgtttattctctcatcatccgccgaccgaccggctaaatttaaactcagtcggacccctaaaaataaatatttgatgcatatttgtgaatgaatatgaatgaatgttagtgatgatgatgatgaggagtgtttaatttattattatttcccattttcgagtacacaaattttttttcccttttttatgcgcaattttattttatttttttaaatattttaaattgttgttgttgaagaatgaagaacgcttttttccgtgggagaagcgggggggggggggaattttattattaggtatttatgattatatttttaattttgttgttgaagaataaggaatggggaacgctgttttgcgagggggggggctaagatttttatgccaaattttattttaacaacaattggagagctatttttttacgatatttaaaacaaatattttatttaaaattaatattttcatttttgttgttgaagagacgcattttttccggctgggggggggcgggtgagatttttgcgtattttagcaattttattttgaaaacaaatatttaaattaatatttctaattttttgttgttggccgtggtgctgcgattttcatgcgcaattttatttttcaaaacaattattttatacatatatgtatttatttttatg

SEQ ID NO: 114291 - DNA, 527 bp, Heterodera glycines
tgtttgggatagggacgatcccccggtggaggggaggataatccgcccgaattgggacgacggagaaaccaatacttaacccagtttattgcgcccggatgaagctttttggacggaatcgcttttctgatcaaaattgcaattaaaaagcaacatttcttattttaaaagcacatttgttcgggccttcttctaccgatcgtttttccaatttaaattttgtctctttcccccggggcattgagcaagtcccgcctctatctgatcagtcactcgcccccgctcaagtgatcagcagccattcatttgcccaaatgcccgcggcattgcgtcgcatcgcctccttttgtgcaaatttttagcgcttttccctttcccaaaaaccaaaaaatgatttatgccattcctatttcggctttttgtggtgccacaatgttttttaatttatatccccaataagccgacaaatgacatttctgatcacatttagattttcttttttatattcaaaaagtattccaaaaatg

SEQ ID NO: 114292 - DNA, 400 bp, Heterodera glycines
ttgagtaccccaaacggacacttgaaaaaatcgatttttttgttttcggggcagtccccccgaaccgatgcgcccagatttatggggagaccgaatccttccggaatagcttccctatagcctgtactttaattctgcgttggatttttgctccccataattgtttgagtaccccaaacggacacttgaaaaaatcgatttttttgttttcggggcagtccccccgaaccgatgcgcccagatttatggggagaccgaatccttcgggaatagcttccctatagcctgtactttaattctgcgttggatttttgctccccataaatgtttgagtaccccaaacggacacttgaaaaaatcgatttttttgtttcataaatatttttttcagaaagtcatg

SEQ ID NO: 114293 - DNA, 1003 bp, Heterodera glycines
attttgaaattttatggcagaatgtcactattttatcaagaaaatataaggtttgcgcaaaatttggttattttttgacaaaaaactgttagcaaatcgcattaaaaattacaaaatttttcccggtggcgcctatcggcaccgccggaccatctccccacttgttccccaaaagtttttgaaaaaacgcaccgcaaaaaaaagtatttttaaagacaaaaaatcgccgcttggcttttaataaaaaaattggccttttttggtgaaaatctgttaacaaatcagaattaaattacaaaaaatttttcaggcggcgccggaccctctcccctcgcacttcccaaaagttttttggaaaaatacgccgcaaaaaattgttaaaaatctgatttttttatcccgaatgcactaaaattttatgatttgctaatttcctccccaaaattgttaaaatcattaatgggagaccaaaaatatactatttgatacatttttgatcgaataaattttaaaaataactgatttgaagcaatttttgcgaaatgttcttatttttgaccctaaaatcttattttttggccttgatgttcttattttgaaaaattttcgatccgagccctgcatttatgtgacagttacgtaataaattttacatttcacaataaattttttggccattaaagaaattgcagggcggtgactcattctcatcatttccctcccttcccatcgtttttattaatgtgaaaatacattttctaagtctcgagaaatcaatacaaattcttggaattactcaaaatgaaaaaatatctcccttcctacaaaattttaataagcgaatttcaaattagcgcatgttttgattttgacacagaaagtggcatttgttttcaaagtttcataatttaaaaattaaaattgcaattttatataagaaagattttgttggtttgcctcgcagaatcgatttccaaatttggaaaaagtaaatttaaaaatg

SEQ ID NO: 114294 - DNA, 242 bp, Heterodera glycines
ggtatggtcatggcaaaaatttttcgtatttattttttattaaaaaattttaattattttaaaatttattgcaccgtattcagcagttggacgacggctctggatgtttcgcaattggtggaagaaagggcgcagcaaattcgacaggcaattaaatgaaatgaaattaaatttcaaaaaaaaaattaaattaaaaaattcttgcacagatttgctcccaagttgatgacggcacactgatg

SEQ ID NO: 114295 - DNA, 1003 bp, Heterodera glycines
taactccgaaagtactgtttaagccatgcttttatgccttccctcccaacagttcggacttatgcagtttttttctcatgttttcgccagttcttttgttgggtttcacacacacgcacacactctcttttttctctctcttcttcctcctctctctctctccctctctccgcacacactctcttttttctctctcttcttcctcctctctctctctccctctctccgcacacactctcttttttctctctcttcttcttcctctctctctctccctctctccgcacacactctcttttttctctctcttcttcctcctctccctctctcttcctctctctctgcctctttcttcttcctcctctctttctctctctccttcctcctcccccctctctctttctctctctgacttttgtcttttttctgaattttggaatttgtctgtcttctttgcccccccccccaccttttcatttgttcccccttttccaattaattccttttcatcccggccgattcatctcaactttttcattcttttcccacttttgcccatctgctgttgttggccctccctctgcttttaccgtaccattcgttctccactcattcatttacacataaacaccctctctcttttctgcttttaattcatccaatcttcttgaatttattccgtcacaaccccaaaacagttcgattcttttcgctaatcttgcaaatccattgggtcaattcattcaaaataagtaaatctttaaacatttaagtatcaaatcaacttaaataaatatatggttttttataatttttctaatcgtttcagaagtgccgacgtcggcactaaacttttcctctcctctcaaatctatacggaaatttgtctctgatcagcagcaaagtttgaaacatttgcaacttataatcacatttatagaattaaaaataatcaaataaatatttttaataatttaacaatttttaaatttcagttggaatg

SEQ ID NO: 114296 - DNA, 56 bp, Heterodera glycines
ttctgcccgcttttccgcccgatgaaagtgccaatgcgtcggctggccaagcgatg

SEQ ID NO: 114297 - DNA, 731 bp, Heterodera glycines
  unsure (1)..(731): unsure at all n locations
ataaagggaaataaccaactgatgagggggatggcgtccaacaaatgcaaaaaggataccggtgctggtcagatcgaatatncatggtgtattagtagcagcccattcacaaataataaaattaaaaatgactaaatagtgccatcagtagggctcgaaattatatggactaaaaagctcagaaatggccaaatattaaccaaaatatggactaaaaactgacaaaaattaatttactaaaattccaaaaatattcaatatttgcttaaacaaacttaaagaatacacaatattaccaaaaaatggatttaaatcttaaaaacgccaaattttttaaacaaattctaacttcataattccaaacggctccctgatatgccaaatattttataaattttttgaaccaaaaagcattaaatttgtgccaaatggtatgaaattaatcccgtaaccccagactcccgcctcatattacctaatttgcaagggaccaataatttaatttcaaaaatcggaaaaaaactaaaaactttacttccaaagagtagtaactcattcgaaaactctttttgaactctgcaaatctgtgtgttttttacttatttttgtttttcgtcggagcctcaattctgtttattaccgtgaaaccaactcgcaatcaagcctttacttccttaccaataacctttcatatttagatattttcagcagcttttttgtattccgtaatg

SEQ ID NO: 114298 - DNA, 1003 bp, Heterodera glycines
ataattttctaaataaaaaaattccacgtcttatgagcaaatattttgttagatttaaatgcgctttatgtattggtaattaaaaacggattgtttaatttgtttgtttacacaaaatcctcgagaaattttaaattcggtaaaaattttcggattggaataaaataaaataataaagcatttttatatgtttataaggttttgtataacgattgtttacccaaccgcctcaattttgcacgtttttccattttaaaactaatctacggagcattacaacaagagataaaaatattggtcttgttttggattacattgattcatcgtccatcggtggttattttgttattaaaattatggaattaatattaaactgtcttttaaccttttaatcccattaaacactacccaataattatcttatataatcctttttagtgaaaagtggtctttgttaattctcattaaaatttgtttattttcattaagcttttctccggaaaattgccaaactattgatccgggagttgcagccatctgcaattttttttggcacattttattctttatcctccgactttataaagataggataaatctattaatattcccttatctgttgtgcacattttgaatatatattttgatcatttttggttgcatttgaaaaaagttacgacaaaaaaaaggtgagacacggcttattgcttcacactttatgttattataacatttgttactagaaatgcacactaaaataaaattatcaattcttgacaaatgaaaagaaggaagtcgaccgttttgtgatgcattttttgcgtcatattttttggcccaaaaattaattttactaaaataaattaataattttcaattgaaattatgattattaagcaaatttgccggcaaactaattataactaatggactagtttgaaaatggctgctactgatttcaactactattatttgtattatttgtagggctgcaaaaaatatg

SEQ ID NO: 114299 - DNA, 438 bp, Heterodera glycines
tatttgaataatgaaatttttgctatcatagtaaatgaaaatatataggatttatgtgacagattttggcacggaataacaatttggcatcaatttcggttaaaattttaaaaaaattgaaaatttgagactcattgtaagcggtgccgagagaagccgctggaaaaaaattttaaaaattcgcgaatgtaaatttatttaaattcaaataaaaaatattgtgaaaataaataagtaaacaaaaaaaaaaatttaaaaatggagatcacaaaaagaaaaagtttcaatttttcgaatttaaataatcaaattaacaaattttggtgatggaacaacataatcattaaaattaacaaattgatgggaatgaatgaattttggggacccaatcaaaaaaaataaaaaataaaaatgtaagaaataattggcgacgaaatg

SEQ ID NO: 114300 - DNA, 168 bp, Heterodera glycines
taataaagatttcaaagaaatataaaagaataaattcaaatttattaaaatctaaattttttacgaatattttctcagataatcacaaaatttttactaatattttttgccccttttttatcatttttaactaaactttaattacatgcagtgacgtcaacaattatg

SEQ ID NO: 114301 - DNA, 241 bp, Heterodera glycines
gtggggttcatttaggcgctcgcgtttgtacgctggggtcgtatgggcacaataaatgtcttttttcatgacatttccaaaatttttgatattcatagtgattttggagtgtctgatcagtgatcaccgtaaaaaatttttaatggacgtcaaaatttctcgtttcccaaacatgagtgcctaaatgtaattccccaaatgctattttcaaggactggacagcataaatccacttgaaatg

SEQ ID NO: 114302 - DNA, 229 bp, Heterodera glycines
  unsure (1)..(229): unsure at all n locations
cgatagagaagtgatcagaaatgccaaatgaaatttggaaatcaaaataaaatcaattaaatcgaaatgatgcagaaaatgaatttgcacacgacctcggancatgataaaatagttaaggaatgcgcatcggctgaggtttttgttttaaaaattattaaaaaaatataaagtaaaatntaagaaatggaaaaattggggagattttgtgacgcaatcacacaaaatg

SEQ ID NO: 114303 - DNA, 56 bp, Heterodera glycines
ataagggttttttcaccagtcgaattagactaatttcattaacaaattaaaaaatg

SEQ ID NO: 114304 - DNA, 151 bp, Heterodera glycines
  unsure (1)..(151): unsure at all n locations
agagagtgctgaagactcggacaaggagtgggcagaaagaacattgggtgaattttatggatataaaganccggagtgattaaagacagtgatatgnagatataccacgtatttaagtatattatattttatattttattaaaataaaatg

SEQ ID NO: 114305 - DNA, 763 bp, Heterodera glycines
agtcttccggagcaggacaaaacattcgccgccgcccccacgtccaaaatttacgaactaacaaaacacggtatttctccgcttctcacctttaaaggtatcgattggccagtagaatgtgagatagtttccggcgcacagacacgggggggggaggggagcagctcaatttttgttcacctatggtgctctgtctcattgaaataatgtgcccggtcctcaaggtaattttaatatattttccactgcgatgttttgtcccagcgacattttaggctgtgtcggggcactttgccattctctttgtcaatttttccccttttcgcagtttgtccgcgattgatgatatggagtttcgcaaggtgcacgtcagagggtattaccttttcgaccgccaatttgtcattcggtggcgctgtcggttggaccccgcaaataccggcacttcgaattcggaaaaatatggggcgtatgtgatcactccgatgagactggagggcacaaagtacttttctgttcggtttcaccttagtttcctaaattcactttttgcaacagaaatataagaaatgaccataaattgttttttttcttattgtaattttgggaacctttcggcgtctgaccatcttttggtgcattaaagaaatttcggaaattggggtttacacgtttttgttttgaattcgagtcgaagctcaaaactacctaaagccaaattgtccccactctaatcgctaaatttgttagcgttacaattatg

SEQ ID NO: 114306 - DNA, 1003 bp, Heterodera glycines
acatcctttatttattttagttttcccaaatttcggttgttattcctagagttgtacgggaccgggactggtaccgaaaaaaaggttggggtcaattccataccggccgtttccatgccataggccattttcgtaccaaaagtataaatattaatagacagtgaaattaaaacatccaataaaatttttcactactttttagacttagctccccaaaagctttcggatgataccaaatttatcaggattcgatcgttttaaaaaaaaagttagaagtgtcaaatctttgaatttttcgaattttgaaccgagccaaaaataggtttaaaccaaattccgcaacttccgggaaacccaaaaccgggctcaaaatcccggagctttagggacttcgggttcttacagtacctgctggggttaaatttgaatagttaaatccgggtcttacttcctaattttcgtgccaattgtaaattcgggaaaaaaaaattctcgatccaatttaagaatccggggaccggataaaactggtaaaatagacaaaacaatattttaaaaattttttacttcggcttgtaaaaaagtatgaatggtcattgttttgaagctttgcacggttctttttttgttagaagtatttccattttcttctctacaacagtaaacataaaatatattgtcttataatgcatgagaaacatcaaaatgttgaaaatccccttctatttttgaaattttgccgaaaaaatttttggtacgaaaatggcctatggcatggaaacggccgcatagaaacggcggcatggaaatgggtcgatcccctatgccaatattcatgttacaaaatgtgtcacttaaacatcaattaagcttcaggaattcctctttcttttcatttgcactgtccgacggattggaaaatgatcaccgatatgcaattgggtattcattcatcctttggcatttgcttgttcctttcattttttgctgcttaggtatcatg

SEQ ID NO: 114307 - DNA, 1003 bp, Heterodera glycines
tttttggccaagccaaaaggcaccgcagagagaagaatcccctctccttgccttctggttaatcctacttatgctcaatcacctttttaataattgcattattatttaataataatatataaattatataagtaaaacatagatttggttaatcctacttatggtcaatcaccattttaataattacattattatttaataataatatataaattatataagtaaaaaattgaattgaattatcctgctgtgatcattaacaattttcaaatccatttttactccgtttaaaaggcagtgttatttccattttttcattttaataattaaattttctcaattttacaataccctttgaaaaaaatcaaattgaattaattaatgcattttattataatccaatagaattagtaatgttcaaaaatttaatatcttttttatacagattaattttattttttgggtttactaaaaagcaggatttaaaaggtctttcagtttcatatttaaaatttatttattttttcatttcaaaatatcaaattaaattgttttatatttaaacaaacaattttcagaaaatagaaatattccaaaaatgcgaaataaaattataataatgaatttcaatctttttaaaatcaaaaaaaaattatggacaattgtaaaaatttcttaatggttcataaggcatagcgattctaccaatttttataattaattttttaaaatttaatatgcaaactttgctaattgctttttataaataattacttcattatttaatgtaaacaaaaatggtattaaataagggacaaattgttttattaatttatatttgaataaagaaagacataatgctatttaattacttagttcctttttttattatcattcctcatcaatttttatttccatttacaaatgcaattccattcgtgagttaaataaatttggcaattaatttgtctaatcttttttttatcagagagaagaaaaaatg

SEQ ID NO: 114308 - DNA, 465 bp, Heterodera glycines
aaaaaggaaaaaatttaaaatttttcaatttaattttcccaataaattgtagacaaaattttcttaaaaggggttaaggtacaataattaacaactttttaaatattcataacaaagtggctttgaactttttgtcgtcgagcatttgagttggggttagtgcccagcacatccacgggtggcaagctgtgctccatttcaaagcatttgcttcaaatagggaaataatttttatagaacaattatatcttgacaaaaaataattatcgttataatctttggttaatcccccgaactattacttaaatcactccactaccatacattagggattgcgaagcgcttgcggactgttcaagaaatcagacttcccgaaaagcattcactgcgaaggcttccagttttcctcgcggtgttcagtagtttaatactccaattcaccgcttcacctagtgattaccaatg

SEQ ID NO: 114309 - DNA, 1003 bp, Heterodera glycines
agaagggcgaagcgctttatcccattcccagatccgacggtttacgcaccagttattttaatatatttgtttttaatgatatcggtagttaatcaagttgtaattgtggactcttattaattttattaatagccttataaaatattatagcttttgtagcgtattttgctccctataaatataaaagagaacaccatattttttattcttttttttgaagattttgaacctcgattatgtcccaaattgaaagagtttcaattataatacataatctaatttaattatcaaaaaattcaaattagaaaatatttagggaaataaaaatatttcttatttatttaatatttatgacaaaataaatgatgacaaaaataatttatgcaaaagaagtataaatataatagttgaaattagaaatttaaaaaatcaactagaaatgtattttgaaataatctgtcaagctgcctaattttactagttaattagcaagtttttcaaataaaattttgattaattatgagttagtttttatttttctctcatatgctttattattgcgtactagcaaaaaatgttcttctttattgcttcatcgtaaatgttattataacagatagttagtttttagtttaaatccttttaattctctttgatcccattttatgttttaaattaatgaatatatttttaattaaaatttcaaattacattgtttaataattttataatatacgaatcgccatttgcgccacgacattcattaagcatatagaaaaaagctcccaactttgggtaattaaatccaaacagttttgtatgtttgaaaaattttcctttctcgtcggcaatccctttcaacttttatataatcattttttgggcagagttaagcactgatgatgttgacggtgagtagtgggggccgacaccagcaaaccgcaaaaaaactgccaacaagttcaagcagtacaacaaaaagccgacgacgacggcgagcatg

SEQ ID NO: 114310 - DNA, 858 bp, Heterodera glycines
  unsure (1)..(858): unsure at all n locations
ttttcccttttttttttgtgtattttttgggggttaattttttttttggggggggtttaaaatttgtttctttattttccaattactcattttttgttttgggtttttttcggggatttgttttacgtggatttgttttttaaattcttcatgactttttgtcgtatttttcttattttctttatgttttttgatagtattaattnaattattttcctttttctgggttttttcgtatttcatatttcatttttctaataggtattctattttttcacaggtcaaataccccggccatcccaaatttgtgttcgttactgccgccaacgatgcttatttcaaaacccttcgcgtattaattgcaaccataaaacagagatttggctgtaaagaaaaaataattgcgtacgatttgggaaatatcacacagaacaaatccatggtacggttatattacctaatccgattttcgtggataatagcttcgacggattccagctcctatgaaaattcctcaaaattttattaaatcattaaaataagcatagaaatttatgaaaaatttgtggcctgtcgtcaacacctaataaagattctagggcaaaatagtgatttaacccatttgggatttattcctaaaaatcagggtttgaattccgctaaacatatcctgtggcctttggcatcatttgaacgctcacaacttaaattagctattttaggaaaaaaaaataaaatagaagaaaataattttgctcaattataaaaatgacttttttgcatttaaattaaaattaatacctaaagacggatgagcttaattcggtgtgcaaattgacttggcgaacttttcaaatg

SEQ ID NO: 114311 - DNA, 98 bp, Heterodera glycines
ggtaaaattttttttattaaataagggcaaccatatggttttcacttctttttttagattccctttcgctgtccgttcagtcgaagctgtacaaaatg

SEQ ID NO: 114312 - DNA, 277 bp, Heterodera glycines
tctcaaaaatgaggaaaaatggcttgaattgagtcattttttggataatcggtatttacaaggcacccctcagcgaatacttgctatagagcaatcattcaaaggccattttgtagagaattttgtgctctttctgttcgtcatattcatcttctatggaaaatttttcccaaccccctagaattttttttcgaatttactcagattttcgtattttttcacccgcaaaaattttgtgtttaatgccttttttatggcataaaattaataaaaaatg

SEQ ID NO: 114313 - DNA, 143 bp, Heterodera glycines
tggtaaaacagtgaaattaatacttaaaaatcaaatttatatttaatttaaattttttcaacgacttttccaaatttaacgcacttgaagaatttcgactgttgaaggcaagaattgagcaattggagcaactgcagagaatg

SEQ ID NO: 114314 - DNA, 505 bp, Heterodera glycines
atctttgtagcttttgtgccaccatttatttcatagaaattaatgacttcgcgtgttgaacacctttttttgttgtaaaatgttgtcgcgtgccgcccatttaaatgggacgcggaatggcaattaaaaagcacaaattaaaaaaaaattggccattaatttttctttcttttaaaattcgcattcacggactttttttctcacagccattgaaaggtttatgatgagaaagaactttatgttcttaaaccaacaaattaagaaaaaaaattaatttattttcataaatgtactcttcattaaagtagaaacaatatttgtttctaatttacttattttttttattaatttaatgtcttttcattggcacttcgagtttaaaaaagaatgcgtcttgcaattttgtttcattattgttaaaatttaaatttttgcaattttttagcctttcaaattttcctacatttcctcctccttctcattcgctgttatgggtcaacaaatg

SEQ ID NO: 114315 - DNA, 223 bp, Heterodera glycines
  unsure (1)..(223): unsure at all n locations
ggatgaagntgttgctgcttcgggagagtacgcggatgtgcacttttttgttggggacggagacgaaaaagaggcgagttttgaagaatgaataattttattttaaataattttaattaattttattttatgtattttatttttttcctacattagttcctttaagcttgtgccagcacataaactcattttgaagcacgcgtccgaagtatttgaggcaatg

SEQ ID NO: 114316 - DNA, 1003 bp, Heterodera glycines
tattctagttctttagccattttaaacatttataatcattcaattaaatatttttgttttacaattaaattttaaatttgtctaaaaactcactcaaggaatgataaaaatttaatttctcatttttattaccataatttagccgcaccgtgaggaattaatttgtaatttaattttaatttctcatttttattaccataatttagccgcaccgtgaggaattaatttgtaatttaattttaatttctcatttttattaccataatttagccgcaccgtttactcatttggcctggcgcttgtttgtctttcatttttttttatttcggcgctcagttggctcctcatttggcccgatcattgggccaaaattgtgataaaaatgattgatggtgatttgtgtggtgcattttccacctccccttggccatttttccccgaccaaattattcttcacgcgatttgcctccgctccgtctccggcggggcgttttggacaatcgattttacataatttttgttttatttttaatttgattgggtgcgactttctgtccagtttaattattttacattttaaaaataaaatgttacgagaaaaaaatattaattatttcattcaaattaattaaattccttcattgaataattcttgttaattaattttgataatttaaactgttaattaaatgtatattatttaattctgactaataattattcttaattatcacattaatcaaatataatctgcaattatggttattatttttaataatctagttttactgactatttttaatgtaaaacttatttcattagtttgggtaattgttgcaaataatttttctaataaaaaattgtaattaattaattaattatagatttattatgttcaaatgttttttaattataattgatgttcttgcccaaccaattaccaactcagcttaaaaatcaacaccaaaacagtgaaaaaggtcaaagaaaacggaacaaaatg

SEQ ID NO: 114317 - DNA, 56 bp, Heterodera glycines
ctagagctcggtattttgaaaaaagcctggacctggccctggacctggattccatg

SEQ ID NO: 114318 - DNA, 114 bp, Heterodera glycines
ggtcgtttcccattattattttttagttttgctttgcgttatcgaatattttcagttgcgttcgataaattgcaaagggactctcgacacttctttgaaaccatcgaccaaatg

SEQ ID NO: 114319 - DNA, 77 bp, Heterodera glycines
ggtgagttttgccgtgcttttcccatttgattctacgtttttcaattgctgtctttcaggtgttcagcatcgtcatg

SEQ ID NO: 114320 - DNA, 1003 bp, Heterodera glycines
ctgatggagggcgtttgctagcctgatggtgggtgctttgccaacctgatggcgggcgtttgctcgcctgatggcgggcgtttgctcgagtgatggcgcgtgccaactcgcttgaaggtggttggcaacggaaggatggtttctgtctgtatccttaattaggagagttattttcccgtataatagttttgttgacaataaacggatagcttcaagatttttttgcgggagtgtgttttcggaatgagttgaaatgaaaacaggtaaatttggatattgggtcccagatcatgagaggctcattcaattgaaatcacctgcttggtagagctttggtttttggcggccgattgccaagctttgttctgttttggcactgtgactaaatgccgagcctgaaaaggttttggcgtttggttatcagaagccgagcatagttaagttttggcgcggcggtgaatgtcgagcctggctaagttttatattgtacaattgacaaccgtacttgtctgggttttggtttttgacggccgagtgccaagcgttgttctattttggcactgtgacccaatgccgagcctgaaacggttttgaatttggctatcagaagccgtgcaaaaccgagttttggcgcggctgttcaattccaagcctggctggtattagcttttaattattcataactgacagtgactttacgatgctgtgacaataaccgtcttttgatcttaaaaaaataattgggtcgtgatagtataaatcaataaactatcttaaaaataagaaatgaattaaatgggcaaaacactatcaaaggtttatttcaatcttaaatcccagcaagttatgtgggaatcttgaaggttttactagaaaaattaacccaaaaataaaacttaaagatgttcatgagtttcatgataattttacaaatgctagtataattttgaacaaaaggtacgacaataaaaaatgaaaataataataccaaaatttaaaaatg

SEQ ID NO: 114321 - DNA, 411 bp, Heterodera glycines
caactgaggtagccgtttctggcattattttgggtgcgattttgtgttatttccgaaaattgaaaataaataattagacgccaaaatactatattgatgaaaatacatattgaataatgtatgaagagcaaaaaataattaactgtcaatataaagaacataaaatttaaactctaaaagaatatttaagttaagtttttcaagaattttttcttattctaattttccataacaaatttttcacacagacccccttcttatgcatgctaacaaaaattacaaatccacctatccgtttccataaaaaattttcattttaagacagagtatttgccaaaactcaaattttccctggcggcgcctatcttcgcctcctcacaactttcctaactgttttcgatttccagaatg

SEQ ID NO: 114322 - DNA, 170 bp, Heterodera glycines
gaggaggaggagggtgaagtccgactcggagacgaaggacgagcagaagaggcttatgaaatggagggggaacacctccgacaccacaacagctggctgagcagaacgcaaaaacaggttggcagagaagggacagactttcccaagaagaaacaccccacggacagatg

SEQ ID NO: 114323 - DNA, 216 bp, Heterodera glycines
tcagtcgagacgaaattgaaaagctgaaaaatatcatccgccagaccgagagcgctttggtgaaacttggagaagtcggactcttcaaaggacaaacgatacaccgcatcgacctaatcgatggcgcacggccggtccaacagagaccctatcgttatcctgtcgcacttcacccgaaaatagagcgtcaagtcaaggagttgctgcgtcaaaatg

SEQ ID NO: 114324 - DNA, 318 bp, Heterodera glycines
ttttggacaaaacagcttgccgtactaaactgactctcgtactaaaccgaccctcgtactaaaacggccgtactaaaacggccgtactaaaccggccgtactaaaccggccgtactaaactgacccggtccggtcccgtggcactctactactaatcatcaatccttcccttttcatgactataaaaatgtttgttttttcgctttgtctcgcatttgaaaaaataaaagtttctaacggaataattctgcaattcttccttccctttgtgacatctttcggaactcggccaaaattgtgctaattgccacaaaaatg

SEQ ID NO: 114325 - DNA, 592 bp, Heterodera glycines
ccccgtacgggggtccgaatgcgggaggcgtactcccgcacggtggtccgaatgcgggaggcgttcccccgtacgggggtccgaatgcgggaggcgttcccccgtacgggggtccgaatgcgggaggtgttcccccgtacggtggtccgaatgcgggaggcgttcccccgtacggtggtccgaatgcggcgggaggcgctcccccgtacggcggttcgtatgcggcgggaggcgcttccccgtacggagggggagagaatcactggcgactgagacgcctatgaatgacgaagagacgcttgaataaagggtgccattattgtgataattcaactcttatgctttgatgttttttatttaaaattgttcaactgaaatagataaataatgaggcaatttgaaaaatcacttatttaattttttgacaactattttacaagctctttggaaatgaattgggctccaaccatgttatatttaaggtcttgacgacagaaaagaagtcagacgtttgataaaaaagacctttaaaaatgttaagtgcggccttcgatctgtatggaataaaacagaaaaggtaaaagacaaaatg

SEQ ID NO: 114326 - DNA, 1003 bp, Heterodera glycines
tgttttataaaatgttctttcttcaattaacaaatttcttgattgattatttacagttttgctaggtttatatacgaattaaggaaattaattatacatttgtgcataaaaattttgaccaaactttgtcttcaaattattccatggaacatttttgactatttctcattttaaagaaatcataaaatgcttggctgctccgctttcttcaaaaggatatttttacgatcattaaaaattatttttattttattcattcgatttttcatcccttttatttatagtcgtaaaaattcaacagacatataaaagacaattctcgacgagacattatacaaaacaaagaaataataattaaaaaacgaagccaaactaacgaatgcttttttcaattttcctccttctcatggtcatttttattatttgttttatatttaaaaaataatttttatgttaattagtagggatgcaatttaatttagtcacggaaaacagcaaaagaggcgctatataggaaaaaaaataattaaatttccaaaaaacatacaatagataaccaaaaaatttttcaaaaatatatttgagaaagaatcgctgagaacattttcatttagggttatgttttcattttttgaaaatttttaggttcaatattagagttgttttttcccttttattgaatttttgttcaggaattttctaagaatctcgaaaaaggcaaatataggcatttcgtaatagcaaaaaatgctaaatttcaactcagacaattacaaccaagcaaaaaattcttaactcaacgaaacaattatttaataattgcatcccctaaaatatttttatttttaaattgcataataatttagacagccgaatttgcgagcggaaataattcgtcagaattggacattggcgatttctacaaaaatagctcatcaagtgatgtttaaaaaaacaaaaacaaaatttaattgcctcttttcagttccaatttataagaatg

SEQ ID NO: 114327 - DNA, 215 bp, Heterodera glycines
atgatcaatgagtgatcaggaaagaaacaaggttgctcttaattgtctgtggggtgataatagtgtcattaattgttacggaattggtgatcaaattgtgcgttaattattcgccagaggggtaaaaatgttaccggaaaataccgattttgtgatctgaagagaattgtcggagaaaaatatttttcttatcagaacactgctctaatgttatg

SEQ ID NO: 114328 - DNA, 187 bp, Heterodera glycines
agttcaatttgtgatgttcgatggtttctcaattatataaaatggttcagccgatacgaacggcgacttctcaacggacagcgccgaagcgtcgacgagcgaaggcgacggaggggcggcggagccgcagcacagccaatcgctgcacaacgaactgctgatccgcgcatcgtccagcattttaatg

SEQ ID NO: 114329 - DNA, 165 bp, Heterodera glycines
ttttccaattttttttcgttatattatagcttttttttcttaaaaaggatataaaaaagccatctaaatttcatagtttatttttccaaatttttttaggcctcaatttttacacattatgcatacattttaaacatttgttgcagtgtcaaaatggtgctgatg

SEQ ID NO: 114330 - DNA, 64 bp, Heterodera glycines
aaaataggcactaaaaaatggaaaataggctctaaaaaatcctcatttttaggggtgtaaaatg

SEQ ID NO: 114331 - DNA, 1003 bp, Heterodera glycines
agaccgactttctctatttgaattaacccttgctatatattttgcaatctgatcaaatcacataatcatggtctcgaccataaaatattgtttgcttgactaatttcaagagtaaatttgcaaatttttccattttatttctccagtttccatgtctgatcagttcgtaatggccttcaaattcaaaatgttgcattaccttcatagtgcccattatttagcatttaaattctaaaacttttggactgatcagtcgctaaaatttttcgtttattttctctgcccgatcagttttaaaaaaatcgagtttttgcagcctttccatgactgatcagagtgaaaataaatttatttatgataaaaaaattctctgatcagtccatcaaagaaaatttacattttctgcttggagcacaatcaatcaatagtttttcaaatcaaatgtgactgatcaatgcatttttctcgatcaataattgccgaattttaatttgattggtcaacctatttcggtcatagatccctaatcaatcaataattatcgatttgttttcattcatagctattataaaaatcagtcaataatgattttctcttttccgatttaaaaatcagtcaataatgattttcccttttccgatttaagctgctcagctgagcgctgcggccgccctgtacaacaacagcagcagcaccaattcgcttgtcggcggttgcgcgccgccgcaaccgtccgctaccattgctgcaacatcatccgcggcacccagccatagcagcagcaccggaagcagcgtgtccgccttcgcgcgactgttgccgccgacgccgtcccactcgctgcaacattcgccgctgcaccaaatttcaccgcaaccgtcgccatcctcagcgacgtcaacggcagcggcatccacagcgaccacgatggccgcgctcagccaactgatcggtgccgcggcagcgaccgcagccgccgcgtcatcaccggcgggcggcgatg

SEQ ID NO: 114332 - DNA, 418 bp, Heterodera glycines
atccgcacaaaactgaggtaatcttacccagctaattaaataccgataatatttatgaatagaaatggctcaatgtttatccaataatatctttgcaaaattattaattgaattttctaataaatcaaaaattaatattttaatgacaaaaaaatgaatttaaaatacaataatttatattaataattgtttttcttttaagtttaaaatgttcaaagaaagcttccttcaatctttctcaccacaatcccaccaatttaaatgtttcgctttgtttggaatggcaacgttaatttttatttggtgagagttaaaagccatcacttaaaaacaattccaattaatgagttttgatttcgcaggtactcaacggtaatgcacgacacggaatgttttgaaattaaatggccaaaaaatg

SEQ ID NO: 114333 - DNA, 514 bp, Heterodera glycines
tttttggacggagacggaatttgtatgtgacaaacaaaagacagctaaaaataaaagaagttattttttaatagtcggaataaaaaaatagggagtgaagaatgcaaaaaaacgatgagaattggaatgatggcaaagtcaaaaaagtggccgtatttatacaaaaaaatgttggggagcacttcaaacaaacgacacatatcgcaagcagccatcgacccatttttcgcctatcgcagcagtcaccgccaaaaaacttcttcacgacgtctcaaatctggaaattcctcccgaaatcgaagccgacaacgccattccggcatatgcaaagctgttcatcagacaactcacagctctgctcggttcgacgaccacacttctccaacaacagtgtgcagcagctgatgctgtggaggaagacaggcgccaacattcactcgtggtgattggcttgccggagagtcaggagaaaacgcccaccggtcgtgccagcgccgacaaaggtacggccatg

SEQ ID NO: 114334 - DNA, 458 bp, Heterodera glycines
aagctttatgcggtgccgtgcataaaaatgtgccgccacattgatgttgaacgggttgcgcaattgcccataagcaggaagaaatgcggcgccttgtgccgaaattccagtgacgaagaaagttttggtcatcccattacggtcgttgtaggtggtgcgcgctttgcgcccaatgatgtgtttcagcacaagcgcccgatcctctgggtggttgagccggtcgcgcaatgacttgacagggcagttgagaagctgagcgcaaaatgtgcttacaagaaccatggcaggagaatgaaagtgggatgaagttgaaaaattttacttttatttgcgcaaaagtgtggccacgcctacactatttgaaaagagtcacggttttagacatgcccgcccactaaaagccaaaacattttgcctgccaaaaacccagaatcattttaccaatttttgtcaaaatg

SEQ ID NO: 114335 - DNA, 422 bp, Heterodera glycines
acttttatgccacctaaacattgttgcgggctcaccactggcgcttttttctatttttttaaattttgaggcgtggcctattttcataactttatttttatggggtttcatttggaattttgaatttcttttattgtgatagctttatattatgtcttttgtgcaaagtttgaagataaaaagctaaggaatttttggaaatatgtacaatttcaactgttaaaaagatgaaaaatccacacaaaaattcaataaggtttttagaccagcaaatgatatgagaatgacaaaaaaattttatgaccttaaaattccttaatgtgtagaattttaagttaaaaatgtaaaaagaaaagaaaatttaataaataaaaaaattattacattttatgagaattttattattattgcagaataaaatg

SEQ ID NO: 114336 - DNA, 97 bp, Heterodera glycines
ggttcccaacactttccagcttgtttctatatgtttcattgttaggttcaactccgaattgaaacgaattgccgacagtcacctcaaccgaaatatg

SEQ ID NO: 114337 - DNA, 517 bp, Heterodera glycines
aaaaagcattgactttcgctatcgtgataaattatttgtaaaaaaagatttgtttttaggggtaattagaatattgcatgctttggtttttgtaaaaaaaatttaaaaaaaatttttcaataaaaaaaatcaaaactcatttcagatataattttatagactccttcaaagtgacaattagagatataaattaattccgatgcctatagatagtatttatccttcaagtggatatttgattatgaattttgaaaatttgtatttttttattaaaaaaccacaaaacatctttttttatacaatccagaaaattttttgaactaaataaaaaaaacctatcgagtctcccttctaacaattttacagcaaacaaacgtaaaattttttaatttaaaataattacaaaatgttaaacggtaatccgaaactgctcggcctgcacactctgccggtttagcagcaacaaattaaaaggaataaattaaaatttaattaatcaattaatcaaaagaaaatg

SEQ ID NO: 114338 - DNA, 177 bp, Heterodera glycines
gttcggaaaacattgacttcttccgaagcaggggcgtcttcgtcttccaatattgacacaagacaagagtccgaaactgctgttttacgtgacctggaccagggcaatttgaccaatactctgacaacgcccgtggcaaaaagccaaaaattggatcaaccattttcggcatcaatg

SEQ ID NO: 114339 - DNA, 286 bp, Heterodera glycines
ttgggatcagtacaaaatactgggtgatcatttcgcaaaatacggatcacttgaaatagaaagtgagaggggagagggaaaagggagagacagagagagaagggtcaataaacatattgcagagagaaaagaaagtgtgacggaatcattggaagaactgatccaaaaacaagaggaagctaaagatggcgaggagagagtgaagcatgccattgctggcagagagacggcagagagaagagggcaagaaggaatagtggaggaaagggggagaatagaagagatg

SEQ ID NO: 114340 - DNA, 775 bp, Heterodera glycines
tttcaaaaaatttgatcaagtttgaaaaaaagttatggacgaaataatttttttttacgatttttagtcataacttatttcgaaaagcaataaaattttctttcatcagtatgtagatagagaacattaagggctatgaatgatcccaagaatgtttaatttggtcaattttaacaaaagttaagacgatttttttgtctaaaaacagtacgagttgggcagtacgagtggtccctgaaaatacgaaactggaaaatgcgacaccgagagaaagttttcacaaagaaaatacgacaccaaacttagatttttaaaaatataaatttatatatttttttcaattaaagtctggaaatgagcatcagtacctaaaaagacttgttaagtgtggataacaccactgattattaaacgtgaaaaattggcaaaataaattagtataaaattggtagctgctcttcctccaccttccattattattttccatttgccatttacccattggttttcgtctctttttgttcgactttatctccctgacaattccttcaaaaaatgattctgtacgttttgtagatttcttcacaattttacctttttgaatttcccattttttagtctgttcgttgtgccaatgtttgttgggtgttgtgacattctttggagttattgggaccgcctcaaaaaaccaaaaaagaaaatgtaaaaacatttggccattcacacgaacaataaacacattttggtgatgattttgcacaacatttggccaatg

SEQ ID NO: 114341 - DNA, 87 bp, Heterodera glycines
aggttcaacaatgccctggtgattgccgaagtgctgggcattgaggcggcacgcggctcaatcatttccgaaattttgaccacaatg

SEQ ID NO: 114342 - DNA, 132 bp, Heterodera glycines
gtttttaattttttttttttttttttctaaaaccattatttttcataggattgggccaacaaatgtgagggcgatgcgcccgtgttgccctgtcaggatgtgaatgcgcccgacctgtacattccgttgatg

SEQ ID NO: 114343 - DNA, 822 bp, Heterodera glycines
gaaccgtcctgttccgcagccaaacgtattttttctttgatcatgccttttggtattgttttttgatcgtatttgcttaaaaatcatataatcagaaccaaaaaatatgatatcaaccaaaagtccaattaaatattttttaataatgcacaaaatttcgccacgttaagtcctcggcaaacgtttggctctttcgtttggagtggacagtttcagaaacttctttgcctgatttttaacagattttgtgataaaaaatgccaatttggttgattttcgtcttaaatttaattttaaattaaggatctgagaccggcggtgccgttaagcgtcgccaagaaaatttttgaaagtttaattgtgatttgttttatgtaattttcgagttgttgatcacgaatctgacatcaaaatttagattattcagaaccccggacccaaactcgaacgaagtcaaaactcaaatcttcgaattccgcatttttatttcaaaacgaaactgaatcttagtccaaaataaaaaagttaaattagggaccacaattctttgccattaccataaaaaatcatttaaactcgaaaattcggaatcatgacatttttagtgaatttttgtctttttcgtccttttatactcacaaatttgtccattgaaattgcgcaactaacagctttttcattggttgaaatggctatttaaaagcgattcttcgtcaattgttgtcattgtcccagtattatttctttttttttgatttttgatttttcttttttatgttcattcgtgtcaataatttttcagcctccaatttcagccacatg

SEQ ID NO: 114344 - DNA, 191 bp, Heterodera glycines
gttggccgcgttgcgcggcgtccccgtgcaattggtgcgaaagccgcgactggtgagaacggcacacattctgctgacattcacatttttgactatagccgacattttcttgaaattttaatcgcgtcaaagtcgagactctcggttttgccctaccaaaacttaaattcagtcgtttgtgttttcagatg

SEQ ID NO: 114345 - DNA, 798 bp, Heterodera glycines
ttatttactctaaaaataaattcttcaaaagaataaccgttaattgaaaaaagtcagtaataaaaaaggaaattttatataaaaactttttaaagtatagtgcaaaaattcaatttgtgaataaaaaatgaaataaaaatgcttttttgactaattacggaaaagaataacattgaaaaaattttataacaatattaataaaaatcaataatggttgataaaatttctatttttaggcgttattttattgtaaaaaatgtacgaaactaagtttttttaaatttttttatagcgaatatactataaattaaatctgtacaattttttattataaatatttaatttatatatttgcaaaggaaattatattcacaggaaacagttgaagtgaatagaaaatcctttgtgctaaaattctgaaaggagcatatagtggaaatccatataatgagtaaaccctaatttatgaataatattataaaaacaagagtcaaagcaaaaccaatattctttttaagttaagacttaaaatgtaagcaccttttttcggcgcttgtcggcactgccggaacgtctcattctgttttttttaatttggttcaaaaaacaccaaaatcgtttccgaaacctgacataaattcattgatgcaatggataaggaaaccataaatgcatttgtagacagctcatatttctcacgtaaatgaaataattaagataccacttcacctaatctccgtgtgcaaccggactgaatttttcagcacattgtcatttttttcagaaaattttcccatg

SEQ ID NO: 114346 - DNA, 111 bp, Heterodera glycines
ttttttagttaaaatattttgaatttttacctctaaaaatcaataagttattagcttaattaatttatttacccgaaacattgacttggtgtatttgaaaatgtcctaatg

SEQ ID NO: 114347 - DNA, 191 bp, Heterodera glycines
gtcaccagtcattggatacttaaattcattcgaattttcattaaaaaaatttccatttttaccacgaattcattagcgcatttttccgcactttttttaatgattcaatttaaaattaccattaaattaaaaggaattcgtttcattcacctacctatttaaaattagtttgattacctgcaaaaaaaatg

SEQ ID NO: 114348 - DNA, 1003 bp, Heterodera glycines
ttcttaatttaaaggcaaatataaccaaatatctctcaataaatatttgttgttggtgggaaattttgacaattttgccatataacgcagggaaaaagtgtgaccaaattggccataaatggaaaacatgaaaacaattaataagaagacaacaaaaaatgtttgtaggcggccaaagttgtgtcaataaaaaaaatcttgacgatattattatttaataaaataagtaaaattaattaaaatataaaattgattggtggggaaaatttgtcaattttgccattgaattcaggaaaaattgtgaccaaattagccacaaatggaaaactattactagggcttctttttttaggcaaatgcctaaaatttgcgcacttaataagtgtagctaagcacgaaaaacgcgttttccgcttggtttggggtgtctacgatgacttttataatgcctatttttgcctatctcggggtttttgtgcctaaagtgccaattttaggatttacgaaaaataacaattattttctttttgttatttagcttatttcatcagtttatttttgataattgttgagatttaattcaattttccaaggtgtccctattctaatgtaacaccccaattttggaaaaaaattcgtaaatcctttttccgtcgtcatttcgtcttctcacttttagaatcttaatattttcagaattgctatatacaattaaaatttcaaatcgattggttcatgagaagtggtcaaactcccacaatagggtgtccctattctaatgcaacacagtgtactttctttaattcaagtttaatttaagtttagaatgccatgatatgtaataatctgatggcttaatgaatgtgtggcttaattaaggctaattgccaataagggattattaattaattctttgtcaaattaaagttattttatgccaaaattattttcattcaatttagtctttttatattatttttctcagaatgccatgataagcatg

SEQ ID NO: 114349 - DNA, 405 bp, Heterodera glycines
aaatttaattatctgggctttccgaacaggctaaaagtattgaaacgtattaaataaataaataatttggcaacgcctattatctgtttagcttaccacccactccttaaaattggtcaaaattaaaagaaaaaatcccattgaaaaaaacatttatttttaatgactaaatttccttactcattaatacaaatttgttatctgctcattttcccccaatttagggagtctttatggatgccgaaccctttgtgtgcctctggccattcgtttcacagcatttgcatgttcggcattgaagatttgccgcaattagccacctttccccacctttttgtcaacaaatttttgccctccttcgattttggcgctgcgatttgtgtgtacgaaagaatgtttaacatg

SEQ ID NO: 114350 - DNA, 203 bp, Heterodera glycines
ggtggaggagggtggctatattttaggagacacgataattttttttttctagtaaatacttcgcttacaaattagagtgcagtttttaagaaaaaaatttttagttaaaaaattgatataaatatttccattgccatcacaccaatcttgttttacaaaataatttttattaagttaaattccataaaatttaaagatgtatg

SEQ ID NO: 114351 - DNA, 395 bp, Heterodera glycines
gctaattttaagttgttctaataataaaacatataacggcttaaatgcgcgggcggatttcttaatgcaaaaggatatggcaatacaatggttcaatattgctttgatggatattcattttgctatgcggcaacctgcgccaaagttacgttttcttttcattgtttcgatagcaaattattaaaaaaaaaaacaaattttttttgcgaaatttttaatttttatttgagccgaaacgggttcggattcaaaattctggcacattgattttttaaaattaaaattttaagctctacgaaataaatgtttaaatttctatgtctgatatgttaagaaatgaatttataatactgttactgattgtattttaataataactttaggtgaggagcatg

SEQ ID NO: 114352 - DNA, 561 bp, Heterodera glycines
ttttcgagctttttagtccatatttcgggcttttttagtccatattttatgtccatatttagcgttttttaatccatataatttacaaccctattcatcatttatcgcttggaaatgattgatactcgtatgtatgagaagtaaaatttgtatgagaaacaaaaccacaatcaataagtatataaatacgcagataaaatgacggtttttggaatgcttaaatgaaaaatatgaacataaaataaaacaaaaaagggcgaaaagaattttcaacgaagaaatcaataaattttaggcgaaaatttttttaaaaaccgtcaaaaccataaaatattttaaaaatataaagtcagtttgagtcctgggaagttcgagccccgaattcgaattgaatctctgaaatgtaggctggattcgtgattagcgacacccaaaaacctaaaaaaaggtattctatccaattcttcaaaattgtaattttttcgaaaaaattatgggcgacaaaccatataaaagccgatttttctcatcactgccaattttttaggtgcattaattatg

SEQ ID NO: 114353 - DNA, 59 bp, Heterodera glycines
gatagggccagtatgtttaaaacaagcttcatcatgatatacataaaaaatttcagatg

SEQ ID NO: 114354 - DNA, 173 bp, Heterodera glycines
tttcctatgtaatgattgacgccttttttctttataaacatacgagcaaataaaattttatttgttcactttttatttagtttaatttttagctttttttattatatttattgaatttaaataaaaattagttaaattaaatttaaaaaaattaattatttcctaaggcaatg

SEQ ID NO: 114355 - DNA, 60 bp, Heterodera glycines
gttgtctgtggcacgggtgcgaggagtgttttgaggcacttggacgaagaaacgaaaatg

SEQ ID NO: 114356 - DNA, 661 bp, Heterodera glycines
ttttttaaaattagtaaaattaaattcaaattttatttaccccaaaaatgaaaattttggcatttttattaaaaaaatatattaaaaagacctgaaaattaatggagagaatgctcatgaacaaagtcatctccttcagtgtgctccaatttttgctaattgtttcttaaatgaaaatttttaaataaacaaaagaaaagggacacttttttattgcttaagcaattgcgaaatgtgtccccattaattactagtgatgctcgagaccgaaaatttcccgataccgagaccaagatttgaccctgagaccgaaaacccaagacacgagaccaacgaaaaacccgagacttttctcgagaccgagactctccagcatcactataattccgctaatttcacattcaattaattagcaatcaaaattattcacccattgccaccaatgacatcgaaaggtaaaatccctaaaaaacaaattcaggaattaaatcaaattaaattaatgaatttttacttggaagaatcgggcaccaaatatggccataaaagtgaatggctttgtgagaaattcggccgccaatggcaccgccaccgtacccaatccgttcagaataccgtaggcagtgaatgtgcgacgaaagccgaccaaagcgcacaaatg

SEQ ID NO: 114357 - DNA, 1003 bp, Heterodera glycines
taaaatacaggcagtgagtgcacatttgttttgaaattacaggcagtgagtgcgcaatttgtttgaaataggtccgagaataataaggcactgagggtgcgcgaccaagaagtgatcagattttgttaccaaggcacaaatagacagagagtgttgtgaaaattgaacagaattgtggcaattgagacaattggtcagagtgatcagacaattgatcagagagtgatcagacaattgatcagagagtggtcagtgagtttatcagtgatcagtgaattaatcagagtgatcagacaatcgatcggagtggttagacaattgatcaaaagcgatcagatatttgatcagaaagtgatcacagtaaaaaacgaaccaattgatcagagattaattagggtaaaataaattaataaatttcctaaaagttgtcaaacgagtggaaatttaaaatttctcatattgcccaaatttacgtcatttttgccggtcaataaatttgattacggaaatcaaaataaaccaccctaacacccctgagtatctgggactaagcgatcttgagcgagaaagaaggaaacttgaaggagaacgaaaaaggaaaagtaaagaaaagttaggagctaacagaaatatggctgatgatgatttagaagataaatatgtggcattaaaggcaaaagtccaagacttagaggatcgcttgtccaatcgggtcccgaattatctcccccctggagttaaagtcccaaaatatgatgccagaggcgacttttttaaatttttaaaggaattcaatgttttggcgacagcaagcaactggcacccgccggattgtgtccgattcttacctttgttcttagaaggggaggccaaagaaatttaccaaaatattccggcggacaaaaaaacaaattggagaaccctaactagtgaaatcgcggagctcactaagaaacttgacggacccatgtgggcgaggaaaatgctaaataagacaaaaatg

SEQ ID NO: 114358 - DNA, 376 bp, Heterodera glycines
aaaataaaaagttaaaagagaatttttttttaaaaaaattttgtcgtaagtactaggattcctgcgcgtgacgggatcccgcgcgggattttgcgggatcacagtcttgcagggattaatccaagcgggatcccgtcccgcaaagaaatttgagttccaatcccgcagcgggatccgcaaatttgattttttgtgcgggattatgcgggattttattatttttttgaaaatttttctaagacagaatgccaaatatttttaaataaattaaataataaatttaattaaagttagctcatttttcatcgtaaactagcggggtcagcgccttcggcgcatcccccgctaggtagtacgcttgtattataggattatg

SEQ ID NO: 114359 - DNA, 937 bp, Heterodera glycines
tttcggggaggcattgctgaactcgttggagatgacataccccttaattatgcacttcggtaagatcatcgcggcggccagatatggcacaatttaaaatataaaaaaaatgctggggttgtcaattcgtggattacctgtccaaaaaaggttttaacgttatgccgcacattttttgattttttctaatattgcaacgcctaagaaaccatgtaaaaaagttttcagtattttctgacgtttatttttagttataacatgttttccagtgagttaattgaaaactcacgtgaagttaaacgaaaaaataatagttaaatggttcccccattttttggcacaaacatttttaaaaactgaaaattcgaattcttcagaaattcacttttatctttgaatctgtgcataattgattatttttggtgttgtaatggtttgtgattagttatttcttggttttaatttattttagaacaaaaagcaaatttttaataattggggattctcgactttttgttcgagttcgggtccggggttcgaaatagaccaaaaaggatttccatatcattagcaatacattaaatcaacctagtaaaaattatttaaaaaattttcaggggcgggtgacaaaacctacaaaattcctgcttttaattactaaatctacatatttgaaaaacaatttgtccttcctcccgctcgtggaaattacgtccccccccccttctctcacaactttttttaagcccctctttttaaaatatttcataatcaattttaaaatacaatgaaaattataggcattttatttgcacagaattgaatttaaatgaattaattttttaaacatttgtcagatatgcccaccgtcacacatactttggcactttttgttgagcagctgagccacaaaacaggctcttttgaagcggaaatg

SEQ ID NO: 114360 - DNA, 1003 bp, Heterodera glycines
gctttataccattaacattgtccaaccatggagtgagcttgaactttgctttattattgacgcgatgacattttttggagaaatattcaaaataaatttcaaaaattttccactaaataaatcattcgaaaaataatctctctgtctccattaatctgccagtatctaattatctccccctttctaagggtgttgataaataatatacccgggcatataattagagaaaatacggtatgtacataagggatggcattccgccgaggctccaaaaatatgcgaaatgaatgtttttgggttagtaggcgaaatgtcaataggcgatatgtcggtaggcgagatgtcgagtaggcaaaatgtccgtacacacagcggcccaattttgtgctctcatttgtcagtgcaaataggtttattatttatttagtaatcagaacgccaaaactttgcaaaacttaaatttttttggggattttcccttgtaaaaatagaagagccgatctcgagttaaaaactagacagctaaaacatgaaatgtttttacgacacttaaacttgaaaattctttgcacccaaatccaacaatcttggtgtcattcgaaagctcgtaacatgctttattagccttacaaaaagcaacaaaattttcaagcctggaaaaaatttattaagaaaaaacttcaaaatttttgttaagctttcgaatgatatcaacaatgttggatttagatgactcagaaaaaacgtttagtggaaaaacgagctggcgccgaaacgaagtggaccccatttcacggtcctaataagtttcaaaaatgggtttaagtgcaaaaaaactccaacatttttttgtcgaaaaaacagtaaaagtcggctttttggcatcattcctctgacatcccaaccccattactcaaaggcctcaaaacacccatcacatattgtacatattatttggaaaagcctgatcatctccatccatccatcatcatcattcaccatg

SEQ ID NO: 114361 - DNA, 697 bp, Heterodera glycines
tctggaattcagattatttttacgtttaaatcgttagggtttttggggtcggagaatcctactccaatacctatttttcatcacaaatacacaattgtaatttcgtttttagaatgagtaacttttctgagaaaagaaattttggcgctatatgaaaagtgacatattttgaaaattttttcaaaaggggggacccttttgttttgcaaaatttttttgtgatagtcataaaaatgtattctctggggtttttggagaccccgatcacgaatctttcaattattttgatcaattccgatttcctaatctaaatttgaacaaaaaatcataatttgaaaaattaaaaatttcgatttttattcgagttcgggttagggattagaaattagtcaaaatacatgtcagattcgtgattaaaaactttgcaaatactttttcccattttgctgtcccaacccccgccacaccatttgcgtagtaaaatttcatgttttttaaggaaaagtgagtgaatggaagaaaatgggggaggggagagagctttataaattaataaaaatttagaaaatgggaaaccgtacaaatgaaccaataaattcgtataaaagtggttgctgctcttcctctaccttccattattattcattcgccattattttcgtctctctctctctctgactttttctccctgacaatg

SEQ ID NO: 114362 - DNA, 156 bp, Heterodera glycines
acttatagttcaaaaactaggctggcgcgaaaacgacccggtacgaaaacgtcctggcccgatatccccctattaataattggcagtaaaactctaatgtcaaaaaatgaattaattattcaagcaaaaacgaagcgcattttggtggccaaaatg

SEQ ID NO: 114363 - DNA, 579 bp, Heterodera glycines
tcggggctatgatgagccatcacatcgtatcatcgcatcgttgatacgatgctaatttgaataggccccaggtaatattactctgaccccgcctttatatgtcagcaccccaaaatccgcttttttacttttattgcaaatgatttaatacatttccatttgaaaattttacttaattttttaatttcattaaaaaattcccaattaaaattgtgctccctggactttcaaataatataaaattatttcttttaaggaaaacgattgaaaaatcgaagaaaaattatcattctttttcgattttgacctttttctattttttatcgaaaaaaccgaccggaactccttatctgatctactcttggttaaggtaaatttgttttttattatttcaatttctcgagatgagacgacgcagcattaaatattgtagacattaaaatcaattcaattgacggacgagctataaagtattaatattgtttagacgtcataagaattaatattttttaccactttcaaaaaataaatttcattaaatgagaaaaaaatattaaaatttttagaattttaaaaatg

SEQ ID NO: 114364 - DNA, 76 bp, Heterodera glycines
tttgctactttcaacgttttttattaatttattaattcaacctattttaaatcaattttctcattttaagcaaatg

SEQ ID NO: 114365 - DNA, 171 bp, Heterodera glycines
tggtaactaaaaaattcttgataatttttttaaatacaattttaaaaaattttcggcgacgtttcggcggtgacgttttgtcctgctcccgtttaatccgcccatttttggcatttttcagctcgtctcaaagttgtgattgcccgcggtccattcttcagtggaataatg

SEQ ID NO: 114366 - DNA, 1003 bp, Heterodera glycines
tgccgtaaatttttacggttttgtgccgtcgtctgctgctgtccccgtcatgacagctgcatttgtagtatataaatcattaatagctagctagctatatattatagcatttataaaaaaaatcagaatgttttatgttctataattaaattttaatttttaatcccaccaatttttgtttaaattttattttcgcttaactatgaagtcacaagccataattccatcattctaatttgatcattaattcgtcttcagttaatccatctggaagaaaagttgtcctcatttttgggcgggcgttgtgctgcttccatacatcggtattcgccccctattatcgtccctattaaggcatttttgaaaaattccttacaaaataattagtaaattactggcactgcgaaaaatggattttgaatgaaaggttgataagaagaaaattagaaaccttttggcattccctcgcagtattattatctattatattatttgagaatgtctttccgtcccaaaatttttgctttttttgaatgagaaaatggattttttattgaagcgaaaacattttgtgtttttcgttctttctttgcatttgctttccattgggacttcactctgccttatttgtcataattagagatcggatacggacaggatccgtatacggatttttacggatccgtagtccgtaatccgtatttttttcggccgatacggattttttacggactacggattttacggatttttaatccgtaagtccgtaatccgtatcgatgtcaagtccgtaatcctgatcccgatccgtataaattatgacacggattacggatttttttctgacgttttttaaggtacaaatgtgtaaattttttaaatttttgcagtcattttgccaaaacataaataattttttttatatttaaaaaattgaaagtgtaagagaatgtcattgttattttttctattttttgcataaaatatttaaatttagaatatg

SEQ ID NO: 114367 - DNA, 1003 bp, Heterodera glycines
tttcaaatttcacatttttaatataaaaatagtttaaatgatcttttattgaaccaatgatcattttcaacttcgtttccgagtattcaaacaaaatttgaaacaaaaatgttgaattcaaaaatttaaattttcgactttttgttcgagttctagtccggtgttccaaattggtcgaaatggatgctggattcgtgatcagcgactccgaaaagcattggaaacaatttccatggcttttgaaaattaaaaaaaaaatcctatgggctgtgaacagtacaagtacccgtttttgaagtgggaaaagaatttgcgtaaatgaaatggcagaccaaacgtggcactaaacgttttaataattgtggagcaaatggggagagaaaggatgaaaatatggggaggcccactgtcgactaaacaaaatgataatgagggatgagggagaggggaaaattggcaatcaatcaaagccaaatccaactcacttttattgggaggacccatcaaattaactgattatttcctgatgttggccctctttttaagctttgcccaaaaagtcgaaaaagtgaaacgcgtacactaattaagttttaattatggtgtaaaatagcgtaagaattcacttcgtgctcatattccaaatttaacccaatcactggagtaattttagccaacaagggtaggacaaagccaaaatctattaagcctaaatgggaaaaaattttcaaaaattattttttttattatttcctctacaattaaaatataaattttgatgaaataaatcagttaaaacttgtaaacttttttgcttttgagggaaatggtggagagattttactaattttccatgtataaatttaattataagtcatttgcatcaatagagtaaggagtgtccgtccgtccaaccaaatgttgaaatgagaggacaaaacaaattattttacatttatttatttatgattaagattcatataaatatttgtcctttataatg

SEQ ID NO: 114368 - DNA, 63 bp, Heterodera glycines
tctgtgaacgagacaaataaaattacaaaaaatttgttttgttccagacccacctgcattatg

SEQ ID NO: 114369 - DNA, 1003 bp, Heterodera glycines
tttcctaaatttgtccgatccaatacttttgttatagccatagcatattaggattagctgatgtaagtgccaagattggggctcggaaacctgcgctagtgtgtggcgcgaccttttttggtaaaatggggttggggtaatagtttaggtagatggttgcccccatttttcggagaatttttttgtttgttttcaaaagtcatgaaaacatgtttctaagtgttttcggggtcgctgaacacgaatccggcatccatttcgaccaattcttaaaccctggacccaaattcgaacaaaaagtcaaaaattaaaattttttgaatctcacattcttggttcaaactttgtttaaatacatgaaaacgaagttaagtcattagtgcttcaataaaagatcatttaaaccatttttagactaaaaatggaaattcgaaaaatttgagttttctgctttttgttcgaactgggtccgggattcggaattggtcgaaacagatgccggattcgtgatgagcaaccccaaaaaccattggaaacatgttttcatgacttttaaaaacaaaaaacaattttcacaaaaaggggggggcgacaaactagagtattaccgaaattttgacttcacatgaatagggcgaggatttctagttttttaactatttttctgcggctttattttgatgagaaatgcacgaaaaacacattctttttcaaaaaattttcgtttttagtgccactattcatcactagaaagaattattttggaagttggccactaaaataattatttgtcactattggcgtttcgtcattatttttgtcactattttgccatttttttgtcactatttagttaattattttggggttttttgccactaaaaatcctcgccctatacatgaataggtatataaaaaaggatgaaaaacaattccacgcttatttttgctaattttttcaaaatttttccttattttaggctaacttattattttctaaatg

SEQ ID NO: 114370 - DNA, 74 bp, Heterodera glycines
ttgtttagacatttcgccgtgccaccacttctgtcagttacaatattcaactttttttttgggtggaaccaatg

SEQ ID NO: 114371 - DNA, 887 bp, Heterodera glycines
ttgaaaatttgagtgcactttgtttcgaaaaattgcctatattcactcatgaaatttttaaattttcgtttggggggaggaattcgaagaatttttccattattcgctggaaaatttttaaaaattttcatgcctgggaggggggatcttggattttctgagcccaaaattctggatttttaattaaattaacagtcttttaaattttttaaatgcctctttttgtggtgctgttttttcaaaagattttggatttattgtggcggtggtccggcgcgccgccggaaaattttcgaaattttaagtgaaatatgttaacagaatttgccaaaaaaggaccaaatatttggttaaatttgcagttttaggttgtttaaaaaaagaaaaaataataatattttaaaatattttttattaattaaatttcaattgaaataatgtaaagaaaatagaaaaaagtatctgttcggttggggaattgaacccaggagattaacaatgaatgtcagaagatttagccactacgcaacataaggaaacaaaaaaacactttaaatgaaataaataatttaattttttctcaaaaaattctccttctccaccaatttccttctcgttttctcgcccagaccttattcttaccagtgcttatttagtcccgccgggactggcaaaaccgggaccgggatttcaattttccaaaaaccgggaccgggacctgaaaaaaccgtgaattcccgtcccggtcccgtgcaactctagaatttacataccgtattttctctaattatcccccatggggatgataattattttaaccttcctcatgaaaaggggggaggaataataaagattgggtggcagttagagaaaaacgacgacaaatg

SEQ ID NO: 114372 - DNA, 595 bp, Heterodera glycines
ttttttacgaaatgtctcgaccaaaccacgcacgactcggcaattttcttgatccgacccgcgacgaccctttaagtgctggcacgtgcgatttaataaaatcaattttaaaattccatttattatgaaaaaatggggaatatccaaacagataaaaatcaataataggatttacacatgttttcaatcatagacaaaaaaaaattcctttatgattctaatttcataaaatagcaataaaaaatttttatcagtttctttaacaacaattatttttatttttaacattaatttttcttttttgtggaatagaaaagcaattagcgaaattacgcttgtaaaaggttgttaaagctgaaaaaagcttattcatcacttgttctaatttctttaattaaaacatttatgtattagacaaataattctttcattaaaattgccttttaaatggaattgcttataaatacattttttatttaaactttttaaaattatttttatttattttttaaattacaatgtaatgcatttaatattaaatcatttaatttcttcaataatttcggatattataaattatttttcagaaattatg

SEQ ID NO: 114373 - DNA, 587 bp, Heterodera glycines
aatagtcaaaattctttaaattttctattattaaaatcatgatacttataattatattttttaaataattataatttttacaaaatattttaagtccaattttatactataaaatatttttttatgatatttattagtttcttttctttaaaatcttttttgctgcaattcggcgatttttctttttggaaaattgcgagaagaatttaataaaatttagttccaaaggtattaaaaaataaaacgtttttttatgaaattgattgtagttatattttaatattaaaatgtaaagttccaaaggtatttatttatctttaaaataaaaatataccgtttaaatgcgcacagtaataaattgtgaaaaattcaaatataacttgattatttaaacatttaaaataaaatttaagaaagtcaataaattagagttattacaagaatatatattatctttttctttgagataatttaaatagcttctcaagttttatttttttattctccgattaaaatttaaattaataaatgcataatgaattaaaaccacatgaaaatctcggagaaaatgaagaatttaaaaaatg

SEQ ID NO: 114374 - DNA, 62 bp, Heterodera glycines
  unsure (1)..(62): unsure at all n locations
tgctctaaaaataaaaatttccaaatttggcaaattntaatntattttgntaaatgaatatg

SEQ ID NO: 114375 - DNA, 1003 bp, Heterodera glycines
ataaataattttcctttaaaaatttttacccaaaattgccgcggagtcgcaaattccgcggatcgccgatttaaaatcccgcggtcgtggatcgcgcattgcggattcaaattgcagcggtcgcgaatcgctgatcgaggaaaaaaatgtcgcgaatcgcggatcacgcatcgcaatcgcggtcgcgtcccagcgctggtgcgcaattgcagcccattctctgccaaactccgcaggaggaaacaccgaaaatcaatggaattgcttcgcttggggacgccaccccaaaaaacgaagccaaaaaacatttgtttcaaaaaaatactctcacaacgaaaaaatgtagatttaacacactgttttcgcgacggtctacacctgactgcttaacggttccccctgaactgctaggcccagctgactaaattcggcaccatgccctcagacgcctagtttttttaagggtaattttaatagagttttcgcattgtcatatctttatgaacaataaatagtttatgcctttttaattttcttctttatttgaatacatttttttaattttgaacgattgttttttaaattttagcattttgcttttttgtcctttttattatttacaagtcttttgttaatatattacttaaactaatgcatttttataatctctcaatttcgtttctttttatgttctacaacctttaacttttccatttattcatgtaaatggagtaaaacttgttgatatttattagaattcgccttgttcgattttttgcctttaatttttattatgcgtttttttctttcgatgttttatctccgtcatttcattgtatcacattttcacggtctttgtgttttttttttcaagttcctctcactccgtttttcggagaatgataccacataatcctctagattttttttgattatctttttcatcattttgttaatttttgatcattattctccaatataggtggtgctttatgataaaatg

SEQ ID NO: 114376 - DNA, 862 bp, Heterodera glycines
cccccccccccccccataaaaaaaaaaaaaaaaaaaaaaaaagaaaaagggggagcaccccccccacccaaaaaaaaaaatagatggttttttttttccttttttttttttgtggggggaggggggggggggggggtaaaaaaaattttattatattttttttttttttttggtggggggggggggggggggggggtttttttttttttttttttttttttttttttttttttttttttgggggggggggggggggggcgcgccccccccccccagggtggggtgtgtggggggttttcttttttttttgggggggagagggaggggggcgctctttttttgttttttttttttttttttctctctttgtggggcgcgcgcgcggggggggtttttttctttttttttggggggggttttttttgtttttttttgtttttttgtgtttttcccacaaaggtttttggggaagacaaccaaaaaaattttaaaaaaaatttttttgtggaaagaaaaaattggggggcaaaaaaacacaaaaaaaaaaattttgtattttcccccccaaaaagttccacccccggggaaaaaaaggaaaattcttttttttttttttggggcccccaaaacttttttttcttttattggggtttttttcaacaacaaagtgccaaatgggccgaaaatttcccctttttatttttcattttttgttgcccttttttttcagtgggaaatttgaatttaaaaaggcgggaaatggagagaaatttcattctcgtcacatttctaatttttatcttctcaactattacatctgattgctgctgctcaccgactccatcgacaacgacacgcgatg

SEQ ID NO: 114377 - DNA, 97 bp, Heterodera glycines
ttttacccaatttttttcatgtttaagttggatttgtgcggatgtttggatggacattctgccatcttttgaccatgctcaacttggactcaaaatg

SEQ ID NO: 114378 - DNA, 379 bp, Heterodera glycines
ggggcgaattgatcagcgtctgggccaaaaaagtgatcgcaatagaagatatggccaaaaaagtgatgacatcggaaagaaagagccaaaaagtgatcgctaaagaagacaggaccgacaattgattcggtcggagtcagctaatggcggcagagccaaaaaagatcggccagtgatttctccaagttataaacaattttcaaagaatgaggatgtattttagccaatataaaaattaaaataaataagctaatttttagtgtggagctttttcttttattttctttttaattattttttatttaaatcaatatttttaatatttgtaccaatttcctaatcattatttttagcctatcaaaacattaagtagaaaatg

SEQ ID NO: 114379 - DNA, 79 bp, Heterodera glycines
tgtgcgattttaataattttttaaatatttttatattttaatttgaaaatattcgcttttcttttttctccttcagatg

SEQ ID NO: 114380 - DNA, 144 bp, Heterodera glycines
tgtggcgatcaggaagatgcacattttatttcacactatttcaatgtttttgataaatatttgatttgagtgtggtttatcggttgtaattcctaaatattttgccacatgtacatatcatttcctcatttttgttttcagatg

SEQ ID NO: 114381 - DNA, 706 bp, Heterodera glycines
tgtccgaaaagtgttccaatttcttaaaaatggaaaaaataattaaatttacatttaaataaattaaataattaatgtgcctccagcatttgggcgcgcagcttccgcttttccatgtacagctcttgcgaaaagggcaactgctcagggtcaatttggtccgaatttgggcggtactcaaaactctgtgaaaaaatgggagaattttgtatcaaaatttgagtgaaaaaattccaccggcggttacggtaatcgtaatttaaaccactcccccgccaactacaaaaattaaaaatcgtaaaatcctaaaaatttatggggaaaaaatgagcaggactcaaaaacttaataaatctttaattgaaaatgataataagacttgtttttgtacagtaaacaggcaaatatatacagtatacgtataccgatcaaccgtaacccgtaattgcgggacgaaaacaactaccgtaagctcacggccccaatggtgggcggccatcgcccaactcatgcggcccgtgtacacctcgcgcaaaatgttggccaccaaccagcacgggatgttgcggctgacatcgctgaaacaggcagccaaatttaaattcaaaaatggttaaaaaatgccgaaatatttaaaattaattattttccaaccgtaaataattaaatttaattattattattatttaaaataataataattatg

SEQ ID NO: 114382 - DNA, 441 bp, Heterodera glycines
tttttctccagcaattgttgaaggggacgagccaaccgtacacaaattgatggattttcggcaccttatgcgcggtgattattatttttatgcaattaaattgcagtttttcgcgcaaattttcaatttttcataattatttactttaaataagtttattttaattttattcatttatttttgagattttcaaaatctaaattgacacttcgttcattaaattttcaaaaatttaaaattttagctaacaatttccaaatttcaactatttatcaaatgctctgtttcaagttcgaaaatctttcacaaaaaatgcctacaacttccaaatttctaatatttttccatccttttgaattttggaaattaaaattttccaaaaattgcgcaaggccattggccttcaaattttaattttcagctcgtcacccgcgcacaatg

SEQ ID NO: 114383 - DNA, 926 bp, Heterodera glycines
  unsure (1)..(926): unsure at all n locations
aagttacttcagtcttttntaaaataataattgcactcggcaggtaatatgtataaggaattaaaaaattgaaaatccggaagcgaacaagcggagtattttttatttatgcaatttatgatatttaaaatttttcattatttaaaaaaaagtgcaggtcaatgcggcggacctctatcaaaaatttaaaaaaatattaataaaattaaattaagcacaaaaacgaaaaccgctctataaagctgtaaaaaatgatgatatcatttttaaaataaatcttagcattaatttctgcaagtttataaatttttaacgataagtcttaataataatatgatttaaaaacaatatttttatttccacttttaaaacgaattttctattgtaaaaaataaagaaaagccaatgtatatgaaagaacgatggtcttcgtataaaaagttttgaacgaaaatgaaaaaattagaataaaaaaattatcaagaaagtttaacgaataacaatattaatataaagcgaagaaaaaattttaattgatgttcaaagcagaagtaatcaaatagaaacgatggaaattttcaaaataaatgtgcaaactttggcacatactaattacatttaaagaaaattaattcttttttataattaaattttcatacaaatgaattaatgttttattttacaaaattaatccacaaaaggcctaaattgacttatataaaaattaatggaaaagaaatattatgaagtaatataataacaaattttattgaatacatatttacattgatatcccaaaaaacaaactcaaataataattttaaaaaatcaaataaatttctattgcaagccttttcgaatttattatctttgctattaagatatgacttcatatgtttggaattttataaaaaataaaccaaatg

SEQ ID NO: 114384 - DNA, 132 bp, Heterodera glycines
aaaaaaattttaatttaacaattaggacgacaggcgctggagatcatccgcaaaacatggcgtaaccatttgaccccaaccgaaaccgcctcattggcggacaaggccagccaaagcagcgactccgccatg

SEQ ID NO: 114385 - DNA, 506 bp, Heterodera glycines
ttgtaaaatgccaaaatcgccattctattggctttttcttttcctttatcggaatgccattggcatcccctctgcttctcttcccttccctttcttccccctccccctaccaacgatggcatttcatttcaattatttgagattttctgtgcgctaaaacttgagatttaaaaagaagccaaaacatatgatcactcgaaaatggaaacccaaataaaagtatgtcaccaaatttcagactgccccttaggcgaaaaattcatcccttttatccctttattctccatcctccacagctctcttcctctctctctctctgtccgctctctctctctccctccctctctcctcactctctccctccctctctccttttcggtgctctaattaaccgcgataaaaacatccgaataaataaatagcttctgagataataaggtttatcataaaatttcatttaaaaataaaccctcaattattggtatgaacgatactttccaaacatg

SEQ ID NO: 114386 - DNA, 1003 bp, Heterodera glycines
aataaaagaatttttcataaaaataatttattagagcccggtagaatgattctggatcaaactgtaaattttcattgaaataatattttgaaattttacaggacccgtacgctttattctttgtaatttttagaccgtttttttattctaccaaaattgccttaataacgcaaaaattggataaagctttcacaaatgattaaagtgtttaacgcaaataaatcagaaaaataaaaaattctgaaagaaggaagtccgtcgatgctgacagagcaaatttttgccatatttattcattttttattgcaaatattcaattggaattatgttttttggaattcaattggatcctgaagaaaattaaatttcctgaacctgtaatagaatctgaactaggttcctgaacgtattttcagtaatttattgccattgatggatttttacgggataataaataaatgaccaactaactataaaaaaataaatttcttttttgccttcgtcgatacttttttcaaggttttcatttttcccatctctcagcatttaaaaaaatttcgtaattctccatatttatctgagtcggtaaacaatcttttgctcccatttgtcagctgggagaagcaccctttgctcagttactttttaatttcttttttctttttgtttgcttttgcttctcctaaagtctagaatgaatttcaaagaacactttgggctgtaggtacataagttgattgatttttcttctttttaaaatctcaaagcctttttaaatcgcagagactgcgtaatttgccatccataaatcacttaatatttggtttttacttaaaaaccataaaatggtttttacttaaaaaccataaaatggaaaaattttgacgaaaatttgcgttgctcaagagtaacaaaatttttaatgcttcttatcatatagcctaaatgttctctttaaccttcaaaatttcaaaaaatttttctgactttgaaacaagtcatg

SEQ ID NO: 114387 - DNA, 57 bp, Heterodera glycines
agggcagtgcgttaccctcctaccactttcctgaagacggaactgctggtccgcatg

SEQ ID NO: 114388 - DNA, 163 bp, Heterodera glycines
agtcgaaggtgtcgactgattagtgggtcagaaaagtcgaaaaaagtcgaaacgaaaccggaacatttggtgatcatttcgaaagaatgtaccactcgcgcaacgcatcagcaatgtaaatttaaccgaattgaaaaattgaattcatttttcagaggcaatg

SEQ ID NO: 114389 - DNA, 297 bp, Heterodera glycines
  unsure (1)..(297): unsure at all n locations
caatcgctttttggaattntaatgagtaatcagggaccgtaaaatgacattctatgcttctcttgtntgatacacggaaagaaataatagttagtcctttngtgaatttntagaaattttatccgtcaaatcgcttttggaattttaatgagtaaatcaggaaccgtaaatgaattctctggttctcttgtggatacacgggaagaaataatagttagtccttttgtgaaattttagaaattctatccgtcaaatcggcttttggaattttaatgagtaaatcagtaaccgtaaatg

SEQ ID NO: 114390 - DNA, 816 bp, Heterodera glycines
aattaaattttttgaaattattgaattaaatttaaaaaatattttttaattaaataattattatcagaaagttaatttcttttaattgaattttctaaaaaggttaattaaattctgtgcaatattttaaaattaaatggaaaaagaataaaaaattattgaaataattttaatttatttatattattattaaataatttaatttttgtttattattatttacctgaaatgcatattgtactcgctgagtgctttcacggtgacggagcccggaattgaaaaaatgataagcaaaatggagaacagtggcagaattgaacagaattccttaaacaataaatgaaacaatgttttttaaatagctaattattgacagaaatattttgaaggggcttaatgaacttgaaaataatgcttataatatgaatattgttagtccggaacgggatcccgaccgagattggtcccggaacaccggctattcgtgtcccgttccaaattaaatccattatcccatcccgacccagaatttttgatcacgcttccagttttcctcctaaattccggaaccgtctaaaacctatttaaagttttaatgcggcataattaaggacatttttcatcttatttaattaaaaaaatttattaatattattaatttctaaatttaaaatcaaatctattaaaaaaattttaattgagcgaagaatttgatttaaggacgctgcttttaaatcaaggacaaattgccgtcctggaaattaatttaaaaaatataattgcacaccaaataaaagtgtgctcaacgtgacaatg

SEQ ID NO: 114391 - DNA, 273 bp, Heterodera glycines
aaagacaaatgatacacaaaaatggacaaaggagcttcgataattagtaaaaaaagagacaaattgtcaataagaaatggacaaatcaaaaaagatgacgaattgtcatgtgcttagactgttgaagcggaggagcacacccatcagcatcgaagacggtggaacaacaacgtcttgcagcaacaacagaagcggacggcacagccgaatgacgcggcgcggggcgcgacggcaaacgctggcggaggagggggcgggtggggcattgacatg

SEQ ID NO: 114392 - DNA, 565 bp, Heterodera glycines
  unsure (1)..(565): unsure at all n locations
aaaaaattaaaanttagattttcggaaatgtataaatttctcatttctaagccggaattgcgcagaaaaatagttggcggtgagtaatagtattagattgctcaaatgttgggaaaccatttctggccagtggccacaattcgaaaatttgacaagcaagcggtgcagaaaaagaagcgatgaaataacaacgaacgaagtgaaaaacaaaatcagtaatatgtaaaaggaatggggggggctgcaaaaaagaaatgggattattgtcggacgcgatgaatccccatacctttcaattaaacggataatcattgatgaaaatttctgttctgttgaatatagttatcagttatcactttcatattaagtaaagtcatcaactgattgcactgcattaattaggtaggcggtttatttagtattagtcatttcattggaactgtttttaatgacaatatgaatagcgacaataaataagaaatacatacctaatctaaacaaatttcagcattgaccgacaatttgtaaattttttcctcgaacccactttaagagaacggcaatg

SEQ ID NO: 114393 - DNA, 1003 bp, Heterodera glycines
cctattcatgtatagggcgaggatttttagtggcaaaaaaccccaaaataattaactaaatagtgacaaaaaaatggcaaaatagtgacaaaaataatgacgaaacgccaatagtgacaaataattattttagtggccaacttccaaaataattctttctagtgatgaatagtggcactaaaaacgaaaattttttgaaaaagaatgtgtttttcgtgcatttctcatcaaaataaagccgcagaaaaatagttaaaaaactagaaatcctcgccctattcatgtgaagtcaaaatttcggtaatactctagtttgtcgcccccccctttttgtgaaaattgttttttgtttttaaaagtcatgaaaacatgtttccaatggtttttggggttgctcatcacgaatccggcatctgtttcgaccaattccgaatcccggacccagttcgaacaaaaagcagaaaactcaaatttttcgaatttccatttttagtctaaaaatggtttaaatgatcttttattgaagcactaatgacttaacttcgttttcatgtatttaaacaaagtttgaaccaagaatgtgagattcaaaaaattttaatttttgactttttgttcgaatttgggtccagggtttaagaattggtcgaaatggatgccggattcgtgttcagcgaccccgaaaacacttagaaacatgttttcatgacttttgaaaacaaacaaaaaaattctccgaaaaatgggggcaaccatctacctaaactattaccccaaccccattttaccaaaaaaggtcgcgccacacactagcgcaggtttccgagccccaatcttggcacttacatcagctaatcctaatatgctatggctataacaaaagtattggatcggacaaatttaggaaaattatagttaactattattttttcttttggtttacatttacatatcaaatttaattttttcagctttttccaaattattttcattcaacaaaatg

SEQ ID NO: 114394 - DNA, 577 bp, Heterodera glycines
acacatttaaaaggacgaaagtttggggaaaacaacagactccctcaaaataaacactaaaagtaacattatgacaaatcgaatcaattcaatattcaattgaaaattgaaaatcggaaaaaattagcacaaacttagagatttatttgatcaatcacacaattcacaaaagtatttaatttgcgaaacatacttataaaaaaggcattgaataattaaaggaaaaaatttcatgccaattatgaaatcattttccgtttgatatgcaatgaatgccaaatttgtctggcaatgccatcggcaccctcccccctccctccccatcccttttcctccccctctcatcatccatcatctccgttctctctttataatccatcatttcccccactcactcattcgctgtcattcgttcggcatttctccccccccgccccaaatgaaatgcttcttcaaattggcctcctccccattttgtcctatgcttttcattattttcattatttggttgtagtaccacttccgtgccccatatttcgtccgcttcttctccgatgcggaagccttcgctgaaatg

SEQ ID NO: 114395 - DNA, 287 bp, Heterodera glycines
atgaatttatcttagagtaattaattaatatttactctttttcaattaattgctaattaattaattaactgtctaagattgttttgaatttaggatagttaattaaataattaatgactattttaaagtgattttcggtttaattaaaactagggttgttattaattaattgctaataattagtagttatacgtctcagataataaacctcagataattatttaatattaattaattaattaccctctctcagatggttgctctgcctgttgttgcctttgattatg

SEQ ID NO: 114396 - DNA, 686 bp, Heterodera glycines
atgcaaaaactttttaaaaacagatttctttaagaaaattcttctcatttttaagaaatctaataaaatccatgttttttcaaaaaaggaataaattttttaaataattttagttttactattcttgctgatttttgtcaagtttaaataagttgttttttttcaaaacaggtttctttaattttttttttactcatttttagcatttttgaattagaaaatttaaaaaatccatctttttataaatgtgaaaaaattagagtgccacgggaccgggacctggtagcggacaactgagtacaactgagtgccaaggtcccggttttgaccgggaccgggactagtcccggttttttcccggttttcccagccaaaaattcccggtttttcaacccgaaaaggtcccggtcccgggtttgcccaaaattcccggtcccgtggcactctagaaaaaatcataaaataattttattttacaattccttacaaatattttcttagtaaaataaattgactgttttttcaaataggatcattgctcatttgtttgtgagtgaaaggcgcggaaaaactgaaatttttgaatttcctatctctgaaattttccaaatgtccctaaacaacagaattgtgcggatttggtgcaaagattagaccaatggacagaacaacagcttggacccatg

SEQ ID NO: 114397 - DNA, 481 bp, Heterodera glycines
cgttggatttttgctccccataaatgtttgagtactccaaacggacacttgaaaaaatcgatttttttgttttcggggcagtccccccgaaccgatgcgcccagatttatggggagaccgaatccttcgggaatagcttccttatagcctgtactttaattctgcgttggatttttgctccccataattgtttgagtaccccaaacggacactagaaaaaatcgatttttttgttttcggggcagtccctccgagccgatgcgcccagatttatggggagtccgaatctttccggaatacattccctataacctgtactttaatcatgcgaagcatttttgctcatacataatagtttgagtactgcattacgatacacaagaaataatagcttaaaacatgctggcgccgaaacgccagcgccgaaacgccggcgccgaaacacagaggacccctttccattgccggcaaaaaaataatg

SEQ ID NO: 114398 - DNA, 125 bp, Heterodera glycines
aggggttttcgaggtcgctgatcacgaatccgggctctttcagcgctaacgttcgctacatgagctgcacagggacaacaaatttactgtcatactgtatcaataataccctcattggcaagatg

SEQ ID NO: 114399 - DNA, 341 bp, Heterodera glycines
gttttacacgactttgttaaaatttttaaaaatgaatgcgcacaaaaaacagacaaaaatttttgattggaggttacgccgttagtttttttaaaatttaatcgggcaaggatgagaatccgaaaaaaacgcagggtttttttttaagattttgcatttgacgctgccattgcttttttgtctttcattttctttccttttatatcttttattttttcgtctttcgttttctgtctttgttttgttgcattttccctgtgccattttaccatataaaagcaccgccaattcctctctttccctccattcacttctctttcattaacagtgccgctgaaatg

SEQ ID NO: 114400 - DNA, 78 bp, Heterodera glycines
agtgattgccccgaaattgaatgattgaccaaatttatcacaggacgagtgccgaaaccgggccaaaattcgccaatg

SEQ ID NO: 114401 - DNA, 397 bp, Heterodera glycines
ccctgtgagtaagtgttttcactagggtcgcgacttttagtgacgaaaaatcccaaaatagttaactaaaatagtgacgaaaaagtgccaaaaaagtgacaaaatagtgaaaaaagtccgaaatagtgacaaatagtgacataattttcagccaaaaattgagcaaaaataatttttattcactgattgcagttgcaaatgagtaggacttagtgtcaaattatcgtgccaaaattttgaattgatattagtctatgttttttgtttttcttcttctgatggcggattcaggaaacatcctagcacggttgcaatacttttattttaagtgtctgccgataaattaagggaattacaaaattcccaaaaaacgctgtcagaaaaggtcaaagcaatg

SEQ ID NO: 114402 - DNA, 1003 bp, Heterodera glycines
  unsure (1)..(1003): unsure at all n locations
aatacccaaaagaaccccaaaaagtcagagttttcaaatatttgtgaaaattttcagaatgagaattgtttaataattatttcataatttattttattgcctcgttaaaaacatctttaggaatataattatcccactaattattgccttctttttgcttttcgccaccatttttctttgtctaaaattgattgataattatttgcctcctcgtctccccttaaaaaaagtggtcgtccgcgtgcactcttcgtcatttatcatcaaattaatctgtgactgaccgaaatgaaatatttttatttcttttcttaattaaatggttgatgtaatccaccaatgattttcgtacatatttaatacataattttctttaacttttctatatttattaatatctaattttgtaataaaatattgactttaatgcttttctaaatatcacaccttacctttttagtatttgacaaacaaaaattgtcataattttttaataaattcgctatttaaatataaaataacatttttataatatttaatgtattaaatttaatattaatatttttggaaatagacaaaatttaaatgtgaattttaaatttttggtgacgtcattaaacaattatttttccaataaaaacatcaacaaaacaatacttttctgtgtggaaaattgtttttggcatcggcatgaaataatttatgcctgaataagcccttccttntaagccactcaaaagcnctcttattgagttccctccccaatgagaaggagcacttgtcaaacaaacgaaaaatgcccaattttcaaatatttcattattttcagtctaaaatatttaaaatttaattaagactattttaaataatttttaataaacaattgtttttttttgattttttaaataaaattctgactacaaagctagttttttaaattaatttccccttaattaattcttcccattttaagtgtccgacaatttaaaaaaaatccaaaatg

SEQ ID NO: 114403 - DNA, 1003 bp, Heterodera glycines
ttttaattttcctcttttaaaagcaaaagactttagcatccaacattttgaaaaaagaaacaatcaccttgaatcacttttcatttcatttttagagggatataaattaagactaatggtcaactcccctacacggggaaacaatttattagatttattatttacaaacaacgaaaatctattgaataatgttatagttgaacccccatttggtaatagtgaccataatgcaattcaattcagcataaatttacaggttaatagtaatgcttcaaaaaaattttataatttcaaaaaagcaaattatttgaaaataaatgccatactctcaatggttgattggaatttatttttttctgattgcccggacatagagcttatttaccaaaaatttatgtttttcctaaataatttgataaggaattatgttcccatacaaacaacgaaaaaagttgaaaaactaccagaacatattttgaaactaatcatctatcgtaaacagctttggaaggatattcacaaagaccatataaaaataaaattcttagaagtttcgaaaaaatcgatgtagaaataaataaattttataaaaatcgcgaaataagtttttgcggactttggactctaaaaaacgtttccaatttataaattctttccttaagactaaaaatactatgatacctgcatttactgataaaaatagtctgattctcttctcagataaggaaaagtcgaatgcattagcgcaacaatttttttccgtttttacagatcaaaatttagaacaatttcaatgcatagaaaatcctgaaaaaaatatcgaatattttaacataactccatatgaaatttatttttctctttccaagctttcaaattctaacaacactagtattgatggaattcccaatatttttttgaaaaattgtaaagaaaatttagtccgacctcttttccatatttttagtttctcatttatgactgctcaaattccagaaatatg

SEQ ID NO: 114404 - DNA, 51 bp, Heterodera glycines
cgtaaaatttaaaagcattcccaatttttagcatcctttccttagagcatg

SEQ ID NO: 114405 - DNA, 417 bp, Heterodera glycines
  unsure (1)..(417): unsure at all n locations
aaaactggttgaaaacggcgtccacgacgtttgacgtaattggtgtatggggcagtatgatgtcacctggtctaaagtcagaaaagaaattatgacacctaccttattngcagcgccaagtgtgttttgtccatctaaaattgcttcctcgatcgaatggtgcacacatgagcgtagctccgcagcggggtcagcacatttgtcaatttcctcaatgacgaacttggattttgagcgcaccagttgatattttttactttttgaagtgaggttatcaattttacgaatgcatttatttggttgggattttttggggaaggaggaggaagaattttgagagagggaaaaacgtttcattttatttgaataatatatgaataaaaactttatgatttatagatgatataagataatatg

SEQ ID NO: 114406 - DNA, 61 bp, Heterodera glycines
ggttgtttggctgactgatcagccaaataatttgttatttcagttcatgaggaggataatg

SEQ ID NO: 114407 - DNA, 333 bp, Heterodera glycines
ccgatgtgtaggagaatacagcgttcctaaagaagctcgcttccaccagacccgaacaaaagaagaacgaattaatcgaaaacgccacagctgaccaaattttaggaatcgttgaaatttgtgcaaatatattgagttttagttttaaactaacgaacaaacaaaaagaaagttgtcacaattcgccgatttctatagagaaattgcaaaatcacgttcagagaaaacggcaagaaaaaggatacagcagggggagtggtatagcactgggggctatcttgatcccggtactgagtgtattagcccaacatttattagaaaaactaactcatg

SEQ ID NO: 114408 - DNA, 726 bp, Heterodera glycines
ttttagcgtcccattcctaatggggtcaaattgccaaaagaatttgacgcgcgcaaaaagtggccggaatgtgcggatttcatcggaatggtaactgaccaaggtaaggaaaagaaatctattgactatataaattgacaaaaatttctatcatatttttatataaattcttggtgaacgcagaaaaaataataaatttccgcgaaaagttttgtttgggctttatttaattgtctaattttaagacttcaacctaaaaaatgtttacaataagcttgtttttcatagtcaaccaacttcgataaagattggtaaacatcgatagcccaaggcttctcaataaggcttcctagtttcagaaatttcatcatttaaaaaaaaaatatcgccataagaatacaaaaaaaaatcggatgcttcacagagttatcaaaattttgggttaaaatattcagacattagtctaccatttaaaggtgcttgtaattcatgcgcgtccgtttccgctgcatcggtactcaccgaccgtttttgcattgaacgcctcaaaaaaggcatacgcacctattccaattacccatcttcgtacgtatctgcccaagacacgttggaatcgcaaaattgcaagtacttcaaagtagcaaaagttaacattaataaagcgtaattaaaaaatttattactttttaaagtagcgacaaagagggcgcataattcaaaacaatg

SEQ ID NO: 114409 - DNA, 183 bp, Heterodera glycines
ttttgacaaaaatttgcttacaaatcacatgagagcataaaatcttcaatcacttggctgacttttttttaaaaagattcagaatgccataatgccaaatttaattaaaaatatggaattgcttaaagcatttaagaaataaaaaaataacgaaaaatacaaatattacttcaatttcaaatg

SEQ ID NO: 114410 - DNA, 101 bp, Heterodera glycines
cccccccccccctcgtcagcccctttacagccataaattttaatttaatttatttggttaaatatcttttttaaatattttttcaaattccagttgaaatg

SEQ ID NO: 114411 - DNA, 99 bp, Heterodera glycines
tcaaaaaaatccgaaaaagaaaatgtaaaaacagcataattttcaaaaaattttgcaaagctgataactatataataaaaatagaattgaaaagagatg

SEQ ID NO: 114412 - DNA, 504 bp, Heterodera glycines
taggcaaacagcggcaactgcaacacgtcagtgttcgatcaatgccggcgcgttaaaaatgtgtcacacaaagaaagagaggaagtgaccccagtcatcagccagtcaattcctaaccgttgtttttgtcaccttttggcgaatgtactttttgtgtgccaccattttttggataatcctaatgcctgatcaaaatattttgctaaaaaacgcattttgccaagcaattttggggaatttcaaaattgttcagaaatggggcaactgtggacacgaaaagagacaatatcaattctttgtcgtataaatgtaatttcttcaccttatgcctttccactttttcttggaattctcccaacttttatcgcaagttttgacgttaaacatacaaaaaatgtgcttcatgtgttttcaattatggatttaacgggtttaccaactcaaattgataaatgagaaaaatatgttgacttttaattaattcccgtcacactgcacagaatg

SEQ ID NO: 114413 - DNA, 1003 bp, Heterodera glycines
attcttaattagatattaggccaatggcaagaaaccaaaaaatgaggaaaatgaacaaaattgatggctcagttggttaaattcgcattttcggagcactgggttcaaatactacataaaaataaaaaataaataatttgtatataagaaagctaaaaaatttataaaataattttttcgactaaacgaatgtaggatactttttctttagtgaaaataagcttaaaacaatcaattgtaaaggttgggaaattaatagaaagtaaacaaagctggaaatgggccctttgtctctgttttaaattgcatttaattgaaaaaacgatattttattattccatatccaagtgattgccaaaagaagacagattccagaaaagctagaaaactttgcttaattctaatggaaaaattcttttaacggtgtttccgattgtaaagcctgaaacgcatggacaaaaagcacaaaagaactccttaacaaaaaatattaaaaagttatatttatttatttatttttaattaaatttttttatcattttattatattttacttttgtattgactttgaggcaaataatttgtgtgattttattcatatttatttgtgactatggcaacgaaatatttccggaattttttattttttcaaaaaatatttatttttaaaaaataaaaataattacttttcaattgaaacacatttaaatgtttaataaacacgaaaaaataataaagaaaattacttacctcacccggatgcgtacttaacttcccccccccccccctcagaatgatgcttcagaaaggcgccgccaaatttttttttttgaaattatcctttttttaacaggttacagaatggttcaaaaaatgaccaaattttgccacatatcttatattttcttgataaaatagtgtcataatgcataaataatcgcccagtctccaattacccccccccccccacctttctgaggagattgaaaaataatcccccatg

SEQ ID NO: 114414 - DNA, 1003 bp, Heterodera glycines
gacctaaataggggcagaaaatcgcgaaaaatcgtaaaagaggggcgaaaatctgtgctttttctcaatgatagagacatgaaaatacctacataggtagtacgccaaaatagggttgcgaccccgacgtgaagaggaaaactatagagagagagagatgagaaaggaagcgagaaagtaaaccgaattgatatattcagaaagaaaggaggaatgggagatagtgaaagaaaaagagagataagatgagtgagagcgcagagagagagagagagaggagaaagagagtgaaaaaagagcagagagagagagagggccgccgagagaaagagggagagagaacagtgagagagagagagagagaatagtaagtcaattgagggtaaaagagagagagattagagagagaacagtaagagagagagagagagagagcaaagaagagagagagaaagcagagaagatagagagaacagtaagagagagagagaaagcagagaagagagagtgaaaaagagagagagacagagagcagagaagagagagcaaagcagagaagagagagtgaaagattattaaaataaaatggcagccataatcaagaatacagcaacaaagttaaaaattgcgaaaatggatgtaaattttataatgaaaatatatttcactattttttacagctttattgtacttaaattgaccttaaccggccgcaactattattttttcaaaatttcgggtcctcaaaagtcgggtcctcaaatgtcgggaatatccgcaaatgtcgggtcctcaaatatcaaatcctcaaatgtcgggtcctcaaaagtcgggtcctcaaatgtcgcaccacgatatttattttacccagtgcagcagttatgtactggttgttgttttgtttttttattcgttaattaacgcctcccctcgattcgtcaactcaacgattcgtcaactcaacgattcgtcaactcgacgattcgtcaactcagccaaaatg

SEQ ID NO: 114415 - DNA, 60 bp, Heterodera glycines
aaaattgaatgaatgcttctcaatgaggagcattcattgttggttttcagctcgaacatg

SEQ ID NO: 114416 - DNA, 294 bp, Heterodera glycines
atttgattgaggtcacgctaatatattcataagtgcatttattcaaatgcatttcatttatattatatttttatggtttcaaaatttatttttattaaaatatttctctaaaaaaatttttgttttataatttctattaatagcaaaaaattattaaacgacaaattcccatttatttatgaaatgatgataaccatagattgggttaacaaataatgaggggtttaggttaaatttataattgctttaatataatatttaaaaaaaatctaacttttagaaggccgagaaatg

SEQ ID NO: 114417 - DNA, 177 bp, Heterodera glycines
ggtgagggcggacattttcacgctttgattcatgcaaaaaaaaagggtgggcatcgactccagcccctcgcattatttacattttggttttcaaactgctttattgtttaaggtcgtcttcatgcaagcgaactcactcattctaaaagcgaatggagcgaaggaactttcccaatg

SEQ ID NO: 114418 - DNA, 336 bp, Heterodera glycines
cgcagcaattggcgcccgcgccctccggcgccccgcatgttgggttgaacgtgttgctcggcgggcctggacggctccaacccgtccctgctccactcgctttcgctgctcgctggaggggtgggtgcaacggcaccgacccccgggggctcgatcggccgtttggccaatttctaatgcgttttccctttgtgctgcgcttcagcgccaacaggcggcaccggcaatgcgcttctgaccgcgttggccacccaacttttgctgcctcagcagcagcagcaacagcaaattgtgcagccatcagccaatcatttgaccgccgctttgctgcaaatg

SEQ ID NO: 114419 - DNA, 943 bp, Heterodera glycines
tttttcgaaaaattaaataggtctagacgattttcaaaagataaaatttcaattctcctgaaagttcaaatctgattgactcctttaaatgcaaacgtaacaatctaatttatatatttaagcacacagcgagcaatgggaatttttattgggaaatagccctgagtcttgacgagggtcgtgagaaagtgggcctaaagttgcgcgagatttgtcacaacgtgctacatgttttttcgttccttttcattcagtttgaggaaagtgaacgatgggggagagcagaaggaagagtgggggcggggggggaaataaaatgaggggcagaggcggccgaagagttttctctttctttgctttcccacctccaaatagagagaaagagagatagagagagagagaaaggaaaagagagacagtgggaaaataaggggaagaaagtggagggcccgtctcgcgatggaaaaaacgctcagcatttgttacgcatgaagggcgaatatgagaaacgcaccaattccgagggatggaccgatgggtggggcgatgcttaaatcgagggaccgattttcaatgcattttgtgctaggaaaagagacaggggaaaaagagaaaaaggaaatttgtagtgaaagagaaaaaggcagaaataaatagtggataacgcacgaattccggggatagacacgagcaacgcacaaagaagcccattttgaaagtgggcaagggaccgttaaacattgacaacgacagaaagtgcgagagatgaatgagtcagcggtggaagaaaatgcgaaaatgcaatgagacgcaccaattccagggatgggtgagcagtggaacgaaatagcgttaattttttggagagtctgtggcggaacaaagtgcaccgatttattggaggtgagagaaaaacagggaatgtctcgcattgccaaacatg

SEQ ID NO: 114420 - DNA, 83 bp, Heterodera glycines
ttaggccaaaaagttttgtttatgtgagggtaaaaaggggaaaagagctgctaaaactgacaaactttggcaattccgaaatg

SEQ ID NO: 114421 - DNA, 386 bp, Heterodera glycines
tttaggaaattagcggtgatcaaatcaaaaatggtgcagttcaaaattaattgacaccaaaaagtgattgaattgtaatgttcaagaatttgaaaatttaagtgatctgtagtgaaaagtattttaaaaaataattccaagaaagcctgatcaaatgaaaaattttttttcttattaaaatctgataagtaaatttatatattcaacaaagtgattgagctaattgacgttgaattcattattttttttaattaaattcaaaaatcgtttaaaaagatattgcattaaatcaaatcaaattaaattaattttttttttaattaccgcttggccttgggatccattacggcaaaacgtgtgttcaagacgggtgtccacaggccatg

SEQ ID NO: 114422 - DNA, 142 bp, Heterodera glycines
ttcattccatccacttattattcgtcctcctccaccgccacttaaatcgtcagtttatttaggtaattaattgttttgttatgtgcattttcattgtgctaattgccccccccccgtttttcagcgaatggccaacgcaatg

SEQ ID NO: 114423 - DNA, 459 bp, Heterodera glycines
aaaaacctgttcttttatttattttttttaatttaaagaataaaatacaggtgattgtttaggaatgcggtgactcattcatttagacaaaacgaaaactaattgatgaatcagtttgattcttgctgctattgcaattgatgccctttcactgatgattggaaattgttttttattcgtaaacagcaaaagtcgagaccgtttttcatttaaaaacatgaatgaaacatttgtattaatttcgatcattgagaaatttaatttccttcaaatttcgcattttttttatttttagttcttttcccactcccttatttagactttagcctttttgttttcaatcgtattttgttatattaaaaccggcttattatggagaatggcactcttaggtcaatgtatagtgcaacctccgttgatgaccggagccaattttttgaccgaactgccaacataatg

SEQ ID NO: 114424 - DNA, 141 bp, Heterodera glycines
  unsure (1)..(141): unsure at all n locations
ttataatnagggttcaattaatatattgtatatttcataaattaaattccgaaaaagtttgaatttagttcaaaaattttaaaatttgattaaattgtttaaaatatttttaaaaatatttaattaattttaaaggacatg

SEQ ID NO: 114425 - DNA, 581 bp, Heterodera glycines
  unsure (1)..(581): unsure at all n locations
ataaactggctgtataacaaaataatntcgggaccggcagtgccaaaaaaggcgctgccggaaaaaattttgaaaatttgggttttttaataagatttacaaatttttgggccaagcaatgccggaaggcagcggcaggtgaattttaaaattcagctctattttcgaacgggttttaacaacaaaaatttttgaatttccgataatttttgttattcttcgatatttggtcaaaaatattttgaaagatattaaattttcatgatttcgtcaaagaaaattgaattttttaatttcaacgaaaagaaaattaaaattaaaaaaattgggttaatttgttaacatattatgccaaggatgatcgtttttatgggcatttttgtttaacattactttatttaataaaaatttggcaaaatgtttaaaaaattcaaattttttataaattttttttgccttttctccaacgaaaatgccattcttaggagtgtatatttaacccggccccaagtttgagttaaaatcggggtcggggtttgtcggggtcggaagcgtcggggtcgggattaacccgaaaaatg

SEQ ID NO: 114426 - DNA, 1003 bp, Heterodera glycines
tggtttggcccccgaggggagggcgaaaagccgcgcaaaattcgtccaacaagaaaacttttctgaaggaatgcttcatcccccaggccgcccatcgcataggacacaaaaatgaaaagccaagccgataagtgctttatggctgcgcaattttttatgtgttggtcaaccaacaaaaccaccgggagcattttttgtgtgtgtaaacaccgcgcgcgcttgatcagtttaacgaaaaaatgcgctgcttaagcattcatttttttggaaaattgttttttcaaaaacaaaaaaaaatatctctacttgttttttaggcatatgacacgaccctctcctccccaaaaaaatagggaaaatatttgcttaaaatttgctttttcgttaagcttgttttgtatttattatctgtgttatagggctattaaaagattaggcctttctttatgttgcccggcttaaaccttcaaagggtagagctcaaaatttttgtagaattcttttttaaaaaaaaccattaatacaacaacaagcttaatgtaccttaaatttgggttcttccccgaccgaattttaattggatgcgagtgttttttaaatgagttgctatgtaattgtaagttttttttattttagaaaaatttctatcattttttttcaactttttatgcaaatttcgtctccctgacgaagttgttgtccccgacttcctccatgatccccgaggagttgttctccccggggatcgggcagcaaccttactgaaaattttcaacctcgggcatcacttactcactcattttgtatatataataattttttcaccttttaaaattttgatcacatctcaacccattaccgttaaatattgatcaccaactgatcagagtttttgtctcccattttctcagggctaaagcgagagacaattaattgattgcttcgtccattgcgagagagagcacttcaagacgagagcgtaacagacgaacaaacaaaaatg

SEQ ID NO: 114427 - DNA, 220 bp, Heterodera glycines
acctaataaccttaattatcccttattgaacaaaaaaaaatgtcggcttttagatacgcaatatccgccgcgttttattaacaccttgaatgatctgcatgtcaaaaatggtgaaagagttgtgttaaatttactgttgcgctcttcgcttgaacccaaagttcgcttactaataaatcttttgtgttagcccagtaaaagccgaaaatctcaatagatg

SEQ ID NO: 114428 - DNA, 191 bp, Heterodera glycines
ttatcaccatttttgagaagtgagttagaaatgataaacttcacgattcaaaccagttttcggtgctctaattaaccgcgataaaaacatccgaatcaattaaatagcttctgagataataaggtttatcataaaatttcatttaaaaataaaccctcaattattggtatgaacgatactttccaaacatg

SEQ ID NO: 114429 - DNA, 257 bp, Heterodera glycines
tactcagattttcaaaaaaaaaagtttaggtttttggctataactttttttttgcatccaaatccaacactgttggtatcattcgaaagctcttagatgctctattagctttacaaaaaacaaaaagattttttagcctgggaaaaattttattatgaaaaaattaaataatttcgacttttcgcaattttcatgtataacttttttggtaattgtctgattgcgaagcgatagcttagaaattgcttcaaaacatg

SEQ ID NO: 114430 - DNA, 132 bp, Heterodera glycines
gctgaaaaacaattataaacttaattaattattaatttttgctacttttcttttttgtcgtcaatgggtcgccgtcgtcgtccttttttgacgtgtcgttttttggcgtagtcccaacacatccaaagaatg

SEQ ID NO: 114431 - DNA, 684 bp, Heterodera glycines
gatcactcaattgcaaattcaataactcactataacactgccaaattaaagtgatcactcaattgcaaattcaataattcactttaactttgccaaattaaagtgatcactcaattgccaattcaataattcactataattctgtcaaattaaagtgatcacttaattgccaattcaataattcactataattatgtcaaattgaagtaatacacccaaattgccaattcaataattcactataattatgtcaaattgaagtaatacacccaaattgccaattcaataattcactagatcactcaattgcaaattcaataactcactataacactgccaaattaaagtgatcactcaattgccaattcaataattcactataattctgtcaaattaaagtgatcacttaattgccaattcaataattgacaaaaattttgccaaagtgatcacgcaattgccaattcaataattgacaaaaattttgccaaagtgatcacgcaattgccaattcaataattcactataattatgtcaaattgaagtaatacacccaaattgccaattcaataactcactataacactgccccataaaatgggcccctgatagtgatgaatcaacagattccacatttattcattccttactactttatcctattccttcaaatttcctacaatg

SEQ ID NO: 114432 - DNA, 682 bp, Heterodera glycines
ttttaaaaaaatatttttacaaatataatgattagggttgtaaattatatggactaaaaaacgcgaaatatggacattaaatatggactaaaaaagcccgaaatatggactaaaaaggccaaaaatggccaaatatggaccaaaatatggataaaaaatgccaaaatatatgttgtaaacccccaaaaatcccaaaaaaaggtgtgcatatttaatatttgcttaaataaacctaaaaagtacaataaacaaccaaaaaatggggtttaaaacataaaaatgcatattttttattgttgttcgttgtatcaaaaacacctccaagtttgccaaatttcgaaaaaattctcattaaaaaaaaagaaatgttcgcaaaaaaatgacgaaaatatttattgaaaatgccaaaatgacgacgaaaactcaaatttttcgtgttttgtggggtgtaatttttaaaaatttccaaaaagttgatctttaggggtgtatttttcgtttttttttcatttttcttgtgaaaatttccaaaaaatggccaaaatatggactaaaaacccaaaaatggcgaaatatggatttattcccgaaaacccccaaaatatggatttatatggactaaaaaccttcaccaaatcaaaaaaaaaatgctatttttaagcccctttcttcatagcatatg

SEQ ID NO: 114433 - DNA, 262 bp, Heterodera glycines
attaattaattagtctaaaggaatggcacttgaaagattaaacagcaatgaaatgccaaaaaaaaattgataaataagtgatcagtaaagcataaatgccaaattatcatttgtagaagcaggcatttaaaaagcaaaagtgagaaatgccaaaaaagtaaaacaaaaaattaacgaacattttttcatgtaaatacaaatttgaaaaatgtaagggagacaaatagagaagtgaaaagtgatcagtgaaaattccaaaatg

SEQ ID NO: 114434 - DNA, 78 bp, Heterodera glycines
ttcaaaattgtcattccttcaaaattgtcattccttcaaaattgtcatctcctctcctaatcgatggcaaacagaatg

SEQ ID NO: 114435 - DNA, 97 bp, Heterodera glycines
atttttatcaaaatttacaaaaggcctatgttataaccctgcgaaaggtatcgtccttttaaaaccatatttaacattacctatcgaaataattatg

SEQ ID NO: 114436 - DNA, 1003 bp, Heterodera glycines
aattgaagcaatcaatgccgtaagacttttccattactttttaccatttatatattaagattttaagttattttacttaaattagaaataattttaatgaatgtatatttaattatagcaaaaaaaaataaaacaaataaatgtcattcaaattaaaaaaaaataaaaattttcttcatattatatgcaaaaactaaaactgcaataactcgtcataaaatttattagtttttgtttaaataaaaattatattaaatgaaattgaaatctaaagaaagaaccttttaatcgattatgcggtctacgacgagagaagaaagttaaaattacttaggtttaaatttccttattttatttttattccaaacgaatttctcattgttgaataaaaataaagagaatttttttaattataaaaaattaatttcattgaaactattaatatacacgtaaattaataaaacagaacaaaatgttaaagttgttgatttagatgttaaaataaaacaattatattcaatgaaaattaattggaaattcattataataaattcaaattaaaaaaataaaatatctagacaatagtaaataagaaaaataaggcattaataatctaataattttatttgagataatgcccaagcaatttgctatttaacaaaataaattatttattcaacatttgaaatagaaatttttaggacaatgcagaaatattaataaaaacaaaattattgtatgaattgaatttgaaaaaattaataaattaaaagcgcaaagtttgtattaatttaaaaatcctacgctcaaatacaaaaagataacaaatgattggtttcttctctctgacaatattagaaattaaaaatattcctaattattttgaaaataatgtaaagtcatttaatatgactcaaagtgaagatcacccgaaagatatgcgataaaccaagtaaaaataatcatttaaataaaataacatattattaattatgccagaatg

SEQ ID NO: 114437 - DNA, 93 bp, Heterodera glycines
ggcggtacatcatccgccaaagcaaatgttgacgagtggcgggccaatgtacgaattttgagtccggaaggcgacgggcgggcaccgacaatg

SEQ ID NO: 114438 - DNA, 1003 bp, Heterodera glycines
ttggggttttgaactctctctgaaaaaattctaaaataattttttctatggtaaaattgacgctgctcacgaatctggcaaaaagattgtctcttttaatctctgactaacatctgcaatgacttctaaccacttatacaatagactaatctttgaacagcagcgtcgctgattttatgcctttttcaatgggacttaattttgtattgtcatcgaaatggatccgatttaatctaattaatgcgctttttaaagttttgttttttggatttgtcttgttattttcttttttccatcattagacgattgtcgcaagattgagcatgcgacagcggaggatcgcatgcgaatgcataaccccgaaccggcacgagcagcacaggcaattagcaattacatggacgagccggaaagtgttctgttcgttgcaatgtcagacaaaatgaatttataaatggcaataaatattatgcaaaaatgaagttaaattttaattgattattttggcagtcatttaaaatttaatttaaaaatttagtttttttatcttaacagaacagcatatgatggcagtgccaatgtgattgcgtgttgtcggttgaaattgtgccaaaatggcaacacaataaacggaggaccatttgcgcagattggcccttttgcaacattaataggctggtttcgttgatttgattgtttcaattgaagataattatttaattacactaactaatataaattataaaaatttgtgaagggattttaggtgctaaaaagtaaaaaggtacctaaaaagagctaagaaaacgccaaacagatgctaagaaagtattcacatttttttaattaaatgaattcctgctttactatttctgtaaattaaatttttatttcttttgaaaaaatgaaaaatttccttaaatacaaaatttaaaaaataattattttttctttaaaaaatttctattaaaagccgaatagccaatttagctggtagttaatg

SEQ ID NO: 114439 - DNA, 79 bp, Heterodera glycines
aaatcttcaacgcgaaattcgtcttgagttggaatcatcactaaggcggttattgataatttatgtagaacaaacaatg

SEQ ID NO: 114440 - DNA, 1003 bp, Heterodera glycines
  unsure (1)..(1003): unsure at all n locations
ggaaatgccaaaaatgagagagacaaatgccaaaatggggagggaaatgcaaaaatgagagagacaacagtgccgaaggggactgtcgaatggatgccaaatgccaaaacatttcactgtaatactgccgatggtcccccccccccccgtttttggaaaaatttttttcgattctaaaaagtcgtgaaaacaagttttatggggtttttagggtcgctgatcacgaatctgacattcattttgaccattttcgaatcccggacccgaattcgaacaagaagttgaaaattccaaattttcaaaattcttacttttgtgcctaaatttatcaaaataatctaaatttagttaaaaaccattgcaacaacaaaaaatgtggtactagtgcagttggtacgccacaaaaaaaattcttttaaaatcgtataaaaaatgtttctacgttgattacggtgggggtcgactgggccccagagccttcgtacgaaaaattggtcctggcgcaccccttgttcatgaggcttgangggggctaaagcccccccccccgaaacccaaaaaagtaaaaattttcagtacatttttttgaaattttaagcgattttcttaacaaaattgcgttaaaatactcaaaaattttcccggctgcgcctatcggcaccgccggacccccattttactatatttttgaaaaatggaggccaaaatggcaaaaaatagtaattttttggcgaaaaaattttgtaaaatacccccctagttcgggatttcaaaaaacgaaaaatacacccataaaaatcgactgaaaaaagaaaaatcacccctaaaaatcgaaagattctccatcactacacgcgatccgtcctaccagtacacaatgggctaccgcggaggcctttctttcaaggacgcgaaaatgattaacctgcattattgttcgagtaaaaaaatatataaaaataaaattaattaattaattaaattaaagaagtttgcccaaatg

SEQ ID NO: 114441 - DNA, 74 bp, Heterodera glycines
ggtgggtggacagcggacggaaccttacaattgccacaaaattaaaggcgcacgaaattattgtgctggaaatg

SEQ ID NO: 114442 - DNA, 1003 bp, Heterodera glycines
ccaacagcattctcagaataattacgccgatactaattgttctgggatttgtttctcggcgcgtttgtttgggaaaaatttggaaaattggctatctctttttctgctcaacagtaataggaattccaaccgcattctcagaatacctacgccgttatggatttaatatatcggggcgtttgtaagggaaatatttgtcaacaagaatatatacgtcatctcatggacttaaaatcgcaaaaattaggcagtttttggtgaaaatctgttaacaaatggcattcaaattttcaaaatttttccccggcagcgcctgtcggcaccgccagaccccccccccccccccccctctgtcccacaaaatttttggaaaaagcgcgccacaaaaaaagcgtttttaaagcagaaaaaagtcgtcgtaaatgaggaaaatgatcagcggaaataaaaaaatattggaaaaaatccattccggtgaaaaatacaagccatttgaataaatattaaccatttttcattgcatataataaaaattttaaatgtccttgaatttcatgaattttccccactatgtccttgcaaatcggcatacccgtccttggaagccgaccttggacgattgcagccctgccctaaagggtcgactactttagatgcttgaaaataactgcaaacttaaaatcttttgcaatattttttattcatatttttttttttgatttaaaaggcgggaataattttcccgtttcccttctcgctttttctgtattccgcttcaaaattaactgatattgatcagttcaaactaggaatgcactttgaaatctatacagattcatagtgattcatataaaccactgaaaatatttttcataatattgggttgacttgtggatgttgtcgtgtggaagagcttcctggggaagattaccttgactccgcattacatacacattctgatatctcttaagaaattctttcttcgtgaaaaacttcggaaatg

SEQ ID NO: 114443 - DNA, 102 bp, Heterodera glycines
tgtcgggcagtattggacacgtgcagaaggccatggaactgctcaaggcactgaattttttcggtagcatttggaaattggagaaaaaaatatttaaaaatg

SEQ ID NO: 114444 - DNA, 520 bp, Heterodera glycines
attttgtcactatttcgacattttttggaaaattctttaacaaaaatgcaataaaaccaaaaaatacacccctaagaatcgacctaaaaattttttcaaaaaatacacccctaagaatcgacaaaaaaaatttcaaaaagcactcctaagaaatgaaaaaattttctcaaaaaggtaattttgtggcaagaattttaattttaaaaattattttttttatgtacctattttgtttttttgcccttaaaaatcccagccctactcatttgcaatgcaatcagtgaataaaaattatttttgcttaatttttggctgaaaattatgtcactattcgtcactatttcggactttttgtcactatttcttcactattttggcatttttactcactattttagttaactattttgcctatgttttcgcctttattattttcattttttacacatttttaactgtcatttttcccccaatttaagcgcaattcatttcttttccgttttttctacccaataaaatg

SEQ ID NO: 114445 - DNA, 1003 bp, Heterodera glycines
tataattattaatgcttagagtgaaaaattgattgacaaaatccatgggtgataatgtatgaattataattattaatgcttagagtgaaaaattgattggtaaatccatgggtgataatgtatgaattataattattaatgcttagagtgaaaaattgattgacaaaatccatgggtgataatgtatgaattataattattaatgcttagagtgaaaaattgattgacaaaatccatgggtgataatgtatgaattataattattaatgcttagagtgaaaaattgattggtaaaatccatgggtgataatgtatgaattataattattaatgcttagagtgaaaaattgattgacaaaatccatgggtgctaaagtaagaattataattattaatgcttagagtgaaaaattgattggtaaatccatgggtgataatgtatgaattataattattaatgcttagagtgaaaaattgattgacaaaatccatgggtgataatgtatgaattataattattaatgcttagagtgaaaaattgattggtaaatccatgggtgataatgtatgaattataattattaatgcttagagtgaaaaattgattgacaaaatccatgggtgataatgtatgaattataattattaatgcttagagtgaaaaattgattgacaaaatccatgggtgataatgtatgaattataattattaatgcttagagtgaaaaattgattgacaaaatccatgggtgataatgtatgaattataattattaatgcttagagtgaaaaattggttataatagaaaaaatcagaataaaaggcgaatgattgcacgattaaaatcattggaattaaataaataaaagttgtatttttacttttgtcgtcataaatgcgtatttttttgccattctattcaattaaatattattattattcataatgaattatatttataaaaataatatttttttaataaatcccatttttttagaaatg

SEQ ID NO: 114446 - DNA, 294 bp, Heterodera glycines
  unsure (1)..(294): unsure at all n locations
tttgtacaagtgccattaatccatattttcggcaaacgactgatntgccctttggtttttcggtgtcatgacagtgggtacaaaaggcaacaactcgtacaatggcttaggctaggcctctatgctntaggccaggcttaggcttgcttggacctaagcttaggcttctttatntagtaaaaagtttttattgtacgagtttcatttgcattccccaaattgttttaggcatttctctgtgccaccactgcggtcaatttcattattcacttgagacagcccaaatcaataatg

SEQ ID NO: 114447 - DNA, 374 bp, Heterodera glycines
cagcagaatgctgttgcacagcagctgggttcttttcactgtatgcccctcccacccgccgctgccctcgtagaaagacagtcagacagtgcactatttcccacctttccctccctctactttttttcaaattcatttttaacgcaaaattcaaacaaaacgccacaccaattcaaaccacggacacatacacacagacactcaactttaatatataggatttcccgtttccagcatcactacagaattgaccgattgtgtcatagtgaaaacaaattctcgtcagcagctactccacttcacaatccgttctttttctccctttgccctttcaattccaatttgtcatatttttgaaccatttttagcaaatg

SEQ ID NO: 114448 - DNA, 83 bp, Heterodera glycines
agtgatcggattggccacacggaaacttactttttattcagttggcctctgccgggagtaacgaagaacgaatgataaaaatg

SEQ ID NO: 114449 - DNA, 613 bp, Heterodera glycines
gaacaaaataaatattatattcggaatctacgcctcaaaaaacccatagaaagtaaccaaacaccactactacataagaatgaaaaaacaaattactttatttaataaaaatttggcaaaatggttaaataattcaaatttgtatgttttttgtcttttctctcacgaaagcattccattcttaggggtctatatttaacccgaccccgagtcggggttaagggttggcgttgtcgcggttgggagcgtcggtgtcggggttatccccggaaaatggccaaaaaagtcggggtcggggcggggtcggggtcgcaaccctaggctaaacataaaattttcaacacatttccatttgagtgagtttcatcgaccaaaatgtcatcgcttttctcaaccgttttggccagcttttcaccaaatgtccaattaattttttccatcaatacgttcagtgaccgcattttggagtttattctgtgcaacatttgggcaatgctcaagaaaaatatttatggcatggatctgtctgccagaattttttgccttttgcgacaattcgttccgtcaattctcgacgactgtccatcgctttgcgttatcaatgtcaattatg

SEQ ID NO: 114450 - DNA, 290 bp, Heterodera glycines
attttttaattttactttattacctagttcttattcatttaatggagcgtaagcattcatcgatggaggtcagtaaacaaattctatggtaaattatgcattttacggaaaagattacattcgttggttacaattacacacatttttattgtttgtttttggataaggcaaatcccgattattttttatgcttttacactttccttttgatagaatctttttatctgcgctcaaagtgccaagcccaactccgttttgttgttggattctttttctggctcatcgagatg

SEQ ID NO: 114451 - DNA, 162 bp, Heterodera glycines
ggagataaaaaatagtccacagggagacggtcagtcattgtttcggaatccgttgcgtgcagtcgactgtgtgcatatcgaaaacactgagcacagaaaccaaccagtgtacgtggaagggtcacttgaccttgtcgagggactcgaactttacacaacatg

SEQ ID NO: 114452 - DNA, 624 bp, Heterodera glycines
aaataattttttgccactattttggcgtttcgtcattatttttgccactattttggcatttttgaaaaacttcccaaaattgcaataaaaatgaaaaataaacccctaagaatcgacctaaaaaattttcaaaaatacacccctaagaatcgacctaaaaattttcaaaaatacacccctaagaattggaaaaatttcgcaaagattcttcccccaaatttttttttcttgttcaatatttgctacgaaaatattttgtaactgcaattagtgaataaaatctttttccttaattttaaattattttcaaattaaaaatatatttaaaaaattacacccctaaatttggaactttttcgccactatttttaccactattttggcattttttggtcactatttagttaattattttgagattttttatcactaaaaatcccatccctaattatgaatattaatttttaattatttaaactctctttatctgtttaaattttgttatttcatgattttttatcacaagggattttgacgcagcacatttcgattaaaactgtgcgtacggtagtgcaaagaccaaaagaatttcgattcattcttgacaatataatgcttaaaatg

SEQ ID NO: 114453 - DNA, 317 bp, Heterodera glycines
tgtcaatcaaaatttttttattttgcattttccctatcgatttcgcaatctacacgtgacttttttttgttgcatatttcgcaatagacacgtgactttctgccattgcatcgaaaatttatcgtttgtcaacgaaatattcctcaatgtcaatgaaaaacaatcacgtgccaggtgtcagctgacacgagccattctgcggccactataaaagccgcccaaattcacttctccattcagttcaaccaaaagttggattttgctaaaataaaattgtgcgctcttatttaaatatattaaatttaatttaaaaaatg

SEQ ID NO: 114454 - DNA, 89 bp, Heterodera glycines
attcactaaaaatctgtcgcaaaatatcaaaaaattcttttcaaattttcctaaaacttttggaatttcagttcataatctaccaaatg

SEQ ID NO: 114455 - DNA, 153 bp, Heterodera glycines
taggagccgtaaattgggaacacctgtctgaaatcgattcttcggaaaaacaacgaatttgtcggaaaagggtagatttgggaagaaagcccggcggttggtaaaattttggcgaccagtgtttcggtgtttggacgtaaattggatgcaatg

SEQ ID NO: 114456 - DNA, 199 bp, Heterodera glycines
ccttaaaaacgaatggtgaatgatcaaatagaaatttggtacatcaaacatacgcttagaagcagatgccgtgccggttgtttgagatccatgtccacgatgttggtgtttcggatgtgtcgaagtgccagcaatcgaagacgacggtccagcggtgcgcacagaagtttcgacggtgacgaaagttgttgcaccaatg

SEQ ID NO: 114457 - DNA, 560 bp, Heterodera glycines
tattgtcagaatattggcctaaaagatgcaaatttaaaaatgcaaaaaataccttttcaattgcctcctttcatttccttgatgattaattgcagttttcgcattattcggcccaataaagggtctttttcttttattgccttaatcttcaggtatttctcttcgttcgcttctgttttttcttcctttcgatcagacatttttttgttcttcttaatggaattttggcaatcattaaaaagggctctctaattatttttattaatcattttaccaaatctaagcgctttggatctataataattgttttccctcatcccttttcagatattcaagtggtgttttgtatttattttattgttttttaaattttaccatatataatatatatatatatatatatatatatatatatattttaattttgcctgaatttggtgtgcattttgctgttgcggttcgaacacttcttcaatcagatgctgattttctctcatttttttgaagtgttgctaataccttgacttttattgctgctgcccgctccattgaccaaaatg

SEQ ID NO: 114458 - DNA, 142 bp, Heterodera glycines
aaattcacacttgaaaaattttttcacttttttgttcgaattcgggtccggggttcggagttgggtaaatacgagttaagattcgtaatcagcactctcgaaaaccattaaaattggttttgagcacaaaataaaaaaaatg

SEQ ID NO: 114459 - DNA, 423 bp, Heterodera glycines
agtaataaaatttaattttaaaagtgttttgatgcaagacaaaaaaaaaaattttttttaaagccatagaaaaatttttaaatttttttttcttgaaaatttcttttatattttataaaataaatttttgtttttttggggttggggcaaaagacgcgggatgggggaaaacgaagtatatccaatcaagtaccaccaccaaatattcgaaaatagcattacagagaatataaattttttcaaaaaaaaaattttttttaaatcagaggcctttgcgtggatcagaccagcggacattggcaactgaatttgttggtcgagttctgtgaccgtggcactttgcagcaggcgatcatcggcggcggcgcttgtgttgtcggcactgatccgccgttggcattggcaccggcggcgcccgcaatg

SEQ ID NO: 114460 - DNA, 617 bp, Heterodera glycines
gaattttgaaattgcctggacctggacttggaaaatgaaccgtgacgggatcccgggaccgggactcccgtttttccgggatttccggtcccagtttttgggccgggaccccgccgggaccgggacgttttcaaactttgtgcacctttattataaaatttttaaaaatggtaaacttctattttagcttgggaataggccaagcaatgcaggcacgatgacatttcgcctactggacattttgcctactaaggcaaaatcggacgtttcgcctactaagtcaaaatctgacatttcgcctactgacatttcgcctactcgacatctgacctactgacatttcgcctactcgacattttgcctactcacctaaaatcggacgttttgcctactcacctaaaatcggacgttttgcctactaagccaaaatctgacgttttgcctatgaatttttgcctactggaaaaatgctaaagagaaaagaaaaatagtgtgatagagtataaaatgcgttgtttttgcatcaaacatataatttgtttcatttctatttttctgtaatttattcaaagttcccttttcagcccaaaccaacaaaaaaaatttttaataagatg

SEQ ID NO: 114461 - DNA, 342 bp, Heterodera glycines
agtgttgaggtcaaaattgaacaaagtgcatggatcggaacatagccttttatatttttgacaaagttttgcgtataaatatgcaacaaaatgaaaagtgcctttaaattctaataaattatatatagggaaaatatgaaaaaaagactaattactagagaatggcaaatcaacctttttattagtttttgcggggtatcaatttaaatgttgatatttaattaaatcaactaacattatgccatcaacgcaaatatcaacgtaatttttaaaatttgcgaaaattttttaaaatttatatgagcggtttataattttagtgcgagagataacgcaaaaatg

SEQ ID NO: 114462 - DNA, 181 bp, Heterodera glycines
tttgtccatcccttttttctctcattttaaagtcatttatttaaattttattttttttcatctaatttattatgtacacaaattcagaaaatgcagaacatttgactttaactcgaaaaaagttttttaaatttttgttataacaaattaagaatcaaattttcatttataaattcgaatg

SEQ ID NO: 114463 - DNA, 209 bp, Heterodera glycines
  unsure (1)..(209): unsure at all n locations
agataagacaaagggttacgggctgtgcattgatacggggtacagactntcgggctaaatacnctgtagtccgtaaaaaacacctatcgttcgaataaatacagttacgggttcataccgtaatcgctctctagtaaatacagtaaactagacttgctatattctttttttttgcagttttcacctgtcgatagcgcttagacgagatg

SEQ ID NO: 114464 - DNA, 780 bp, Heterodera glycines
tttttatgactgtctgaagattaaattagcattaaaaattaatttataccgacaaaaattggacaaatggcaaaagaaaattgcccaaattgttgaaacaattgcgatggttttgtgactttttgttgtacaaaattcgcccactcattcaactcaaattacaaatcaaacaaaaaagattttttgcatcttttggctttaaaacagttaagaaaaagctttttgggccaattgaaaataaataaataaataatttttctctaaaaataaaatggactcattttttcatttgaaaaaagggaatattgaatttctttaaaagaattttccaattaaattaaagaacaaacacaacacaacacaactcagatttatataaagaaaagctcaaaagttaaaatccattaaaaaatatttttgcgtgtttatattgttggtatattttaatttaattaaaaaaaattaatcaggtaaagaagattatttttttacaaaatttcaccacaacgaaacaaaaaacaaacgaatgccgaaagccaacagagaaaaccaaaaacaaaaaaaagtccaatgtgacaattcaaaaaatgggaaaatcccaaaaagctaatggagaaattttacagaatttccgatttttcaatttgaaaaatatcgagaactatttttgaatatgtaaaatctcataattttgctaaattaatgacgaattagataaggaattttaaatttcttaaggtgtggcccatttgcgcggagaataaatggagcaaataaatg

SEQ ID NO: 114465 - DNA, 750 bp, Heterodera glycines
  unsure (1)..(750): unsure at all n locations
cggattaaaaacagttttttcataaaaattttttttatattaaattttttaacatattcatcgtaataatttacactggtgtaaatcatttcgtaaatggagagaataaatttggtcgcttgntcaaaaagaaaaacatgtgatgattaaacatntaatttattcaatgttttatcacatttacacttccattttcatttttgcttattcataaatattttaaataaaaataataatcatttatttttggtaaatgctttacaaatattttttgttggcattttctttggtgcttgtgcaccgaataaatgcttacgaatgcggcacatttcgagaaagggacaaatattaccaagaaacagcagaattggcaaaatttcaatttaaagtaaattttttatttgttaatcctagcatacatttgacagtgttttggaaaaaaacggcataattgctgaacatttttgaattgcctattcaatactcatctttaaatctatttttagcattttgaatttaagaaaatgaaattttgcatttttttcagatttttttttagataaaatccgctttataatatacgaaaaccataacaatgattaagcagactcagatacaaaaatttctaaattttccacaatttaaggatctttctcctataattggccttattgtatgttgcctacttattgtgcttttttctcccattaagatcagccacggtaatccggtaaagtcaaacaacaaatg

SEQ ID NO: 114466 - DNA, 1003 bp, Heterodera glycines
ttgataaaattaaagaagcatctttctaaaaatttaaattcaaaataacaaaagaaatagcgaataaaattgcacgaaaatttggtatttccgcaaaaacaattcgagcgtggaaaaataaattccgaagttataattaattattttttaataaataatttatttattttttatttgaattgaagggaaacattacggcattgtcgaaaaaaattggcataattaaaagaaaaatgcaccaatgctaaacgagccgattaagaagaatgaatgaaggattgagacagaagaataaatagtctatatttatttagtttttagtatataaaatactttcgctcttaaaatagaaattttatgaaaataaactttttttttaaaagcgaacattttttcggggtttttatacttaatgtgcctattttcagttaaaaaatgcaataaaaacgaaaaatgcacccccaagaaagacccgaaaaatttcctaaaatacacccctaagaattgaatttccaaaatttgatcccaaaaatttaatatttttttcttattaaaaatttttggttaaaaatgttccttattcgaaaaaaaactttaaaatatttaattaaaatttacaattgaagtgtttaaattcttacgtgttttgctacctaaaaattgttaataaaaattattatttgccttttttttttgcctatttgaagattttgtgtctatttaatgcctattttacgactttttgtgcctaaaaaaggaagcactccctactctttaattaattaatttgaatcctaatgtaagccaaatattttgaaaaaatttccccttttttaaattaacaaaatttttgcgaaatcaattgccttaattggaatttacgtggaatttgcaggaaatacgcacgcacattaaggcatatttccttcgctatttaaatcgttaccaattcatacgtcaattaattgcaaaaataataattttttagcttcatcaataaatg

SEQ ID NO: 114467 - DNA, 152 bp, Heterodera glycines
tttatcggaacgatttgacacctgagtggttttcaacttgtttttgaagaaaacggaaattttgaactacgtaatttggttgaatttgcaaacgacctgggcgctggaaattttgaattttggttataaattgattttctgggagaacaatg

SEQ ID NO: 114468 - DNA, 294 bp, Heterodera glycines
cctgaacaactttgtcatgatggaccatcctacttaaacatcaaaagcatccgctgaatgtccattccccccttttttgacattttttccgtttttctcaccaattttctgcaccacttcgggtgccatgtaattgcccgtgccgaccaccgaatgcgctctgtccctcttccggtggtgccgcatctccaacactttgacgcgctggtccaacccagggggcaacgagaaggagtcgtcccggacatggccaatgggtgctccgtttgattgttcgtcgtagactacgtaatg

SEQ ID NO: 114469 - DNA, 707 bp, Heterodera glycines
gaaggaagagaagaattggcggaagagaatgaggaagagaagaattggcgaaagagaatgtggaagaggaaggaagagaagaattggcggaagagaatgaggaggagaaggagagaagagaaggaatttgccagaaaacgaagaagaattatttggtaaacgaatgtataattccttggattacgcctcttttccaagttttagtgtatttttaaagtttattttaaaatttattattattattttcttaacagtgcgatgtttgtggaaagagatttgcgtttgcatcagttctatggcagcatcgccatgtccacacggcgaagaaaaattttttggtgaattacaaaacttaattttatattattgtattttttaaatttattattaatttaattttttgaattttattacaatggaccggatttaaatggatttctattttttcatacttatttcgacctaaaaagcatgtaaatcgtatttttagcttggtttgatcctttttatttccacatttttaatccatatttcgacattttcacaaagatggaaaacttttggaaaatatttccctaaaatcgaaaaattttgaaaaaataccaaaaattgtacaaaaaaaaattttaatgtgaaaaattcgcctaaaatgattttgcacatataaatccgataccaatttattacagtgcgatgtttgtggaatg

SEQ ID NO: 114470 - DNA, 501 bp, Heterodera glycines
tctttgtgctagcttatcgtcacaatttataaataaaatcaattattaaatgttaagtccataattaaaagggtttaaatgttaagtccataattaaaaatgtttttgtttatttacgtttttgtgatggccttctccgatgaagatatctggcggcgatgaatgtgtggttccattaattgtatgctgtgaccggtctttggactcaatcgaatgaaaaccgtgaggagtgtcaaaataagtgagaaataatgaaattttctaaattgaaaatgccaaatttaaattcagttggtaccttttaagtcaaattttgcctttactctttctaaatccttattttagcaggcaaaaatgcctatttatggccaatttcaattaataaagaaaaaatataattgatgaaatgttttcgcctttcataatcgcatcgaatttttttgtcagaaagcaacattttgaaaattctgagtcccaaaaactaattctatggtaaaaatg

SEQ ID NO: 114471 - DNA, 237 bp, Heterodera glycines
ctctcaaagggtgggccaagaaaagcatcaaatttactttcttaaagtgaaaactgaacagtttgtccccgtcattagaaagagagtggcgagagagtaatccgcgacggttctgccgctgctccgttctcctcccagtgtgtggtccgactgagtaccgacgcacatcgactcgcctatgtgatgttctacggtaccaacccgtgggtgctgttcatccgtctgcatgcgatcatg

SEQ ID NO: 114472 - DNA, 339 bp, Heterodera glycines
tttggccatttcagtcacgggcccattactcggcccaaagtgctttccgaaaaaaatctttcggattcgttcgttacagaccgagaggagtcacatgatatatcatttgttaaatttgttgaggtaaaagtattcttgaattttaccttttgggtttttatacatatttctggatttttttaaaatatttatgtatatattttgaccactttttatacatatttttggcatccttattaattgcaaaataggtgagagaaatgataaaaatgttttttatgcattatatgaatcattgtttacaaatcatcaaaaattggcaattggagggccaaaatg

SEQ ID NO: 114473 - DNA, 748 bp, Heterodera glycines
ctcaatttcataagataattagcagaaataattttgctaaataaaaataaaatgaataatataaaaagcatttaccaaatagaattacttagatttaaattattaaaaagacattaatgaaataataaaaaaaatcataataaattcgtgacgatataaataaataaatttaaaaataaataaataaataaaaaagcaataattgtttgttttcttttcagtaattcaagcgcaactggtcatgagttattttcaaaaaataatagtataatagaaccaaaagaaaattaaacaaataaaatagaaaattctttgaaattttttaaattctattaaaaatactaaatatttatataaaataaaagaaactcaaatattttaaatagaaaatattctacaaaataaagattttaaagcagtaataattattaattagtctcatcatacagtgtaacaaaatgacaggttcactttcaaaaaaatcataatatcggaaaaagtcgacctaaaatctgaaataattcatgtaagcctaacttttgaagcttaacaaaaaagcaattacattatgctcaccagatcactccttcttagtgatctgaaaacgcgaaaatggcttgaaatcgggaaaatttttgaaaaaaaaaaattcctaggggatcagaaagaggacaaaattttctacaaaatgacctttgaatgatggatctacgacacgtcttcgctgatgcccaattggttaaaaatg

SEQ ID NO: 114474 - DNA, 551 bp, Heterodera glycines
gtctcgagattttataaatgcaagaaaagagcaaatattggcattaaaaaagaaattacaatgaaaaattacgaaattcaacttttccgagtataattttttgtctattgcctttatcaaaaataaacttatacaaaagcttccatagaccttaagctttagtttaataccaagaatataggtattgaccaagtaataaaaaagttatggtctaagaaactgggtatggtcattcatgggacgcataatatgacatgggacgcataaaaccgactataaccgcctatttttgcctatttcggggtttttgtgctaaaatttttcaaaaaaattatcccaaaatttaatatttttttcttaataaaaatcttttggtttaaaaatttgttcatattcgaaaaaactctaaaacatttaataatttcatttacaattgaaatatttaaagttttaacgtgttttgttacctaaaaagcgttaataaaaaattttatttgcctatttttgtgcctatttaatgcctatttcgcgattttttgtgcctaaaaatg

SEQ ID NO: 114475 - DNA, 79 bp, Heterodera glycines
ggcaaaatcatttaaattttatttgaataaattaaaaacaaaagccaaaagcgcagagtaccaaaggttcttcgacatg

SEQ ID NO: 114476 - DNA, 106 bp, Heterodera glycines
ggaacttctgaaaatctgatccatcgtctggtttgtttgcattgcaagcattgctgatcaattgcagtcaaattattccgccgatatacgaaaagtgctcaaaatg

SEQ ID NO: 114477 - DNA, 81 bp, Heterodera glycines
tttgaaccggcgcattattcgagcagaccaaataaatgggctaaaggacagcgaaatgaaagcattgggaaaaggaaaatg

SEQ ID NO: 114478 - DNA, 142 bp, Heterodera glycines
cgaagacaacaaagtgctcggcattcgatggaaaccaaaacacaatcggctcatcttcaaattgccaatcttcgaaggaaaaatcacaaaacggacaattctgtcgcaaattgccaaagtctatgacccgctcggactcatg

SEQ ID NO: 114479 - DNA, 604 bp, Heterodera glycines
atgtttagaagctttttctaagctactgcttctcgactatacaattatcaaaaaagttatacactgaaaattgcaaaaagtcgaaatttttgaagttttttcttaataaaattttttctaggcttgaaaatcctttcgatttggtaaggctaatagagcatgttaagagctttcgaatgataccaagattgttggatttggatgccaaagaaaaaagctttcgtggaaaaacatgctggcgcccaaacgagcgcgcccaaacgtgagcgcccaaacgcgcgcgcccaaacgggtgggtcccattcgaacctgggaccccccattttttaactaactcacagaccactaagacgaaaaatccaacttaattgtacttggagcccaaaattgaatcgccgtgaatagagatcgattccgatctgccgggccgaactgacattttcaaaaacgaccggtttccgggtccggtctctcaaaaagcggtcaaatttgatttttccaaaaatcaccggtctggtttccgggcccggctcggtttttatttttagtgcctattttagcagattttttagagcctaaaaattggatccctaataatagtatg

SEQ ID NO: 114480 - DNA, 196 bp, Heterodera glycines
actagagtccggcgggatcgggactcccgcgggattttacgggagtcccgctcccgactcccgctttttcggtgaacgggatttttaacgggagcgggatttttacgggattcccgttcgggactcccgtcccggaaaattttgaactcccgatcccgctcccggaaatttttacccaaaaacgggagtaaaaatg

SEQ ID NO: 114481 - DNA, 275 bp, Heterodera glycines
tcgaggattgaaaggtgtatcatgttttgattacctacgaaaataaaaaaagtgggtaataaaactattcagaaatgatgatatagccgcggcgttaagtactctccaccgacacggatagtcttgttttctcacatctacgcgatgctttttagctgaataagatcgacactataagcagttcattgatggaaatcgtagaattctacactgctggtgcaaaatagtatgcgttggctttaagacgtataaatgttctacatgatgcggaaatg

SEQ ID NO: 114482 - DNA, 292 bp, Heterodera glycines
tcgcctaacgcaacgcggcgggttgaccagcaggaaatattcaaaagtgtccattgttcgcactaaactcatccaccaaccccaaatctgtgcacttttatttgtgaaattcaaaatggaaaatttaaatttaaattttatttaattggtttacaatttttacattaaaatttaaaaataattattgattcgttactttttttaatcatttttatttatttatttaaaaaatgtttagtgttgttcacaaattatatatatttaaataatgttttgctgacaaattgccatg

SEQ ID NO: 114483 - DNA, 739 bp, Heterodera glycines
tacaatgatgttgaacagcgtgacggtctgtgttgctcgtccggacgggcaattggtctacagagcatttcaaataattttatactatcgtttaaaaatattttaattttaaattttttattaaataattaattaattaataaaaaataaaatcttttcactctgtttatttgacatgaatattatttgaatattgtgatatggattatatttttgtttagtgcagcacaaaaacatacaaattatttaacatatatcaatgtgaattggtcaattaaaaattgccaagtatggtagccttttgcctattatggattttgaaaattacggtagccattttctgtgaattaatattaatatacatcacacatattaaattcgtcaatttggtgtaaaacaaatcaattaggtgcaatgaaaataatttttcgagttacggtaaccgtatgcattagtcatccacaaattcatttttttcacgcatttcaaatgtgctgcaaatgccccaatcacgcagaagtgtcactataaagtgctggtgctaattaacaatttgaaaaataaaaaacaaagtataaaagtgcccaaaatatgccaatcattaatttcaaaaaattttttagatcggccctttgtaaatataaaaattaaattttccgcagttaattaaccttaatataaaaaaagaaaaataaatatctccagaaccactcataaattttagtgccattttattatg

SEQ ID NO: 114484 - DNA, 193 bp, Heterodera glycines
  unsure (1)..(193): unsure at all n locations
aatattttgttgagttaataaataaaaaattcctttttatttaatttttttttgataaataaattttataagtttaaattaattatttttttaattgatagaattttatgtatatgttgtatatttttaataagttttgtaagtgttgatgaaatttgtagntattataatatgtgttgtangtgttgtaatg

SEQ ID NO: 114485 - DNA, 865 bp, Heterodera glycines
  unsure (1)..(865): unsure at all n locations
gccggaccggaccggantgccatttcaaaaatgaccggattccggatcggtctctcataatccgatcaatccggtaatccggtcaatccagattttttccaaaatgcgctggggctttttatgccatttcatgatggcaccccttctcttgagaatctcgcatacatttcagacgagcaaaaccaaaaattaactatacgaaaaaaatgacgcgctcgctgattaaatgattcatgtcatataattagctgcccactaattgatcaattagggtcgctaatttgtttttgctcattcattcgtttcgtttctttgcgcccgcccccttttggccgtataaatttgtcgcgcatgtgctcacaattcattcattcattcattatcgcaccacacgttcattttccattcccatcaattcatcatttctcttcccatctttaattacctttaattacccccccccccttctgccgatttttctgatgggccgtttcaaaaatatggcccgaccaaatcttttcattattacactaaaaatattttggaaatttaacaatgaaaaagaagtgaattttgttttagggtttaggaaatttaaatgtcgtgggtacgggaatggtaactcggatttggggtaggggatatttggaaagctggaagaagtcagggcttgggatatttggaaaagccgggtttcaaggcaatggatattttgaaggattttgaggctggggatatttggaaaagcgtttttggggcggaaaacattcaaaaacgggctagtttcgagaatcgggatccctaacatttgttcacttttagctctataacacataaatttcataaacattcatcattgaaaatg

SEQ ID NO: 114486 - DNA, 103 bp, Heterodera glycines
  unsure (1)..(103): unsure at all n locations
aaagaaaacgcatatgtcgacattttntaatgatgtgtgatgacgaaatgaaataaaattcaaacattactggagcaaagaaatattcaaaatagcatccatg

SEQ ID NO: 114487 - DNA, 181 bp, Heterodera glycines
atgttttgaatttttaaaattctatgttttttttttactttattggttacctaaataaatggattattttttcccttcatttcattcattatttcttaaaataattaaatactttattatttgaactcatgtaactcgatctttgtcatttttaaattttgcttttgcatagaaaataatg

SEQ ID NO: 114488 - DNA, 209 bp, Heterodera glycines
ggttaggcaataatttttaaattttcaccaaaatttcgttctccgtggagaagcctgcagcacttaccagaaatttaaatatcaaaaaaaaatttgttgggtagaaattatttattctttgtttttaaaaaaatcaatagaaaaatattgaaacttgaatattgatacctatctttatttaactattctaattcagaaccgtcgcaatg

SEQ ID NO: 114489 - DNA, 195 bp, Heterodera glycines
tagtgtacactattaaacaaaactctcgaataatgttcttgaatgggtttatgagtttgttaagtttcaaaaaattaattcaaattacatacctaacttttagtttctactcattcgaatttcattcccattctctccatctgtccattttattccgtttttttcttttggtcgctgtcgccgttgtctccaatg

SEQ ID NO: 114490 - DNA, 223 bp, Heterodera glycines
ttatgtttattgaaaaaccaaaattttttttatctttcttcatttttgtgctgttcgttttacaaaaaaacctatttacctaatgcaattgaagcaaacaccattttaattttgtattttagtcttctgtcctttcaatttcaaaaaaattgctcacatttgtgaaattttgtagctgtttgtctgtctttttccgcatcgataacacttccaaagagaaatg

SEQ ID NO: 114491 - DNA, 122 bp, Heterodera glycines
ccgtaactgctgcaccatccgtcatcaaagcattgccgattgacgaatctggcaaaattctctttccgatcgtcgaccaattcggtacggaattgggattagtcagtccctaatccggcatg

SEQ ID NO: 114492 - DNA, 343 bp, Heterodera glycines
ttaagtggtcggaataacccaataattttggggagtagaaaacagagagagagagagagatgctaatgaccctaattagtaaaaagcatttataagcacgcataatccgttcataatgctttgctcaaatcaggcaaaacatatttccatatgaccctaattttttaaatgtgacgaaccaaaaactcaatctcaagtctcagtagcgagatatcactcttacccaatatagtataactacaaatttaaaaaatgtcaaaacccatacagaaaaagtggcattgaatctaaaaaaagaagagacaaaaattggacccgtggcactatcatcatcatcatcatg

SEQ ID NO: 114493 - DNA, 115 bp, Heterodera glycines
aatttatcggcgctcaactattaattcatttaattttaaatttattttagatatcaaaaccccatgtgacaattttgctttattatttaatgtttccagttcctggggcaccatg

SEQ ID NO: 114494 - DNA, 65 bp, Heterodera glycines
tgtaaaattattaattcatttttcgcttttattccccatttgcttacataagttatttcatcatg

SEQ ID NO: 114495 - DNA, 862 bp, Heterodera glycines
ggccaaggccactgagtcccaaatgattaagtctcttcgatagacacattaatcccaccataattaagtttttattaaaatcttaaatgagtaaaatttacgaaaaattatgaatttacattcagtcccgaaaccccgacccggctggtccgggtctaataactattcttttaaatttttgaaatttctcaccaataatccactatagctctcatttattgagaagactattaaatgcacaattctctattttataaaaatttttatacatttttaatcaattttttattttcgtgaaaataatcaacaaaaaacgaaattaattaagacatttggcagtaccttaaaaattttgaagaatcaaaaggaattactgataaatgtttatttcttgtttcttctgattttttaaatattatttgccttactttcgaattgttttaaaaccaacatattttattgtatagtttaacattcaatgcattatattgcattttttcatcaaaaaaaattactacaaaagcctaatattgtaaataatttaaaaaacgccttaaatcattagaataataaattaaatttaagactataaatttaattaaggggggtccactaaattcagtcataatggtgaacaaaattaaaataatcttttttctttaaatctaataatcttggtatcattctaaagcccttcagaagccctattagacctacaaaaaaccaaaaaaaaaatttgacctgtaaagaagttattaagaaaaaatcacaaaaattttgacttttttgcaattttcagttagaacttttttagtaagcgactaatcgctaagcaattgcttagaaatagcttctaaacatg

SEQ ID NO: 114496 - DNA, 387 bp, Heterodera glycines
tttcatcttccaaatcgaagatgttgtccaagtgttagtaaaaatcttaaactgaatggattattgctaacaaataaataaaataaaattcgagattatatgaaaaatatttttttttacttatattttccaatatatataggttttcccgggtctaactacattttttgttgaaaaagttattaacaatcgagctcaaagaaataaataaatgatgtcgtcctgaacttttaaaaaaatacaaagcattctttttaggaagacttaatgagtgaaaatttttttataaaatatttattctccattctcaagtctaaaaatttcctgtttcatgggtcaattctcgctctcggactctaagtttactatttttggtcatcttgaatg

SEQ ID NO: 114497 - DNA, 53 bp, Heterodera glycines
cttcttcttgttcgtcatcatcgatgtgctgctgcaatgcgttggccaaaatg

SEQ ID NO: 114498 - DNA, 698 bp, Heterodera glycines
ttttatgtcttaaaaatatttccattggcaattttaaaataattttaaattcgacaaaaatttaataaaaataattacttttaatattcgctgttattttctccaaataatttatacaaacctaataaggtagctgctgatccttttttcaaattaaaggaaaaatgcgttcttttgaatgttttatgtttttaataatttgactggcttttattggtactaaaaatttaaaatttatatgaaaaaatagctgagactttaatctataagaaatatacaaatattatttatttaaaagtctcccgaattttttacgaatttttttcctacatacgatgtaggaaaatcgctggttccttccatgtatgtctacatacgattttcatagagggaggctcatcgtatgatgggctcgtcgtatgtagaaatgttttaatttgaacgcacatacgacatatcgtacaaataatcgtctgccgcagacgattttacgagcgatgtgacgatcgcatcgtagatgcgatgatacgatgaatttgaacgtacatgtgatgacttggtgtgataaatcgtatgcgggagacgattttaatttgaacgggcatcggggctatgatgagccatcacatcgtatcatcgcatcgttgatacgatgctaatttgaataggcccctggagacccagaccatcttaagatg

SEQ ID NO: 114499 - DNA, 120 bp, Heterodera glycines
aagaataaaaattataagccgaaaatcttttttaatttcgaaggatttcactaattataaaacttataaaacaaagtccaatatcccctcatttcaacattcaaaaaaggtgaacttatg

SEQ ID NO: 114500 - DNA, 485 bp, Heterodera glycines
aatgagcggaaaaattttatttttaaaattatttgttatatagattcctatattgtaatcactttttaaaaataacacaccgaatgtattaagtaagctgttcctttgcagaaacaagggcccatcgtcgtggtgagcttgcccagcacaccctcagttgcgtcatttctccaagaaacttcagggtctttttggtgaaaaggcttggtcttatgccttaaatatagtaaaactttaatatgactcaaataggcgaaacatttaagcaaattttgaaaaagccgaaaaattattgtttttaattaaccacaaaaaagttaaaccagcaggctttttaaaaaatgaaattcatgggaaaagctttaaattaattccaagcgataaattttgtatttttcagaaaaattatcaacgatcccagataggacttatcatatgtagattttgaaaattagaattctaagctgcctatgaatttaaaaatg

SEQ ID NO: 114501 - DNA, 756 bp, Heterodera glycines
tttcaaattttttggtttaattacccaagtttgaggtcatttcccggtataaattttttattaattctgtgtctcgtccctgcctgcccctgaaccccgcaccgtggaattcatttggcccgaccccagagcaagtcgggacaaattggcgctcctgggtggatttgctgtgaaccacggactgaaatcgacggatcccggtgacaaagggggaagggaaaagcaaattagagagcctagacaagaccctctgaggcttgtctagtgttcatagtttcgtgtagttattgtcctccgaggcataacttcacgagggacgtagcggacttagtgtttaccctctgaggaagcacttcgtccgaacagagggttggaaggtgttgtgtagtggacaaagtacttgcccttcgaggaagtacttcgtgcaaaaagggtgttttcgcgcactaggccattgacaaataaggaaaaaaggcaaactaacagtcctccgaggctttagtttagccataaggcaaaaggcaaactaacagtcctccgaggctttagtttagccataaggcaaaaggcaaacaccttgtcctccgaggcaggtgtttagtcacaaaaggtccaggaccaaggccagactgatcccggaaaaagacacaaaacaacaagtgcaccacaacacacacacacgcacaaccaaactgcacgcaatgtctgggccaatacaaaaagggatcatcaatgcactcaaagctctggacaatg

SEQ ID NO: 114502 - DNA, 82 bp, Heterodera glycines
  unsure (1)..(82): unsure at all n locations
tttgaaaatgtcctcntttttcatctnnccaatttataatatttttaaattaaactcttaaaatataattattaagaaaatg

SEQ ID NO: 114503 - DNA, 1003 bp, Heterodera glycines
  unsure (1)..(1003): unsure at all n locations
tggaccacaatattttttttcaaaaaatttttaaattatgggttacggattacggaaattaggctttttcatatccccataattacggatttagtccagaagccctattttcgacactttcattacgcaaatatcaataaaattgtggttttctatggatttcataatttaagtttggatcaatggacggaggacaaagccaatcaatcaaaaggcatttcattcatatcagcggggcttttcacgccaattgctgcttttccgcacatttttttgatgtttattcactttggcctttctttttcgcgaaatttcgtcgtcacaatgattcgcttccaattataaattccattttcatttgatttttcgtggctaattttaaagtaagccaataaaagatcaaatgaatttattttcaaaataaatttaaaataaaataattattttcgttgatgaatgccttgaagaaattgttaggcggtggagggaaaaagaatggcaaaagggaagaggagaagcaaagggacaacagcgaggacgaaggcgaacacatcgccacggacttcgacaaaacattcgaagaagcggccaaaaagacatcggcgacggtgccacagatcatcgaataccgtaaagcaatgactaattaagagttaattattaaatgaattatntaaagttaacccgtaatgaagcaacacttaacccccccccccccccggcacaggcggaagtccgtcgagaacgaaccgatcgaaaagtccgtcgccctatcagtgtcgaattaccacacagcagcaacagcccaagcagcaacagcatcccatcaaaaaagtgtccagtgccgttgcaaatcgcacgtcagagctttgtcgcgatttttgttttgaatttttattttagacccacgcgaattcgaaaaggttcggcacccggcgcctataaacttttgggcgatgcgaaaagcgcaacgccggagaaagatntaatgagacggaaaatg

SEQ ID NO: 114504 - DNA, 167 bp, Heterodera glycines
ttcggttttaattatgctgtacatgcttttaagccccgccgtgcggcggctccccgttttgtgcactattttagtttttaaaattggttccggactttttggctttttgaaataaattgtgaaaaatatacgaaaattattttagcttttaattatgcagtacaatg

SEQ ID NO: 114505 - DNA, 500 bp, Heterodera glycines
ttagttaagtaagcacagcagaaaagataaatttctacatttataaaaaaatattataatattttgaatgatttttgaacagtagcggaagctttcagcttaagtcagaatttatcaattagataacattcggcgcatcgaaaactctgttaggcaggcagggatgtgatctgaaaatttttaattgcttgaaaatttttaaaaattttcatttcggggaattccccccccccagtaccggtaaccgccggtaaaaatttgcactgttaaaaataggagtttagcacaaaatgaatgatgcaaaatttagggaaacgaaaaattttataaaaatagaacatttcgccaaattttatcattttaaaaacaatcttattttatttcgtcatattaattcattgaagattaataatatttggttttaaaatttcttatccctgattaatccattgtacaagagaatcatgattttagttttggtaatccaaatccaataaatg

SEQ ID NO: 114506 - DNA, 98 bp, Heterodera glycines
ttttcattacatcagaaaagcaccattgaagagaaagaattaagtaactattccatatagagtattgtaaacatagtcaagatacatttcaaactatg

SEQ ID NO: 114507 - DNA, 517 bp, Heterodera glycines
atgtatcaaattttccctcaattatagaaaaacaaattatttcgttttttttaaaattttctatttcaaaaagaaaagacaataattccaatgaaagatgaaaacgctcattttactccacagcaaatttcaaaggttttttaatatatcttttgttattttttatgtattctactagtaattttagctgttaaatctacacatcaaaagtcacaaatgcctagatgttaagtgccaaactgaacgacaacagttgcttagcaccatagagaagctggcaagaaatttttacgacatttacaaaatgtttgaaaaacaggttacaaccaaaatatgatttaaacaattttttgcgggtgcttagaaacgtgagatgagcagaattagcaatttatacaaggatttctgtatacaatttggtctgccggtgaaaattgacttggtgaaacaacaggaattcagtcagatcgacaaagtcgctaatatggtgatttgtttcttatctctttaataaatg

SEQ ID NO: 114508 - DNA, 245 bp, Heterodera glycines
ttcctagtcgtatgtgctttgcgttggttaattggcgtgggtgagtgtggtggttgggccgtttttgcgatattgtggctggaaaaaagaagcgatttcgctgtggggagcgcggccgtctgggtttaagtgcttgcttgcgcttgtgctcggcattgaacggtgatggctgctgctggggtgccacctttgtcgtggcctcagtttctccagcgattggcagctgtcgaaatgaataaaacatg

SEQ ID NO: 114509 - DNA, 385 bp, Heterodera glycines
ggaaataagcttttgtcattaatatcaaatcagatattacattgtgattgaatcagttcttttgtaaaatttatgtgggctaattagtcttccgccagattagggatcattttgatcaaaaagggttactcattaaaaaataataattagaaagaaatgacgcaatataactttaggactattatttgataggttggttatataagggtttgaatatcatattagttgtagtttaagattaatttgcgacatcaataaggaaaagatcaattcaatttaatgaaatgaattgaattaattaaaatcagagttagttttaatccctgatcactgataagtacagtaattacttcatttcgtccatcacaacagattcggtaaaatg

SEQ ID NO: 114510 - DNA, 119 bp, Heterodera glycines
tggagcagcagtacggcaacaacggtaccaacggtagtgatggtgatcagacgaaagtggaggctgatcatgatcagcagcagtatcaccaaatgcggaatggtgggggaaaagtaatg

SEQ ID NO: 114511 - DNA, 150 bp, Heterodera glycines
ggtgggtcgaccgtggaacactcgcggacaaacactccccagcagcagcaacaacagcagttttcgcttcattctgttccgcaaatcaacgctaataacaatcagtcgtatcatcaggggcctccttcgcatcagtcgcttcaacaaatg

SEQ ID NO: 114512 - DNA, 369 bp, Heterodera glycines
aaaataaacttttctttatttagctttatagtaaagagtcaatcataatgcatttatagtgattccctgctcagtcacaagaaatactacaatgaaaaatgtgatgtagaataccccatgggaaagccaaaaatatatgaatgtttaagcacaaatgcaaggctaattaagtgaaaaaattaattatatttttcctagcgcattagtggaaaaactaaaacagaaaatattattacttaggcaggcattttttaagaataaaaatattcatgaattcactcaagaacctattgttgctcaatgcaatttagtcaattatatagcgacctttatgcgataaatgaaataattaaaatcgattttcagatg

SEQ ID NO: 114513 - DNA, 444 bp, Heterodera glycines
tttattaatgaaaaaaaattctgccttcttctttaaaagaagaaattgaaattaacacacaacataaggaggatttgaacctgagacccactttttggtgactaactcacagaccactaagacgaaaaaaccaacttaattgtacttggagcccaaaattgactcgccgtgttatcataaaaaaattttgcaaaacaaaagggtctctccccccttttgtttttgataaaattcaaaatcggccacttttcatatagcgccaaaacatctcaaaaaagctatgggtcgcggattctcgactttttttgagtgcccggcaagcatatttgtttccaaggccaaaaatccttcaaataatgaatgagcctacctatcttttgatttcgttatttttttatttacggtttatctatttttatgagtgactgttttaagcaaaaaatg

SEQ ID NO: 114514 - DNA, 1003 bp, Heterodera glycines
taaattccattgaagttgaaaaatcttttttgttgtatttatttttttgtgtcttctgccacttctcataattccactcttaattaggtgataattgtccattatactttctctctattgtaaataattaatagcccaattagttcctcctatgtgacgggtatttatttattcgtttgctattgtttcaattgaattcaaaaatgcgttcctaagtaatttgtattcactgatgatcatctttgattgatacatattattttgcataaaatacgcataaacatttcaaattcaagtgaatatttttttaattttaaaataaaataagccttcatttttaccaatatataaaaaaaggaattatttaaaaaaactaattaaaaaacgactgaaaccatgagctccaaattttaataaaattccagctaataatatacttactagctagctttcgccgccttttaccctctctcactcattaattgctcaagataccgttaaaaaacagttttgttttttgtataattaatttttcttaattttacatttttgaaaatgttatgccacgagtcaatgtgcaaaataattagcatgtaattagtaattttatggtcttgtccactttaagcaattttattataattgaattttttatttttttttaatattaatttccctatagttttattcaatttttgtacattaaaaaacggattatgatcagataaaaataaatattcatcaaatcgtatttggcggtggattcaatgaataaatgaatgagtcattcggtagggaaagcaaaaataaaaaataaatgtgaaaacaatttgcttttagtcatttgcttcgcttttgaccactgcaaaacagaaaatgttaatatcatttattttatttttgcgtaaaacaaattattaaaaaataaaaaaaataataatttatttgaatcttaattgaatattaattttaaaatattttagagtcaattttcagcgcaatg

SEQ ID NO: 114515 - DNA, 87 bp, Heterodera glycines
ggtaattcttaaacaatacaaccctcaaattctgcttgtcttttggtaggcgttgacatttgtgtggccacccctggtcgtataatg

SEQ ID NO: 114516 - DNA, 297 bp, Heterodera glycines
ttttttaactcatttttcaaaaataacggaaattaaacggtgctaaacattcgaacgattaatttgttcttggaatggcatcattattagccttttgtcctgggaatcccattgtctctctgagggattaatttttaattaattgtttgttaattgggcgaattgaaataacggacaaagtaaaagggcaaaacattggcaaaatgccactgatggcgagggggagagattttctgtcgtttattttgaaaattcaaatttcgatttgctttctcttagggtttatttctccgaatg

SEQ ID NO: 114517 - DNA, 97 bp, Heterodera glycines
tcgacgaaaaaagccttcggattattgcagacgaaattttgaggtatttaaaaaaggaaaattgaattgcttctaaaaggaaaatgagtaccaaatg

SEQ ID NO: 114518 - DNA, 487 bp, Heterodera glycines
agagtggaaacaacaacggtaacagcaacactgacagaccagaaacaatacaacaagaaaagagacaacaacaacaacaacaacaaaagcaagcgaagaaaaaagggccaacaccaagtcaatacattcaacaaaacaccagctttttcaagcagctgagcaactgtcgctcggcacgcgcacgtgcctatcgtcagctggtgaggggggcgagcagtgagcagctgttgtgtctggtggaaagtgcgttgaacattctccgtgcacgtgtcccgctcaggagcactcatcttcagcacttgcgcgctcaggcccaacacgtgcgtgcgttgggccgtgcgagaagcggccacggggcacgtcgactgttgctgagacagcagaccgggcgcggcgtcccggccttggctggcttggtggccagcgttgtgcttccactgctggcggataagctcatgagccgcaaagacagcatcatccaaacatg

SEQ ID NO: 114519 - DNA, 92 bp, Heterodera glycines
  unsure (1)..(92): unsure at all n locations
agcgttcaaatgcaacgtgatttttccaatgattatgtaaatttctggttttntcattcttcacatttatagcaattcctcgcgatggcatg

SEQ ID NO: 114520 - DNA, 252 bp, Heterodera glycines
cgtgtcgttgtcgatggagtcggtgagcagcagcaattagatgtaatagtgcagagaatagaattaagaatgtgacgagaatgaaatttctctcaatttcacgcctttttatattcaaatttcccactgaaaaaaagtgcaacagaaaatgcatataaaaggggcgaatttttgtccatttgcacatttgctgctgacacaacacccaatcaacgaacgaacgacttcagtgcgcccaacaacaacacaatg

SEQ ID NO: 114521 - DNA, 214 bp, Heterodera glycines
gtgattaaaagtggtacaaaagtgattcaaagaggtatatcagtgattaaaaaacgtacaaaagtgattagaagaggtgcaaaagtgcttagaagaggtacaaaagtgattcaaaaacgtacaaaagtgattcaaagaggtacatcagtgattaaaaaaaggtgcaaaagtgattaaaggaggtacaaaagtgattaaaagaggtacaaaaatg

SEQ ID NO: 114522 - DNA, 295 bp, Heterodera glycines
taatttttcttaattttattttataaaatttaatattttatatgaatatacacacacatacaattctaaaaaaaaaattaatttgcagcagataagtcagtgtaatgcaaaatttcattttgttttctattcatgtttttgtttattattttttgaatttccaattaaattggtctttttaattaatttatgagcattagtttaaaaaatttaatgttttgaaattataaaagtgatggctcgcaatttaaaaaaacaaatttatttttattttagaaatggccgggccaaaatg

SEQ ID NO: 114523 - DNA, 156 bp, Heterodera glycines
ttggtcacaatggtggatgagtcgttcgtcgttctgtcccggctcggcacccgttcttcctccaccaatgccctccaacccgcggccgattcgcttctcctcgacgttctcttctctcttcccttttggatgccctccaacgaattgtgcaacatg

SEQ ID NO: 114524 - DNA, 121 bp, Heterodera glycines
ttttggaaagtcaaaaataaactgaaaaaagaacacaaacttaacggacaaaaaagttctgtaaatgttctgtaaatatttgggtttatgaattaaacattgccaataatttcagaccatg

SEQ ID NO: 114525 - DNA, 129 bp, Heterodera glycines
tttttatgcatatgttaatgcaacttcctgtttatttatatagagatgttgcacacatttgacccattttatccctccccgatttaatcatataattttcttttttttagcacggaaaaataatcaatg

SEQ ID NO: 114526 - DNA, 167 bp, Heterodera glycines
agtttgaggttgggaaaattaaacaccaaaaatcttgggagaaactcccaaacgcaatgaaaatgccaaaagcattgtcagtggagtcggaaatggcattttaagccctaatttcaacggcacaactgccccaattccatattccatttaaattttggcgttaaatg

SEQ ID NO: 114527 - DNA, 1003 bp, Heterodera glycines
acaaatcattggaactccaaaaattgtcattctgtacagattctaatataaaagtaaatttttaaaaatttgaattttgcaccagaaaattataattattatttttttggtttttaactttattttgaaagttctaagaggattaacgtccggctgtgcacatagaggaggccgaaaaaaatcgaaattaattaaattcaaggttcccaactggaaatttaaaaaaatgagaatttggccgacaaaaacatgcgcttaaaaaatagtttatttttgtgattttgagcaaattttttgagaaaaataaggaaaatttagtttttgaccgtttttaacatattttcactgaaaattggcaattaagggcagactttgaaatttttaggggaattttgggggtcggtggtgccgacaggcgccgccgggaagaattttggaattttcaatgaattttgtaaagaaaaatgtagcatgtagcaaacgaaatgtcttattttttccaaaaaagtgattcttaagggtgtaaatattttcgtctttttcgtccaaattccgtctgacgaaaacgaaacgaaaatttaaaatttttaaatacgaaaacgaaacgaaaattttttgacggacgaaaacgaaacacgaaaacgaaactcaaaaagtgacgaaaaaagggacgacacgaaaacgacacgaaatttcgtacataaatcagtaccaaaagtacttattttataaataaataaaaataaattaatcaaaaaattatatgaataattaatcaattaactgacggacatgtaaaagaatgacaacatttactggatggcatgaatgaaaaatttaaaaaaaaataccaatacataaaagatgtctattttacaaatatgaaaagtgtaaataaattaaggcaatggtaaactttctgtttaaagaaaataaagataaaattatatgaataatatcatgaaatattaacattatatacataactaaaagttctaggatg

SEQ ID NO: 114528 - DNA, 110 bp, Heterodera glycines
agcagtgaggaaaagtggcacaatttatttgttggcacttttacagtatttttaaatgattttcatttgttcccactgtttacatttgctttttgctctgtgtcgagatg

SEQ ID NO: 114529 - DNA, 967 bp, Heterodera glycines
atttacacacaatcgacttaaaaacttcaaaaaaatccacccataaaatggaaaactttcaaaaaaatacacccataaaatggaaaactcaaaaaaacaccccttcctaatttgaaaatttttcaaaaatttgcccactaatatttattttagtctttcttgaacaatacttgtttttgtttttaaatttttagagaatttttttttgtagtcaaatcaaatcgtttattgaaacaaaaaaaaagaaaaaatatttttttaacccatttttatgggggttttataccttttcatactttttgcaatttcttactcataattcaatatgatacatatttctttcggtttttcctacctaaaaaactcataatattttaaaaaaagatataatatttaacaaaattgtggtttatttaaccacaattaaaacgaaaatacaattttatttaaaataaactgcggttaatttaaccgcaaaaagggaataattgggccgcttttttttgtccaagtggcgcctttgtgagactgacggccacagctcgcaagttcgaatcccttccgaattccgttttttttcaagtattcccccattttactccattttccaattattttcccatttttcatattgtccaattatttcccccattttccctaattttccccctttttagccccctcccccccaaaatgcccccctctgttcctcctcccttttcccctcttcgccccgtcgttcgaccccaaaaattcgtcgctgtcgttcgaccgttcccttcgctttttcgccctcgaacaaaaaagacgacgaccgttcgaccgatgaaagcaccaaaacgcttcggtaatttttgcattttattctctttccatttaattttcgccttttgttttcagtcgctccgcgcgcgtgccgaaaccgtcgccggcgctaattcaatcgcttttagacgcaaaagaaatg

SEQ ID NO: 114530 - DNA, 1003 bp, Heterodera glycines
agttttttgcattttttaaaattttctagttattttgataacgattattaacatttaataaatgataagaatgaatcattttatttgcaagttatacgataatcaattattgttggagtattcttactacttttagttagagtagagcgggaccgggaattttgggcaaacccgggaccgggaccttttcgggttgaaaaaccgggaatttttggctgggaaaaccgggaaaaaacccgggactggtcccggtcaaaaccgggacctcggtactcagttgtccgtgttttggtcccggtcccgctctactctacttttatgtagtgtatcaattttttagtccattgtttctcaaagtcttttaatgagttttaccaaccatgaataagcaacatttgcctaaatcctcttattctatctcaagtagcctcgctagcatactttggaatttttgaagttaataattattgttccattctcttgatttataataaaaattatcttaccagaataaataagactagatttattaacaaaataatctttcttttagatgaaaggttttatttctcgattttaattacttacttttttatcttttaatattcaatagtttatcttttaatttataatttttattttaaaataaaatatatcaatgctacttatttttattaagtcttaaaattattttaattcgaaaacatgcataataatctcaaccgtggataattaaatccataaatgtgatttttgaaaacaagtatacggattaatttgttgcatctcttttctaatttaataaatccagatctttagaaatagggattatgatatttcgacaatgttttaggtgcagttttttattttaactgtattttaaataaattaatgattactttttttaattaataaagtcttaataaatgatgttttatattaattttaatttactttcttataattaattagattaatattttaattcattaatatgaaaatg

SEQ ID NO: 114531 - DNA, 509 bp, Heterodera glycines
ttatggtaattaaggaattgtttttaatcaaaatagataaaaaatcgatgtgttatatttttcattttttaaaatataatacactttttattaatgaaaaacaaattatgaaatgtataataattgaatagttatttaaattgaaatgaaaaagattttacaattaaattttaaaataatagctgaaattctttaattaaatataataaataatttaaatgaaaatcattattcatcaaaaaataatttaattaaactaaaaaaatttattattaataaaaccaaacatttaagtttattaaaagtaatgaaaattaacccaaaaaatataaagaaaaataatgtacaccgtccggcttcgaactttgcccccccccccaaaaaatgatgcctcagaatccccaatcacacagggattctgaggtcttaacgatgtcaaaagtaaaatctgatcacgtattcgtgatcagcggcccaaataacccctaaagacatgttttggtacaatg

SEQ ID NO: 114532 - DNA, 405 bp, Heterodera glycines
aatctataaataaacttgttaattttttcaaataaaaatgttttacttaaaattatttctagtttggttcttgttggtcggaacggaaagttgttgcctttcaaaagaagaaaaagagcaatttaccagtgcccgaagaactgtagaaggcgtatttagagacataattaggttagataacgaagcaaaagaattttctttttctgcacataataccatggttgaagcccaaaatataaaaaataaaaaccctgataaacctggtgtaaatttttggcatagcaaattattagatggagttttaaaaattcatgccctatttgacaaaataaaaaagaagaaaaaaatatgaaaaatattaaaaaaggtatggaaaaatgtctagacagaaaagatttaactatg

SEQ ID NO: 114533 - DNA, 52 bp, Heterodera glycines
atttataattaaaggtcagtcactttgtggaattttatttattttaaatatg

SEQ ID NO: 114534 - DNA, 127 bp, Heterodera glycines
gaaaaaaaccagcaaaaaaattttcaattttttttctttttcatttggaaggtccttttttctccaatgggaaatatttttttttgaattattataattaatattaaaccaaatttttaaaaaaatg

SEQ ID NO: 114535 - DNA, 429 bp, Heterodera glycines
aaaaatggcaatgtaaataattaataattataagtgaagattttttaattcatttcgtaattaaaatccctaattttttcaatgaaataaaaagtgcctttaggaaaaaattttttaggatggctaatcttttaaattaaaaattttgacaaatttatattacaaatacatcaattttattatttttttgagcattggtcagaattaatttgacaattttcaaatttttgtaattcattgatctgcatttttgctggattttataatttaaatttttatgtttttaagtttgaaaacatttacaaaatccttccgaattttttgtattttacttgctgatatttcaaaatttttattgcatattttttttattcctgaaatttaaaatattttaaatttaattttaagacaaattttcatttaaaaatg

SEQ ID NO: 114536 - DNA, 164 bp, Heterodera glycines
tctacaaaaaataaataatttatagtttaactctaaaaaaatttaaggaaaataaaaatggtttaatttaaaaggaacaataaaagaaattaggaaaagccagaaaacccattgaatttcgcgaaaacaatgaatttttttagaggaaccgaaagcaccacatg

SEQ ID NO: 114537 - DNA, 481 bp, Heterodera glycines
ttctgctgtggccgaatcagaccgttcgtcaccgttgcttctggagtccgctgctgtggccactgacgccgccactcattttgtagcccaaggcagtccccaagcgtcggtaagtcagttttatcacaaaattctcatcttgtgctttgtaggctggttgtccccagggataatttaaattttaaaagttgggtgaggctagggagggaaaatattgccaatggaactaatttaacaacgaaataaaatgtctgtctggcagcacagatgggagtaaattactgttcttcctttgatattacccctaacgttctattaaaattcttttaaaaaatttttgtagcttccaacgcctccatacattgagaacaatgacgtgtggagaggacagttcatatggagggaacaagaattcttcgactgtacgtgcacacctgtgagtggtggtcctacagtgtcaaaagcgggtcgtgagatgatg

SEQ ID NO: 114538 - DNA, 181 bp, Heterodera glycines
aaaaggatatgtggagagaagagtataaggaaaaaatatggaatcgaaattgaattggctaaagtgaagaagaatccaggattgcggtacatcagcaaattgatgcttaatagtttatgggtaagaaaattgaaaataaattacgataggtaattttcactttcagggaaagttttcgatg

SEQ ID NO: 114539 - DNA, 804 bp, Heterodera glycines
accgagaatatgattgttggaaattcattgagctcactccttcgtgttgtctctgtgtcgggggcggtaccaggcgaatatacggaaaaaatttacgactcaccgctctatgcacgtgttctaccaaaagaagtatcagaaattgaaattgagttacggacgatgacagacggacgactggtaccattttcctatggtacagtgctggtcgtactgatatttaagaaggtgataaatttttgaaatcactcattattgtttttattatcacactcaattgataaaatggtacatactctttatgacacttcggtttcgggctatgatgcattttttgtgcaaaatggttgtggagtcggggatgactcctcctaccaagtttttcgaggagcgccaccgtttcagcgcggatggggcccagcacagacgggtgcggggctaggtgatatttttcgtggactctggcgatttttcctgccactaattcgcagagcttgagattctgttgcagatgaaacaattcagactggaaaacgctttataaatagggtaatcgatgaaaaacccggtttgaagggaacgatagagacgttggcaactgagagtaaacgtggagcggataatgttttagagaagggcggatttcggcgtcaatttggcacaggagggcgaagaaagcgtataaaagctaacaattcctccattctatcacatcaaacgataattggaaaaacaataacaaaaccgttaattcaaagcaaaaagaggcttcgatcagacgcgttcgggctttattaaaaaatg

SEQ ID NO: 114540 - DNA, 295 bp, Heterodera glycines
ggttgcattgaattcaaatcttcagcaatactcacagcaagagattgcaccacacagattgtggtttacattcagcaattagtggaaggaaataaaggctaaaggcatgatttttcggtcacctcgtagagggggaaatcagcgacaggcggttccggaaaatgttcagcctcgaaaccaaaattttccagcatttccaccaattaatttggacaatcaacaaaattttcaacagagaaatgaagagaataatgagcgaaataatggaaatcggaaccattcagggactcaaatg

SEQ ID NO: 114541 - DNA, 55 bp, Heterodera glycines
aattgtatcccgctttatagattgttaaatttaaaataataaatattgtatcatg

SEQ ID NO: 114542 - DNA, 384 bp, Heterodera glycines
tcctttattcaacatttaccacttcgttcgctgttttggggacttcggtcatttttatcatctcctacattaattagtctttgttaattttcggctcagcaaatttggacacaaaagagcaattaaaacaaagaaaatgattgtttttgattacgatgagattgtcgaattacgcattcaaattaattatgaagagcataaatatttgttcttgaaaattggaaaaaaatgcaaatgacttaattttgatttacacgaaaaattgttgtttgtttttcaatttttaaatgaaattattatttttttttaatcagaaccaaaaagttaattttttgtaaattaacatttttcggccaaaagcagttaatgcatggaaataaaatg

SEQ ID NO: 114543 - DNA, 810 bp, Heterodera glycines
gaagaggtaaaaaagtgattagaagaggtacaaaagtgatagaagaggtgtaacagtgattagaagaggtacaacagtgattagtagggtacaaccataggggtggaagaggtataaacacggttaaaagaggtacaattacggttaaaagaagtatagtttaaaattaaacaaataaggaaatggttttattaaaaaaagaaaaattgaatattaataatatttttaatataacaaaagaaattctccatttctttattaaaaataaactataaagcatatagaattatagaatatttgaaattgaaatgaatttatttttaacaaatttaaattaaattaaaacatgaaatttttttaattttaataaataattaattttaaataaaacattcaccaaaaataataatttaaaaaataataattaattttaattttttaattaaatttttcacaaaaaaaaacaatttaatttaaattaaaaaaatttatttttttatatagaaaaaaacactcatttaaatgaattaaaacattaaaaaagtgattaaagaggtacaacagtgcttaggagaggtacaacagtgattaaaagaggtaaacagtgattagaagaggtacaactgtgattgattagaagaggtacaactgtgattagaagaggtacaacagtgattagaagaggtacaatagtgattaaaagaggaagaacagtgattagaagaggtacaaaagtgatgagaagaggtacaacagtgtgagaagaggtacaaaagtgattaaaagaggtacaatagtgattaaaagatg

SEQ ID NO: 114544 - DNA, 1003 bp, Heterodera glycines
ttcctgttatgtgtagggagtgtaattatatggatataaattgcgaaatatggccataaaatatggaccaaaaatcgtaaaatatggaaataaaatggcaaaaatatggacataaatttttcaaattgagggtataatttcccaaaatttctttaaatttgttaatataaagtaaagcccttcaaaaatggctaaatatggtattaaaaatcattttagaagaaaaaacacgataaagctaaaatttactcatttttagcgaaaaatcaaccagaaaagtgaaattttatcttttttgcttatttttgacataaacttattaatttttaagaaaattcaaatttattcaatattcccgagaaaatttggcgaaaaaatgatttttttgaaaaattttccggtttttgggctcaaaaaggccaatttagctgctggggccgttctaatagaggttttttggaaaaatatcaaaatatggacaaaatgccaaaatatggaaaaatatggatatggaaacccatcctaaaagcttaaaaccaagctaaaaacatgtttttcgtgcgtttcaggcctcccacagtgcaggaaaaaaaaataaggatttccatataattggaagccctagccataacgcattttaaaaagtacacttcagtaccaggtgaatgccacgccagggtttggaccgtaactgaaaaaattgccgtaattacggattacggatttccgtaattgaaaatcagttacgtccagccctgattctgaggcatcattttgaggggcgagggcgaagttcgaatccgggcggtgtacattatttttgtatgcatttttgggttaattttcagtgcttttaattaatctaaaatttgttgtaaattatttaaattcatattatccccccggatgattattgttcaacctccttagataggggggggggctaattagagataataggtaaagtgaattagagtgaaaaaacaatatttcagtgcgaatg

SEQ ID NO: 114545 - DNA, 59 bp, Heterodera glycines
tttttgagtttaaaataaaaatattttcagttataagaaataattcgttgaaaaaaatg

SEQ ID NO: 114546 - DNA, 345 bp, Heterodera glycines
atttggcgctcaataatgtacacattttctaacattaaaaaatattgcttaaatagttggcacaacacacacacacaagaatatatctgacagttgttgttgttttgtctaaattttataatttgattttgaaaataatatttctgcgcccttgctgcgtgtctgtcgtctcatctaaatcaaatggacaatggtaagaaaggagagctcaatgatcgcaaaggtgtgaaacggcgatacccattccctctggtgtccgcaagagcacaagattcatggtaaaagtgtaataagataccgcccaagcttccgatcaaacacaggagaaccaaacttgaacaaatg

SEQ ID NO: 114547 - DNA, 171 bp, Heterodera glycines
ccactttttctgtttttgtttttgtgcacatcttcgatccttatctcgaccaatttccatgccttctcaaataccgagtttgcatatttgcattagctcttatcttttttgctacatattaacataaatgaacatgagggtcattcattcgttgcaatctcaccaaaaatg

SEQ ID NO: 114548 - DNA, 114 bp, Heterodera glycines
  unsure (1)..(114): unsure at all n locations
taaaattttttttaanttaaaattaaacgctttttgaatgacttttanaatttatttttttttgcaattnatcgttataaaagcaatttaatgggcacaaacaaatgggcaatg

SEQ ID NO: 114549 - DNA, 118 bp, Heterodera glycines
gtcagaatgaaataaatttcagatttttggcgtaaacgatttcgcaaatgtgccctctgacggccgttccgattttgacgttcccactgctttccatgaaggagttcccttcccaatg

SEQ ID NO: 114550 - DNA, 121 bp, Heterodera glycines
tggtctgaaattattggcaatgtttaattcataaacccaaatatttacagaacatttacagaacttttttgtccgttaagtttgtgttcttttttcagtttatttttgactttccaaaatg

SEQ ID NO: 114551 - DNA, 233 bp, Heterodera glycines
  unsure (1)..(233): unsure at all n locations
aaatcaatgagataaaagcaattataaaatggatttatatatcatttcattttataaaatgatataannataatattattttcttattaattctgaaaaatctaaataaaatttatgctggtggaataaaagaagaaaaaaactttgacgaaatatttggccaaagatgggacgaaaaagaggagaaaaatggagagaatgaaactgatcaaaatggaataaatggacaaatg

SEQ ID NO: 114552 - DNA, 78 bp, Heterodera glycines
tatgtcattcaggaatacatatgggcgcacattccatctttgcctgataaagatgacgacacgcccattgcaaaaatg

SEQ ID NO: 114553 - DNA, 767 bp, Heterodera glycines
tcatcacaaattgtactttcctcatcaaaatggactgattttacatgtccaaaaaacaataaataataaattaataataaaattacaaaaaaaaaaaaaattttttttttgcaattttttagaaaattttcctgccaaaaaaaggacaactacaaaaaattggggtaaatcactcactgctgggcgtagaaaatgtgaaaaatgattaatcaaatcataattacttataaatgatgggggtggacgagtcgaaaaatttatcggcacttttccccggggtccaccaccaccaccactgacactgatataccccccaaaaattgaaccgttgggtgtgtgtgggtgctgataaatcttgtccaacaaaatcagcgattagaaaaatgataatttttctggtgctaatgattataaagatggtatgataagtggacgtcttgaagttgttgttgttgttgttgctgtcatttgttgtccacaacaatttttctcccgcccccgcccaaaaacgccggaggggccatttttgggtaccacaatatctcaagagtgacaacgaggagagtaattaagtcttgagaactgaaaactatcatatcatcatcaccacccaacctttatctgttgaaataatatctatcccattaaccctaattgcctttaaaatgataaaagggtcggcgctggggtcggcaaaatttggttttgataaaaaaatgatgacaaattttttgataagatttttgctagttttcacactgaaaatg

SEQ ID NO: 114554 - DNA, 289 bp, Heterodera glycines
aaaaaaattcttgaatttgcttctgaattttttaattttaacccgaaaattactttttcgaaaattttgcacaaataagaggcgaagaaattcaacgaaatttttattaggattttgatttaaaatgttgagaggtttaacaaatttgtacactgaatgttggatcgtcaacaccaatgagaaatgactaacagaaaagagggagaaaagggcgttggtttaggaaaatagcttataataaaggagagacgagcagacgatgagtgagagaaaaatagtggtaaaaatg

SEQ ID NO: 114555 - DNA, 1003 bp, Heterodera glycines
taaatgtttacccgaaaagggaagagagttgtgaaactataaggaaaaatctaatgctattgtttcatagtgaaaagagatgaatatgcaacgaaaaccggtgaaatgagaatgaaaaggaatgatgatacaagggggatagatgaattatgtgttagtatgtggtcaaacaggtaatgaataggtaaaactctgtgataagtcgtgaaaagcaaatgtatatggtgaaaagtgaaaaggtaaaagcaaaaatgttcactgataaatagtgaaagttggtgaaaagcagtaggcgacaagcgaaatggttagtggtaagtggtgaaaagaggtgaaaaacaatatgcgacaggtgaatgtcctgtggtaagtggtgaaaagaggtgaaaaacaatatgcgacaggtgaatgtcctgtggtaagtggtgaaaagaggtgaaaaaacaatatgcgacaggtgaaatgtcctgtggtaagtggtgaaaagaggtgaaaaaacaatatgcgacaggtgaatgtcctgtggtaagtggtgaaaagaggtgaaaaaacaatatgcgacaggtgaaatgtccagtggtaagtggtgggaggaggtgaaaaaataatatgcgacaggtgaaatgtcctgtggtaggtggtgaaaagaagtgaaaaccaatattcgacaggtgaaaatgtcctgtgttaagtggtgaaaagaggtgaaaaacaattggcgacaggtgattttcagttataagtggtgaaaagatgtgaaaagtctaagaacattgatgaaattctagagaagtgatgaaaagaggggaaactaaaaatggaaaagtcaaatatttcaaaaacagaaaatacaacgacgatgctgattttcgtgttatgtggtgaaaggcaaaacagaacagtagttgagatagaagctattttaaagtggtaaaaaggcaaagaaatgttcgaatatgtaaaaatataataaaagaatttaagagatttacatttaaaaatg

SEQ ID NO: 114556 - DNA, 69 bp, Heterodera glycines
agttgttccgacggggccatcgacggaatgcaaaaaactttctcattttaggaccgctacgggaacatg

SEQ ID NO: 114557 - DNA, 160 bp, Heterodera glycines
ggctggcacaaataattcccttccccccccccgctctcgttcgttcgttcggcggcttctcaaaaacaattttcaattagctgacgcgacggctggcacaattctcttctcccgtttttgtcatttctttacgaattatgaatatattttctagaaaatg

SEQ ID NO: 114558 - DNA, 1003 bp, Heterodera glycines
tttctcccccttttccccctaattttcttaagtagtcagctgtttcttccttcccctcattagcattacacttacaattagttcatcactgaaatttatccgcggttcagcagctgtaaaaatgcgaatttttcgaggtgctaacatttgaaaagcattttaatttaaataaattattaattgagcgaaattaattaatttacatcttaattacatgggtataataatggcttagccctaattgccaaatgagacaattaaccaacaaattatcccagcaatacaataatttttaataaatgaaaccttaacgtaaattagcggtttttgttgcattattttcaaaccacggggtaattaaagaggtaattaattaatgtgaaaggcgtgaccatttctaattattttaattaattctaaaagtgccaatgttctcgcaaaaaatcattaaaaacaaaaatttgccaattgattatttgcaattatttttaatcgattctctctttttgagcaaataattcatccaatttctccaatttctgaaccatcccccaattattccattcgttttttcttcacattttatccatttttgcttcatatttttgtgcttttattttatcattttatcatttctccggcggaaattccaatttcaatttaaatttcaatgttttaatttaaatttcattttttatttattttttttagattttttgctgcaaattgataaagcataaaatccttagaaaaagcaaatcaccaaatgagcagcagattccaggcaggcttttttctcttttcttttttttttggtggcgtcccaaattaaatttttattaattaataattaaattatttttatttattttatctcatcagagtccatccactttttctgttcttttgtgcccaatattggattaaatgaatatgaaaagctccaaatatccacatttaatggatggcatttccctcgtggcgttttttgatgaatgaaatg

SEQ ID NO: 114559 - DNA, 1003 bp, Heterodera glycines
ccaatttttaagaaaatttaattttagttcaatttttttgacaaaattttgctaaaaaatgtctttttcgaaaattttttcggtctttaggagtcaaaaaggccaatgtcagcgcctcagatcaccactagaaaaaatgaattaaaaaacaatttcgggaccaatgttctcaacaatcatggcctgattttttttggctattttttcatggaaaatgtacatattttccccctattttcccccgttttcctctttattgccccccgcggacgaaagaagtgttaaaaacatcgcaaatgaattctcaaaacactcgccacattagtttagaggcggtggtggttgtggtgcattgagtggtgcaatcgattcattcgttttcattttcatttcgtaaaatatggaaaaaatttgtcctccataataatcactaatcgtttttatggcgaatggcgtaagaaacgccgcggggcgattatctctattttctccattctctctctctctcaatccaggaatggagccactacacgcgcaatccgcggcatttttttccgcgattcgctaatgcgacaatttgccatccgcgtagcgcggggattttcatgtccgagctccacccctgcttcttccgagtcaatggcaactcgtacaatggcaatttgtacaataaaaaataaaataaagccttacctaagcttaagcatagcctggcctaaagtttaggcctaaacctcgtaattacggattttgtatgggttctgcgtaattggctttcaattatatacagccctgctgatctccttggcacacgcttcgatctgtaaatgcaataaaaattaccgtaattcatacgggccttattgacccaaaaaaatgatgagcatttacgattttccaggcttgaatatttagccttaacacattttccaacattggctaattaccgtccctaactaattggcttttttccctcccacttaattgggtaccatcaaaaatg

SEQ ID NO: 114560 - DNA, 242 bp, Heterodera glycines
actgaaaaaaggtttaatgatcgaattaaaaaataaaaatgtaactttgcaagtgctaaacggctgatggagtccctcgctgacaatgttcgaaggattaaccaccaaagagaggaaaattaagaagaggaaatggacacaaacgacgagggaaagctcatcgaaccaaaaggaattgccagttcgagaatccaaaattgggttgcgtcgatcaacggcataaataacaattgcgaagaatg

SEQ ID NO: 114561 - DNA, 93 bp, Heterodera glycines
gggtgtttcgcacaaaaacgagcgacggagagcaaaaatgttgctcttttcacatgaaaacgttgcgctaggtgccctgagagatgaataatg

SEQ ID NO: 114562 - DNA, 305 bp, Heterodera glycines
aattgcaatgtccgatcccaatcacggcaaattttcaccggtttaccaacccctttcggggaaggacaagcacgctgattttgccagtgtagcgcgcgtgcagccccggacatctaagggcatcacagacctgttattgctcaatttcgtgcggctgaacaccgaaaatccctctaagaagttgtgcccacagaagcaatgagccaactatttagtaggctagagtctcgctcgttatcggaataaaccagacaaatcgctccacgaactaagaacggccatgcaccaccatccaccgaatcatg

SEQ ID NO: 114563 - DNA, 1003 bp, Heterodera glycines
  unsure (1)..(1003): unsure at all n locations
ncgcgnngcgcgcccccttcgaaatgcgaaagcgaaagcccatccctggtgtggggttaccataactttttggtctgcgaggagcttgttcctgtattatttggaacccgcaaattctgggaaataacaccaggaacttttatacaaaaaaacgaacaacaaatattcaggaaaaaaaaaatttgcatttcaagaaaaatctcttcaacacgttgaaaacccacaaaaaatgaattattgtaaaattagttaatgcaaagtctaaattataattgttttggcacaacaaagtgcgttgtggcaaattgctgaatgaaaaactgcaagctttaagtgaatttttgcattttccaaggcaattgagaagggggggggagacgggagctctttttttgccgaaattcccacggattaaacacgccaaaattggtggaaaatgccgagaacggacagatggaaattggcaccatcagttctcccaattcacagtgcaaggatggcaacactttttgtgaagcagcattgatttatttgctgctttccgggcccggggtggacactttgggcgttggaggggaggggggaatttggcatcatcaaaaagagtgccaccccccttggcggggggggggggcttaaaatttcattttttcccatccattcaaaagatgagggggggggggggggggggagatacaaatccctgaaaaaatttttgccaaaaaataattgcatttttattagtgttttttgagagtaatctgttttctctgtttgacaacaggggtccaatttttttgttgagttttcctattttccgggactcctaggggccagaaaaatacgaaaaactttcttttaaataggtcattaagttcttttttgaatttttacggcaaatttttcgaatttatatgggaaacatttttcttaattgtgtgaaaatattgtacatttccctcgtcctcctccttttaaatgatgatgattttttaacgaaatg

SEQ ID NO: 114564 - DNA, 1003 bp, Heterodera glycines
ttttacatattcgaacatttctttgcctttttaccactttaaaatagcttctatctcaactactgttctgttttgcctttcatcacttaacacgaaaatcagcgtcgttcgttgtattttctgttcttgaaatatttgacttttccatttttagtttcacctcttttcatcacttctctagaatttcatcaatgttcttagacttttcacatcttttcaccacttataactgaaaatcacctgttgccaattgtttttcacctcttttcaccacttaacacaggacattttcacctgtcgaatattggttttcacttcttttccccacctaccacaggacatttcagcatattgttttttcacctcttttcaccacttaccacaggacattcacatgtcgcatattggtttttcacctgttttcacctatttccaaatgtttttcacctcttttcaccacttaccacaggacattcacctgtcgcatattgttttttcacctcttcaccacttaccacaggacatttcacctgtcgcataattatttttaacttccctaaatccaaaatctaaaaataatgatgaataacagaaaaaaacaatttatggggaagaggtgaagggagcaaaaaaattatcaagaaaaattatttttaaattgctacgaatgactttaaacaacatacattcagaattttcaattttattatttttttaaatgggatttgaattatctttgggtcattgagctgactgatgataattaattaattttgcttaaattttcaaaattttgagcagcctatattttgaactcgttttttaatgtaaatcgctgcaatcgccgaccgttactgatacgccaaattaccgggaggtcatcattttaattaaattattaaagtagcaacgcttaacaaaggttataaattataaaaaaaagtgaaatgaaaaaattggaatgaaaaatttataaaattaacattttgtaatttagattatg

SEQ ID NO: 114565 - DNA, 63 bp, Heterodera glycines
agtaaaaattaaaatacgattttaaacttttaaaatgattttcccatatttgagcggattatg

SEQ ID NO: 114566 - DNA, 316 bp, Heterodera glycines
atgaaggtgctaatgatgatgatgtatggcgccggtaacggacaagatgttgacccgcaagccaaattttaaggctagatattctctgatgatttttagcattcaaccaaaaaaacgctttacaggattttttgcttttcatcttaaacaagtcgcttctatttgcatttgccatattatatatatagtaatgcgttaaaaaacgctccttatttccaccgaggtgctgaagatgtgcgaaaacagaagcattaatctcatgtttagcctttttcttttgcacacaaccacaatacatttgaagagtcaaataatg

SEQ ID NO: 114567 - DNA, 738 bp, Heterodera glycines
attttacaaaatcattgattttgtctatgatttttcatcatgtaacataatttttaataaaaaaattttcatataaggataacttgaaaacatgtttttttgagttttcagggttgctaaccacgaatatgaccttagtgttggtcagttccgaatctcggacccgaattcggacaaaatgtcgaaaaatcaaaaccaatttttgttgtgagaattttgaatttcgactttgttcgaattcgggtccgggattcgaaattagtgaaaattaatgtcatattcgtgatcagcggcccagaaaacccccataaatatgttttaacgactttttgaaaagaaaaatttaaaaattttcatttattagggggatgtatttttgaaaaagattttggtcaatttttgtttgttagggttgttttttcgttttattgcattttgtaataatattagcaaaacgccaaaaaaggtgaaaatagttttttttctaaagaggcagattatgaaactttttttttttaaatttcccatttaatgatttttgtgtaacccctttttgatgattttgatatcgacccagcacctatggatacatacccctttcttaggaaataatgtacataattaaaaacaaaaaacccattgaagggtacccgcaaagccccaaacaccaaatactggtcgcatttctggcttatcattcgtgctaagtatttcctagttcttttttagataaaaatg

SEQ ID NO: 114568 - DNA, 236 bp, Heterodera glycines
agtgattaaaagaggtacaacagagattaaaagaggtccataagtgatgagaagaggtacaaacaatgattagaagaggtacaacagagattagaagaggtacaattttgatgaagaggtacaacagcgattagaagaggtacaaacaatgattagaagaggtacaaaagtgattataagaggtacaacagtgattagaagaggtgcaacagcgattagaagaggtacaaacaatg

SEQ ID NO: 114569 - DNA, 161 bp, Heterodera glycines
cctataaagaaagaacatgactactgaattcatatttggaactgacttgatcccgaagcgagttgtagtatgaaggcagatggtttgcctttttcgaaccgcagccatatccaaagtgagcggaccgaatggttccgcaacagtgcgtcactggagcaatg

SEQ ID NO: 114570 - DNA, 461 bp, Heterodera glycines
gcggaataatgggtttggggcggaataatgtgtctgatactacttatgtttattcatcaaaatacataatagccccgagggagtgttaagaaagaccaaaagggggcgggcggggagagaaaacattggcaaacaaacccaagggcaaatgattcatccaaccgtatctttggatcattattttatttttaaaattttttatttttctcattaattaaactaattatttctaaatctgatagggcaaaaagtttttaggcttagttttgatttatttaattattattttcaagaatgaatgaggacggccttacgccgtttgaccaaattccggaattacgggaattacgggactgctttattaaagtcggttttttaatttattattttttaaatattttcattttagttacttcacacccaaattgatatgtggaataagttggagaaggtagtaaatg

SEQ ID NO: 114571 - DNA, 56 bp, Heterodera glycines
ctttgagggaaactgttttcattttgaaattggtgaattcgcttttgtttagcatg

SEQ ID NO: 114572 - DNA, 72 bp, Heterodera glycines
taaatcgcttgtcaacgctatttttaaaatttcgataaatttttaaaatgaacagtcattttttaaaaaatg

SEQ ID NO: 114573 - DNA, 1003 bp, Heterodera glycines
tggtggctaccctgattatatcatgttaagcttatattaaaaagaaaaatattcatttcttactattgaaaacatcaaatcaaaaactattttaaaaaagtcaatcaattttggattaataatcgaatactattcaatgttgcattttccggctccaaataaaaatatatgtaaaaatggagaaaaaaacaaatcaaaaaccgggatgtcggagattcctcggcttgatcggtctcaatactgatctttccagctctaatctattttcttgaaaatttctgactccattcctttatagtacttataatagggaattttttgaaaatcttcttattctaaaacaggaaaagagccaaattataatatgcggacatggaaatgagctcagacaaaccgaaccaaaaagtaagaaaaaatagaaattataaatttaatattgtatcttatacatattaaatagaataggaaaatttaaaaatggcagagaataaatccagttagtttttattcgtttttttgtcaacgccaataaattaacggcaaaattatgacgccataaaagaggtgaaaaacggcaaaattataaacggaataatatttgattaataaactgaataaatttgaatttaaaaaacggcaaaattatgacctaaaaaagaacaaatggaataaaatttataatttgaaaaacggcaaaattatgaccccagaaaggagatgaacaaatggcatcaaatttgaatttaaaatataaccagaacaaatcttttttataaataattctttttatccatgtattttgtttaatgtaaaaacttctaaaaacatttaattctcccattttgataattcatctaatctattcggattttttagggtagtgcggcctatctgaagcagaaattcattaatttgataattaaattggtggacaatggccgatcacaacaaccaaaaaaaaaattttaacccaattgagctttgccaagaagcagtaaaaatg

SEQ ID NO: 114574 - DNA, 318 bp, Heterodera glycines
tgtccgaagctaaaagagggggtggtgggaaaatccttctttccatgcatcaatgcgaccgaattttcccatttagaaaaccagaaaagatgaagatggatggatgaatcaagggattgtttagattaaaggatgagaagtgggcaaggggctaaagaaccagacaaaatttaatggtcacaaatcgattggccggcggaaggctttggaataacgacgacggctgacgcacctttttgagggggaggcacagacagaaggaaatgtgagagacatgcacactctatgaatccactcgacggcgcgctgtcagaaatg

SEQ ID NO: 114575 - DNA, 213 bp, Heterodera glycines
attttaacgttttttaatttttagatttttctcaatttttatttttggaattccaagagccaacggtcagtaagcgcgatgaagcttgtccgctttttgatgaaattgtcccatgagtctgtgaccatcgagctgaagaacggcacacaagtgagcggtgctattcagggcgtcgacgtggccatgaacattcatttgcgctcggtaaaaatg

SEQ ID NO: 114576 - DNA, 127 bp, Heterodera glycines
gccgttcataaggccaacaaccaccctttttcgaacattcctaagagcggacgattttcgtaaaatcttttctcttttctgatccgtgatggagattatcgtctttcgtgggatttttttaaacatg

SEQ ID NO: 114577 - DNA, 628 bp, Heterodera glycines
ttgatcatatccgcgatgcttcgaatgcccgagttgtgatgtattcagagcgagttgttgtccggcttgttgagtgaagagaaccgatgggctagcagagtgaattggttgaagcatgtctaaactgaaaacccttcccccttttataccaaaaattcttggttatttaatagcattcaaattttacacattatcattttatggttttttcatttctaaattattttttatcgttttattttttttttctccccttttatttaagaaaggaaaacttttcataaacaattttaattgcttttacgttcaatcgttttattgtggaataaatttatttattatttggggcgttttattagattattttttagtttttattgcgagaagcattcgcttcgttttttatgaattcattttgttttatttatttattttagtttacttttattttatattcatttatttatttaattttaataaaaaattttatgaaatgtttattttattttggatttatttttattaattattttgtattttcaggtaaaattcttattattttaatttggttttgtttttttaatagttttatattttttcggatttaatccgacaggctgcacatatg

SEQ ID NO: 114578 - DNA, 672 bp, Heterodera glycines
ttcctgcaaatatttcatatacaatacgtaaattaagttttcttaacattgctgcaaattatttattcaccaaaatcatatttaattttttttctaaatttctttatttgttttacaatatcagcttgtttaaattaaaaaactttcatttcagtggtcaatggccattgttgacaattttttatttatactgattaaactttgatttggcccaatgcgcaaatattaacaaatatttttaatcaaattttataaggacatttccattagctaaagcgtaaagcaaattaaattaattttccgtccagttttcccgcttcataaacaattaagctataatttcattttaactccattttataaaagcgcttaattgttgttcaacaattggtcagaagtgcacctgactgtatttaacagattttatgaggttttgtttgacatgagttttgcggtgcttctacttttataaattttcgaaatccacctttctgctatgtgcatttttgcgaattaatcattcattattcatatgaaaaaatgtaaattttttaaattaatttttcgaaaatagagattcacaaaaaaacgtacggactcctgccttttttcataatcattacgttgcttttagtgggttaattacattttatagcgtaaaatttcaagatg

SEQ ID NO: 114579 - DNA, 878 bp, Heterodera glycines
cttccctatagtctgtactttaattctgcgttggatttttgctccccataaatgtttgagtaccccaaacggacacttgaaaaaatcgatttttttgttttcggggcagtccccccgaaccgatgcgcccagatttatggggagaccgaatccttcgggaatagcttccctatagcctgtactttaattctgcgttggatttttgctccccataattgtttgagtaccccaaacggacacttgaaaaaatcgatttttttgttttcggggcagtccccccgaaccgatgcgcccagatttatggggagaccgaatccttcgggaatagcttccctatagcctgtactttaattctgcgttggatttttgctccccataattgtttgagtaccccaaacggacacttgaaaaaatcgatttttttgttttcggggcagtccccccgaaccgatgcgcccagatttatggggagaccgaatccttccggaatagcttccctatagcctgtactttaattctgcgttggatttttgctccccataattgtttgagtaccccaaacggacacttgaaaaaatcgatttttttgttttcggggcagtccccccgaaccgatgcgcccagatttatggggagaccgaatccttcgggaatagcttccctatagcctgtactttaattctgcgttggatttttgctccccataaatgtttgagtaccccaaacggacacttgaaaaaatcgatttttttgttttcggggcagtccgaaccgatgcgcccagatttatggggagaccgaatcgatagttatattacttttctgatttttgctccccataaattgagtaccccaaatatttttttcagaaagtcatg

SEQ ID NO: 114580 - DNA, 212 bp, Heterodera glycines
ggtatgtgagcgtcctgcctgatagatttcggcagcgacttcactgtggctgaggacgacgacgatgatcattattttacacattcatatattttttgcttataaatgtttaaattgtgcacaataattggtcaatgttcctcaaataccttttgtcacactcgtattatcccattgattttgtttttcagatgccttctaagcaagaaatg

SEQ ID NO: 114581 - DNA, 65 bp, Heterodera glycines
ggtatttaaaaatccgatacaatttagattcaagaaattgttttacgtttcagttaaaactgatg

SEQ ID NO: 114582 - DNA, 1003 bp, Heterodera glycines
accaaagaaatttaaaaatattaaaataaatactttcttttgataattaagtttatttaccgtaaataattcagtgaagtcgtcattgtaacattgatattgatttccgcaatgaggcaagtaaaagattataataaatttgcgaaaatcttaagggatatttacttatttagttaaagaaaataattatttaattgatgaaaaatactttcaaaaaaattaattaaaaaaaaataataactttgctcagcactatgaaattttaattataataaaattattcagttcgtataactttttaatataatacattatacaattgcgctgaatataaagacatcctattcccatgggccgatcgagttgaaattttaaatgcacgtaacaatcctgaaaatattaagattctaaagtgagaaggcgaaatgacaacggtaaaaaattttacgaattttttttcctaaaaacgggtgttccataaatataaagacattagtggaaattcagctcaactggttcatgggaagtggtcaaactcataaaagttcaaactagcggtgcgtgaaccgtcggatctgggctgggaaaaagcgcttcgcgctttgtgagcttcgctacctagactgtgaagcgatttaaattgatcgatttggttggagaaatttttttttgaatttttaaaaaattattatgggttagtccacatcgaggctcaagacgggcgcttcgcgcccgttatttatgggttgtgagtaattgttggatccgaagcagttattagaagaggtacaaaagtgattagaagaggtacaaaagtgattagaagaggtacaaatttgatgaagaggtacaaatttgatgaagaggtacaaatgtgattagaagaggtacaaaagtgattagaagaggtacaccagtgattataagaggtacaacagtgattataagaggtacaacagtgattagaagaggtacaacagtgaatagaagaggtacaacaatg

SEQ ID NO: 114583 - DNA, 578 bp, Heterodera glycines
cgaaaatgcgaaaagcgaaatgcgaaaagcgaaattttttctacaactttttaatagttaaaatcataaagcaaaaatcattttttaaaattttattacaaatttaaaaatcaataaaacgcttttttgaggcgcgctttttccaaaaaaactttttgggaagagggggcaggcgccgccgggaaaatttttgaaaatttgattaaaatttgttgacagattttcaccaaaaaatcatcaaattttgtgatttttgtatcatttttctaatgagaaataagagttttggcgcgccgctgagaacagtttttcatcaaattaccaaattttgcgattttgggccattttctaagaaaaaataggagttttgggggcgcggcggtgccgataggcgccgccggggaaaaaattggaaattttgatcatttataaacagtttttcactgaaaattagccaatttataggtaaaattttgaaaaattttatgggaatttaatccaattcttaggggtgtaaaagtcgcttttcgcgccaaaaagcgaaatgcgaaaagcgaaatgcgaaacgccaaaaaatg

SEQ ID NO: 114584 - DNA, 498 bp, Heterodera glycines
  unsure (1)..(498): unsure at all n locations
tatcattcgaaagcttttaacatgctctattagccagatttaactcaaaatataaactgagcaaaaaattcattccctttgctgggagggtaacaaaattgtggaatcaactcgataaagaactaatcaaaacaaactctttaaatcaatttaaaaccaaacttaaaagttcactagggtaatgaaaccagaaatagaattataacaaattcctaagtgatttggttttatttttatttttcgacctcatttgactttgacctcaatttatttatttattttcacatatttgtcttttaattcttgtgatcatcactttattttatcacttactctacgacacattatctgaacagtcgtcagagtaagaggttttcgcccttctgatgacttttttatttttacgaataaacaaacaataaacaaaatttggttttttgaactcttctgatgccgctgngaccgaggtaatccgcccatttcagattatgcaatatg

SEQ ID NO: 114585 - DNA, 249 bp, Heterodera glycines
ttgaaaaaattctgtttgaaaaaatttttaaaaaatttctagcggcgtgatttcggcggcgtgattttgtcctgttcccgaattttttagaaccacaaagtccgtgggtttttttgcttttgaattttggccaggatattttattttcattttttctactaatgatacaactgctttagccgtgaccatccgtcccagcaattggtgaacgtggcccaggcctttctgaagtacggtgggcctgccatg

SEQ ID NO: 114586 - DNA, 793 bp, Heterodera glycines
aatttcattacacttaatttctctaaaaaaattctgggagaattcttccaccctacggtatttatttcttttgtaacatccttgtatgttatatatttttttgtctaaaaaaatctcacggcacgttcagttcagcgctaaaattacagtagaaataaaatattataaaaaatcggagggcacggggtagggacagttatccctccccattacccctggggcaggccctaacaagaaaattatgtaggcaaaacccaagtgaatttttttatttttttttttgctcttcggtcacaaatttttgagagaataattttaaaaaaataaaaatgtatatacccaaaaaaaaaaaaattaatatcctataatttaattaaaaaatcatcattcctttaaaagcgcaaattggcataaaaatgttgtcgtgttagccaatcttaccctataaaatgctagcaatagccaccaaaaatgcaagcatataaaatggcaccaaagtcgcttttcttggcactttttacgaaatgctaaatttcgcaatgatcgaaaatttaaatgaatttttttaagttggaaaaacggccatgaaaatgatatttagcggcacaaatgcactctattttagcagctatgatagtcagaggcatagtaaggttcgtttgtttgatggagccaaattgtgatgcggaaattttgccggattttcaaaatttttcccaaattttcccgttagacttccaacttttcgctgggaaattttgaaagttgtaaaatcgaagagaagttggacatg

SEQ ID NO: 114587 - DNA, 318 bp, Heterodera glycines
gtgttgatactcattttttcaattagatgcaattacggtatgctttttcaaaatcacttatacgatctacatttttacaataacacaaaaatactgtctcctccaaaaacaccgtattcttacccttcccactaaaaatactatttttggagtttttatcaacgaaagtgccgtatccgcccacataaataccgtatttttacggacctaaagaattttattttactaaattggactgtttatcaattaaaaacaccgtatccccgaatactaccgtatctctcaaatcctaaaatttttagacattatcatagaatg

SEQ ID NO: 114588 - DNA, 509 bp, Heterodera glycines
  unsure (1)..(509): unsure at all n locations
ttatttatatttttaaaatacctacaaaatttcttgagtcatgacaataaaacaaaactaaaattctcaagtaatttggaaaacctaaaatctntaagaatttaattattgaaagtgaaattntaatttttttttcaggacccggttggaccccatacctggccccggacctggcccctaccctatttttagattgctttagatcgttttaaatcaattttagtgaaatatactgtatttaccttttgttttataaaatctgtaataaaaagaattacaaaaaaaagttattattaaatttaagcatggtttaaattatttattctttttattctttgaatcgtaaaatttagcatttttattcatttatcgattcacatttaaatcgatattgacaaataaaaaaatatttccattaatttgatgaaacgctaaaattatagaaataatattgtaaaccattttccatattattatatatttttaaattccgttaataattcgaaatg

SEQ ID NO: 114589 - DNA, 305 bp, Heterodera glycines
ataaatatgttatgttattaattttaaacattttttcggaaaaaatcagtagaatctattttggacaaaaacagcttgccgtactaaactgaccctcgtactaaaccgaccctcgtactaaaacggccgtactaaaacggccgtactaaaccggccgtactaaaccggccgtactaaactgacccggtccgtcaaaatgtcgccaagccaaaaaataatgaaaagtcgaataatgattaaaatttaagaattttagtaaatttaatgaatttatttgtaaaattttgtagatataattcacaatg

SEQ ID NO: 114590 - DNA, 306 bp, Heterodera glycines
tgcggagactgcgctggtttaccaccaactccaccagctgcaccttttggatgtggacggaattaggtcagaaaaagccacaactaccattcgattatttaaaaaatcggaaaataattgaatcttttgccatttttgtcgccccttttggccaaagaaaaaagtttcagattgagttcacgcggtgcgcttaatttggcactgttggccaccaatttggccgagtcggcgggctccccagccattccccactcattccgtgccgaaatttacctttgtgccgcgctccgttccgtcctgtgcatg

SEQ ID NO: 114591 - DNA, 941 bp, Heterodera glycines
tttcttaaaaattaataaatttatgtcaaaaataagcaaaaaagcgaaaatttcgcttttgttgttgattttgcgctaaaaaaattaataaattttagcttttatgtttttttcttttaaaatggttgcacgtaattgccgaaaaaattcgagaccaatttccgaatgttgaccgactaattgcaaaacgaaagccgtctttgtcaaagcgccttaccgagtcaaaaaatttggaaatgtatctcatatgcaatttcaaccaataaatttgaagaaattttgaactcaattttgaaaaatttatgtccatattttgagatttttgccattttatatccatatttgtggcatccctaataattaccatccctaatcataacgtttgccaattttcaaaatttgaaaagggcggatttaacctttacaaatgaaaaattatccatcgaattgatttatttgattgatttgggggttgaggataaggtaaaacgcccggcaaatgtcatcattttgcaaaatattctcctttttggtggtcctcttatgttgcgttccctttttcttcctcttccgatccgtcgtcattttatgccaaaatgattccttcacttccgtttttgtcaatgatttttcgtttcccatttaaacattgtccaaccccatttaaggcaaaaaacttcaaaaattgttttaataaaatgtgattttcgtgtttctttcatcaagtactatccgtaaaaaataggaaaaatcaaaaaaaaatcagggctctctctattcatatacaaaaaatacaattcccttttcatgactataaaaatcttttgttttccgctttgactctcattaaaaaaataaagtttccaacgaattattattctgctcttttgtttgacatcattcggaactcggccaaaattgtgctaattgccacaaaaatg

SEQ ID NO: 114592 - DNA, 86 bp, Heterodera glycines
gcgcattcgcctcgtcgttgagcaaaccgcgccaagcaatccatcgacctcagcccgtccatttgctggtggacattggcgaaatg

SEQ ID NO: 114593 - DNA, 652 bp, Heterodera glycines
cgaaaatgaaaaaaaaatattcaattttatttaagcctttttattaaatactcacggatgctttttcgagcttatctcagaactatagtcagttcaagaagcaaatttatagaatattgtttttattattaaatatttaatagttcttatttcattcagttattatgcatttacagaatatttttgcgaaaaattttattaataataacattaatttttatcctattaagtcccggattataccttcaagatgttttttctttgtattccattggcaattaaaatttcattattctcttttttcaatcttatttagttcttttataaaaatgaatgatttttaatgattttcaaatccgattttagtccctctataaagaagagtgatttgccattttttcatttaataattatttacttttcttaattcgacaatacctttttaattagaaaacaaaaatcaaatattttttacaattttttgatttaactgctatttgtctttgtttaatctattttaattaggtcgatgataatatgctaattgcatttatgtaagggcagcaaagaaatcaaatctgtgaatattcaatggaaaaatatgaagcacatcttggaattatgtattttatgctaaacaattgacaatatg

SEQ ID NO: 114594 - DNA, 382 bp, Heterodera glycines
acggacaaagcaacaaataaaaacaatgataagcagaagaaatgaattaattaagaatgaccgatcgatcataatttatcagtggtaataatgttttttatggaaaaaacctctttatttttttattttattcataaaaataaaaaagtcatcagaagggcgaaaaccacttactctgacgactattcagttaaatgtgtcgtagagtaagtgataaagtaaagtgatgatcacaggatttaaaaagacaaaataatgtgaaaataaataactaaataaattgaagtcaaagtcaaatgatctttgccatctttgtccgctaattgaccagcagcagcagcacaacggggcaccactgctgctggtgttcactgccaaaatg

SEQ ID NO: 114595 - DNA, 84 bp, Heterodera glycines
ggtaaaatatttattacatcgaagaaataagcatttcaatggcacattcagtttgaactttgttttcctgtaaccaattcgatg

SEQ ID NO: 114596 - DNA, 214 bp, Heterodera glycines
ttctctctccttatcttgtctctcccctccctctaactgcctccccactctcttcttctgccattggctctcctcagccccacccccattacgaaggtgaatgatgcttctcctcgcgtcctcgctgcgttccctccctcctcggctttttccttatttttccaacacttttcaaaaggctttttccaacgcttctgtcccccgtccaccaatg

SEQ ID NO: 114597 - DNA, 391 bp, Heterodera glycines
tttgtttaggcctgaaaaagaaatattttttagtccatttcttacagaaagaaatagagaaattttttattcattatttcggcatatctaataaaatcgcaacttttttttgcaaaaaacaaaacattttcgttactaatagaatcgcatgatttttagtgtaatatttgagccttactgcacaaaagaccaaaaagttttgcaagtttgaaggtcatttactaatttcgtttgctgaatttgaactaaattagggttgcgtcagcattacaatgcaaaaagcgactatttaagaactctaaattttcattaccgatatataattttgccttcaaacattagtttatgctatttatttttgatttaacattttttttcccattaagaaatg

SEQ ID NO: 114598 - DNA, 743 bp, Heterodera glycines
tttggcccatttttgcgccaaacattcgccatttcactttcaaagatggcgatcatttggacaatttgcgtcgtctcatctcaccgacaattctcactgattgccatcaactgaattcaatcaactccaattaccttttgcccgatttgaacgctaatgatgggccaaatttaaatgctggccaagctttgtccaaatggttgcacactccgcgcactgatggccaaccgaagcgattgcgttgttacgaagagttgaacggaccgtcaaacatcgattgggtcaacagtttcaaagaggtgtgtggccacataatcggggcaaattttttaaaattcacacaaataaaaaaatttaaaacttttttaaggttaaattaaatttttgaaaatttcctatccatatgccctgcggcatttgtcgtttgatttgatcaatttggctttttgtttaggtcagggctcccatccgtccttgaatggcaaggacgtccttgaaattgggccctctttcttgaaaataaaaaatgtccttggatgccaaggacgtccttgaaaatgaacatttagaaaagttttaaaaaaattcaaagaaatttgagaaatctttgtaattttcaacgatattttgattatattatggcattatgtaaataaaatgcaaattttcaaattttctcatgcttgtgaatgaatttgttacgcaatttttcgcgtttgcgacataatttatattttagaatg

SEQ ID NO: 114599 - DNA, 1003 bp, Heterodera glycines
tggcccgaacagctgacgcgccacagttcgagcttctcgatttctgttaaatcgcttaataacacatgctaatctctttccccctcgtctctcttctctcatttttcccttttctctttctctctctttctcttacactatttcccaatgtatcgtaccgtacattcgctattccatttgaagtgacagccgccccatttttgagcccaaatattgcgaaaatttccccattgtttccccaaataaaccccctgacggaaagggcccattcctaagggtggaaaaaacaaaagcgctcattaattaacaaagggaaacattttgggggagtaattaaatcacattttttgtcccgggacataagcgaaacacaagacaaggatccgaagattgaagtaagcaaaagggtcattaattggggtgcttaatccatcagaggaggaaaaacgaatttgacaaaagaaactgaggaaaaactgaggaaaatcgtaacatttgaggaaaagagaaataaagattaattgaggagaaagacaaaaggcaattaaaggagtcgggaagaaactaaaaacggcaaattggcgctaattggctgacggatcatctgactgagaacacaatcgacaatttggcactaattgttgtctgatcaattgacacatcatttgactcggcaaaaattttcgccaacaattcattcctcgccatttgctattttttaaattaactgcggatcacccactaccacttcattacattctcatcaccaaaactacaaatttcttaattcattaactgatcatcgacaattatattcttttattcgaattcactttaattcgacaaaatttcttcgagcactgaagaagacgacccaacacgggagcgaacggagcgtgagaaaagacattttgaactcaatcagaaaagggaacttcatcggatggaagtggagaccctaaaaaagagggtctcgactttagagcgggaattggattcgatg

SEQ ID NO: 114600 - DNA, 249 bp, Heterodera glycines
aaagatttgctgagagagcaaaaacaaaaaaatgtgtcgtaataataaagaataatgagcaataaaaaagaaaaatgagaaaggaggaaaagaaaagttaagaaaaagagtaaatgtttgatttatatttgtacataataatgaaagggaaaaaatcactttaatttggttgaaaaaactcgttcgatccgccccttaggcattgacgcgccatttgctcaaatacgttttgttctcgaaccccaaatg

SEQ ID NO: 114601 - DNA, 369 bp, Heterodera glycines
aatgcattttgaaaacaaagacaaagaaagggccatataattttctctaaaaatttgaggttgcgcggacgtggccagagactgtgcacaacgtgctgacttatgcataattgaggtgtaattgacagtttgcataattaaataaatcatttcttctaataatttaccgtctgtactcattttgcgctattacttagggtgtaacataagtttccgcacaactttttttaaagaatttttttatgaatataaatttaaaaaaccacaatatctaacattattattgagaatgagtttgctatttatcgggcaagggataaatcccattagaaaagtatttaaggagttagagttgataatgtaaaaatg

SEQ ID NO: 114602 - DNA, 53 bp, Heterodera glycines
ttcaaaaaaatgcaaataatttttattcgttcgaattgtcaggggaccaaatg

SEQ ID NO: 114603 - DNA, 177 bp, Heterodera glycines
tgataattttagcgttcataatgggattgtataaaggcgattgtagaaggaattggaagcgctaaaattgtttgaggagctttttgagcgtaattacgatttttacttacaccattttttgctaggcttagatcacatgcgattttcgccactctgataattttagcgctcacaatg

SEQ ID NO: 114604 - DNA, 256 bp, Heterodera glycines
caagccacgttttgtccaagccacgaattgtccaaaagagtaaaaacccacgaattgtccaaaagtcgaaaaagctcataaaaacccggaaaatgggtctattttagggtttccggggtcgctgaatatgaatacgacatttatatagccccttgcctaaccctagacccacccgaataagaaaaatctcaaaatttgattaaaatatgtgcttttttttgtcttcagattttgctattcattaattgaacaaatg

SEQ ID NO: 114605 - DNA, 1003 bp, Heterodera glycines
aaaaatcccaaaaaaggtgtgcatatttaatatttgcttaaataaacctaaaaagtacaataaacaaccaaaaaatggggtttaaaacttaaaaatgcatattttttattgttgttcgttgtatcaaaaacacctccaagtttgccaaatttcgaaaaaattctcattaaaaaaaaagaaatgttcgcaaaaaaatgacgaaaatatttattgaaaatgccaaaatgacgacgaaaactcaaatttttcgtgttttgtggggtgtaatttttaaaaatttccaaaaagttgatctttaggggtgtatttttcgtttttttttcatttttcttgtgaaaatttccaaaaaatggccaaaatatggactaaaaacccaaaaatggcgaaatatggatttattccagaaaacccccaaaatatggatttatatggactaaaaaccttcaccaaatcaaaaaattttaacgcagaaatgctatttttaagcccctttcttcatagcatatgcgcagaaaaaatatgttaatccatataatttacaaccctaataatgaacgttagctatagttggctcttaattttggtgaaatgtttaataaaattcaaataaatgagtatagaacaggaaacccggtcaaaaaaccaaaacccggcaaaaacccggcaatttcaaaaacccggcaaaaacccggcacggaccccaaaaacccggcaaatgccgggtttaccaggtaaaataacacccctggcattgatggcaaatttgtggaatttccgtgggcccgtccattcactgcccagcagaattcgctttaagcaccttcggattgagtaattaaaaaattgattataatcaaaagcagttaatgtaaaaagtatcattttttccggatcagctccttgttcccccttcccgcgaaaaatttaaaaaaaataaataaattgctgaaaatttatttttgataaaatttcttaagattgaggagacaatgacggcacaatg

SEQ ID NO: 114606 - DNA, 404 bp, Heterodera glycines
tgcatttttagtttttacatatttttttcctgagctcccagtgatctgaaaagcacgaaaaccatggttaagctaatttctaatttttagaaccttttttaagtttatattttttagaacctaaaaattttcgaaaaaaccttttatctatttggcgttttgcccaaaatataggtaaaaatgcaaaaaaaaaaaaaaaatcccccccccctacgaatcgaaccctaaaatttccgaggctgggccctagactggttccttcttaaaataccatcacggcccggctgattttaaaatttcagtttcctcattatcttaagcatttatttttgctatttcttttttttcatattgaaatttcacaagaactgtgcttctattgatttacgtacctttttatgatg

SEQ ID NO: 114607 - DNA, 246 bp, Heterodera glycines
agtcatcatccgaggcggacttttctttttcgttgtagggtttttttaaattttataatgttttattttgctaatttcaatggcaaaattcatagggttgggctgctaaaattccactatttttttaaggacaaataacatacaaatacaattccattagctaaaatacaatcccattagctatcgttaattaacattttttaattgccacatccttttgtttaggccagcaatgtcttctcaatg

SEQ ID NO: 114608 - DNA, 245 bp, Heterodera glycines
tgaccttctgttgacgagcattgaggaggaacagcttacttcagaggtattcgtttattcaaactgttacaagggagtgacaaatcgggaaaatgaaatttaaaaggctttgccttatatttttgataataacttttaaacatgttttgtttgtttgaggaacgagaggaggcttggaaggagtacgagagcgaaagactgcctcgccaacttttgccattgccatcctcatttgaccatggatg

SEQ ID NO: 114609 - DNA, 336 bp, Heterodera glycines
  unsure (1)..(336): unsure at all n locations
tgctccgctcgggttgtgttgctgctcgtcctgctccctttaagcgtcgncccccggccgntccgntgcggaactttgcctttcgccggccgcaacgattgttccgcctcagaagcgttcttcggacgtgccgtcttcgtcgtttttcctcttttaattcccccccccccctcagcgtgccttcccggcactccgcgcagttgccccggcacatgtccacccggttgtcgctgtacggtggacagttgttgctacccaagctcaaacccaggcccaaacccttctcctccggtgccacaaccccaaacaaatgtcggcaacggtggtttcaacatg

SEQ ID NO: 114610 - DNA, 651 bp, Heterodera glycines
aaaggaaaataaccaaaacggaaaagcatattcaaattaaaaagcaaaggttgtggaatttaattcggatcaaaaaggaatggaattaaattcccccccaaaaataaataaatttgaaatttgttgttatggttcattgccgatccccgacttttagaaattattatttatttgaattaagcaaagaaatattgattacagaacactattgttccgtaaattactggacaaagaaaggaaaatcttatagaaaataaaattatttgcccaccaatagaaatatgcaaattaattaaatgtttattttgcctagaaaaattggcaaatcccgaatgcatgttgaccgaaacgctcatactaataggaatcggcctaacttgtattatttcttttattatttgcatagcaagttttatcataaagtttatcataaaaatatggtggattattaaaatttgtttttatgggccatatttggcgttaaaatgggtcttgaacccaaaattagacaaaaaatttaacgatgagatacagaaaagtttattaaatgaatttgaaaaaagagaaaaagaaaaaattcaaaaaagaaaaaacagaagactatatagacttggaagcattttaatattactatttttatgtttgacaatg

SEQ ID NO: 114611 - DNA, 218 bp, Heterodera glycines
agcagaaatgccaacggaggagagagaaaagccaaaaggaatattcattccgggctaaatttaatgacaattaaaagaattggaaagggtaattaggaatgaatgaatgtgggggctgttgcttcagctcaacgggccccttttatggggcagtaatatctttaatttttaaagattcatcctgaattggagaaagatcatccaaacgattaaacatg

SEQ ID NO: 114612 - DNA, 691 bp, Heterodera glycines
  unsure (1)..(691): unsure at all n locations
caggtcaaatanagaccatgcaatattttagattaacacggtcccttttcgaattggctgattaaaaaagtgggcgacaaattcacatattgaggaccaagaaagggcaaattgtgccgagaataaataatgccataaattaaattctatttccattaattgtggagtgggtgccgagatgagtcagctgttaagtttcttaagctttaaaaagtaaccatttcctctttctagtgacatttcgcattatggcactataaaactccaaaaatagcattagcgatggtttgtgctactgtatttaaacaacagaagccgagcagagtttgtatgacatgacgaatttgttggggaatttggcgaagcgaagcgtaatgattggttattgtctgctgacaatttgacaaaatgatatggggcgggggcgggggaatatttgcagcacaaattccccccggggacatttttaatattttcgtgcgcggagaatttgcataattttcgctatcaaatgatagttttgtccttgtctcttcacgcattttttacaattcactgtcattattttttaatttttatttattcattttatttttcattttcaattagtccatttcatttttttattatttttctttttgttgtttttttctgttcaataaattggccgtccattcagcgaatatcaatg

SEQ ID NO: 114613 - DNA, 366 bp, Heterodera glycines
gtacagtgatgacatagtcagagcatcggttcgcccagcagcatcagcaaccgctgcagccagaaacaaaagtggagcagagtcgtccgtgacaacatgtcactgcaacatcgcttgaacctccgccgccacatcacacgcctgctgttggtggccgcgctcgcgtgttgtcgccggcgaccaagcgtcgcgtgcatggcacaggcagcgacccaacaacgcagctgacgccttcgactgctgttgctgctggtggtggtggcggtgttgcagcggcgccacaactgaaccagcagcgcaagagtggcgtgtttgccaagttggccgagagtgggaagaagcagcgagcacaacagcagcagcatg

SEQ ID NO: 114614 - DNA, 481 bp, Heterodera glycines
agtgaaataatgaatgaatgggattggagtgtagaaaaattgaatggaatgaatcacatttttgttcctcatctgccggtgactgacatttgtacacatgcatacgcgaaattcaatagatttgctcgatttaaagcgatcaaaagatcgaaaaatatccaaatctttttagaattttcattttttcatacaattttctctaagtctaatcctattcaattgagtgagcttaatactacttttttataagttttttctcacttttttagtttttttctttcgtaaatccgttaatcataaaattaattatcatttgactttttcatactcctttttgtcatattcttgaaccgcatgtcactcactataaacaaaaaagtcattaaatttgtttcgtaattgcctttttgccaattaggcaaacagttttctcttcatttgtacgcacgcaattctctccctctctttcctaatccaaatg

SEQ ID NO: 114615 - DNA, 160 bp, Heterodera glycines
ttggcgacgatcgtctggtcggtcgcgtcattaaccttctgctgttggtggccaagttaagttcttcatcgaacgacctcgcaatgtctacgaggacaaaacgcctggcggcataaaatatgagcgtttgcagtttcccatcaaacctgcctttgccatg

SEQ ID NO: 114616 - DNA, 172 bp, Heterodera glycines
  unsure (1)..(172): unsure at all n locations
tgtgncacagttaccgcaacgacaacaggtgcgtggcagtggaaaaaggacaccgtattcagtacaacatatcgtaaaagagagtgctcttctgagaatcaacaacagcgatgatgcatattgtcttttttacgctttggaggcaagcagaaaataccacagcaaagagatg

SEQ ID NO: 114617 - DNA, 95 bp, Heterodera glycines
aatattttgtttgcaggaaatcgtccacaggatgaaaattttttggttttccacaaatatcttgtctgattttttccattttagggcggcagatg

SEQ ID NO: 114618 - DNA, 540 bp, Heterodera glycines
agcagccgccgggactggaccacatccactcaaaaggcatcatccattgcgacatcgccgccaggaactgctttcactcggactgcatggtgggtgagaacatgatggacgagggaggggtcagaaaaatttggtgccaaaatttaaggaaattgaaaaaaaaaaaatttttttgactttttttgcttttcaagagtgaagtgattgagaggggttttcaatggaatttaatttttctgttttttttcttccccaatttttatgtaaatgaattctttggtcgcttctttgctcacaaagctgcaacaacaatggcaaacgctcatttacgctgtttttcctctcaaactactgtagattttgctgctcatttgctttgtccaattcattgagtatgtttaaattcccccccccccatcgtccacatattatgggaaaacaaaattttcttataaaacattaattttgctcatttttaacaggtgaaaatttcggacttcggcttggcgcacaagggaaagatgaagaagatggacgatg

SEQ ID NO: 114619 - DNA, 838 bp, Heterodera glycines
agcgtgctcgactccgatctcaacaaacctggctcgtctgttcgtccgccctgcactgaccaaggaacaactcaaggaggaatatgaagcgcgtgtccgaaaacgccagaagcattaagttcattaccaccaactgacaaaattgttcatcaaattcaatcgctccaaaaacaataccctcatcttttcaataaataattctaccagacctccaacagccaatggggtgattaattagtcttaaatgtcctaaattttgtccgggaatttgtttaaatcatcatcaattccgccgattggaggtcaaactattgaacggcttctatttcttaaaaaactacaacccgccgatgatggcattttgattcgttaaaaaacagaaatttaggtgaaatccttaaaattttgattgctgtgatgccagaaggaacggagtgtgggagaaagtgggacaaaggacctgagagaacctctaaaaggaacgcccgtagctcagttggttagagcacggcacggattgctggggtcgtgggttcgattcccaccgggcgagttaccttttatgttctacattgcagctaacgaaaaaatcaccatcaccgttaaattgatttaatgaaatattaggatatgaaatttttttgaaatttctatcacccaaatgataatttttatggcttcaataaaaatttttattaattaattgtttaaataattattgttaattgtctaaataatatttattcttaaataaaactaattaaataattgattaaataataattgattattaattgtttcattccttaatggctaagtcacttcgaccagcaacatg

SEQ ID NO: 114620 - DNA, 494 bp, Heterodera glycines
ttttgcccattccaaatccggcatcctaatgaaaatgcccggggggagggggagggacgggcagtagcggttggtgggaacatcttccttcagcaatgccaatgccatttatgatgcctttggcataaagcagcttgttgctgtggcgaaggcgggcaatgcttgaaaaattccatggcgcatttgccgtcccatttcaaaatgcctattttcgaaaatgccaaaactgatttactgttttgtctataaaaatgattgaactgatggacccactactcattcacttttcttttcaattttgttccattttcatctgattcattttcatcaaaatttctttcatttcgttagtcattttgcgctttttccaatttccaatcctccgaaaccaaaaattattattattttttttttttataatttggcaaattaaattttatctttttttttaattgatagataaatcaattgaaatcattcaatactcaaatatg

SEQ ID NO: 114621 - DNA, 91 bp, Heterodera glycines
agcatttgttggccacacttcaagtcaaacaaagcaacaaaaagcacaaaattatgacacaaattatgggcaaattggacgaaatacaatg

SEQ ID NO: 114622 - DNA, 1003 bp, Heterodera glycines
ctccaaaatgtagtattagaagaaaaaaaattattaaaatcaatggaaatctcaattatttccaaaatatgatgctattgtccactcggattttgccaaaaatctgtttatagccgatggtggtgagtttcatgaaagtgtttattatgagttcaatggtaaatgtttttattagggttaggtcgggaccgggaccaaaacacggacaactgagtaccaaggtcccggtttgactagttttgaccggaaccgggaaattcctggcttttttcccggttttccccgccaaaaagtcccggtttttcaacccgtaaagtcacggtcccggttttgcccaatattccggtcccgacctaccctaattttatcaccagttaaaatcaaaactgaatatttataaaatgcatatttaaaaacattttaaatgcacatcgcccatctgttctctttaaatctttttttaagaaaattttggcgcaaatttcaaaatttatgaaaaaaaccttaattaatttattgaattaactaattaataagttactcaattttcttattatttcaatcattaattaatattcagttacccattttactggaaaagaaaacaattttggcttgaatttatttgtcgatcaatgagagtaagtagcagctccctccgtagtaaactacctaattaattgcttgcaaatagaaccttaattcttttaaaaacggagcttaattgaaccaataaaagtatcaataacgttaatatatacaaaaaatcattcttttatctttttttaaatatttatacaaaaataaattaatttaaagccggcaattttaaaataattaaaaaatttgttacagattaacactaaattaaaaattctattttgaagttatttttggttaaagttgaccaaaacgtttaccttctgatagagctctttaaataagaaaactcataaatttaaaattgatttttttttaagtgcttgccatcaattgattaatg

SEQ ID NO: 114623 - DNA, 433 bp, Heterodera glycines
ccgttaaatgttcagaacggaaatgctattaatctgctgctagtttggggaggggggatatcggattaccaaatgaatgaaatggagggggggggggcgaggatgggatgaatgcgattggagaatgttcaaaagggataaacacgaaatggtggataatgaaatgagtgggtcggcaaatataatgacgcaaaatctcaaaatagttaactaatagtggagaaataatgccaaaatggtttcaaaagttgccaaaaatttggtttcagcgaaataataaacaaaaaacaagcgagttgaaaaattttttgcaatttgctgaaatgaagattttttttatataattaagggaatttttgtctgaaatttcctacatgcaattaatgaaataaaatatgaaaaagccgcaaaaatagctaaatcactaaaaatg

SEQ ID NO: 114624 - DNA, 626 bp, Heterodera glycines
aacaaaaaaaaatgtgtcaaaaaaaagtgaaaaaaatttcaaaaggttactctttgcaaatagcgtcaaatatgcagaagtttaaataggaacatttggttttcgcagttttaaattggttagaaatagagttgggtgatttttttcggaaacgggggaatacaccaaaagcagagcattttcctgttttgaaggcacactccaattttatttatttatcggtaaagaaaaattgccaacagaagaagggcggggatcacttactctgatgactgatcacagaaaatgtactcatagaagagtaagagaataaattaacgaacgaatgatcacagcttaaaataaaataaccaaaaaatttgtatttgatgtaattttggcagaaattgttttgcttttatgcctccaaaatatgtaagtctattaatattgaacgcttttgtgcattttaaaaaatgggtgtgccttaaaaacaggaaagtatccaaaaggaggacggaaaacaggaacgaagaagcgcacatgatagtaacaaataaatatgatatgcaattatcctatcaatttccattcataataatcgatcagaatttctaattccccaattattctttcactttttcatg

SEQ ID NO: 114625 - DNA, 339 bp, Heterodera glycines
accggaaaatcggtcagtggaaaatgcgtcagtgataaaaatactttaaataaagttgtatggcatttgtattgtaatatagaaataaacttctataagaacatcgttctgcattctgaacgccggacccgaactcgaacaaaaaatcgaaaagtcaaaatttcgaaattagagtttttcttcaaaattggtttaaatacacggaaacaaactaaaagccatcagtctttcaataatagatcatgtatgccgttttgaacaaaaaatgctaaattcgaaaatttggactttcgagtttttgttcgaattcgggtctggggttcggatttggccgaaatg

SEQ ID NO: 114626 - DNA, 1003 bp, Heterodera glycines
aagataggatattttatttcgaatctacagtggataaattataaaaagtgcaatacggtattaatttatttagttgaaagtctattttcatcacttgtttatgtataaaaaatgctaaaatatgtatgaaatatgtacaaaaatcctcaaatatgtaaataaaatttttaatggttattttttggaaaaaaattcttcgtaaaaagtgaaataggcacaaaatgccataaaaatgaccaaaataggcttagaatcacagactaggtcgtttcggcgccagcccatgttttttgggtataacttttttctttgtaagccaaatcaaacaaacttggtatcattcgaaagtccttcacatgctctactagccttacaaaaaaaaaccaaaaaaattctagcctttaaaaaattattaagaaaaaacttcaaaaattttgacttttttgaaattttcatgtataacttttttggtatttgtctaatcgtaaagcaataccttagaaaagcttcaaaacatgttaagacttcgaatgataccaactatattagatttggtttagactaaaaaaagttatagtccgaaaacttgggctggcgccgaatcgggggctccgaaaagaataaaaaacgccggtttccgaggttcaccaattcaactgattccgatcaaattcattcaaattgttgaatttcgaaatttctttttttattgcagaattgttggttttcagtaaaccgatttagaactcaaaaacgaaaattgaactttcgacttagtgttcgaattcggacccggagtttggaatcggtcaaaatggacgccggtttcgtgatcagcgacctctaaaaaccacaggaaacttgtttttatgaaattaaaatttttgaacgttttcaaaaaagggcggggacaaactcaataataaaaaattgtttcttagccctttatttcaatttttattttttgctaattggcagtgagcaggaattgcgttccatgatg

SEQ ID NO: 114627 - DNA, 209 bp, Heterodera glycines
tttcaccaagaatgaatgttataacgactaatttcacttttatatactcaaaagttgggccacgcccatcatttagttactgattagccccgcccactctcacctaaataattcacctgactaaaaaccgaaatcattttaatttgtctgtccaaacccaaaatcatccttcattaattcaaaacaccaaaattattttatacaaaatg

SEQ ID NO: 114628 - DNA, 334 bp, Heterodera glycines
ataagaatgttgtttactttttagtttttcatcgtaaaacaattttatgtccaatttaattttcacgcactattcgattatagacaaacataaagtacaaggcgaaaatgaaaaatgaaaagcacttgctgcgtttcataactgttcttggccacagaactaatgagcggcaaattcgctttaaaaatcggtaattacattttaggtgtaaacaaaaaattgtggcccccattcttttatggccaaacgtatcgctttttaacagatattcatttagtaaaaaattagaatattatttaattattgttgctaattttaaagattgataaaaatg

SEQ ID NO: 114629 - DNA, 79 bp, Heterodera glycines
tttgctgccgcccttttcactgcctctccctcgcgacgaacaacacaacgaatttatcaaattttacctcgaattgatg

SEQ ID NO: 114630 - DNA, 654 bp, Heterodera glycines
tttctcggtctcggttcccggtaaaaatctccttctcctacaccccttatactcatggttttcctatcgacaaaatatgattcctcatttttttcttttgaattgacacatattttatcattttaaaagaaaatccgtgcaaattaagctagcaatctcaaaaatcagtgtttttttgttgaaaatctgttaacaaatcacactcaaattttcaaaatttcctccggcggcgcctatcggcaccaccggaacgcttttatttcccaaaaagttttttgcaaagagcgcgccgaaaaagtgatgtgaaaagcaaatctgaatttctaatattattcgataatttagtccaaaaatgattattgtttgaaataattgaaataaatttggtttgaaatattgattaaatatattataatttagttttgcgttaacttttgggttttataaaataaaaaaccaaacaaaaaattaatttttttttgtatttttttttgggaaatttcccggttggtcccagtcccggcttctcaggtcccggcaagtcccggtcccggttttggcaaaaattcccggtcccgtacaactctagttagtagtttaaaaaaaaagaaaaaaagttataaattaacaaaaaaattaattttctcagaaatg

SEQ ID NO: 114631 - DNA, 1003 bp, Heterodera glycines
tgagcaccttttgcctttcacatcatgctctcattcagtttttcaaaatctcttcaaattttttcaatgactatggtatgaatagaataaattgctcattagtagggctacaatttttaggtgctaaaaactgcaaaaatagttagtttttaggttctaaaaaaacctcaaaaataggtgctaaaaaggaaacaggtgccaaaaaccttcaaatttaagggaaaaccgtaaaattttatccaaaaagcaacaaaattaagcaaaatcagtattaactttaaataaaaaatttttataaagaaaaaaaagaaaaattttgaagacgaattttggaatttttttaggggtgtatttttgaaaatttcggatcgtttcttagggatgtatttttcgttttcagttaataattttggccaaaacgccaaaatagttaaagagttttttaaaaactttttagatgctaaaaactagaaaatagttgctaataataacccgctaatcgcgccttatgaacaaaaaaaaatgttttttcttattttctcttaggcaaaaagtgcttttccgtcagcccctttatttgtttgaatgtgttcatttggtttattcaatcattcataaatttaatcttaatttaatctttgtttaattctaaaaaaataggcaaaatgaattcaatttgagagttttctttctaattttggcaatttaatacatttgttcgccgattattaaattaataaatgttttcatttcgtttcttttgattattaaattaatttttgttttatttttgccaataattgaattttataacgaagaaacgaaaaccgactaaacaaattgcttatttatttggtccgttggcactgatttctgtcaaatatgttcatattattgtttttaatagaagaaacaaactcgaaataagaaatatgaattaaataataattagtaataattaattaaattagttaaatgaattttagataacttcgcatcaatg

SEQ ID NO: 114632 - DNA, 567 bp, Heterodera glycines
tgcgaactttgcagacgcgttttaaccacctaaaaaagcgaaattgaaaaaaaaaattgtttcaagaggcattgtggtcagaatttttcggccatgccccccaaaaaaaacggttccaaattttcaatggatcaattgtttttgttttttgagaaacccgtctctttattagcctttaaaatttgaaaaaatggtttcattaacagctagcattttgctcttatctttttctgttgaaattattttttttttcaaatttggtacggaaatacggactgggtcggttgggccccgccgattggccccggtacgattgggccccgccgattgggccccatagagcagtcactacatggacaagggggggggggtcagaataaaagttatattgtcacatgttattgtttgcgtgtttcattgcatatttgtaaatatatttggtttcatatttgttttctaatttttttatattttccaattcttgattgcctaactaaaataccattaattcagcttattatttaatatattaatatcacgatggaaaataatatcttatcgaagatg

SEQ ID NO: 114633 - DNA, 93 bp, Heterodera glycines
tcagcaaatgtagaaatgaaaaaatgaaatagtaatgacccgtgttaaataaaaaaaaacctttaattatttaggtaattagtttcatttatg

SEQ ID NO: 114634 - DNA, 55 bp, Heterodera glycines
tttcctaaaataaacattttgccaggagagtgctgcgttcgtttacggtgccatg

SEQ ID NO: 114635 - DNA, 433 bp, Heterodera glycines
  unsure (1)..(433): unsure at all n locations
ttgtgnataatctgggaacggatttatatgtcgctaaaaaactgccaaatatgtacatattatgtagcaaaatcccccaaaatatgtaccaaaaaaaattaaaaaaaagagcaaaatatatgccaatatatgccaaaaattgaaacaaaactgcttaaaaatatttgaatttcccaaaaattcaattattttatcagtttcggtagcataattgaaaatcaaaatcataaatgcctttaggcgttaatttaatttcaacgtgtcacaggtgatgatgataggaggcgacagaaaaattttgaacatttattagcattttgcatgaatttgaaagctaaaaaggaactttcaaaaaaaaaaaattttaatcgccaagtagtgccaaaaactgccaaaacccaaaatattttttatgagctaaaaaatcgctatg

SEQ ID NO: 114636 - DNA, 265 bp, Heterodera glycines
aaaggtgtatcatgttttgatcacctacgaaaataaaaaaagtgggtaataaaactattcagaaatgatgatatagccgcggcgttaagtactctccaccgacacggatagtcttgttttctcacatctacgcgatgctttttagctgaataagatcgacactataagcagttcattgatggaaatcgtagaattctacactgctggtgtaaaatagtatgtgttggctttaagacgtataaatgttctacatgatgcggaaatg

SEQ ID NO: 114637 - DNA, 459 bp, Heterodera glycines
tttaaaattatttaaattaaatttttagaaaaaataattgtcaattgtacatacattacggtaattactttcccttctgaaaatcttttatttgtgcgaacaacaagcgcatggtttatggcccattcgatggcaaattgggacagtttatgcaactgattctcattttttaccgcattttccacataatttagcacagttttgttgccttaatttaggattaaaaatatttttatttgttttttattaaagttttttaaaatttcctaaatattttggaaaatccccatgtaaaatacaaaaaaaaaatgttaagataaaatgccgaaaattgactatttactgttgtcaaaaactagtaaaaaaaatatggaaaattttttaataaaaatttaatttttaatcacccgaaattttccccatatttttaaatattttattaccttcaattgccacatg

SEQ ID NO: 114638 - DNA, 899 bp, Heterodera glycines
aaatttgaaaattggaatttttagttaatttgtttactaaatgtatcaattagcgttttcacagtgcgtgacttgaaaatgggtcagtgaatcagaatatcttggaaaaaacgagacccggtagtataatacttatatcttgattggtatctaaacaagcttacaacaacctatttacagtataatttttttagggattgggtaaatttcaaatttctttagactttaaagaaactttgaaaaaattcagaacgaagtttttaaacaatttcgaccttttataaatgctacagtactttaatttagaaatactgtattattgacttatttttccggtaacttacaataataaaatgtgtttaagataagttttcaagtccatttacacttacaaatttgcatttttattttttgtctgtttatttttcaaaatttgcttctgcccaccgattatcacataacgcgagcggagtttgataattatgaaaatgttaacgacaattactacgacgaaagtgagaataaattggagcaaaaaccttggaaaatggaaaatcaccttaatatgaaatttgaaaattaaattaaattaatttatttaaattttacatcgacaaatttccgttccgtctcatagctgcacttgaaagaggcggtggatgaaaattgaactgtcacagaatcatgcgcagtttttcgcagtgcaaaaaagtgatgggaactgatcagaagcaaaaggaacagccaggcacagatcactttccatcggttgagccccgaatactgtagcggaaaaggaaaagggcacagataaaatgccgaaacatttttatgatgtaaaatgaaatagaaatattcgactaaattatttccatttaaataaaaattaccctcaaatg

SEQ ID NO: 114639 - DNA, 644 bp, Heterodera glycines
tctctctttcgattcacaaacgacacacactctctagtgcattaattgttcttttacatattaattgtgaatgacgcgacgccgcacatgatgtcatatttacagccgaataataacgggtcagactgctgctttattattaccatttttgtgaatgtttttctctttctttttgtttgcttgttttcatggacacaattatctacttattacaatactgtaattcaatgagagtttgactccgcatttaaattgatactccgatcgattaaaatgtgtgtaatgaaatgaaaatgcaaataaaataagttgccgaggatcattttgcttttgtcctattccattggttccgtgccaatttctctgccaatgaaagcaaatttccgtttcatttaccatatggtgtgctgttgaaatggaacttaaaaagacaaataatttatatctggcgaactgtttaaatttaaaaaaatcgcaaattttttttatcgaaggaaaaaaaacattaaagttaaacaaatttacctatgtatgtatgtgtgttcacgcaattaaaagctataactaacttaaccctttatgtgcactcgtatgataatttcttatttgagctttttgtattaaaataattttgctaaaaaatg

SEQ ID NO: 114640 - DNA, 151 bp, Heterodera glycines
tttaatttttgttagagaatttaggccgcatatgcaaaacatacgaaattcaaaaaccttaaatatgtgccaaaaaagcaagatagaaatgtataaaaatatgtaaaatttaatttttgtctttatttagcaataaattaaacaattaatg

SEQ ID NO: 114641 - DNA, 1003 bp, Heterodera glycines
ggtgtgaccatctaaactgcctattaccgaaaatctttgtggattttaaggctgatagagcttatgtagagttttataatgatgccaatattctaggattttgtcgacaatgaaaaaatgtctcattccaaaaaactcgagctggcgcctaactccgatactgaaaagacccattccctgaatacttaaccgaatataaattgtaaaggaaatgaaatgaaagaaatcggatttgtataggcaaaaagtggatggttgtaaaccgcgagacgaaaaaaggtttaattgaacaccacacgactgagactgacaaaagcaaaaataggtttgccaagtcctatccgtgcaatagtcaaagcagttaaaaatgaatatacctaaaataatgagtagtatgaaattagtatgcactaaaaatgccaaatatgcactcaaaatacctcagatatgcctaaaacccgaaaaatgcccaaatatggacgaaaatatgcttcaaaaactaccaaaaatggctttgaaccctcaaaaaatacagaaaattatgtaaaattcttaattgactttcaaaacataaaaacaatggctaaagagagttttttagagaattacaaaaattttgggttttttgtgaagcgcttttcttgtaaaaattacaaaaaatgcccgaaatacatatctctaaaaaagcaaaaatggtaaatatgcatttattctcgaaaatccctacaatatgcgtttataagcataaaaaacctccaccaaatcaaaaaaatttaacgtagaaattcccttttttattgcataaatagtaaatgtgtgatgatcaaatggaaaagtaaaccggaaaagtgcttcttttatataatggaggatagagaagaagaaaatcatactcctttttttgctaaattttttgtttcttttttggtcgtcatcattataaaaggaatgcattttctcagtttcgaccattccattcctcattcaacaacaacagataatg

SEQ ID NO: 114642 - DNA, 304 bp, Heterodera glycines
tctttactttgatcataccttcttgactctgtctgatcagagggtctgccctctctctgatcagagtcccaattgggaaaattcgaattaaatttttgattcgaaaattacttgactcagattttcacttttggaacctttatttttcttgagtagctcgacccataaaatttgtttttatttggattctgttcaggagttagtaattgggcccaatgtatgtcaaaattcacgattgccggcccaaaaaacttaaaaataaatttaaaatttttttttacaggcaagtggatttgaacccatg

SEQ ID NO: 114643 - DNA, 555 bp, Heterodera glycines
  unsure (1)..(555): unsure at all n locations
ttggccaaagcggcgcactccgttaccccgaagacccttagagaatantttggaagacgccgccgaaaatttctcggcactttacaatgttggtgtgacgccgtagtggaaaaccgacacgctcaattttcgattgaaaactttgaaaagcaaaatgcaagtgtaaaaggcttcaaaattttgtattgtggccttattaattggtttccgacctcaaccctttgcctgaaccatttaatgccaattcattttacaaaattaatgtgaccatacgacgattcaattttgggctcccagtgaaataagtttattatttatttagtaatcagaacgccaaaactttgcaaaacaattcgcaacacaatctttcctttgttgcgtatatggtgttggttctcccccccccccccccatcctgctaatttgccttttcgttttaattttgcgcagcaatcatttattgatttgatattttttggaaattttacccgttttaaatgcttacaaatattttatttaaaatgccgaaacaattaaaattttatttagaatatg

SEQ ID NO: 114644 - DNA, 293 bp, Heterodera glycines
atgatcatgaacattatatttatcaatcattccgaattctttgtttatttaaaaattaaacggtgaccctttttattttttctggcaaaaaaaaaaatcgtttttacaaaattttcggggttttgccttttttggttctaaaattcacaaaaaattatatgtattaaaactgaaacgctcactttgaatggagagaggggccttgcaaattttcaaaatgcaccgcttttaactttacataaaaaaaattataaatttttttttaaatccaaaatttttatgccagaacaatg

SEQ ID NO: 114645 - DNA, 770 bp, Heterodera glycines
attaattataacagattcttaaaccacagtaatcaaaattgggctaatcttttcaaatgtacagtaatttccctatgcttttgattttatttggtcaaatttgagtgcattattggttcaaaacaatgggttagcaataaaaagagtaaatgttggcattttatgattaatgtcttacttttaaccacagactcattaattcaaatgtgacattagtttcaattactaatttctgggaataatttcaggttttctgttcgcatctgactgacaaattggactttgttgtgagcctcggcatctgcaaattgcctttgaagcccaattaagtgagtccaattaatcaatgacatccaattatttcacacattgggggtgagtgattaattaattaaatggtgtgtacccatgcattttggcttcaatttaatgcatttattaaatttcaaaaatggtaattacagtaattttttttcttttcgataaaatcaaatctgtgacaatcaaatttaaaattttgttttctctctctaattaatcaaccaatccaaaaaaaataattttgtatcaatgatatgataatgcttaacatatatgtctataatcttttgtttttataattttggtgcatttctaataataattgaagtttattgggataaccttaaatagtgttttcttcttaaaattttttggggattattgatcattggcacttattaattcaaattaattgcgtaattatttaattattataattcattcagatg

SEQ ID NO: 114646 - DNA, 122 bp, Heterodera glycines
ttctgcgttaatttttcatatcactttttcatttttattttgcttttttcgtttgttaatcatctcacacatacatttgtagcctttcctatattttgtcacatttatttcctttttaaatg

SEQ ID NO: 114647 - DNA, 1003 bp, Heterodera glycines
aataaattatggagacgaatttttgggaaaatttttcatttcttatgggttattttctgaaattttggtcaattttcaggggtatattttcttaaatttttgggaccgattcttattggtgtatttcgtttttattgcactgtttttttgtgaaatttatattttatttaaacattttttctttcgaaaaaatcttctttcaacatccttctccattttaaaacataatggaatataagtttttaaattcttattatttttattcttctttatgttcataattcttcaattgcaaaaggttgtattattttgattccaaaaaataattataaattatatttttataaattacctgaaaaagcatcagtggaaaattcacatgaatcttttaccaccataattattttcaccgtttaaaaaccgctaattggccaagaccaaattaacgtaatcgtccaactgctcttataattattaaaataaatattattatttctatattttctttatgcgttatgtgcaggcattttttttggcaacctagatctttccttgagctgggtttccttgagttttttaccccgaactcaatccaggccaaatattcaaaaaatacgggtccaggcacaggctcggcacgaattttctggatttttttagggtttatttcaagtgaccaatgttttatttgaagttatcaaaaaaagattaaatagatttacataagattcaatttgtacttttatatgttcctaatcaattaattgttatccaagtccaggtccaggattttccaaaatgtcgtacactaattaacaccaaacgcagttttttaaacctaaaacccaaaaagacatttttataacgagaattatgtcaagaatactgtgcaacagcacaatttgtgctggtgacaacggttaagcattcgtcgtagcattggttggttcaacaactgtgtgtgaatatgaagaagcataaaaattgggaagtgtgatacatg

SEQ ID NO: 114648 - DNA, 1003 bp, Heterodera glycines
agggattgattgtccaaatctatattttacttaatataatttatttattatattaaataataatgaagtatgtaaaaaatagggattgatcatcagtaggattgtccaaatctatattttacttaatataatttatttattatattaaataataatgaagtatgtaaaaaatagggattgattgtccaaatctatattttacttaatataatttatttattatattaaataataatgaagtatgtaaaaaatagggattgatcatcagtaggattgtccaaatccatattttacttattatattaaataataatgaagtatgtaaaaaatagggattgatcatcagtaggattgtccaaatctatattttacttaatataatttatttattatattaaataataatgaagtatgtaaaaaatagggattgatcatcagtaggattatccaaatctatattttacttaatataatttatttattatattaaataataatgaagtatgtaaaaaatagggattgatcatcagtaggattgtccaaatctatattttacttaatataatgtgtttttatattaaatgatgaagcaatatttaaaaaaattgggattaatcataagtgtgccaattttggcggatgtttttgttaagtaataaattttttattgaaaaacaaaaactatgacttacaataataaaaagcaatgtaaagattttatttgtcgaccaattcaattaaaaaattaatatgccgataacttatttaaaaattttaacaattatgaattaattaatacatcaaatagtaaaaaattaatgtagaatacgacccattattaatcagaatcccctattttcggttttaataataaataaaaatatattttaaataattttaaatttagaaaatttaaaaaataaaatgcaattgctcttcacattcccaattctgttggtcattctgtttgcaaacattgaccagaactaacattttgctgatg

SEQ ID NO: 114649 - DNA, 81 bp, Heterodera glycines
  unsure (1)..(81): unsure at all n locations
ggaaaatttccgggttttgagggtcaaaanagccaatttgtctgttgggggacgttctattagaggttttttggaaaaatg

SEQ ID NO: 114650 - DNA, 248 bp, Heterodera glycines
aaaaaaattgaaaacttcaatgcaatatattaacagaatttgtacaaaattgctaatttttttgaaaaaaattcaaaaaaaaaatttccgtaaatttccgactttttatataaaatttcggaaatcggaactcggaattccgaagtccaaattttttttcggaaatcggaattccgactcccaaaaatgtcggaaatcggaattccgaccccaaaaaggtcgaaatcggaattccgactccaaaaatg

SEQ ID NO: 114651 - DNA, 368 bp, Heterodera glycines
tttttttataaaaatttaatggagccaaaatccggcgctatttgcaaagatgtgctatttgaatttgttgtcgcatttttacgaccggtgtctctaataggaggtctggcacaggaagatccaaatcaaaattgaggaattgacggatgaactggcagaggaaacccacagaagaaatgtgacaagaagaggcaaaggagttgggaaaggagaacgagcgctttgagaaccccccggagccgccaagagagcgcaggcctttctattccagcgccgtggcgcgctttgagtgccaaagcgaattggactcagcgtcgaaactaagaggaagagaagaaagaggggacagagaaaggaacttgggaatg

SEQ ID NO: 114652 - DNA, 943 bp, Heterodera glycines
tttttgctattcgaaaatatttgtaaagaaaaataatttatttgagaatttttttgaatggattgctcaatatgaagaatttttaattaatgtgaatttttttattatttgttaattttattacatattagctaaaaatgaagtcaataaatgtccaattaattgtaaaaaagtaataataaaattttgcaaaaattatatcttttctcgtttttcattctttaaatctattgaaaacttataaatattaagaatgcaaaaagatatggacacaaaaaaaaataattaaattacacaaaaccattctgttatttgcttaaatttcaaaaaatttctaactgatataaggaattttttttttaaatttccaataatccattggactggaagcattttgacttacgaatgttgttataaccatgattatatgctgtgtaaacaaatggacaaaacgctacaattgcggcaataacttttgaaattatgtttagaatttgttatgctggtcaattaatatttttcgtgacattttaaagatcagaaataaatgtaaataaacagattaaaattcaaaagatttgacatctctttatcttgaaaattccgtcataaaaattttttcaacttcattaattctaaaaaaaataattgaccgaaacaaaaataaatgggaaagttaatgataagcaaaaagtaaagtgtgactggttcagcttattatggagaaaaacttatgtgttcataaaacgagatggatggacgacggccggggctttttctgacaaaaaacctcggtctgtgtgcaaaagcaactggtcttttagcgcatgaaaaaatgagcgaagagcccccgggggtgagagtaattgcgatcaaaaaaaactcctaaaattcgcgtataaattgcgacttcccatcgcatcgcataaataataaaatcatg

SEQ ID NO: 114653 - DNA, 94 bp, Heterodera glycines
  unsure (1)..(94): unsure at all n locations
tgatttctgtaattgaaaatcagttacgcacagccctacccttaccgaaaaaaccagngatctccgatcacatatacaaaatctaaaaaaaatg

SEQ ID NO: 114654 - DNA, 552 bp, Heterodera glycines
agtacggtagcacagttcacatgctcgcatcaaattttttaaattttcattagagcattaaaaaaatgactattcgcatgaaaatcctaatttttaaaacattaaaaatttcaagcaaaactaggttaaagtaattttttcatttgaaaaaacactaaattgatccacttcttgtcattttataagcattatgggggtgggctttgagtaggataaatcgactaaatgatcaattattcaggatcttgagtcaattctataaaaaaattctaggatttgaggttaggcagtgccgaaaactttttaaatttactggattttatcagattttggaaatatttggatttttgaaaaaaaatcctcaaatttacccaaagatctcaagaatgttcatactcattttcaaagatttccaattgagtataaatcagaatatggcccgaccccctgggttgtgatttttttgaaacataattttagcagtattcatttcggttttttagcgcataaatcccagccccaataaaactattattattaatccaggaaatg

SEQ ID NO: 114655 - DNA, 1003 bp, Heterodera glycines
caagtgtccttatttctctagcatttgtccttattttgttaatattcagtaaatgaaaatatctcaaattttcttaattggttttttaaagattaaattagccatttttttgctgcaaaatgaaaccgtatcggatttttggccataatcggaatcggcgatttaatcggaatcggattttgtctggctcggcacatccctgctgtgtatgtgtaaataaaaagttattgttgttgtttttttacgtcaaccaattctttcacgcattccctttcgatctatgtaaatttgtaaatcgaagtcgaccgcaaaacagtaaatttagttagttttaccatttttgatagttttttgggaaaaacaaaattattacctcatttatttattattataatttccatattcaacaatttttattgcaattttttcttagaaatttcaatgtcgagcagtttgcaggaccggtttaagctgatgttgagcacgggcgatggggcggacgttcactttttggttgggaaagaaaaggaggtgaattgaacacaaaaaatttaaaaaagagaaaagctccagtggtagcacgcaacaattatttagatggtctaaaagtcgcaattatacataaatctactcttaagtcgataatttaagcactaagaacgggaaaagaacgaatggcgttgttcaaatgctaatttatacgctggacacacataaagcgcgcgtcgctttttaaaaatttggaggtgtggccgcatggtcgaaaagtaccaaaaaatgatactttctgacagactgaaatgagtgaggcctctgaaatttatcttttgggtttaaaacttcaatgataaattcatttctattccgagttttttatttagcttttggtagcacacaaatgcgtgatgatgttcgcttctgatgtgtttgggtcgatgttccgttttgatgataaaaacgcaaagacaaaaagtaaaaaaaatcgaaatattttttaaaaatg

SEQ ID NO: 114656 - DNA, 193 bp, Heterodera glycines
aaaatttttagcggtgcctatctgttccgccgttctcctatttttatgtttacaagttcggtctctaacaattgattttctttttatttttttaattcaaaatttcgtttttttctttcaaaatgtccataacatttacatatgttttattgttcattgaatttaagccatttcattttatttccaccaaatg

SEQ ID NO: 114657 - DNA, 569 bp, Heterodera glycines
attcaaatgcacgaaatggtcgttcgttggcagtcgtgcgattctccattcaaaatctattggccgttgtccatcgctctttcattttgatcgtcttttgtgaccacgagtcgctgcagtgtgaattttggtgaaaaataaattttcgatttttgttcgaatttgggtccggggttcgaaacggatgccggattcgtgatcagtggccccaaaaacccaaggagagatgttttaagcgattttaaaatttatttattttttttgaaaaatagggggtacaaaccaaagtattcctacattttttcaaaaaatgcacccccaagaattggaaaattttcttaaaaattcttcccacaatttttttttagttaactatttcgagattttccgtcactaaaagtagcgactctactctgatgatgatgcagtgctggatggagtcggagatgggaacgaattgttcatttattagccccttttactgttgaattgagtttaattttttttttggaaaatgtgccaaaaaaattatttaaaaaattctatttatcccccctggcacataaatg

SEQ ID NO: 114658 - DNA, 393 bp, Heterodera glycines
ttcttggtatcaaaagaaagcttatttgtcccgggaattcataaatccaagaaaagagcaaacactcgacaacaagaaaaaaaatacaacgagaaacactaaatttaacttatttttttgagtatattcaaaaattatttttggtctgttgcttcgagcccagaattttgatatactcaaaaattctatagacttagatagttttaatttaatattaaaaaagtaggtattgattgaccgagttagaattatggccaaagaaactgaagattgggctcataaaagtcgattggactcctaaattgaaaatggagtcttggttttatgaattcaaactactttttcctgtatttaaagcatttttttttcgttgttaaaggtccaactggaatg

SEQ ID NO: 114659 - DNA, 192 bp, Heterodera glycines
ttgagaaaataactctgaattacaattttgggttgggccagattcaaattcaggcatatttaaattggcattttattcgtgtcactcgggactgaaaatttcacttgacccaaggctcgagactgccaaaaactcaagaccgagacgtttttttaattttttttttactaaatgatttttttagtaataatg

SEQ ID NO: 114660 - DNA, 123 bp, Heterodera glycines
tgcaaatcagtgagaaattcatttgggaatgcggtattttacaatttaaattaaaaactaaaattttattagtcatttattatttccattaaatttttttaaaggcactccgttgggccgatg

SEQ ID NO: 114661 - DNA, 104 bp, Heterodera glycines
ttaaaaacaaaccattttgaaaaaatcaatttcatttagttatataaaggataattaattttatgaataaaaatatatggattatattatagacacaaaagatg

SEQ ID NO: 114662 - DNA, 484 bp, Heterodera glycines
tgtatggagggggagaaacagcggataaaggcgcgggggggggggtcaaattcggcaggatttagacggacgaatcccaaacttgaaataggccaactcgtactgtgtttcgacaaataacgttgtaaatttaaccaaattaacatttttgatgtcataactgccctaaacttaatttattattgaaaaaagttatggacacaaaatttttttttactatttttggtcaactttttcgtgtaaacaataaaactttcttaagttttgcttgtagattaaaaagcttaagggtctattgaagggtaccaagaatgtttaattcggtcgattttgacagaagttatgacgatttttttgtttttttaaagcagtgcgagttggttttttgccaattcttacccttccaatcagatccagaaattgtcaaacaaaagataggatttctgcaataggtacggtatcaaaaaacgtatttgcacagatg

SEQ ID NO: 114663 - DNA, 141 bp, Heterodera glycines
  unsure (1)..(141): unsure at all n locations
tgattatagagggctgaactctgtaacaagtaaagatgcatttcctttaccaaaccattgatatagcccttgttagcgctcggcggaaaaaagtttttctcggtcatcgatttnatgtcaggatattggcagataagaatg

SEQ ID NO: 114664 - DNA, 259 bp, Heterodera glycines
aaatcaaaaattgttcggagataatgctatttttggacttctctcgccatacctaagccgcaaaaaaaatatgtaaaaacataaaaatccgggccctagcgatcactgatctgcaacgcataaaactatagtgaacaaattttcacgaaaagatgataataagaccatatctgggacttagaacttgtatcaaattaatagattaattgttggttaatctctattacgactaacttcaatcgtttctcagcaaaatatg

SEQ ID NO: 114665 - DNA, 644 bp, Heterodera glycines
ttttttagcaaaattattttaatacaaaaagctcaaataagaaattatcatacgagtgcacataaagggttaagttagttatagcttttaattgcgtgaacacacatacatacataggtaaatttgtttaactttaatgttttttttccttcgataaaaaaaatttgcgatttttttaaatttaaacagttcgccagatataaattatttgtctttttaagttccatttcaacagcacaccatatggtaaatgaaacggaaatttgctttcattggcagagaaattggcacggaaccaatggaataggacaaaagcaaaatgatcctcggcaacttattttatttgcattttcatttcattacacacattttaatcgatcggagtatcaatttaaatgcggagtcaaactctcattgaattacagtattgtaataagtagataattgtgtccatgaaaacaagcaaacaaaaagaaagagaaaaacattcacaaaaatggtaataataaagcagcagtctgacccgttattattcggctgtaaatatgacatcatgtgcggcgtcgcgtcattcacaattaatatgtaaaagaacaattaatgcactagagagtgtgtgtcgtttgtgaatcgaaagagagatg

SEQ ID NO: 114666 - DNA, 94 bp, Heterodera glycines
tgtgagaacatggagagagaggcggacggatgcaattgaccacgattatattttattgatgccgagctttccttatcattccgttcacaaaatg

SEQ ID NO: 114667 - DNA, 96 bp, Heterodera glycines
tttttccattatttaatttccattttttaaaatttttaaaacttttgcaagattctgactttggcacattttgccacatttaaaaattgcaagatg

SEQ ID NO: 114668 - DNA, 90 bp, Heterodera glycines
tttcagaatgtcaagctctaatgtgtaccagggatggcattccgagtccccaaaaattttcagaaatcggaattccgggtgtcaaaaatg

SEQ ID NO: 114669 - DNA, 73 bp, Heterodera glycines
cctaaaaaaacatacctatttggggccatttaatgcggcgcattttgacattttataacttttcttataaatg

SEQ ID NO: 114670 - DNA, 176 bp, Heterodera glycines
aaaattagaaattaaattaaattgaataaaattttcctttaattaaaataaataaatattaatcattttttataataaatttccctgttttttaaagctgttcggtggaattgccggggaagttaagcgcttttaaatgtaaaaattgtggaaagtgtttgcaatctttggatatg

SEQ ID NO: 114671 - DNA, 315 bp, Heterodera glycines
ttgctaaaatttttgattgtttttccaaattattttctcagagacttaaacatataaaatattatataatttataaattgctacgcaaatgtttagtgatttattgtgaaattgattaattccccccggatttcctatgcggaaatcaaaaaatattggcttaggagtaataaatggttgttgttttcatttgatgcattcattcattcagtcttcactttctttctttctccattttttttttgtttatgaattacaataaaataatataaaaataaaaatttaatttttagaattttaatgtttatttctatg

SEQ ID NO: 114672 - DNA, 403 bp, Heterodera glycines
ttttatggtcaaattttgtggcaatttgttaaattttagtgtgtttaaactgaagataattattccttttattacataaaactacaaattcgccatcgccctgaatttgtgcaccttcttgcagaaacagcaagcatttttgtagaaatcatcgcaaaaagaatgaatgcgaagagaaaaaagtgatcgtctttgttgaaagtactctgacatccatttttaatttaattttggaaaagttgcctatcaaatttgtcaatttgacgcattgcctaaacaggacgtatcaattcaaacggcgataaagttcgtcagatcaaattggcataaaagtgaagcaggaaactgagactgtccaactgctcagacgaagaaaagatgacctgtctattattaaaggatg

SEQ ID NO: 114673 - DNA, 158 bp, Heterodera glycines
  unsure (1)..(158): unsure at all n locations
gcatttgaataagctgaaagctcatgcacaggtgcttcgccgtctcgcccgcacacgctgctctcgctcagccaaaaagtttttgctacagcacgagatgnncctcccagctattgtgggnctcatgncgtcaattgctcttccgcttattgcggatg

SEQ ID NO: 114674 - DNA, 89 bp, Heterodera glycines
atttaaaaaatacctaattttttcggggattgaatttggcggagaatgaggacgatgatgatgatgatggggaacgattgattgtcatg

SEQ ID NO: 114675 - DNA, 265 bp, Heterodera glycines
attatatttaaagaatttgttaaatataagtaacaacaacaaaaataactaaataaaaatgattgatgacaccgtttttagttcaaacgacttaaagttaaaattgccttttggaatggtcatcagtggaccgtcgagtagtggcaaaacaacatttttgttaaaatttttaagagagagaaatgaattgattagcccacaaccaaagtcagtgctatattgttatggacaatttaatgatagtattcctatactacaaaaaatg

SEQ ID NO: 114676 - DNA, 555 bp, Heterodera glycines
acaaaccctatctttttggtatcattcgaaagcgcacagtctaacgaagctaaaatatataaaaccgcagcgttcaggcaattaccaaaaaagatttgattaattaagtaattgctgattattttcgtttgtaactttcttgaaatgttagaattctcttgttttctcgtattattacattattcagactttgcgctttcgaatgatacaaaaaaggtagggtttgtcaacatgaacaaagttattgtataaaaacccgggattgtcaattgattggactcataaagtgcattagagccgaaagtttttccttgtaaaacatagtcccgctggtcgccgccacgattatatacatatgacactcattttgccaaattcgaacaaatcccatcgaaaatttacttcttccgatacttacttattggagttccacataactgttttaaacatgcgaaaatttgtccaaaaacttaaaattaattccaaaaaaacgcatgattctaataagcaataattttttgttattttttacagtgtcgtcaagagttcaaaatg

SEQ ID NO: 114677 - DNA, 86 bp, Heterodera glycines
  unsure (1)..(86): unsure at all n locations
gcatttaattaaataaaattattanttcgctataacaagctaattaatgcaaagattctgcgcatgccatcgattcgattggcatg

SEQ ID NO: 114678 - DNA, 584 bp, Heterodera glycines
tgatatgaatagccggccgagaaaaactaaaaaaaaatctttttttaatcatacgcaacgaattatttacaggcaaaaaaaagtaaacataaatttgtattttatttgcataaaaaatatgttgatcattttggtgttcctttttatggatgttattttcatgatatggcgaggatttttagaagcgaaatcccccagaagagatgccttaactaggagtgaaaaaagtcgaaaaaaccatgttgtttttccaaagataaaaaaaactgagaaaatttaggactttcaaaaacaaaaataaggaaaaaatacaaaacgccaaacaaaggaacagttcgaaaaaaaatttcatttcttcccaaatattgatagacagaaaaaaaatggaaaaaagcatcctagaagcttcaaaataacctagactagaaaatgcaaaaaaggaagaaaatactgtaaaattttttttttatgtttttcatgaatccacaatatatatttttttggtgaaaatattaactcaagtatttttcagagaattacataacgggtaaaatatcgctgaattgttttttttcattataatg

SEQ ID NO: 114679 - DNA, 460 bp, Heterodera glycines
  unsure (1)..(460): unsure at all n locations
ataattaaagtattatacctctaaaagggangnagcagcagnngagagacgaagaaaaaccttttaaaaagcagaggaacgggcagccaaacggacgaaaagccaacgggagaaaacggaagacaaagcaaacaaatttgaaaaaaaaaacaaaactgaaactctaaaaaaaccggcgaaaaatgggaaccaaaagaatgggaaagaaacggaaatgaaaaaaatgaaaaggaaaacagcaaaaacaccgaaaatacataccaaaatcagcgcgaaactctgaaaacgattttggcagcgattggcgacggaaacaatgggacgatggaaattttggcaaaaagtataatttaatcatttaaacatttattttttaattaattttcaattcatcacagattccaatggcgacggttcgtcgcgcagacgaagacgcaaaaagcgtgccaccaccaacatg

SEQ ID NO: 114680 - DNA, 392 bp, Heterodera glycines
ctctcccgccactctttctcttttttgcttctcccccccattcaatttgttctccccccccccacccctccccgctggcccctccgatgcattctcgggagaggtatcattctcgaccttccaaacaaaaacattaaaaatgcaatttgttttccctgtcaaaactatgtctgatttggctgatctataaacgtgatgataacggattctctactagtaattagcaactatttaagcgccagtaattgtttttttttcataggttcatttttccaaattgtgtctcatcaaaattacaaacagtttccatttagcagctatcaaagcatagacattcaattattgtcctgaaccaaattcggccacccaaaatcattctttttttaagaatg

SEQ ID NO: 114681 - DNA, 356 bp, Heterodera glycines
ttaagaaattgacatggaaaggaaatgacgaaaaataaatacactaattgatcgataattagtgatccaaattaatttttgtatggtatggtgtttacgaaaataaacgcataaaactagaaagaacacacctacacagaaacaagggaatttagttttgaaattgcaaaagaaaaagtttggcaatataatttatttttttttaaatttaaaagttggcaaataattttattttttaaagaatttgttaaaacagcttaattttcattttttttttacttagaaacattgaaaacataacttttctttttagtcatttcttctgagcaaatacctaaattcgaagtctaaaaatg

SEQ ID NO: 114682 - DNA, 411 bp, Heterodera glycines
ggtaagtgagtgttcccagggacctttcagctcggcgttaggcctcgttttgtacgtcgaacggcacgcacagaaaaatggcaacaaaaccattaagttcgccaccatcgctgcccctgaattgcccaccatcatgcgcattcaacgacggcacatgtctgaagcgatggcaaacgaactgcactcgcagagcttggttcaaatgcagcttgtgaccatcaatcgtccgcaaggagtgctcatttcacagcactacttcctgcccatgggttttcctttcaaaaatggcgacgaaattttggcattcaatgccaaaataattgccaaggtcgacccgaaagccggatttatgcatatccttttgacagcaactccacatgggaacaaattggatttggagagcgagttatg

SEQ ID NO: 114683 - DNA, 484 bp, Heterodera glycines
aaattaaaatcaatttaaataaaaatatcgcatttaaattaaatttatttaaaacaatatcgtttttaaattaattatttgttcatttccaaattctcatattcctaaactatgaggatcgcttagcggccaatagatgctttttgcacgccccaaattatatctcccactagagccagcgttgaaagcgcccccggcgctttcacagggcccgcagggccctggttcaatttaatttaaaaatgcgttttttatttaaacatattttttatttttaaggtattgccagaagaagtttaacatgctgtatgtttaaaagaacaatttatattttctcagttttataggaaattgaacaatttgtaaattcaaccccccgccaaaaaattttttttgttgctaaatttattaaaattagaggcagtgaatcggtttcaattctcggtaaaacacttcgcacatcgttactataaaaaaaaacatg

SEQ ID NO: 114684 - DNA, 87 bp, Heterodera glycines
ttcccaataacatttccgaaatggtatgctttttatgaattatccactatactaacaattaatatttagttttcaaaaatgcacatg

SEQ ID NO: 114685 - DNA, 210 bp, Heterodera glycines
tttattaatccattccgatcagaaggaataaacgccgagagggacggacggatttatgggaaccaaaagcaaaattcccaatttgatttcattttttgaattaattattattaattaattcgggaattgaatggtcagttctttttttattttgaattcgaattttaaataatttttcaaaatttagcagaattttctgagtttataatg

SEQ ID NO: 114686 - DNA, 97 bp, Heterodera glycines
tttacaccaggttttgggactttacagagtgacaccccacccagcaacaaattcatcaccagctgaaaagctattcggtcgcaaattgcgtaccatg

SEQ ID NO: 114687 - DNA, 556 bp, Heterodera glycines
  unsure (1)..(556): unsure at all n locations
gcctgcannggtcatgagaaagcaattaaaaatgaattaattgaaatgaaaaagaaattaatagttaataattgaagcaatttaaaaataattaattgataataaaaaagcaattaaaaaattaattaattgataatgagaaaaagcaattaaaaattaagctaaacctattaccgtttaaattttgaaattaattattggtaatgagaaagaaataaaaaataattaaaggtaaagaaaaaacaattgaagcatttaaaaaattaatgaattggtaatgaaaaaagcaattaaaaataaattaagccaaatgaattgccatttcaattttgaaattaattaattacttcttcagaccgaaaattatgtgaagaaaatgttcaatttaatttcgaacttacacgccctcatttggaggttaaatttccagaaattacccaacagattcacgtcgaccaatgcgaaaattttcaatcgaaatatttggttaattttggaatgttaagtaaacaataaaaaataatatataatttttagtttaccgtattcacaaatg

SEQ ID NO: 114688 - DNA, 107 bp, Heterodera glycines
aaaccacggtcaatcaccaccaaaaccatcgacagaactgaacaacttctacttggtgcacagttacgtgcttgcggagaagttcaagcagccaggggaacgcgatg

SEQ ID NO: 114689 - DNA, 844 bp, Heterodera glycines
tttgttcttttttttattcttggtaattccattcattcaattagagagagtttttatttagcacactaaaaaacatttattgacttatttgaagtggattggaagctttggcctctgattaggaacttgatcaaacataaagtcaccagcaggaagttcaagtcactaatttataaatttagaaattaattttaattttttgaacatattttttgaccaaaattatttttctagttatcaaatcgtaccaaaacgaagcaatgtctgatcactgatcaggcattgatccgattgctcattaaaaatggttgttttccctttcctcgctctcgctcttcattctccattaaattataaattttttaaatttatctgagattaatcctcctctgactctttcattttctttgcatttatttaattgtaatcccttaattgattttccccttttcattgttttgctcggactcaaaagttagcttttccagttttacatttttcctaatttggctgaatttataaaacgtgaaaatagcggtttacctcagcacttgggccgggccccacgcaaaaaggccccaccatgtttttggctataacatttttcttgttcatccaaatctaacaatcttggtatcattcgaaagctcttaagatgttaaaagctatttctaacctattgatttgctatcaacaattgctaaaaaagttatagcatcaaaatagcaaaaaaaaaaaaaagtcaaagttttgaaattttttcttaataactttttcaaaagtcaaaaaatctttttgcttttttaaggctaataatactcataattcggcactaattattatg

SEQ ID NO: 114690 - DNA, 97 bp, Heterodera glycines
agtgaatattgaggctatttaatctcagctttttgttgctctgatcagatctttaattccctctccgataactgcttggttttagatagtaatcatg

SEQ ID NO: 114691 - DNA, 643 bp, Heterodera glycines
agtcactatcttgtgctgacacgtaacccatccgggcaacttcaggtacggacagtcggatctcaattgtttccaaagcgcttaaattattttatggagtcatataacgatgcaacaagtcaaccgtttagctacctggttataaatatgcatcctaatgcacaggaaaatgaacgtcttactagcaaaatattcccggacgaacgcagagaaatctatttaccgagcgaataacgtattacactaaccgcattggctatataaagacatgaatgtagaaaaaatccaaaatgtatcaatttagtccttacgttagggaaaatacagatttttttaaaaagcttgcggccactaggtctgataaacgaaaaaacgagctactacagggagcatcagcagaccaaatacttgcccttgtggaaatttgcgcaaatattttaaaatttaattttcgtttaaattcaagccagaagcgacggttgtcacaatacgcggactattacagggccatagcacgcgctcgcagtgagaactcagctcggcaaaaacttcaacaagggagcggaattgcccttggtgctattcttgtgcctgttctcagcgttttagcccaacatttgtttgaaaaaataacagcataatg

SEQ ID NO: 114692 - DNA, 468 bp, Heterodera glycines
aatttgaataattgttggaaacgatcggaattggtcgaagaattgggcttttaattgggaccgggacctttagcctttggagcgggaatttggaaaactctttataatatcaattccaaacaaatcaaattatacaattcgaataaaagcgtcggaggagatgaagaacaaatattttagaatcggagagaagtgagaacagaacatatatttaattaacaaatgagaagaaaattaaaataaaaaatgagaacataatgccaaaataatttaaaatcacaaacaaaaggtcaaatattccaacatgcccgctccctgacaaaaaagcgtcccctgcttttgacggacggaaaggctggggtcgaacagaacagtcgctcaacggtttcgatttcgcaactcggcacacgtccaacggctcggatttcgagattgattcgaagtcgacgaattgtggcggtcaaaatg

SEQ ID NO: 114693 - DNA, 578 bp, Heterodera glycines
ccgaattcgaacaaaaaattgaaattttttcaaaatgcagttttctggggaaaagcttcgagttaatttgaccactatttattttgatgcaaaacaatgctccaattatttaattgaatagaaaatacgcaattttcttgtaaatttggtcgattttaacgtgtatttttgaaaaaaaaaatttttttttttgttcgaattcgggtccggagttcgaaattggggaaatccaagttcagattcataatcagcaccctcgataacctgcagaaactaattatgtatgagcacaaaataaataagttaaattagaaacccccacattctttaggattgccgaatttgtaaattgatttgtgccatcaaacacgtgccctcctctgtttttcagcttcttcgaccacaatgtgctcactttccttcgccgttttgcccgttttttcagcaaatgtgaaacaaaatttgacctttccactgcaagcattcacattccggaatgcgttgtgctcaacatttggacactgctcaatgacaccattcgtgtgatgtatttcaacacaaacacttttcgtcaaatg

SEQ ID NO: 114694 - DNA, 435 bp, Heterodera glycines
tactgtgcgctcatatatcgtagtagtgttctaactggtagtgatatgctcctgctatttgctgcgaacgaggcagtatcccgcaaattttggagtacgacgatggctcccaatttacgagccacgagatttgctagatttatgcccgcccacggtgtgagtcacctgttttcaccgccgaataatccagtgtccaacggtcaggccgaacgtttcgtggacacgttcaaaagaacatttggaaaattgacaggggagggagccccaagcaaagaaatcattgaaactttcttgttaagctatcggacaaccccgaatgactcgttgccaaacagcaaaacacctgctaaatgttcctgggcagaaaacccccgcacaactttggatttgttgcggccgccaccttaacaaccgatcgacagagatgttgaaatg

SEQ ID NO: 114695 - DNA, 1003 bp, Heterodera glycines
tcggaccatttcttaggagtgtatttttcgtttttattgcatttttttaaggattttttcaaaaaccctaaaatatttgcctaaaaattgagtccctagtattgattgaaacgattctaagataatttttaattttgaatatttttcgtattatttaaaaaaattcttaactattcatttatttaaataaatttgtttgcaatttagtcaattttatttatttattttttaccattttttagttttcaccaaaaaaaaaattaaataaaaaatcattttttctaaaaaaaagtaatcaccaacagaaataaaagtgtttttttttttgaagttactacgcattgctgaaacgaatttaagttaatttgttagtttcggatatttttcgatttaaaaaaatattacgtatttatttatttaaacaaaatttatttgataaatttatttttttaccatttttttagttttcaccaaaaataacgcatgaggggaagaagcttcgttggatgtacattcgtgaccaattggtggccaatggcatggcacattttgtcggcaaagatgactcatacatgcgccaaaagtgggcggacatgaagcgacggaccattgaaaaactcagccgaatgggcaaaaattcacgtgccaatttgagcgaagtagtgtgtgccaactttgtgatttaataattggtcaacagagtgccaaccaacaataataatttttgaaagaattttacgtgccgtggcaaatttttgagggttttttgcttcaacaaaaaacttaagcttttaaggcaaaaaacaaacaaacaattttctatcattaataagcctttaataacttttatggtgctagtgcgttttataaatccgccatcttacacatttttttattttgtttccatgcgcgttttataaatccgccagcacatttttttgcatatatctttaataatattaaaattttatgcaataatttcagctatattttttacaaaatg

SEQ ID NO: 114696 - DNA, 249 bp, Heterodera glycines
ttaattaaatatctaactaaataaataatcaattaattagttaattaatcggcagttacttttgcggaattcgtcgcataattcgatagctaatgaaaaggatagaaaccccaaaaagagcagacaaaataagccataaaacagtaaaatatttttggagatgcgaagaaatgcttaaaaagaggaaaaatgaattaaaataaaaaataaaatgaaacattaaaagtgtcaaattaccgtgggaaaatg

SEQ ID NO: 114697 - DNA, 65 bp, Heterodera glycines
agattttgttcgcggtcagtttccggaatggaaatctggacgtcttgaaaacgttgaaagacatg

SEQ ID NO: 114698 - DNA, 274 bp, Heterodera glycines
attaatttgcaatttttcgtcttaatttctgcttttcagttacatcgatcaaaatgtcatcgcatttctccgccgttttcaccgttgtattttcgccgtttgtttaacggatttgttcattttcacgggcaatgttagccttttggacaacatttggccaatgttccgcaattctatgtgtgcgatgattttgaataccatcgcttttcgtcgtttgcgtcaattggccccgtcacttctcaacgattgttcattcaattgaaccacaaaaatg

SEQ ID NO: 114699 - DNA, 215 bp, Heterodera glycines
ggaactcattgagaagcttcaacaagccaacgacaaagttgaccaacaaatcgcagaggaacaccaattgcgaaatgaagtccttcagatggcaccgcgcgcgatgaagaaatacctcgacacacgctttgaacgactggtgcacaatttagtcaaattttcaaaaattccgttttaaattttagatgaatgccaaattggaattcccccaaatg

SEQ ID NO: 114700 - DNA, 384 bp, Heterodera glycines
aatagccaaaaagttacaaaaaacgtcagaaaagtagtctttctaatgcaaaaaggtcctgaaaaattaggcaaaactaattataatcaaaatcccttttttaaacatttattgatttgcaaacaatttaaaacgattaattttaacgaaaaagagacacgtttcagaagtgttaccccgccaggttttttttcagtcctgctatttgaatcctaatggtataagaagtttcagtaccgtctcgaagatatacttactttcgcaattttcttcgcgaaaattcaaattttgccttaaaaagtgaaaaaagtcataaaaacgttcaaaaaaatcataaaaatcgcaaaaggaataaaaaagtttaaaaaaaagtcacaaaaaatg

SEQ ID NO: 114701 - DNA, 159 bp, Heterodera glycines
tcatcaatcaccggccgctcacattcgaatccgatcaagagccttacgtttcacttcgttcaatcaacttcctcataccatacaaccaaacggagaacaactttcccgttatcaacgaggatcacaaagatccagactacgaaccaacacccagcaatg

SEQ ID NO: 114702 - DNA, 136 bp, Heterodera glycines
aattgttccccatttttgcaggtatttcgacggtgaagtgatcattttcctgcaccgaattcgccgcctcttctccacggacgtctctctgcagttcaacattcggccgacggaatctcgagcttggaaaacgatg

SEQ ID NO: 114703 - DNA, 68 bp, Heterodera glycines; identical to SEQ ID NO: 110414

SEQ ID NO: 114704 - DNA, 123 bp, Heterodera glycines
aagcactgcggtgttcgtgcactcacagttgatgcctatcaggcacaggagtgcgatgtcatcataatagtgacaacaagatcaaaatactccgaggtgggatccggaaggacggacaacatg

SEQ ID NO: 114705 - DNA, 1003 bp, Heterodera glycines
gaaagttgtgaaaagaattgcgcacaaacacatgtcaacagaaaaatccgcttgcgaagaaaaaccaaaactaaaaattaaataaaaaataataaaaataaattcatgcaacatttgagaaaacaatgccaaacaaaatttaaacaattgtttttttacaaatatatagaaattccaaattttcctggttgcgtatttctttttccttccatgaaagttgaaatcaatataaaaagcataatattaaatactatcttctttttataaaatttttaaatacatatgacgggctaacgtatacggagcttttagacccccgtaattacgggttacggatttccgtaattgaaaaccctccgtaattatgggtttccggcccatcacttttctcgggtcggttgggtcctgaaaatatttaaagaaaaagtgccgaaattcattatgcttgctggctaactgacttatgcttgatggtgatgtaaatgagtgcactatttagagcaatgctttcacataaatctgataaatgcaattaggcacaaaagttgagaatttaataaaaaaggttttattatttatccggccaaaaaatctgtttaaggatgagtatttttaattctttcataataattatttttatattttataaaaaatacatattttaataaattaaccaatcgttttatgaaaattttcatttcaaaataattttttaattaaaatgatgccactaataattttttgatgaatatggaaattgatgttggcaaataaatgaagaaatcaccggaaatggaaaaaacaaaaatttatgaatgaaaaatgaaaaaaaaattcgtcaacataaaaaatcgaattctatcggcatcttttccactctctctgtttggccaactatttaattaaataattcgaaataaaatttggcatcggagcatataaaaagcaattgaaaatgccgaaaaacatatcacattttcatttaaattatcctcccaaaatg

SEQ ID NO: 114706 - DNA, 885 bp, Heterodera glycines
cagttaattattgaaatagttacctaattataattcctttaaatttccattttataaatacattcatttaaaaagcagttaattattgattattcaatatattatatttcaaaagaaaataattaaaattttccctttgctttgtccaaatattattttgcatttaaatgatcaataaaataaagatattatcaataagtaactgaaaaaatctacaacagattccattccaaaaagaaataggaggttaatatattgggatttgcttctttgctttatatctaacaaacgcaaaagaattacaaatttctaagcaattttataaatttttcgattaatggagaaagtggcccagcagaattattatttaggattcaaaatcatcgtctttggcaagtgctgcccaaaaggagttggacttcatccatcgtgttttgttgggcccacaacggggcaatttgacgggaacgcccaccattttggcgcgcgtattttgccacatctactgcgtggggcatattttggtgccaattttgtatgagattgtctagttgggtcttcgccggtccacacgtactcggaaattggctgctcaaatccaagattggctgaataagataaataataacgaaattcaaattgaatttaatttagcaacttttttgatcccctccaaatagtcggccaataatcgatgtgccaaagtggtcgcactgatcggcaaaagcggcgaatcggcaaaaagacgtgccaattccgcccaatattcgcccacggctttatgcacctgaattttaaagaattgagttcgaaatttgcaaaaaaaaatgtttgtgaaacggaccgccaattgattgttgtcgaaaatgtgttcgttgacaaatg

SEQ ID NO: 114707 - DNA, 584 bp, Heterodera glycines
ttataatgaaaaaaaacaattcagcgatattttacccgttatgtaattctctgaaaaatacttgagttaatattttcaccaaaaaaatatatattgtggattcatgaaaaacataaaaaaaaaattttacagtattttcttccttttttgcattttctagtctaggttattttgaagcttctaggatgcttttttccattttttttctgtctatcaatatttgggaagaaatgaaattttttttcgaactgttcctttgtttggcgttttgtattttttccttatttttgtttttgaaagtcctaaattttctcagttttttttatctttggaaaaacaacatggttttttcgacttttttcactcctagttaaggcatctcttctgggggatttcgcttctaaaaatcctcgccatatcatgaaaataacatccataaaaaggaacaccaaaatgatcaacatattttttatgcaaataaaatacaaatttatgtttacttttttttgcctgtaaataattcgttgcgtatgattaaaaaaagatttttttttagtttttctcggccggctattcatatcatg

SEQ ID NO: 114708 - DNA, 365 bp, Heterodera glycines
tgacgtattatgtgtatcgacttgccaataaataaatctttaagcgaattgtctgtctgttggccaatttttattagctttaggaaatgatgggagtgaacagtgagttggagagatgccacggcataaattctaattataaaaatgacaatttccacatttaaaaataatgcttttccacctcataatttgattgatttgttataatattttcatctgctcgcataagcattctttttgaaaaggcaaaaaaaaattaataaaaaaaattatttacaataagcaattcctttttcgtcagcttacaatgttggctttctccttatttcctaactttttgcttctccttttggcaatttgccatg

SEQ ID NO: 114709 - DNA, 342 bp, Heterodera glycines
atacagcgaaaggctaaaatttctaaaactttccaagcttgaaaccaggaggaaatatcttgatatcataacagcctttaaaactatcaaaaatactactcaccttaacccaaaaaacctttataatttttcaaataggaaaaagtcaccttttcctattttggtaaccaaacgaaaaattaccaaaacagaacactcctttactaacagaaccacaaaacatctacaagaaatctgcaaaaattcagatatttcaatatcaaattcactgcccaccttcaagaaaaaagtaaaaaacattttacaagattaattttaagttggagatctgacattatcatg

SEQ ID NO: 114710 - DNA, 139 bp, Heterodera glycines
gccgcgaagtggccgagccagtcgattttatcattcataattctataacacaatcgtactgcctagcgggggatgcgccgaaggcgctgaccccgctagtgagcaaaataagcagcttttaggcctaatcgagaacatg

SEQ ID NO: 114711 - DNA, 1003 bp, Heterodera glycines
tctaatgcgacttttgtgtcccatcccttggactcaatgaaaattcttttggaatgactctgagtgattgttaattgttaaggccgttccatctctgctcggcgacgaagcacccgctgacccggccacccaatagccatacacacacaagcaaatcatcgacgacctcactcctcggaaatggcccttccttcaatggaaaccttttcaaaattgacattttccgtcttaaaatttcacttttttatttcttctgcctatgttcattttttgtttctttaaagtggtgcgtagcaaaggaattctttttgtacaaattgtttttttttaactttttaacgcactgttttaccgccaattcaaatcccattgagacttcctagaatccgtcctctcgcttatctccgtccgaaattatccataaccaaccaaataaggatactcagcacatgcaggtcatttgattgtttagttcttttattgcatccgccttgcttaagtttccaaatttacaacaattttcggcactttctctcacaaagtttcataggatttgtgctggggtaaatgctccaaaatctttccggaaagtgccgaaattttcaagagcaaagtgcattttatttttattgtttatcagttatcacattactatcttattaatctcttgtaaatgaagaattaaaattctatattttaataaactatgaaaaaatatttatcaaaatttcaacagtttaaaatcatttccctaaaaagttgtaaatacctaaatcgtttcctttaacaatgttaaatttattgttatatataaattggcttagagatgtttgaccgcgtctttcttcgctttaatccctttaattgctcagcgttcattgggaaagcttctccagtcgctgtgttgcaggtgcttttttattctcataattgttattttttactagccacattttggggtggttgaaaaactcgaattctgttgctaacaaataaaaaaatg

SEQ ID NO: 114712 - DNA, 525 bp, Heterodera glycines
tgggctcgagcacttgcaacaggcagccaaatcggtgaaggaatttgcggaccaactgcacccgttgtgcaagctgagctacgtggactatggcagggattgaccgggcacggcacggaggacagcgaaaatgccgaaaaatgcaaaattggaatttctcccaattttttttgatttataaaaaaatttcttttttttacttgcttattttgatgcaatttattatgtcattcatgatcatgaacattatatttatcaatcattccgaattatttgtttatttaaaaattaaacggtgaccctttttattttttctggcaaaaaaaaaatcgtttttacaaaattttcggggttttgccttttttggttctaaaattcacaaaaaattatatgtattaaaactgaaacgctcactttgaatggagagaggggccttgcaaattttcaaaatgcaccgcttttaactttacataaaaaaaattataaatttttttttaaatccaaaatttttatgccagaacaatg

SEQ ID NO: 114713 - DNA, 151 bp, Heterodera glycines
actgaatgttttttcgcgttcatagattgacattgtgctcctgctgcttttacacggtgccattgttggacagacggatttcactggtgcaattagtctaattgccctaaaattattggattaatattcccttttttcaattttagggatg

SEQ ID NO: 114714 - DNA, 630 bp, Heterodera glycines
agagctttggatcgaaaatgataatttggctcaaagacaggcattgttcacgattgaggcaattccgttttgtctttttcattaaataattttattaagttatggaaccaaactgctcgcatccaaaatggactatcgagaactaataattcattggaaggctggcatcaaatatgggggtctctcttagccaggaaacccccatttagcatttttgtgaggcgaatgagaaaagaatttgagcgttgggagaacatcgtcgaagatttcgaaaattcacctgccaacggcattcgtggaaaagggctcaaaagaaaagcaatttatgtccaacaggatcgtaatttgcaacgtgtttttgctgaatttctgcagcgtgctgacgacccactccgttatctccgtaccgtctcatatcatttagcagaaatttgaattttatttttaaaaatttaattttattgtcgaaacggtcattgtcgaaacgtcattgtcgaaacggtattgtcgaaagggtcattggcgaaacggtcattgtcgaaatgtccgggagccggattagaaatatgttttatgaaatacgaaataccctccacctctgccgaggccaaaatttttacggaaaaaatg

SEQ ID NO: 114715 - DNA, 1003 bp, Heterodera glycines
agttaaaataagtaatttaaaatttcagattccggaattttttaaacctaattataaggagttttcagtctatttaaaacgaagaagtgatgggtgaacggcgccgggaaaattcgccccattttttataagagttttcaattttcataaaacgtaatatttttttatctgtcataatataataataatttggctattttttgtaatttattttaggaaaattgattttattgattacttctcttttttcttttagcattataaaattatatttgtgaaagtgctttctttttaacaatagaattagttagaaatttccctactcattctattggtaaattaataattttttttcattttctcatttaatacaaattgaaatattttataattcataaataggaaatttatttactattgaatctataaatatttaaattataataattcgtgaaatattattttttgaaaaattataactaattctttaacgacccggtaatcggacccgggccccgcttttctgggcccagggactcggttcttgcccaaattcccggactcgaatatacgaacttaaaaacaagcatctaaaccaccaaataagcacggaataagcacagaatgataaccaagcacgaagaatttaaaaaaaaactaaaaatgccgcagttatttcgaattattattttttaaaatctgtaataggaaaatagatttaaattccaaaaatttgttagaaaatgtaaaaattgtaatcggaaattcctacaataaaaaaaagaaattttaggtttttttttttgtaaaaagtcttcattcataggggatggttttagagatgctttttgctctttcaaaaacccaattaagaataaaactaagcatctaattacaaataatatgaaatttaaatgcctctattaagcaagaaaatcctaaatcactctctattcataaatttgaagaactaccctttaaaatattccctttcaaagaaatg

SEQ ID NO: 114716 - DNA, 411 bp, Heterodera glycines
gtgttggctgaatgaacatccacagttttggtggtgaatgacggcggcaatggactttgactctacttgaacacacctaacaatatcataaaccattcgcttttttggaactacacccggaaacttttctctttttgttgcagaattatctgccctatttaattattattttattgtcccactgacattacacagcatacgaatttgacaataaatttgatggtacaaatttgacatttttcgcttgaagttatcattctaaaagtgaactgtattatgatattggagttatttgcatttccagtttgtttgaacgtcctataattcgatctacataccatttatcctcttaaaacattaactatttattaaataaaatttagccgttaagttttctgtctaattagaatg

SEQ ID NO: 114717 - DNA, 81 bp, Heterodera glycines
gctataaagtataaatgaatagttcctaattataagaagtaaatatttttctcttacggtaactatcgggatgacgatatg

SEQ ID NO: 114718 - DNA, 588 bp, Heterodera glycines
atcacaacagtactgatcagaagcatacatgcacaaggggtgtctcagcccaagggccatacgacagacgattgggacagggggggaggtgtctcgggaccgattttccatacgaaggtccaaatttttctccggcgtcgacaccttttttttttttgctattcaaagtaccttttttgcgacgcgttttttccaaaaaaaaacttttaggaagggggtggggcgggcgggccgatagccgccgggaaaatttttgaattttgacaccccttgtacatgtatgcagctcatccctccccccgaatcagttctacctcccaaattttttaaaaaactaaaaaaaaatgatgaaaatcacaagaaaaaaagtgaaaaaaatttcaacaattttttgaaaaaaaactttttgttagcaattcatcacaaattttgcaaaaaaaaattgctatagaaaaaatttttcgaatttttttcttgtaaattttctcataaaaaaatttctggggggggggaaggcgtagtgcaccttcctcgaaaacaagttacaaagaaatgaattggtttcgtattctaaaccggaaaatcatg

SEQ ID NO: 114719 - DNA, 52 bp, Heterodera glycines
tttgaccgaacgcaaagatttgcgcccgcgctgattttaaaccgaatgaatg

SEQ ID NO: 114720 - DNA, 103 bp, Heterodera glycines
ttcgtcgattcacatcacatttattcagcgcttattctcctctaaatttcatttctaattttctgggtctttccaattccatcacttttttggcttcagcatg

SEQ ID NO: 114721 - DNA, 68 bp, Heterodera glycines
  unsure (1)..(68): unsure at all n locations
gtcgtctttagcnaactcatttaaatgtctgtcatttcccttntagttcggactttgcctttgaaatg

SEQ ID NO: 114722 - DNA, 134 bp, Heterodera glycines
atcggtttgtctaggaaatttcgattctcgagagccctcgtttgggtgttcctgggcttctgttcgattccggcattttattcatattttaccggcattcagttgccgacattctgccatttttcaccgaaatg

SEQ ID NO: 114723 - DNA, 473 bp, Heterodera glycines
ttattagcacaaatttaattcgcctccctgaaatatgaattcgaagtgcttatttttgtgggttcattttcaatttcaaaaaaaccagcaaaatagggatccagcagggataaatcccgcaatctgcggactggaatcccgcaaaatcccttgcgggatccaatcccgcaccgggtcaatttcaactagaaataatctatgcacataaaaagtttgttttttttattagcgttagtgtcttacttcattcaattctactacaagtcaacaaaatgacaaaaaactaaattaaaaatttttttttaaatatcgaaggtcggttcttgcgatgcaccccaaaaggtcgcttgtcgaagagtcgccgggattttttggaccataactttttatgatagttttttgataattaaactatttccaaataacccataatatatgaaaaacaaattacagatattcgaaaaactgctatg

SEQ ID NO: 114724 - DNA, 1003 bp, Heterodera glycines
ctgcaaagaatgcgaaaatcggtgggaaaaatgaaacaaagtgacggacggcggaggggcggcgatggcaccgccgaagaagcgaaggaatgcggctcttttcctttgtgcatcgatcgccaactttcgcttagctttgcttctgcccaaatgacactgaaaatggacgcagtcgcagtgccaccgcccattcgtttaaaatgcctgctaattaacacaaaacgggggtgggagagggggaacaattaaagtaattaggactaatgagtgtcttggatggacgaggaaaagcatcgatctgttgggatggatttgaacagatcaggtgggcctttgaggcgatcaatcactttcagtccttcccccccccctcccctcccatcaatcattcaatggaagaaaagtgttcgaatttcaataatttgatcaaaatattttgacttttctcaacattcccccccccccttttccccctttccccccttttccctttgattcttttgttttctccccctcccgcgcccctccggtcgcatttgaattgtgatttatggtataaattggtgtttttgtggtgtttgcctccttaattttgtcattcattggaaggtttttcggttggtcatgcgactgatcagccgaagcaaagcaaattcagcccaatttctcttaatttgattccgttgcgcattttgcaaaaccgtcgttctctcccattttagacgaaattttgtcaattttttattttgaattttagagtgacaaatttagaaaattgggagggacagaacggaagaaagggaagggaagggaaggaacgggacggactataaaaagagagaaacgcacaaattaggcaattgctcacattatgcgatgtgctctgtgtgtgctcacttttcacttttgcttgtgttttgtgtccccgcggagaatataaaaggccctttaaatgcattcgttaagaaaccaaacaaaaatcactttcacttttcgaaaaatg

SEQ ID NO: 114725 - DNA, 308 bp, Heterodera glycines
actatgagcttaaatacatttttattgtaaaacggcactccctaaagatggcaaattgatgttggcatttgccgacaaacattgaaaaaaaacacctgcaaattacaacaatttccttcctttcaaaattaaatgtgcttttttacaaaaaatttttgtcggcaaatgccaacgtcaatttttctttcactttggcttccattttacaataaaaatgtatttaaggctccaaaaaaatatccaattccaacatccaaaccaaccaataccattaatttcataaatccgaagaaatccctccaaaaatg

SEQ ID NO: 114726 - DNA, 137 bp, Heterodera glycines
tctgaactattaacatatatttttaaacaaatggaaaatttgagtctgccgatgccgataggctgataatattaaacattttacagatcaaatacaaattttcatctgctttcaatactttctctcataataatatg

SEQ ID NO: 114727 - DNA, 213 bp, Heterodera glycines
gaaataccaaataaatgccgaggagggacaagtgatcgccgcatatattgtgggcaattaaataattattaatttatttaaaaaatgattttacataatttatcagtcggttaattaattgataactaactaattgattggttaattaagaacaaagctcgcgcgcgaattgccttaggcgaagcgccagaccttccgattgcctccggcatg

SEQ ID NO: 114728 - DNA, 388 bp, Heterodera glycines
ggtaactgaaaaatgaattgaaaatgaccagttcaaattggcaaaaccatgcgtttcggtctcaaaaaaaatttttttgtaaattttctgactcaaaactttgtttaaaaatacatggaaacaaagcgaaagtcatcactgtttcaataaaatataatttcaactatttttggattaaaaatggaaatttgttagagcttttgttcgaattcggattagaattggtcgagagggatgccgaattctcgaaacgtgtttttagaaattacaaaaaaaaaaaaaaaaaatttctgggaccagtaaaacacattgttgccgtttaattgcagcctcaagacttaaaaaagtgaaacaaaaataaataaacttataatttaagcttgccatg

SEQ ID NO: 114729 - DNA, 260 bp, Heterodera glycines
ggtgaccaagttttgtagaaattaattaagattttttaatcaggaccacccaaattacaacacacctttattcttatgttttaaatcagtgtacaatacactcgtttcgggaaacagttgtaggtatgcgcaatggggctgctatttgtcgagagcagagcgaaagccgaattcatgttctaaaattattaatttgttgtgtctaatgatttaaattaggcagaacaacattttgctttcagaaattgtctctatgaatg

SEQ ID NO: 114730 - DNA, 585 bp, Heterodera glycines
aatgataaatcgtgaaaaggttttagcgggatagtgaataggcttaatgaggcgctctgtgagcatattaaacgtaaagatattgaaaattgacaagtatctgaagctgagaaaggaccacaaaaaagagagagattagccaatgaggatgttcaatttcaatatgacagcattgatcaaaaatttattgtctatctttccgctgctgtctcccatatagatttgtcaaaacacctcgcatatgttctggggtttaagaatacaaggctatttcacgcggaagaggcgacttatatgccggatttgacgggaggtgtaaggcagctatacatttatgcaccaaatttaatcgaaacacaattatcggcaaccagatggccccactcttaagaatagttaacgtcgtcgatgacccaggatcgattagtgaagttatatatagcacctagtttttcatcgtctacagtcgaaacgaatttcagaaattacaattgaaattcacacaccgtttggtgaattcgttaaatttcactggggaagttgtattcttacattacattttaagaaaagtatattttaaaaatg

SEQ ID NO: 114731 - DNA, 222 bp, Heterodera glycines
aaaacgttcaacatcatcaaggttttgaatcgatactgagcggggcacaactgggagcggattgatgcgaaagctgaaggtgttttctggtaaatctgctagttgtgtaaagcagctgcaacaggctctgtcggcatcacttcttttgcagtagtattaaatgtcgtttgtttggtaattgttttgttcgcttcttcaagatgaggtggagatggttgtatg

SEQ ID NO: 114732 - DNA, 57 bp, Heterodera glycines
ggtgggactaatcacaattaaatgatctaaaattcatttgttccgtttttaggaatg

SEQ ID NO: 114733 - DNA, 478 bp, Heterodera glycines
attcccttctcaagcgagtcgaccaggtcccgcttcctctttttaatccaactgaagcattttttgccattttgtccaaaggtgatcaaatggctccgtctcgacgagaacgaacggcccgcgtttttggccatttattttgagcagccggactcggccatgcaccaggcaaaagctattttaaaaaattcaaaaaagcaattaaaattaatgacaggaggggccggattcggacgcggtcaattcggcattggtctttagtgggtcttttgtttcatttctgtccttttcccttaagatttatgtggacgcgatgatcaattatctgatgcaacaattggacaacaatgtcagtcttttgcttttccaatggatttgccattcattcgattggccaattccttttaagggctttttgggctgtatcaatctgatcattgtgtctgaccacggggcgcaaaagctgcgtgatgacatg

SEQ ID NO: 114734 - DNA, 1003 bp, Heterodera glycines
ttcattaattgttgaaaataagttaagaattgagaaaaagagttatcaaattcaaatttattatcaaaacttagcgaaatataatgaaaattcaaaaaaaatattcaacaaaagttcagtttaaaaaatccgtaatccgtatcaaaaaattgtacggatcaggatccggactacggactaggcacacatacggattacggacttacggactaaaaatccggaaaatccgtactccgtaaaaatccgtatcggcctaaaaaaatacggattacggactacggatctgtaaaaatccgtatacggatacggtccgtacccgctctctattaaaaattactcaaaaattttttccaaaagacccacaaaagcaagtatatgaatttttgcccaaattggacaaactgccggactattcttctatattttaaacctttttaaattaacttgaaaaatatgaaattatttgaatttgtgaattcagaaaatcccgatcacgtgcaaccttaatgataaaaacttttttttctatttataataaacttattcatatatataggtgtataaaatctcatttcttgcattttttttaaacagcgacaaagagaggaaaagccttagtcagcaaaagaacagcagacaggtgaacaaacacacctcgaacaaaataagcatatgctttatcgattgtatggttttaaagggatgaatgagaaaaaaattttttggaagtcgcgcacgcttcgtttggtgaggtgggaaaagagagaaaagattgatgaaagagaaggacgagagaaagggagggaaatgcgacggggggggggacgtttcatcgaatgaaatgggctgtggtgcgatcagctcgcagcagaagcacacacaaccaatgatgatgagaatacctagattgtattttaataaaaatgatcctatctaattacttagtaattccataataataaattacctaattagtttagataccgtaacaatctcaaagatg

SEQ ID NO: 114735 - DNA, 83 bp, Heterodera glycines
cgtaagaaattttttattacttttgaaattctcaaatttagcgtttcaaaactgacgcagcctttgcacaattcgccaaaatg

SEQ ID NO: 114736 - DNA, 844 bp, Heterodera glycines
  unsure (1)..(844): unsure at all n locations
ttcccccttctctctcttgctcttcccctctctctctctctccattttgctctttttctctctccctctactttttcatctccatcttcnccacttttcttctccctcctcctctctcccgttctctcttccttattttcatcctcctcctcctcctcctcttatccggttccccattttcgtcgttctgttccgccttcnccttccgccttcggcggttgtcccgtgaccaaaggtcggcctgcgcccgcgccaccccccaaaaaacgcggcgctataaaatgggcgtgcaaatcgcatcaaaaagtgtccgttccgcgccaaaaatcgcttcaccaccattcatccgtcctttcattcattcgtttattcgttcggttgttctcccaccccaatttatttttctgcaaaaaatttctgtgccctaaatttttgtaaaaaattaaataaataaaagggaaatgaacattatgtatttctttttactatgtatttaattaaccatatttatttgtggaataaaataaattttcaactatttttttatgttttacttaagttttatgaataaaattttaaaataatgattccattccttcatcccaaaaattctctttcaactaaaaaaaattacaaaaaatttacgagcttcaaaaaaagatgtgcggcaaaatgttaaaaaattacttttgaataatttaaatgacttaattcgctttgtatgttttcttctttttaaaacatttgtggctttatttaaattgatttaaattgatcaaaggaaccaaaatttatttaaataaataattaaactttaatactttattaaatttaattttcgatg

SEQ ID NO: 114737 - DNA, 306 bp, Heterodera glycines
  unsure (1)..(306): unsure at all n locations
aaaaatgatcaacaaaaatttggtgaacagtagtagtcacaattatgggttttattttgattttgtttnggttgggattataaaattggtaaattccctcggggctttttataccggcaaaattcaccacatttttttggaggcgttgttcattacgtaataaaaaaaaggtgccccaaaaccgcgtccccaattttggtaatcgggcgaattcggcggcgccgtcactgccccccccnccccaacaaaactgcaaaactggtcaagaattgtgctcaatttggtggaaaatttgttgtggcgatg

SEQ ID NO: 114738 - DNA, 396 bp, Heterodera glycines
aaccattggggttactctttcgggtttttaatgaaattgctctcctgggtttgcgctatttcgaccaattctgaacgccttaaccccggcttcgaaacaatggtcgaaaattcaaatttttcggatttttttttgtttcgaattcgaattaaggaattcagaattggtcaaattggatggaagatctatgatcagcgactcctaaaacacctggaaaaaagttttcgtggcagacattttttttgtaaaatttgctccaaaagggtcccttttcctctggtttttttaaaatttttcatttaaatttgcccatttttgaaatttttacttgaaacaatgcatttttattgagtaaaaaattaaaatatttatatttgcatattctattgacagatg

SEQ ID NO: 114739 - DNA, 61 bp, Heterodera glycines
agttagcaaagggaagagggattaatcgcaatcagcttaattaccaccgatcattccaatg

SEQ ID NO: 114740 - DNA, 367 bp, Heterodera glycines
  unsure (1)..(367): unsure at all n locations
atgcatgtgttgtttactcttttgatcactcctcgtacgcagggttagtgcatttttttaaagatgcaaaaatttggggtcgctgactacattaagtntttgctttcggatgataccatggttctttgggtccgagtccggcatttccaagctcgaattcgaaccaaaagtcgtaaaatcaaatatactagttttagatttgtgtctaaaaataattaaatgaccttttaccgaaaaataatgaccttgattcgtttccgatttgcttaaatgcatgacttttaaaaacaaaaaatttcgaaaagtggtggggacaaagtacactattaccacattttaagcggtcgtttgtctacgtgggtcaatg

SEQ ID NO: 114741 - DNA, 1003 bp, Heterodera glycines
cccatgccaaaatggccaaaattttcgtttggcgatgaaaaaaaataaattttcgagatcggacgggcccgacttgcatttgcgcgcccggcaaaataggctttttttatctggcggcccgggcccggttaaaattgtccatcaggaatggacttttatgggcataaatttctccagttaattgtcctatatttgaaaaattttataattttggaaattgcgggattaatcccaccggtatgcgtccagctaaacttttgggtcttcattccacagaagaatccgcaattttaaccgggccctagagaatatggatggctaagtccttcttcagaagattagttgctttttctttgctgtgtccttccacccaaaaagactaattttcttatctttctatgaaattatgcctaaaaaaaattggacaccaagcggaaaattggacactgtcggaattttggacaccaaaggaaaattggacactaaattcctcttttaaaatataaacccaggaatttaaatattcaatatgcacaatgattgatcaaatgtggcaaaaaagtgtacaaaattagacgatgattgatcaatgtaccaaaaaatgcagaaaaaatgggaattccgtaaaaataaaaacttttttcgttatgaatgtatgatggctttctgctgctgatgctacaaataataatacataatttatttcaattaaaatttttgtttatttatttttaactatttattttttatcaaatagtgtccaattttccggtgtctaattttcattggtgtccagtattctagtgtccaattttcggtgtccaattttcggtgtccaatttatcgggagccgtcaaagacccggcttaagaaattccaagggttttccggtctcaatttgggagtgaatattttttaaattaacttctttaatgactatttttattcgtcctttattaattttgaccaattccccgtcatccatttcagtacattcccaatg

SEQ ID NO: 114742 - DNA, 326 bp, Heterodera glycines
aggaattcattttaaacgtatgcgcttttttcacactgttaaaataaaagttcattttaaatttatgtgagaattatatcgaattgttggggcggtgggggggggggttcagtgttgaatgtggtacgggactcagtactgaatgcccaatcagcgatgcactcacacggggctctgttaagagtgcccattcttttcaaaattccgtttgcgcaatttgaaacttaaaatgggccgggtttcacagacggctggctgtatataagcagctgatcaatctgacgtcctccatttcattctcaaaaattttttcccaaataaaaatg

SEQ ID NO: 114743 - DNA, 969 bp, Heterodera glycines
  unsure (1)..(969): unsure at all n locations
tttgggttttagtccatatttggccattttntggaaatttcacaagaaaaatgaaaaaaaaacgaaaaaatacacccctaaagatcaactttttggaaatttttaaaaattacaccncacaaaacacgaaaaatttgagttttcgtcgtcattttggcattttcaataaatattttcgtcatttttttgcgaacatttctttttttttaatgagaattttttcgaaatttggcaaacttggaggtgtttttgatacaacgaacaacaataaaaaatatgcatttttaagttttaaaccccattttttggttgtttattgtactttttaggtttatttaagcaaatattaaatatgcacaccttttttgggatttttgggggtttacaacatatattttggcattttttatccatattttggtccatatttggccatttttggcctttttagtccatatttcgggcttttttagtccatatttaatgtccatatttcgcgttttttagtccatataatttacaacccataattaacagatttgcagaaaaaatggacaaaaatcatactttttgagtcatttaatcggatgaaaagttatttctaaaaatatttggcattctgtcttttgtaattgtcttaaattttttggattcgaatttcgaaaagcactaaatcaatttctcggttgttgtggtctcggcatatatcatcattttgacaaaaattgcctaaggacaaaacgccaaaaaaccccactaatttaaaaattttgccgagattttcccttgtaaaaatggaagagccgatctcgagttaaaaacacaacttccaaaaaataaacagggattcgatagagggggtcaaaatatgggcctatgcaaaatttcaagaaaatttcaactgcagaaaaattttttcaactgggtgaatatttcaataactttccgacacttttacagttaaaaatg

SEQ ID NO: 114744 - DNA, 221 bp, Heterodera glycines
ggaattccccgaaaattggcactcacaatcagctgctggcattgaattttgtttgccaataattctaccaaaattggtactcaaattgctgagacatttaaattttgtttttgccaattccttctccgccattccaatttttttttctccattcgggcaataaatgtgtgtaattatttccgtttgttcacacctccccccccccccccccctcagtgatg

SEQ ID NO: 114745 - DNA, 70 bp, Heterodera glycines
aaaaaaagcgaaagcaaaatttcaaatccaattttttttattttttattctttcagacaaacattgtatg

SEQ ID NO: 114746 - DNA, 327 bp, Heterodera glycines
atttttcctaatttattcaatttggtatttttatttaatattttcaaaataaaaaataaataaataatttttccctctaaagaccatacgtgaagttttaataaaaacaaaaataaaatatttttacttaaaaaatatttaaaaaatactttaatgaatatgaaataataatgattaatttgtgaatttaaataaacataaattaaagtttcttttaaaatttcaaaataatatttaaaaaaaaacaggaattggccttcaccagtgcaactgacaaaagaaaatttactggaaaataattttgatcataaaatttctatggaaatg

SEQ ID NO: 114747 - DNA, 312 bp, Heterodera glycines
tttttttttgctaaattggaaaaaaaatattattacaataaaaaaaatgaacaacaaaatatatataaataaaatggggttggggagatgaccaacgactcgttcggtggtcatcacaatcgatgggccagcattttttttatataatgagcgacgagcattaccccccccccccctccgtctctcttttctctctatcacactatctcatcttcactccactcagcatattctcctcccctccacagctttccatctccccgccaatataactcttacatcattatgcttccaatttagtcctgcccaatg

SEQ ID NO: 114748 - DNA, 352 bp, Heterodera glycines
tagaggatacatagggctatcgaatgacaccacaattttggattttaaatattaattattttttaattttttttataaaaatgcgtcagttacagtctaattcatggttatgaaaacgattacatttcattaaaaatcaaagtgaataattcgaaaatgacgatcagtagtaccacgtgattttctaatgatttgtttatgccattacaaacggaagtccgcaaaaaataatacaaaacaggaaatgaaatatataatgtaacaaataatgatttgccatgcatatataaatgtgatatgcctatcaaaaaatcataaattttctgccaaataaattacatcctccaaaatg

SEQ ID NO: 114749 - DNA, 720 bp, Heterodera glycines
  unsure (1)..(720): unsure at all n locations
aactcaaaaatgttggtataaatggtactttactaaaatgctttcaaaattatctacaaaatcgtacatttttcgttagagttggctctgcgttttctgatgaattcncatgcttaagtggtgttccgcagggatcaaatttgggtccgcttttatttntaatttacatatcagatcttcctnaatttttgtaaaactgaaaatgttgaaattaagctttttgctgacgatcttaaggcctattctattctctcaaaaaatactatttctccactccattcttttataagtattaacaaatttcgggaattactgtgaattaaatggccttaaaatcgctcctaataaatgcatagtttcacatcttgggcctaaaaaccccaatgaattattactttataaataatattccaattttaaaaagtgaaaaaggtgaaccagttagagaccttggcatttatgtttcaaatgacttaaaatgggaaaaacatatagaatttattaccaaaaaagcaataagaacatcttttgctttactcaagtcacttaaaacaaaaaacccaaaaattcttataaatatatttaatgtttattgtcgatccattttggaatttggttctccggtttttaatccatatatgaaaaaagacatcgatgctcttgaaaatgtccaaaaaacatttttacgtattatttttagacgtaataataacaaggatg

SEQ ID NO: 114750 - DNA, 293 bp, Heterodera glycines
  unsure (1)..(293): unsure at all n locations
atggaagggcacaatttgtgatcagtcggccgaaaatgcagaganagcattgtaaaaataaatttanaataaaaaataataattaaataaaacatttttagaaatcaaagctgtccattgcataaaaatccctgcaaaaatggtggccaatgtgtaagtgtgaaggacaatcagcagaatgggggtaattttatttttagtaatttattttaattaatgtttttgcaaatttagcagttcatttcgaatgcatttgcccaaagaatttttcggggacattgtgtgagaatatg

SEQ ID NO: 114751 - DNA, 190 bp, Heterodera glycines
ggtgagtcaaacggtggcgagagggacggggaggggaagggggaggacatgacacggagacacggaaaacgttggcatcatgcccaaaatggcccgccccattggaactcattaatttattctttttgcttgaaaggtctctcgggcggatgagtttcttttgcgttggtcaaaactcagtgaggcgatg

SEQ ID NO: 114752 - DNA, 126 bp, Heterodera glycines
atttttgctcattgtcagtgttggagtgggctgcctttgcgtgactcgtaccaaaatccgaaaaaacgcgagcgcatttcgacgattcttcccgactttctcgatgatcccgaccacgggtcgatg

SEQ ID NO: 114753 - DNA, 296 bp, Heterodera glycines
  unsure (1)..(296): unsure at all n locations
ttattttgctaaagagaagagtaactaaatttttatttttgaaatcattcaattgcactaacaaataaatgttctctattagctgtaacttnttctaaagtcgccaaccttaacataccgtataccatacctttttgcctcacgaccctacggttacggtagggacaaactgtgctttgattgggtgcttctgttccaagttattcggatattatatcaattaaatccatcaatgttttgagtcaaaatttatttaccccccccccctccgtttttgtaggcatttcgtagaaatg

SEQ ID NO: 114754 - DNA, 491 bp, Heterodera glycines
  unsure (1)..(491): unsure at all n locations
aaaatgagccatcatatttgcnggattataaatcattaatttgaaatccctcattaggtgcttggacaaatgctgcttctgggggacccgcaagtgaagcaatatgatgatgttgactntacaaaattcattcaaaatgaggtagatgtaatattatgatccatccctaatgggataattaaaaataaatatctggctgacacggcagcaaaaccagatcttgaactaatgagcagatgatgaaaaataattatgaaattcggacagcagtaaaaatggaaacctaaattaaactcttataaaattagaatgagcaatttgtaattaaagcaaaaaatataattgaatgctctaattcttcaaaatcttttttggtccaattttattagccgccccaaaaacgtttcgattggtgggctctgccgaagggaactgctccgttggattgtgctcgtctgtttgccaaagataaaaaatacattggcaaaatg

SEQ ID NO: 114755 - DNA, 73 bp, Heterodera glycines
atgattatgcggctttgcttacgcagacgaggcagaggcggcacacggcgctggcgacgaggcgggcgcaatg

SEQ ID NO: 114756 - DNA, 1003 bp, Heterodera glycines
cacaataaaaacaaatagaatatataaatatattttttttgcagtttttttacacacctagttattctaatagagtattaggttaagtaattaaaatttgttatgattagaatgttatattcaataggtatatagatgctgaataggagcaatgggtattttcttatttatctatgaaaagttactttttttttatctcgtgcagctgtccgtttttgatttatgatactaatgtcacattaaatattttgtgtcataaagtgattcattaaaatcaaatatttatttaatttcttattttaataaaattcatttatttatttcataaaatttatgcttacggtggttatctttataatcatttattccgtcttgcttagtgtttattactttttaaatagtttataaaaatatttttaacagatttgctatttagtataaaagtctttcaatcttgggtgaagtaaccggtttaagattgtcgttatactataccaatttttatgtattttcaattcttatttgaatgttcaatggtgttctgtttttatattttgttaattgattatcatctcatcacttaaaacatattttcatatgtaaaaaaatcttccatttcagcaataagttcattgtaactcgaaatattaaaaaaaaaatttaattatatattaataattgctctttatgtaataatagttaaaacacttttaataattatcaaatttttatatatccaatttcataaacttttgaaaaacaattttttatgcaatgattattttagttttaattcaattttcaatctaatcagtaaaccagttttaaatcgcccgtttatctgaacagcatgtgcttcaacctttaaatttaatttttaattaaatgttaaaaaatctattataacttttaatcatgcacattggttccacttaattcttcgtgccattaatcttaattttaataatttttatttaatttaaaaaatatatttaccaaaatg

SEQ ID NO: 114757 - DNA, 294 bp, Heterodera glycines
aaatgtcgatcgatgaccgatttgttgatagtgatgtggatatatgatctttttttttgggacatttaaaaaattggtgatgaattttgtcaaataaatggtggtgaatattttgaaagggcagaatttaaaattgatttaaataatagttaaatatggcggtgttctcatgttctgcaattttattgattggctctaaacactcagtgaggtggggatgaggcctataaaaataaactgaaattgacttccgctcattttccgttttcattcttgaaattttccgctaaaatg

SEQ ID NO: 114758 - DNA, 145 bp, Heterodera glycines
ttttacatgggcaaatttcagcacataaattgtgccgacaacaaatttggattccgtgtcatggcccggtctttgtctgatcaatttgtttatgaaaaagctgtccaattgatcaatattgactggacaaattggagacaaaatg

SEQ ID NO: 114759 - DNA, 849 bp, Heterodera glycines
ttttcaagtcaattaggtgagggatttggaaaaatttttggttagtagtagataatattcccaatcaaattatcgattgattttcgcccgataatttgattggagatttttttctctgacatccccttccacaaacccaaacctattggatggggttgagaaagagaaaattctgtatttgctctaattatcccaccaatctccattaatccctcagtctctaattatcccccagtctaggaggcgtttgaaaaataatctctctatcataatcacacagtctccaattatccccagtctatgaggaggttaaaaaataatcccccatgggggataattagatcaaatacggtagttagataaagagagaaaatagtgagggaggagagtgtgcgatagaaaaatagaaaagtgagagagagagagagagaaaaaatgaaaagaattgtgttagagaaatagagaaaaatcggtagccattaaaaataaattaattgtgctattttttgcccggctaaaaaatatcaatactatgattaataaatttgtagaattgtttttatttttaaatgtttataccatattttaaaatatgtttaatttatttatattttcaggtattaaccataatttttggaaaaaaaatttaagcgcataaacaagcgcaactttgccaattcgtttgtggcgcgaggcgccgtgtttgccaacgcgttggtttataaggtttgcaataattatcattaatttatgtcacaataattttcctgaattaattgtcaggaggttttttgcacactaaacaattgttaagcgggggcgaaaccaagcgaagtgaggcagcaaatg

SEQ ID NO: 114760 - DNA, 1003 bp, Heterodera glycines
tttttcacttcgttcgttgttatttcatcgcttctttttctgcaccgcttgcttgtcaaattttcgaattgtggccactggccagaaatggtttcccaacatttgagcaatctaatactattactcaccgccaactatttttctgcgcaattccggcttagaaatgagaaatttatacatttccgaaaatcaattttaattttttaaattttttgggtataggtgagggaagagagttcggcggtgtcgataggcgccgcggggaaattttttgaaaatttaatgcaattttttaacaagttctgtccaaaaaatgaccaaaatttgcgatcttgggctaattttaagaaaaaaaaataggagttttggggggccggcggtgccgataggcgccgctgggggaaaattttaagaattttaatgaattttgttaggaattagccaaatttttcagaaatttcctcttttaaatgaaaataaggcactaccccaaatcagaacatttcttagaaaataagaacaaatacacccctgctctaataggcgccgccggaaaaatttttgtaatttttaatgcgatttcttaacgattttgttcaaaaatgacaaaattacgattttgagccaattttttaaagagaataagaaaccgccgaagaaaaatttgaatatttaactgaatcttgttaagattttgcatattaattcgcttcaaaaaacatttctttcaaaaattatcattaaaaatctaaatttctccctgaatccaaaaaataagacgaaaataaggacaaagagcttaaataaggacaaatcttacaaataaagacatttaaaatttgtaagatttggaccctcaaaataaggacaaatcttacaaataaggacaaagggtaaccctgtactaatgaattacatataatttttattctccggcgtggacattaaaagtaatttaggttcttttttaacagaaataaataaattttcgtcttattcaatg

SEQ ID NO: 114761 - DNA, 323 bp, Heterodera glycines
atatgtaaattaaaattaaataaaaataataaataataccccccctcagaaaaaaccaagacattaggatgaaaaacagaaagtggaaatagttaaaaaatatgaacaaatgaaaaacgaaaatggcaaaatgaaggacagcgaaattgccaaaaaactgaaaatttgccctggaaaattattggagctgagaaaggaatttcagcctaattataaaagtaacggcggaataaattaattgtttttaagtgatgactgatgactcatcctaatttattttccattttctttcccttttttaaaaagcgcgtgctttttcaatg

SEQ ID NO: 114762 - DNA, 353 bp, Heterodera glycines
aaaaagtatcaatgataataatatttaaatttaattattattttaaatattatttgctaaatatgaatcataacttagcttaaacttagtcaaattaatgaaactcttggtatttggcgatagctctatatattctttgaattatatgattaaaaaatctagcaaaatttttacaaaaagttgtaaataaaaaaatttcgttaaaatttaaactcaataattgaaaactcattaaaaaattttattttaacaaaattatagagaaatctttgggctatccaatcatataaagaaaattataataggttgtttattaaaaagttactaaggaattcacgctcattattcacatg

SEQ ID NO: 114763 - DNA, 767 bp, Heterodera glycines
ctatcgttatataatattttcaaaatgttcttagagagcggaaagccaaagactcgagaaaccgagaaaaaaagtcaattctttctcgagactgaagaattgtcacaacaatttcctctgaaaaatttgaacatgttggaattcaaacaggtcaatgatctaaatgagatatgcaaaattcctaaaaataataatttttaattagacatgtaaatgtaagccaaatgctccatttcattttataaaatccctcaatttttaggtgttcaacttcaacccatttcccatttccatgctccgattatcttaaaattaaaacttacgactcaaaaacttctataattttttttttctaaaataacttcaatatttattttgaacattttcacactcaatttttctgatttcgaggcataactttaaatgaaaatattgtaattttttgattatgactaaatgttttccttatttacattgacttaattgatttttagttatccatttaattataacgcaataatattcattagtggaaagccaacaaatgcttcattttgacaaaattattatttatacaaattaaatgcttttgcttatattaattttgtttaattttttttctgaaaatcaaagtcagccccaaaacggagccaaaccgaaggattccatcgatggtggtaagcaaaacggacggaatattttgttaaaattttgtgaattaaaaatttgtaaaagattaccagaaaagggacgacagcggaataatg

SEQ ID NO: 114764 - DNA, 551 bp, Heterodera glycines
tttttatgatttatggcagaaaacaatgaaaaaaaaacttgatttttagaacatttttgatcataatttttcggaacccgtcagttgggcgctcacggttgggcgccagcacgtttttccaatttagcttttttatttgttattcaaatccaacaatcttggtatcattcgaaagctcttaacatgctctattagccttacaaaaagcggatagattttcaagcctggaaaaatttttattaagaaaaaacttcaaaatttcgagtttttcgcaattttcatgtatacgttttttgttatttgtctaatcgtgaagcaatagcttagaaaaagcttctaaatacattatgctttcgagtgatatcaaaaatgttggatttggacgacatagaaaaaagttatagaaacttatagtggaaaaacatgctggcgcacaaacgtgagcgcccaaccgatgagcgcccaactgacgtagaccgtaatttttcgttttttctaagctatttaaaatccatcgaaatctgtctttaataattttgcccaacaaaatg

SEQ ID NO: 114765 - DNA, 506 bp, Heterodera glycines
cccaataaatatgcacaggtagtttgacggaatgagaaaaatggggattccggtttgggtgcactaaatccaccccgtatcgttttttgataatatttgatagagaaattttgcaaaccatttaaaaaaattatggttccagctccatttaattttaaggttggcttttgagacatatgaccgtttcgcagcaaatacctgtgaatttgcgcaattatatctcaaagcggacaacgactggtggttagtgttcaaaaggatcgaacggcgaattttggtgttgtttattttgcaaactgtgactacgtcgatcgttgacattgaattttacgtggaaaatattgtgaattctgctcctttcaagattctctttttcccttaataattcataaaatgacaaattattcaattggatttgcttccgttgtctctgagactttcgtttgttaatatttggtaaaattttagatgattttacaattaattttttaattaatttgacaatg

SEQ ID NO: 114766 - DNA, 290 bp, Heterodera glycines
ttttttggtcaatttgcaaaaatccctccgattcgatcaaagtgtcggcattttcgtcaatgtaaaataaacaatggcaggcaaaattctaaatttgaatgaaaataaagtattaaaaaaaattggctcgattgagaataaaaataaatgaaaaaaggaacattatggaaaaaatcgatgcgataatttccgcttttaaacccaatttggaaatatcaagttaaattgagagaagtttttctctcaaatttccttactatttttctcttctctgcccgccgctaaaaatg

SEQ ID NO: 114767 - DNA, 636 bp, Heterodera glycines
cagctttcttctggctcctcctcgtccgcgtcgggtgcagcagcgggacgcgacgtgcacgtgcggacgccactgaacgacccgcggtcaccgtttaagccattggcttacacatcttttgagccggagaaacaggcaaatggaaaaatttatcaaaaaatgatgtgttttaattaaaactcttcatatttcatttaaatgatgtctttagtggagttcttccatatttaacatttcgagatttcttaaatatctcagtattttggcattatgttcatgtttcgcacccatttctgctggcatttaaaaaaccaaaaccacttttcgattagatttttaactgaatttttatgcattttaagagattttgagaatgaattttatatccatataatccaaacctctgtcatatctgtctaaagctaggcggtccatgataagtgtattttaatttgcattatacaatttaagatttaaaaataaacgtacctaaggcttgaattaaattttcttgtcgcattttttcaattaattcaaataataacaataggtgacaaattttccaagtttcaattttctcaggcacaaattcgtcttgaaattggctcaaacggcccctccggcatccgacgaatg

SEQ ID NO: 114768 - DNA, 473 bp, Heterodera glycines
ttaaatttactcaatttataagaaactaagattttttctataaataaataaatattttttaaaaatttttattttttgtgtaaaattttttttagattttaaagaaaaaataaaatttcatttttatgtacatataagaaaaaattttctagaattttgaaaaatgacgtaaaaacatacaaaaaaaaaaaaaaaaatttgcataacattgttgtgtatgtgaataaatattttcgttattttttttttttgtttgatcggacgattttatggaagggttactgataagataaaaataaaagtgacagatgcatggaatgaaaagaaatacataaaaagcttaaaagataaaaataattaatttttttgctgggataaaattcggattttttgtgggatccaaaaaattgggcgcgaggaataaaaacagaaatttatctgcccaattaatcaaagcaaattaatgagaaatg

SEQ ID NO: 114769 - DNA, 100 bp, Heterodera glycines
tttagcagatggagtgagtgtgtcatttatgtcgacaatccaacaactaacagcatcatataatttatctgaaatcgctacgattgtgccaaaaaaaatg

SEQ ID NO: 114770 - DNA, 442 bp, Heterodera glycines
gcggggccaactcgccgcggcgctatctcgccgccgtccaactcgccgcggccaactcgccgcgccttgtttttgactatctcgccgccagattttttcgttaaaaaatacatttaaaacattaaaactatgtctcaatataatacatttcatcaaattttctctccaaactaagatgattcaaattgaaagctaacgcaggaaagaaaaattgcagaacgatggattcctcggcaattgtgaagattattggtcccacaaaaaaacaaaagtcatcacagtgatcaagaggcgtgtggcggaatgcatggaattgccttctcaataccggtactaatttagtatgtaaaaattttgaagtcccttaaattcagggttctgatttttgccaagaattcttacgcaaattgggcgcaagcaatgacagaagtgttcgcagatg

SEQ ID NO: 114771 - DNA, 1003 bp, Heterodera glycines
aggtcccggcaagtcccggttttggcaaaaattcccggtcccgtggcaccagggctggacgtaactgattttcagttacggccatccgtaatccgtcattacggcgattttttcagttacggccatccgtaatccgtcatgacgggggtcaaaaaaggccgtaatttggcgtaatccgtaatacgtaattttcaacaaaaattttttaatttaaaaaatccaatttaaaaattgttaagattaatttatgatcagaatatctgcttgttttttgaggtgaaaatcccaaaatagtttgtttcgcggtgtgctttttccaaaaaactggggaatgtggggggggggggggtcaggcggcgccgaaaggcgccgccggaaaaattttttaaaaattttatgcaatttgctataagattttgtctaaaaatgactaagattttggagctaatatttaaaaataattaggaatttttggggcgggcagtgccgataagcgccgccgaggaaaatttttttcagaattttaacgaattttgttaaaaaatagcaaatttttagcatttcctcttttcccctttgctagcctcccccccccctttatgtatgttaataatactacaaattaccaagaataagtcagattaaatcgaaatatgggtagccttttaataaaaatagaaaaaaaaaattcattttataaaaaataatcttgcaagaaatccgtaatccgtaactccaaaaaggccgtaatttccgtaatccgtaatacgtaatccgtaattacacgtccagccctgacccggacctacctttaaaaaaaccggtccgggtatcgggtaccaggtcttgaaaaaacagggtatccgggtctggccctaccaaaaaaattttttttttttgtgggtttttatttttgcatacactgtaactcattattaagcaatgaaattatattcagaaattcatcaacgacacatcgccggccaattattttgtcgttatg

SEQ ID NO: 114772 - DNA, 384 bp, Heterodera glycines
aggtcctgaaaaaatatagaagaaggtatataaacagataggcatctataaatatttatacggagaagtcacattttagttttacgatcttgaaatttattttgatcctatatttgttagggggtcaatacgaggcgagcgtctggggttcaaatccgcttggctgtggattgtttaccgtaatttgaaaacatctgctaacctacagactccaagctcagaaaaaaaacatggaaagatccgggaagagattttataagcgtgattttagaaattcaggatggtgtgcagctgcaccactatatctctttttaattacccgtatctaattcattttttatagcaaacaagttacaaagctgtcagacaacaacgtcgatcatg

SEQ ID NO: 114773 - DNA, 325 bp, Heterodera glycines
gaattcatcccaatatttttttattcactttttgaaatacctattttttcctgcaaattttattatcttagttatttaattatgctattctgataaatagttagtgaattatgtgttgtgcagccttaaaaatgtaattttctgactttttcactaattttcggcttggcgacattttgactcattttagcttgggcgacatttcgacgcggcgacattatgacgcggcgacatttcgacgcggcgacattatgacgcaacgacaccagaaaatttgttttctaaattaaattaaaaaattcgactgataaacacaaatacaatg

SEQ ID NO: 114774 - DNA, 202 bp, Heterodera glycines
attttgcaaaatctttgattttgtctttgatttttcatcaactacctgattttaaaaataaaaacttgacttcaagacattcaatagctcattcgaaagctcattttttaataacattttccttcacttttagactttctcaatgtgaaattgaatattggaaaaggaataaatctgttaacttttatttggagttagaatg

SEQ ID NO: 114775 - DNA, 55 bp, Heterodera glycines
atcccacacatcgagctcgaggcggcgctgcgatccgcctacagagttacccatg

SEQ ID NO: 114776 - DNA, 254 bp, Heterodera glycines
tcagtctcttcctctctctttttccttttgtttccgacgtgcaattggtccttgtttgctttacatttatttatacagcaattcaacgctttttgttgttttattgttttgtaaaaaccaaaattaaatttatgcatcgctttctgaataaaatttattccattaaacgagccctaaatgagtcaattttttccaccaatcattaaaatttatttttaattttttatatattttattaatttgaaaaacagatg

SEQ ID NO: 114777 - DNA, 1003 bp, Heterodera glycines
tccttttccttatttgtccttatttggtgagtctgaatctttgcagtcgaaaattcctttttttccgaatattggacatgcttttgacttttgaaattttgttaatttgtttcccgataccgctcattctcagatttgcaccgcaagactagtaattaaaatccaacccaacctcacaaaaatttataattttttggacaaaatctaacggaccgtacttttttaattttaatgaaaaattagtttaatttattttatttttaataatttaaataattcttaatttttctttaatattttatccaattaatttctaatggaattttttttcttcccccaattttggtggtccatttggccacaaatatgctgtcaatcatcattcgcctatgctaatttttcgttcccatatttatgcggtgacgaggcgtcaattagcatttttcaaataataaatctttgtgatcacacaattttttggccatcgatttcccaggctgtgcttcttccctttcttcgtcattctttaatttttcatttgagtatttttttcttagaattttcctatttttttttcaaaatgcactcggaccaagagtcttgaatgctttaacatttaatgttcattttcgactaggcttgatttaattttttatggctttttatttttcaatttattcggtatcaatcttcccattttcacgcgatgtgtgcttctgttattcaaaaaatgcattttccccctttttttgcgtcccattttctatggccaaatcatcaccagaattttatgggcatatgtgatcaatcaagcaaataacttctttgcaaagaagtttttattttcataatcaaaaatttttggctgctctaattttttcaaaatccacaaaaaatgaaaattcaatgatcattattaggactgggaatatattaatataaaataaaatcgcaaaatatggatcaaaatcgcaaaatatgtacataaaattgcaaaaatatg

SEQ ID NO: 114778 - DNA, 638 bp, Heterodera glycines
gcattttttaaacaaataacgtcctaactttgctcaaattagtaaagtttaaacttcttgatttcgatagctattagcttcaaaatttcatcaagtttaaaaaatgttatactgatttttggaatttgttgattattgttttctgaagctggacagaatgtttaacatttcgcaggctaatagatacttataacgacagaatgaaaaagttaaattttgttgatttgagcagttaagttttgttgatttgagcaaagttcttagaatgatttgtttaaaaaaaaattacaaaattggcgattttacgaaacaacccatcactcaatatatggtattatttatatggtagcccaatattttggtaattttccaggaaaccctaaacgtttaaagttaacctagaatgcctaaacaaaaagccattgttttttaatggactccacctcaatcgatggcttgtccaaaactcggtccatcccactttctcatggtgcacaattagacgttcatgctcaaattcgtcaaagagttcggctaaatataaaagaatattaatataaattagtgtaagagtaagctctaattgccataattagattttcaaataaaaaactaccaaggtttgcgctggagccatg

SEQ ID NO: 114779 - DNA, 353 bp, Heterodera glycines
ggtgggtatcggtagggttttccaagcccactgaaactaaagggatgacatttttacccctccaaaaatggtttgaaaatttagtccatttcaaatttggcccaattcttagcaaattctacaaaattttcataaatttttccgagcctgtcgtttgtatcggctccggaaatattcaacttttgcaactttttaaattttttggaatatctgttgaaaatcgcatcgcaattcactggctcggtatttttccctaaagttttttgaaaaaagtttacattagcaattttttcggaaaccagcggggcaattccccccccccccccccgaaatgaaaaaaatttcagaaaatg

SEQ ID NO: 114780 - DNA, 622 bp, Heterodera glycines
tttaattaattaatggacacaaatttaatagttttgaggttttctcatcccctgccgcttcctgaagacatcttcaccactttgaatggaggccgaattttttcgcaaatcgactttcgggatgcttatctacaagtcgagctggacgaaaattataaagagttgtgcacaattgccactcatcgaggaaattttcagtaccaacgtttgccatttggggtgaagtctgcccccggcattttccagtcaattatggattcgatgttggctggttgtgcattcgcagttgcatatctggatgatgtgatcgtggtaagccgatcaccagaagaacataagaagcaccttcaagaggtctgcaagcgaattgccaagtttgggttccgaattaagccagagaagtgctccttcttcaaaagggaaattaagtaccttggcttcatcattaataagaatggaagaaggccggacccagccaaaatacaggcgatcgctgagatgcctgtgccaaccaatttgtccacacttcgttcgtttttggggatgataaaccattatcagcagttcgtgaagaacatgcgtttcatctgccaacctttggacaatctgcttaagcaagatg

SEQ ID NO: 114781 - DNA, 51 bp, Heterodera glycines
atttttcagttgcgcgagttgaacaaatgccaaatcgatcgtgccaaaatg

SEQ ID NO: 114782 - DNA, 414 bp, Heterodera glycines
attataatctatataatcatttacgaaattttgttctaaatttcgatcatcctatgtatccatgtcctatgtttgccaagttctgttgctttaccgtatccctacctaatgaataatttaattgaaaaattttgtattattaacattgtgcaattttccaatttcattcatcgaaaatggttttgaattagctaatcaatgatgattagcatcgccaaatgctgctcttcctttttgcataatcatttcacaaaaattttttagatattaccatccaaaaaaaaaaccctgtccttcccagtccacccattaaaagtatttttttttaattatttaattaaatttaaaaaaattaaatgtaataaaattcacttgcacacatattcagcagaactccccaagacagtagtaatg

SEQ ID NO: 114783 - DNA, 274 bp, Heterodera glycines
atctaattttttcacaaaattcttagaaattgttgtgtcataatattacctaaaagttttaaaataatattttaggaattaaaaaattttttgataattcttttttgaaaaaaataaaagtcacaaaatgaccaacttttacgttaaactttgaaaatttaattggaattttggagatctgtggaaatttttgggatttttacggattttttaagaaaaattagcaaatgataatattttttaatttaaaattcaagatattaattaaaaaatg

SEQ ID NO: 114784 - DNA, 127 bp, Heterodera glycines
ttctggcactatataaagttaatttttgcattttcttccatttgtttttaaccaatatcctatgtatgcatgtaacaaaattcattttatgttccagtgacaattgtacatacaatacatcattatg

SEQ ID NO: 114785 - DNA, 68 bp, Heterodera glycines
ggtcaaccaattagggggcaattaatgtgaattcaaaaagtaattaaatttacaaattgcagggaatg

SEQ ID NO: 114786 - DNA, 441 bp, Heterodera glycines
gtaaaacgaaaaactctgaaatccttaaaaaaattcacgacaaaaaagatgctttcagaatgatgaaaattttctcacttttttttggtaattttttttttttttgtttaaaaagtcattttttagtgaatgtttgcctagtcaggaaacgggagagagaaatgcggtcgggttgggtttggcggtcacttagtcaatggtcgatggacggagttatttggagacggaaggacggattggggagggatggaacatgaggaagaaatggggaataagacaagatgaatttttgcactgcaaattttcccatttttattcaataggtatttttgaatttttcaatgttttcataaatatttacgggccaggacgttttcgcgtgagggccgttttcgcgtggttgcatataaaagagaattcataactcacatttatttcatg

SEQ ID NO: 114787 - DNA, 438 bp, Heterodera glycines
ccacaattacaacttgattaactaccgatatcattaaaaacatatatattaaaataactggtgcgtgaactgtcggatctgcgaatgtgataaagcgcttcgcgcttcttgagcttcgctacctaggctgtgaagcaattcaaattgatcgaattggttggagagatttttttgaatttttaaaaaaattattaggagtttttagtccacatcgaggctcaagacgggcgcttcgcgcccgttttttaaatttgttaaactcatacgggtgcttcgcgcccgttttttttagcttgttaggccacttcgcggcctcagtcgggcgctttttagaaatattttcctaaaagcatgtcatgccggaaacttcttttctaattttatacattacatttttattgccttctttattcaatactaatcttttaattaagaatg

SEQ ID NO: 114788 - DNA, 259 bp, Heterodera glycines
agcgctattaatggcagagggggggtgattaacggacaaatggacgacagaggagagagaggagatgattgatcaaggacaaatggacgatagaggggagagagagaggggatgattgattaatgataaatagatgacaaaacagagaggggatagaggggatgattaacggacaaatggacgacagaggagagagagagggacagatgatggcaaaaatgaaatagaaagggagggggaggatgacaaacaaacaatg

SEQ ID NO: 114789 - DNA, 631 bp, Heterodera glycines
atgtgatgtgatgccctctgagtgatgatattattacacttatgtatgtattgtatgtgattaacagtctctctctgttcatttgccctgcttttgttcactgtacatatgtgtatatattgtcattcaccaattactgtatgtatattgtatatatgtgatgtatcgagcaataaattttcaatgccatgttccatcataatttctgctgaattcgaacgtttaagataagcagggcttcaatctgtgtttattttctgatttggaggatccaaatctgtcaaaatactaatgtacttatttcttctccaaaattgataaaactgataatgggaagcaaaaagcataatatttgacttttgttcgaattccggtccggggtccgaaattggtcgaaatggatgccagattcgtgatcagcggctccgaaaacctatggaaacatgttttcatgatttttgaaaacaaaattattttttcgaaaaaatggctgggaaatttgtctataaaaggacgagaatttggcatttccaatcatttcaatcgttccctttattctcatttgctattcttccctccacttcttcgactacaacaacccatttcaagtgcacaacagcgtggacgcatg

SEQ ID NO: 114790 - DNA, 1003 bp, Heterodera glycines
tccgtcacgtaatcagtcaacaacagtcggagattcatttgaccgaggaaatttcggcgaaagggggaatttgggtaactgactcattcattgaccattcatttctgcggtttcggatttgggttgggttggctattgtctgtaacggaagcgatagaaacacatttccagaaattgtcgaattgggggggggcgattgcatgataataatatatatatatatatatatatatatatatatatatatatatatattaataaagctggtattaaaaaccaaaggcaccgggagacccgtttaggttcataaatttttataaaatatgccttatcgtaaaaaattatttatatttgttttcggagttctgtttacgacgaatctgctatcctttcaacaaattgctgaattccttaactctaattcgaaataagctaaatgattcgaaattggttgctgtcggtttcgtgaccggcgacctcaaaattaccgctggaagcatatatattttcacgacattttatgtcaaaaaaatgtaaaccaaaaagaccttccctttggtttatgataaaattcaatgtgttcttctttaagtagcaccgaagctgtttaaatgacataataggttatcctttttgagcttttaatgtggctaagatttttgaaaatagagaaaacgcgtttttattggcatttttcaaatatttggcataatgcttttcaaagtctgatttttttcattcataaaaatttttttgtggaccaaatacatatttgcgaaaagcattacaacccgagatcgtgtcgttgaattaaactttaattaaactcaagaaaaaaacatttaatattttagtttcaaaaatgcttaaactcatttttttcaaaaaaaaatttcctattttctgtttatttcaagatttcaaccatatgttttgcttttgttatttgtaaaaatgtgacaaacttttgtactgctgaaattcataattcccttttcagatg

SEQ ID NO: 114791 - DNA, 729 bp, Heterodera glycines
ttggcaatcagcaatgtcacaacagttttgctgccaaatggcgtgcaaaagcattggtgaggggggggggggggtgaaaagccgcttcttcggcagtcgtggccatttgacactcttcgccctccttcagccgttgctgataatatttgtctattttcatttcataatgtgttgtaatgtgaaaaggcagcagctgaagctgcgctcaccttttgacctcatctccttcccttttctcctccccccccacgcgtccacttggcatactttccatcattttcaacgacacttccccgccccttccttcccacttcaccaacaggtgcctccctcttaaattgaatgcacatattgccacacgaagcggtgcttttatggattagaaaagggagagagaatgggcaggggagggaggtaccatttaaagtaatgggccaccattcattccattctcttgaactctttttaattttgtgcgcgaagcgttgtgattattttcagcgtttctcgtgcgattttcttattcttgttttttccatctaaacacaggccccttcaaatttgtttctaaacacatattggtatacatatgcgacacttaatctacacaattttccatatgttcctgtttttttttcaaattttgcaatataaaaaaatgtcctccattaaatggtttccatcattttactcataatcaattaaaatttctccctttaaacagcaatg

SEQ ID NO: 114792 - DNA, 659 bp, Heterodera glycines
taccagattgctaaatttaatttttgggccattttttaagaaatcggacgtattaccaattttataaaagtcataattctgtaatcagaaatttttataaaaaatgccagtaaaaatacattataataagcacatgaaacaacaaaattcttcaattcaatttacaaaattaaattaaattttatggttttaaatgactatttataaattttgaatcttttcaacgcatgcagtcataataaataatagaaaactagaaatacttaaagcaaaattatgttcataatttgtggatttgtgttaattttgtaaaaaatttttattttaaaattttatattatttttaatcttttgtatttttatacaaattcttttttgctcatgctcacccaatgcaattgaaaacattcaattcaatgctgacattgttcaatttgttaatgacaatttttgcaactttccctttccaattttttggaaaattccaaaatttttttctcaaaaattgccaatattatacaaaaaagtaaataatgaatgattggcaggcatgcaaaaaggaaccaggaaaataatacgtgaccgtacatgtgtccgtaaaatttattaatgggtaataaaatgctgatgattgaacggcacattttctgcgcagaatg

SEQ ID NO: 114793 - DNA, 265 bp, Heterodera glycines
  unsure (1)..(265): unsure at all n locations
ttttttttaccaaaatgtcataaaaatccaataaaaaatanatatgtaaattaatttattatattttataaaaaattttacagagtgtacgccgaaatttgtcgcagatcgatcggcacatattttaaccaaattttccacncaaatcgatatgacaaacatntaattccggaaccaaatggagtcactgtggcaattgaattagctcttcaagtaataataataaaaaacaaaaatttatttaatttttagactttttacgatg

SEQ ID NO: 114794 - DNA, 165 bp, Heterodera glycines
gaattattttttaaataaaaaattctctcgaaaattctagtaaaagtgccagaagataattgtgccactttttcacaaagtgccaaaagataattgtgccactttttccatggtgttctactcacattgtgccaccgccgaagagggcaatttggcgggatcatg

SEQ ID NO: 114795 - DNA, 105 bp, Heterodera glycines
tcgaacaaaaaagcagtggtcaacaaaaggcagtggaaccgcaaatgaaaaggcagcaccagaacaacttaacagcgcaaagcccacggcaaacaactcacaatg

SEQ ID NO: 114796 - DNA, 173 bp, Heterodera glycines
ggtgagaaaaaagcaaatgggaaaagggacgaaaaggtcggacaaatgagtgatttttggccattcctttcaattggcacacatttcttatcaaaaaacccaaagtccaaatgtattcaaatttagcagccaaattgttggtggaacatcattctttcaacgggacaaaaatg

SEQ ID NO: 114797 - DNA, 208 bp, Heterodera glycines
  unsure (1)..(208): unsure at all n locations
ctaaaatttactattgccngaatagataaaattattataattgccttttatatgagttggcattgaccaaaaataanttcaatgggatttggcgtcaaaatntaatcctaaaagttccaaattttgaaatgcctttgaattttaatgccaaacgaaaaaacaatttttagtcaaaacgacaaatttgccctccggtgatgatcaaatg

SEQ ID NO: 114798 - DNA, 166 bp, Heterodera glycines
aacttgcacctattcacatttttgtgacattgtttagacgctgccgagagtttgtgccgggtacgaacagaacaaaccgttaccacagatgcgatccgaccctttatggatgttgggaggtcctttttagatcacttaatttttgctattttaaatttaatttatg

SEQ ID NO: 114799 - DNA, 201 bp, Heterodera glycines
  unsure (1)..(201): unsure at all n locations
ttggcatttaaaacacttttcttgcaactgtcgaattttcaatcgtttcagctttcaaanaattcccnacaaaagtcaatttncaagcagtgagtcaaaaaattcactttaannttgtgaattcgtaattttaacggtgtaccagggccaattcaaaagttaacagaataaagaaaaataaaatttcagtgcttccggatg

SEQ ID NO: 114800 - DNA, 92 bp, Heterodera glycines
tcgcatatcgccgacttctttcaacgaccaagcggctgcaatgctcccccgagcttctcgatcgctattccgccgaattgacacggcagatg

SEQ ID NO: 114801 - DNA, 1003 bp, Heterodera glycines
atttatacgatattttaattactaaaatggttttaactggataatcaaacttaaaaagcagaaacagaaattaaacacaacttccaaagcttcgttatttgtatttcttgcatattaaatgataaaattaattaattaattttttttttttttggagcgagtattaatgacaaactgacacataaatccggtttgaccaactctcttgtgttcatccgctgctaattgctcatttttttcccgacaatgaagatgcgcaatgggttttttttgcagaatcccacccaaatcttcgcagatttttgctgcaacttttttttggcgaattgccgaaggcaatttgttccgctaattgcttttatccttcggaaatgcgtgcaaaaagcaaattagccaagatgagcagaaagtaaataaaggagatttgcgaattaatcactggatgattcctgcattcgtctcactgcccaattcgatgacagatgcgtcggcacttttgatggatggactggacgacttattcgtcttcgggtaatcgcctttttgcggaacagcgccgcgtcattattttactaatgagcagcgtaattgctattgtcatatcatattgttgggtttttgtctcgtaaaaggagcacgatcagcagaccgaaacaggaaatggtcggagggatctatagctcaaaattcgggggatttgatggatgacgtttgagcggatgaaacatgccttaatgttagtgaaacttcaatttgatgagaatcaattaaaaatgatgaaagtaataaagattggggcgtgaatcgtcggcccctaaaaaatgactgtccattgaatttgattgattatttgggttgaatgagcgctaaaaaacaaaaaattaaaaatgaagaagcaatgctcaacttcaaaactgcttataaagcacggctagagcaagcacaaattatcaaacttcgcttttccatcaaattcaaaagtcgccttcgtttgtccgccatg

SEQ ID NO: 114802 - DNA, 304 bp, Heterodera glycines
caagttgtgtatttgatgagtgccattgaaggcgcccccaaatcttgcaggtgttttaatttaaataccgagagggcggaggggggggggggttaagtatattcataatcttttttttctatccaataaacttggcatcattcaaaagctcttgacatgctcaatcggctcaagaagcacaaagatatgccgacaaataaaaaaagttataaaaaaaatttgctcaaattcttacctttttgcggttttcgtgttgcagctttttataaaaaaatttaatcgcttaaattaatttctagacatg

SEQ ID NO: 114803 - DNA, 346 bp, Heterodera glycines
atttgcgcaaccatcggacaaagcaggagaagaatttggacgaaattgacaaactgaaggtgtgttgcgttgttttgtggacatttttaggggagttaaaaaaatctttttgtaaattgtaatttaaattataatttagaggagagaaatgcgttgccaatatttttttataaccatttaattttttagaatccttaatattggcacagggaagggcggcttgtatgttcagattagcaacaatttaaaaaaaatgattttatttttcccactctttgggcggggggggggggggggggtcgaacgcagaaaaattgcaaatttaacagtttgattcgctgtcatg

SEQ ID NO: 114804 - DNA, 410 bp, Heterodera glycines
aatcattagtttcatactgtataaacaaagatatcaaattattttaatttctaatatgtgggttatgtttggaattgaaaaaatttgaggaatttttagtaattttttggtgcttgaaaatgcgtaaattaattaaataatgaatttcatatttattaaatggtatattctctatatttaaaaaatacaaaaataatttttgcaaaaggttgccctcccgtggtgtatttgctgctgaacaaacgaattcggaacgattgtgccaactttggccgtgccattttccgttttttgcgcaattgcaacaacaattcggtgtcaaatgggccaattgccatggcatggacggcaccaaattatgccgtgaacaatgtcaacaggaataataataataatatgccacaacgatg

SEQ ID NO: 114805 - DNA, 93 bp, Heterodera glycines
gctcgtctactccatgctgaatttgataccatcaagcgggggcgaaggcagactccctgctgtgcaaatggcgccattcacacagagcaaatg

SEQ ID NO: 114806 - DNA, 1003 bp, Heterodera glycines
aaatttggtgtatcgaaaaaagtgcaaaatctgcaaagtttatttttactaaattaactcataacttcgcaactaaattgcacaatcttggtatcatacgatagcccttgaattgcgttattagcttgtcaaatttcaaaaaattttatttaagttttccaaaagttatgaccattttttcctgttttttggcttggacttttgaaaaaacttaatgagttttttgaaatttagtaagctaataacgcaattcacgcgcaatcgtatgataccaaaattgtgcaatttagttgccgctaagaaaagttatgagttgatttagccaaaagtttagcacttttcgtcgatcgaccaaccacgtaaatcaacatctaatttatttttaagacagaggcgaataatatcaaaataaatataggggagggaccacaactgatgagtaaaaaatagctttttaggaaacctctcagtatgaaaattttgaattattcgaaattaatcgaaaaatcaaataaagcattgatcagattttttgtgtcgtgatttcggctttattaaatcttcaaacagtcggtcaaaagcccttttagttgttgcgcgatgagcacatgcgcgcgctgcaacggatggacttgggcaaatcagggggaggccgcttttcggactgtgaacagtggaaagtgatgtgaaatgatgccataatccgttatgaggataatgaaaacaaataaattagcacttataccgtttaacttgcacgatttttgaaaattttggtatttcaaagtcatgaaaccattctctttacaaaatatgactaaatgacaaagtccgggcgctcggcctatctgaatgagtccattgttttatcagtgatcaaatggcatgccgctaatggaaatttgaattaaatattaatttaggcaaaaaatcatatattaatggattttacaaaaaaaaaatatttatttatgtagatttttagtgaaaatgccaaaatatg

SEQ ID NO: 114807 - DNA, 702 bp, Heterodera glycines
ttgatacaaataagttaaaagaaagttctgtagcattaagtattgtaatataaaagtaaaattctataataacattgttctaaattccgaaccccggacccgaaatcgaaaaaaagtcgaaagtctaaatatccgaaattgaatttttggtccaaaatcgatttaaacacatggaacacatggaagtaaactgaaaggccatcaatcaatccttcaatatgaaaacatttacgcattttttaaaccaaaaactcaaaatttaataatttggattatcgacttttttgttcgaattcgggtccgtggttcggaattggcagaaatggataccggatttgtggtcagtgacctccaaagcccaaggatttgtttttttatcacactaaaatttcattgacgcattttcctggaaccgtctgtacaatgtgatatgaaagacagagcccattgggcctggcgcagagtgggccaactgcttatatgttagacaaatttaacaaaatgtataataacaattttttatgttggccaaatccaagaataaatggtttcattcatgtaataatatattcctttgtgaaggcctattcataaaaatatacattaatccatgttattcgaaagggaattttcgtaaaatttaaatgcacataatttgtataaatcgttcttttttattaaaatttgaaggtaagaaaaatg

SEQ ID NO: 114808 - DNA, 80 bp, Heterodera glycines
aaaaaatttgcagtcaaaaaattattcgaatttctccattttgtttccataatttccgaaagttattcggtatcataatg

SEQ ID NO: 114809 - DNA, 80 bp, Heterodera glycines
cgcactttttattatttaaatcgaaatttagaatactcatttttggacgtgagtcgaatggtcggtgggcgaatgaaatg

SEQ ID NO: 114810 - DNA, 812 bp, Heterodera glycines
atacggtgcgcgaccaacactacaggcagtctaagaaaatgatggatggatgcctgttttttttttgaccaattgacgatgagtgagtgatgttatgagattttggctaaatgattttgtggcgttatcaccatatgttttcttcttttgatttgaaaaatatttgacaggaaaatttatttgttgtctcttgcattttggtccatttcttgtcttacccgaaggcttttaaagtctctggattttataaattgaaaaaatgagagattggaatttaatatttccaatgcacattttggagcaaatttaaaaaacatttctcgattctggattatttattttattggcattatgataatcatggaaaatagaatggaaacaatgttggtcttttatgctttgcttcattcattagttgagcttttccgttccgttgtttcttgtctcattcattaggcccaatttgagtaaaacatatgctggcaccaaacaattctcgggcttgttcaattccacaaggctaaatcactattaaatgtgccgttcacccgttcgcttactcggcacagtctctcagcgggtcaaatgtgcgtccgtgccgtgccaccgctgtcgttgcccaattgttgtcccaccagtgcagacacgctgagaaacagctgtgcaccaccgcctcgcggtccgtcaggcagcaaaaaaagaaaaaacatcgactttttgcaaaaaacttgcaggaaaatctttaaaataaatttttttttttaatttcaagaaaaatataaaaaaatttacagcgattttttgagaaaatg

SEQ ID NO: 114811 - DNA, 894 bp, Heterodera glycines
ggtgatgcttcatctcgcccatcctagtgaatgaagcacgtcccgaataagcatatccgcagagagagcttcctcagatcgacaacgcatccacggcaatttttcagaaaacggaaaaacggcaataaaatttaatgattattgctacgtttcagtatgggctggcaggatgagacggacaatatacctatgctttttggcttgttaattagcctaaatttcaaataattttttgcaaattttaaaattcatatgattggtagtgctgtttcagatcgaaaattcccggagactagagaccgagatttggccccgagactagagaccgagacctcgagtcgagactcgtgaccgagagtcttaaacagcactaatgattgggcgatgccggcgataaatttccgtttttttcgttggtgcctgttctgcctgtaatttatgtaaaacgtatccaggaaacctttcaacttttggaaacaaccacccacccaaccatttttgggcgtattcctttctgatcgagaccggaaaactatttggggaacaaagctgaaaaaatgcataatccgtcatgacggatttgcaaaaaagccgtattttctgtaattgttgacatatgctattgaagtgttagctaagtagtaaaatgtatagataataaaaattttaaatcaaaaaagcccccaaaaacataaatttcttgaaatttctcccattctctccccttttagaaagtcgtcttcgatcacttaattccttagtttgcccccaaatgccatcattttcgacatttcttcggcatttttctgtcccccctcatccttccgttacaaaaatttcgcctaaccaaatttcggagttttaaaattttattgtccagccatttttccgatg

SEQ ID NO: 114812 - DNA, 1003 bp, Heterodera glycines
accctttccctgcttgtgcaaattgggagccgctcccgtggtccccgcaattgacacactctgtattctttcctttattatttttatggctcaaaaaattatataattttgaaggtattccaataaaagaaaagcaggaaaatcaccaaattatgcaaatataatataaacgttcaaaatggaatgatcacatgaaaaatggttttatgtaaaaaaaaatgtcaggagaaaaaccaaatggggaaagaatcggtttatgaatgactattttgaaaagggtaattttatattgtacatttgccctacccatttttcaaaaaaaagaagtaaattttatctagcttaaaataagtccatttccgggtatcgaaattcgtttacgaaaaatgtgccatggcaaaccttcctataaacaaaaaaatgatgataaaatgacaaattgtcttcggaatttttgcccacaaaatattgagttaaagcaaattaaaatttttattataaacatatgaccacccgaaaacggagtgtgtcagacaaaggcaaatgtaattcgggcattaaccggtatttcgcctaatgattggtatcattgtaaagcccattaaaaatgctacaaaacgggtaagattgtaggcctataatagagcttactaaaattttataaaaaattattattggaatcggaaaatattataaacatacagtcatggtcatatgtttaggaacacctcttttttttgaataaattctttgaaaatattgcttctctggattgaaagaaaaataatcaataatctttttaatgcattttgtagcattttttctgggctatccattggtaccacacatttctcgtttgctttattcctttttgtaaaaatttgtgttttcttccatatagtcaaatttcggggtggtcatatgtttaggaacacttcataaaattcatattttctaacaatagaaatgcctaaaaaaattcaggtaagcataactttggatg

SEQ ID NO: 114813 - DNA, 517 bp, Heterodera glycines
aaattggaagtgaaagtgacggagcccggaagtccagcaaaaattttttttcctctgaatgtttctctgttcagcactttctagtcgtgttctgttcttacatttttcatcaaaattccgggctccggtgatgacgaatagtcggggagatgggtgctaatggacggagtgcgaaagtattaaaaatgaatgggaagatgtgataaatattatttctatttatttttatctgctttgtcttcatcaattgactaacttacaattagtctgtttattgtacattatcatggaaaggctgtgttcaatcattaatttctttcttctatttcaattcaatttgtgtccgatttcaaaattccgagaaaactaattccaaatcaattgtttttagactgaggacttccattttctcgtgatcataattatcatgattttggatgtaaacttacatttttctgaaaaatttttatgttggtgttttttcaactgattagttaattttgcagccctaatcatg

SEQ ID NO: 114814 - DNA, 590 bp, Heterodera glycines
ttttatttttcacaagaaattttataaattttcaaaaattttcaaaatatgttataaaaatttgaaattatgtacgaaaaatttgccgaaattttggatttttttttgagaatttccgaaaatttctgtaaaaatccacaaaatatgtaaaaaatgtatgaaaaagtccaaaatatgtaccacatatgtataaaaccccgaaatatgtaaaaatatgcaaataaaagtccaaacttttgagtatttcagggctcagattcgtacttggatgccaagtacataccgtatatactctttttatatgccatggtatattatttttcaacctcctcagaagggggtagataattggagattggtagactaatagagactggaaattatttttcgatgatttatttagtggaaaatttttgaaatttattttgaacatgtcgccaaaaaatgtcatcgcgtcaaaaaaaaaacatttttattgcatttatgttaaagaacttctgaaaatgactccaaaatgacaaaaatctatcattttcttgcttccggtatgcataaaaattggaatttttaatgaaaagttaagcaatatg

SEQ ID NO: 114815 - DNA, 101 bp, Heterodera glycines
ggaattcaaaataaggtaaaggaagaagacaaagcaaagggggttataaaaagtgcagattttaatttagccactaattattattttcagactaattgatg

SEQ ID NO: 114816 - DNA, 428 bp, Heterodera glycines
ttgctctgtaaaaaatgattaatttatataaattaatttatgatttttttgaccgttttgaattcttcacaaatgctttttttcaaacctttttacattaattctgaccgtaagcaattctgagtttgggacctcaaaccgatatttaccaataaaagaatatttcaacaaaacatattgatgaagaaataaaaaatgttgaaatcacaggaaagaaaccgaacataaaaatggcatagacaaatcaatggaaaaatggttggcattggcataatttccggcaaaaaattttggaaaaacatttccaatttcaaagaaaatagacgttttttggaggaatataaaagccaaaagaaagccaagcgaaaatcatattcgaaattattttaattaaattaattaattccctttcccaaacattcaaaatg

SEQ ID NO: 114817 - DNA, 205 bp, Heterodera glycines
agtcagtcacttaggttcaagcgttcttcctcccgtaaaattaatttcgaaattccttttaatgggaaattttttaaaacgaaattccatgcactttacttttgggtctaccgtcaattccgtattcttttcctcaaccttatttttaagccatttcagcaatcattcttgctttgtttagagccgtgatcagttcattgaaatg

SEQ ID NO: 114818 - DNA, 212 bp, Heterodera glycines
ggtatgtcagataaataatatattttttaattccttggtcatactgatgactcgttgagagttttattttttgaaaatatgacgaaaaaattcaaattttttgtgtttttcaaaaacaacctattgttattatttggaaacaaataattgctcttaattaccccacccccgccggtacattaagttcaattaaggtgcactttctcaaaatg

SEQ ID NO: 114819 - DNA, 75 bp, Heterodera glycines
aaacgaagtgcggtgcgccgtggccattttatttttcaaataatttttaaatttaatagatattccagaaaaatg

SEQ ID NO: 114820 - DNA, 1003 bp, Heterodera glycines
atttcaaaaaaattataaatctgcaaatatattattgttttattataatttttttttcattaattaacatattacatcactttccaattgatttaataattatagggtttttatttttattgctatagcattttttcagttttttatggaatttaattttttgtaattattttatttggaatatccttttttttctttgttgatgatttgctttttatgtttcaaagtgaaaaaattatgaaacttgccttcatataatataatattgcttctcaatttcaagcgtaaattttcatttaatttaaatatttttattgaattacatacgttcaattcactaattgcataatttatgctcttattttatgattttcctttattaaaagataaagatttttgtaaattttatatttggaatatcgctttttaacaaaatattttacaaccttaaattatagcgcattaagccgataatgaccagaagtgtctttttacgattagtaaaattttttattaatgcgaaatcttggcttgtatttaaaattgtgctgtgattggcctatcgaacgcttgccctattcgaaattgagcctggcgtggcatttgagggatcccttacctaaatatgcctgccgtatttcttgtttattgggattgcgttatttttcattaaaagatctgttccaatcctgcagtggaattctcaaagcttgattttttataactccgccagataaactaagttttatctttatcttcaagttcaaaaattaggcttctttctaaggtcaggcatctgactccaagaaattagtccttttttgagatatatcccgaccccgatgccatttttgaaggaaaaagttaatttatctttgccataagtttttgaatttgtagttaacgaattgtttcgatggttgaatagtttaatgctgaaaattatttattttttaaatgacattaccatactatttattataattaatttttgttctagatg

SEQ ID NO: 114821 - DNA, 98 bp, Heterodera glycines
ggtacaaaaatgatgaaaaggaggtacaccagtgatttaaaagaggtacaacagagattaaaagaggtacaacagagattagaagatttacaaaaatg

SEQ ID NO: 114822 - DNA, 235 bp, Heterodera glycines
attcttttttctcgttttgccttttccggttttcttttgtatttttatccttttttattattgactggtaaatcaacattaaattacatgttaataattttctttttttgcttgtatatttgcatttattttttattttaattgactgtttttatttaaaggcctttttgtcatttcacaagtttttttgcgcacatataacattggtagctaacactattaacaacggacaatg

SEQ ID NO: 114823 - DNA, 80 bp, Heterodera glycines
ggtaaatccgtaaattttgcttatttctgatttttttttaaatttagcatagaacggtgattggtgtgcctcaattcatg

SEQ ID NO: 114824 - DNA, 157 bp, Heterodera glycines
ttttttaacaaccaaatgcctgtaatgtttgcaccaccaaatgtgcagtacccaaacactgcaataaacccagagcgccaaatcgtgaatcagcaaaaataggcagcaacaaatttttccacaacagacaagtctaagtggacttgaatacgcaatg

SEQ ID NO: 114825 - DNA, 410 bp, Heterodera glycines
  unsure (1)..(410): unsure at all n locations
gcaggaagcagttcaggcaagttgatcaatttnaacattctaagtgagagattttttatttgccggtaaaaatcaaaaattaaaaatttttatggcccaaaaacatggtcagttttaaattgtaaaaatctatttttttaaattaagttggccatcgacttccgcacccattgtcaacgcgattatcccatccaaagctgtcgcgtcgcattctcttgccggttgggaattaatttaaattaataatttaccaattttttgtataaattttcaactactaatgcttcaaataaatttttactttaataatttattttaaatttagttaaaaaatatatgatttgaattgtcattaaaagtaatattttgtagatgttagcaatgttcaggacgcgtacattcgccgtatg

SEQ ID NO: 114826 - DNA, 97 bp, Heterodera glycines
ggtactgtattcaggcaacaaatacacattgaaccgatagtatagataattaaattaccaattggtttcgccagatttggccatccctgacacaatg

SEQ ID NO: 114827 - DNA, 217 bp, Heterodera glycines
agtatgtacttggcattcaagtacgaatccgagccctgaactattataatgcgaaaaatactaatattttaataataaatttaataaatcagatttaagcaattgtttaattcatattcattcattatggattcataatcactgattatttttaatcattttttggcaatttattaattaaagaattggccatccagaaacaaaaagtcacaaaatg

SEQ ID NO: 114828 - DNA, 117 bp, Heterodera glycines
accgggataaaaacattcgaatcaattaaatagcttctgagataataaggtttatcataaaatttcatttaaaaataaaccctcaattattggtatgaacgatactttccaaacatg

SEQ ID NO: 114829 - DNA, 115 bp, Heterodera glycines
  unsure (1)..(115): unsure at all n locations
aaaattatataattaattcacnagagatttagaaaacctcgaaaatcccttatggcctcggaccaatgatttcctagaatttataaaatttaatccataaaaatttttagaaatg

SEQ ID NO: 114830 - DNA, 125 bp, Heterodera glycines
tgaactttcgttgtttctgtggcccatccatctatccatcattgttattctgtttttcccacaattgccaaattattggccaattattaattaattaattaatttatttagcctttccaagaatg

SEQ ID NO: 114831 - DNA, 411 bp, Heterodera glycines
ttgaattacgttgttgttagcggcggcgatgaagaaaatttgggcagaaaatggcgaggaataaaaaggattgaatagcaaatttattgggcaaatgattcgcattcgtgaaaaattgtccttttatacaaaattttctttcccctcccacatttttcgcaaattttttttttgtttatgaaaatcatactaaaacatgttttccgaggttttcaggctcgctaatcaaaaatatgacatgtatttcggccaattctgaaccccgaacccgaattcgaacaaaaagctttttaatccgttatttttcaaaaattgcttttgctaaatcccttttttctccgctataaaagcgccttcgtctcccccatttttgtgcattaacattcattcattcacatttctcccactatg

SEQ ID NO: 114832 - DNA, 711 bp, Heterodera glycines
ttagggccccgacttttagtgacgaaaaatcgcaaaatagttaactaaaatagtgacgacaaagtgccaaaatagtgacaaaatagtgtaaaagtccaaaatagtgacgaatagtgacataattttcagccaaaaattaagcaaaaaatttttttattcactgattgcagttgcaaatgaagtaaatttactttctaataatttcgtggcaaatattgacatttttaaaccaaaattttgtcaagaaaaaaatttggtggacgaatttttaagaaaatttttctaaaaaattttaaggtcgattcttaggtgtatctttgaaaaaaaaattttggtcgattcttagtggtgtattttttggttttttggcatttttgttaataaattttactaaaaatgtcgaaatagtgaaaagacaaaaagccaaaaaaagtgaattttcactatttgaagtgacaaaactccaaaatagtgatttccagtgacgaaaaatgacgtccaaatgaaaaaattttgacgcagaaatgcgttttttgagctcctttcttcaaaacaactgagcaaaaaaaagtttttttcactagaaatcggtgccctaattattgtatattattttttgctattttccattaggcatttctccgtgccaccaccacttcttctgcctgctgctactttattcattttttgaatccgtcgacgccgcacatg

SEQ ID NO: 114833 - DNA, 116 bp, Heterodera glycines
acgtttaccagaattttcataactattctggtgtttaacagaattttcagaacaattctgatgtttacaagaatttacagaacattctgatgtttaccagaattttcagaacaatg

SEQ ID NO: 114834 - DNA, 95 bp, Heterodera glycines
tccttcacctcccccgccctccctctcctcccgcgcttcttccgcatttttgaatatttacattatgtatatacatataattcattttagaaatg

SEQ ID NO: 114835 - DNA, 235 bp, Heterodera glycines
aaaaatgatggacggaatgagggaaaagaggagaagcataaaggcttttatatgaatgatgttctaaaagtgatggaaaaattacctaatgcatatttacaaccaaaagttttccctcaacagtctgggtggtatataaataggcaaaatgttaaggcatcttccatttgactttttcaaacggcagaatttgcctcgtcgctcatcactccgtcacatttcctttgcaataatg

SEQ ID NO: 114836 - DNA, 843 bp, Heterodera glycines
cgtccccggggacggtgaggggggaaggtcgaaaccataattcaaatgggtaaatattgatcatatggcccagagccgaaaatggtcgaaatatataccaatcgatagcgctaggtctatttgaaattcgaaaatttaaacttttcttctgaccattttttcaattcggtcgttcaaatcgtttgctttttttgacaatctttcagtggataatccgtctgcaatttttttgagcaaaatcaaaaatcttgcgaaaattattgttatattttcataaattcttaatctttctagttactttatacttcaattaattgaccatctggtgaatgaaattatcatttacttcttttaaaatgcttatttcataatatttataaaataacccaaaatattaatttactttttgagcgattaaattaaatttccaagtgattttaaataaatctgggtgttttaaaaataaatttccttacggattatttactgacggatttgtccttctccattttttgactatcctccggcaataaaagaaaaaaataattgttcataaatgaggatgttgggaacttcttttttttgctcctttggttttagagtcatcattttgccgaaaattagtttaaaaaaatgtaagaaaatgaaggaataatcatttatttttatttctctcttttattttttattatttattcaacagaattatattcttataaaaagataaaatataagcttgttttatcaaacaaaaatgtcatttttgaccaattcaataaattatggagatgctttcacacaagcagcagcaaaaggagggtaaaattgagaaaaggaaaaatg

SEQ ID NO: 114837 - DNA, 120 bp, Heterodera glycines
agttagccctttaatccccaacatgacaaaaatgacaaccctaatgtattaagcaaagtggacatccgcgaaaatgcctttctcgactgtgtccctaccgcccctaaaaatgaccaaatg

SEQ ID NO: 114838 - DNA, 101 bp, Heterodera glycines
agcaaaatggtggcagggaaagtccatcgaaacactgtgaaatgcatcggacatttgacacgattagaaccaaccccgaagtgattttcctgcaagagatg

SEQ ID NO: 114839 - DNA, 326 bp, Heterodera glycines
gtacgattttgaaattgagtaccaacaaacattggagttcggcctagccgatgtgctttccctacttattgcgaaaactccgatgccagaagacgacataattttggccaaactctctacgagtgctacaagatgaaatttctgcgcactcagtggcccgacaaaaagacgatgcggaggacattgtcccttttcaccgacggagagaagcgttgtcaatcgagaatgattgtttgatgtatgccgaacgggtcgtgattccaaaatcacttcaaaaagaagtgctgcaacgattacatcactgacacccgggcacaaaacgcatg

SEQ ID NO: 114840 - DNA, 96 bp, Heterodera glycines
actgaacgaagcaaaggctactaagtaaagaactttgttgcaagtaataacttcgatatatccggatgcacaagcgtagattaaggcagtattatg

SEQ ID NO: 114841 - DNA, 561 bp, Heterodera glycines
tcgtggactatacactttttcaattatttaattattagaaggaattttacattgaaaatacaatttagtttcgagactttccattaaaaatttgtggttaaaattagggttaagccccgaccctcggggagcaaaatgtcggggaacgggaaggaaattccccgaaaaaatttgtcggggatggctgaagaaattaaaaaaatgtcggggagcaacaccttcgtcggggaggaaattttcataaaaagtctaaaaaaacacaaaaagaaaaagtccagaacaaaaaagtcttaaaaactcatttaaagatacttccatcttatttcaagtgcaatttacgaatttcgtaattccccgaaacatgttgggttaaccctagttaaaatgatcagaaaaaagtcaattttttgagtgatggggacggcgcacacactaattaaaaattaaattatctctaattagactgacgacaacgcattccttgcctttgtgaaagggcctaccgcgtttgagcaattttgtgcggacaaagaaatcacaagcgcacaaagcaaggaaatg

SEQ ID NO: 114842 - DNA, 625 bp, Heterodera glycines
atcgtttcgtaaaataagtcaaaaattttattgaaaaaataattgatcaaccacttttaattttgtaaatatttcgaaaattttaacatttaattatttgaattttactacacttaaaaataataaaatttgattttttcattgctttttaaaaccaagattaattcacatacaaaatctattaacaaattgcactcaaattttctaaatcttactaggcaccgcctcccccctccactaaaaattttggaaaaataatgcggcaaaatttgaaaatttgttagcatatcatataacataattttaaggaagttttggagaactttcaaaaaaataaaaaaattataaattttatgaactataattttaaaaatgtaaaataaattgattccgaataattctttttgattgcgtaaattttgagaatgaatcaaaaaattttcaaatttttcagtaaaaaaaaattggtgttttgcgtttcgtattttattttaaaattcgttttttcgtatttcgcacttttttcgatttgcaataacgcttgattgtatcgattaatataactgtttagtttagaaatattaatattgcataaaaatttgtcaggttcggaaattatgctatg

SEQ ID NO: 114843 - DNA, 178 bp, Heterodera glycines
ggtaagatgccaatgaggatatcatccatacaaattttttaatttatttttgttcgaattcgggtccgggatccgaaattggccgaaatggatgccggattcgtgatcaccgaccccaaaaaccccttaaaacctattttcattaaaaaatgaataatttataggcatttgaaaaatg

SEQ ID NO: 114844 - DNA, 452 bp, Heterodera glycines
  unsure (1)..(452): unsure at all n locations
gtatgtatgcatttttggtgcgtaaaaaacgagtgtaagcaattccgtacatttacataatctataatcagcaaaaaaaggaatcacataaataggagtgcgactctttgttgactttttttaaaatttattatgtggtccncaaacggaaaaataccaaaaattatagattaatggtgtcagatgtcaaatttgatgtcatgttcattctacgccccaataagccctgagtacatgccagaatagaaaaaaaaattttcttgtcctcggttcaaaattgaacagaatggatgccggattcgttctcaatcagtgacaacggaaactaattttgtttggaaagtgaaaaatattgtggggcctatgctgcatcatttttttttgtgggaccaatgttcttaaatatgtatataacttgaggtttacttatatttacccgccaactgaaaatg

SEQ ID NO: 114845 - DNA, 94 bp, Heterodera glycines
aatgaaaatgaaattgaaagaaataaataattgaagaaacaattaaattaaattaaattaaacgacaattaattatttaagcagtggcaaaatg

SEQ ID NO: 114846 - DNA, 316 bp, Heterodera glycines
ttttgaggaaaatgagctgaaaatgtgaaaatttcacaaagatggtcgtgaaaataataagtcggagattattggcgctatcaactcaatatttccgcaacgctgttagagtttatatttagatgataattagctgaaatttgagaatttcacaaggatggtcgtgaaaataataaatcagagaatattattaacccgatccttctacaatattgctgcagtatttatttagagattaagtagctgaaattgtgagattctctatttacatttcattatcactttgaaattctcaaaatttcagctcattatcatg

SEQ ID NO: 114847 - DNA, 634 bp, Heterodera glycines
  unsure (1)..(634): unsure at all n locations
ttttatcattcgttttttattatgnctatataattaatattttaatgattgtccaattattgtttttttttttgcaggatttcgtcactgccacaaaagcggagcaaattcccatcgaattggtgctgttgctacctttacaaaaaatttttgaaattaaaaaaaaaattggtagacctcaaaaagggacttccgttcctaccccttagagattatttattataaatgaaaaaacaaaaattataataaaaaattattatagtgaaataaatttttaagcattgccaaaaatcaatagacagcactggtaaaagtaaataaattgcattattataataatataagttaaaaaatatttaaattataaaaagatgaagaggttagggtaataagacttataatcgaattttattttttctcttgaagtcaaaaattttaattttttattttacacaaattcttaataaaacaaaatacgataagataaaaaacagatccataataaataccttaagaagggatcagccgaattttaaataattaaatcctcctaattttaaatgggttttctctattttctaattaattttctactcataaactttttaatttttaggcaccgatgaataaaatg

SEQ ID NO: 114848 - DNA, 608 bp, Heterodera glycines
tccggtggcactggcaattaattttaaatttttgtaaagtaaatgaatttttaatgatttgaataagcaattttttaagtattgcgtcaatcatagattagaccgcattccggcattttttggcgccattaattcgcattatcgcaggaaaagtgccggtatttcgtattttggcattttttagtcgccggtcttcgtattttggcatttttttttggcaccgctatttcgcattacggcaccaagtgtgttatttcgtatttcggcactttttttggcaccgctatttcgcagctttcaacctcattaatattaatcttttattaaaattagaaaatttttaatgtttttggaatcaattgggaataatttttttaaatttaataattagaaataaaatattttaaatgaaaaaataaaattaaatatgcagaaaaaaatcatcattccatgaatgctttaatgtgcgttttacatattgccaattttaaatgtcattgctaccggttggcggatattggcacgtcccaccgatggccaacagtggtggcacactttaaaaaaatattttacaaagatttttaatggcactgtactctcaccaaatg

SEQ ID NO: 114849 - DNA, 216 bp, Heterodera glycines
tatttgcagcatatgctttatagcgcacattataatggtttattttatactacgtttctttctttgccatgctttttattttcgataaaactggtgaattttattgtttgtcctttcccaaagtccaagtttatcttttcactgctttatcttgaaggatttgaatgttttatcatttaactatttcagttcagctattactattaagagaaaatg

SEQ ID NO: 114850 - DNA, 714 bp, Heterodera glycines
  unsure (1)..(714): unsure at all n locations
acaaaaaatgttgctgtttgccggtaaanaatggggaaatggataaatttgtgaaaaatataattgaattaatatttttttaaatctctcccatataattttgaattgtcaactcccaaatagtgaacattttttaattattttaaatgtaaatgaagtttcatttggattataaaatgtataaaattaaaaggattaaaaaaaatactcccatattttacattaaccaaactcccaaatntagaaaattaaaaaaaaaaattttcatttcccatntaaaaaagcctaaaaaagcattaggtttacagttggtacaaatttttaaaaagataaaatttcgatttttttttccacggcgacgacgactgtcgacagaaggcctgggctgggctaagctcggctttgcactcgaaatcaaagctcaaaagataaacttaatttttgaaagtcgaagttcgaaagctcaaaatatgaaattttaaagtttgatgctctgggttatcaaaacatttttccataaaattaagcgcttcgtaaaatagggagcaatttctcgaggattattcatgatgttttttttttgaaattataaaaaaatttaccaattcattggcaatgtgtaatttatgggagttcgcaacaaataaattttacaaaatttgaattatttagcaggcaaaaaaagctcttaacgccaacaatgctaatgagatg

SEQ ID NO: 114851 - DNA, 866 bp, Heterodera glycines
aattagagaccggaaatttcaaatttacggatctatgcgcgggattggaactcaaaactttttgtgggggacgggatctcgctgaattaatcccgcaaaaagttcgcatttttacgatagcctgtacgggatttttaataaaatttctcctactggggtaacctttttaaccagggttgccagatctgaggatttatcctcattttgtggctttttgataggtcaatgaggatttttttttggaaaatgaggatttgaggatttttgtggctttttgagaaattttgaggatttttgaggcttttggggaaaatcctcagaagcttttaaattttgataaattggcataatgtttggtaattatttaatttgaattttggtttttaatagagtatcaaacggaaatctcacccaaatttagccagaaaattacaatttttttcgaaaatccacaaaattatgaatttttatgcatttaattattcttcacgcctctttcaaaaaatctctacctggaaacctttttaagattttctccgattgcctagcaaatttggcgcaaaaatgactaaatttcgctctttattgataatcttttaaaaacaattttttttgagagatttttcaattctttgccattttcacgtcttgcccattgtaagttctgaccatagtttgattttcattaactccaaaaactcgaagggcattttgtccagaaacgagaagtcagaagcattttctggcttcctgctacgcctttggcacagacagcaaagcctttttctgtacgggaaatccaaattttaaacgttctaaaaatgaaaaatatttaaatttaaatatgtatttagaaattgcaaatg

SEQ ID NO: 114852 - DNA, 478 bp, Heterodera glycines
accattcgtccgagcagcacttccaattgcttaaccatggaccgccgtcgacttcgagcagttcggaccaagaaacagcggagcagcaagaccaatttggaagagacaaatttattaacaacgcaatcagagaagacgaacaggaggaggaggaagaagggagagaagaaggggatgaacagacgaagaagggagatggaggaggggagaagagaggcgggggcagccgaaagagacgacggaaacccgagggtaaggggagagaaaatgccggagggaatgacgagaagggcgggggagagaatgccgagggggggggagacgaaacgaaatgccagaaaagggtgtaggggaaaagcggaggagggggggggggggtcaaaaggcaattgggaccaatgcaaaagtcgttctgatcagtcagtgcctttgtgcttaatcggcttttccaatcacagccaaagacatcgtccgaatg

SEQ ID NO: 114853 - DNA, 454 bp, Heterodera glycines
tcagcagtagggggcctgggtcagttcggcacataaattacacaacttcaaaattacccacagctttttaaaaattaagaaattagtattctcaacaaacaatatttattattttataggactttgttaaaaattaaaaattttgcaacaaattgtttctttattttaaaattttataatacatttttcaaacacatttttgttacaataagcaaatatatgtgaaaatttataaaaaaaaaactcaaaatatgttgatatgagtttattttattaatctccacttggcaacctgggtttttcctaaacctggattttcctgaatttttgcccagtaaatccaggtccaggcttttttcaaaatgccgacctctaattaaaacaatcaaagttatgaattgcaaaaaattaattaaagttatggattgcttgattggccactacgaccacaatg

SEQ ID NO: 114854 - DNA, 258 bp, Heterodera glycines
ttaaaaacgggcgcaaagcgcccgtcttgaggccgcgaagcggccgaatgtccccaaaaaaattaaaaaacgggcgcgaagcgcccgttatgaggccgcgaagcggccgaatgttcttaaaaaacgggcgcaaagcgcccgtcatgaggccgcgaagcggccgaatgtccccaaaaaaattaaaaaacgggcgcgaagcgcccgtcctgaggcttaacagccggccgcgaagcggccgaatgatcccataaaattatg

SEQ ID NO: 114855 - DNA, 152 bp, Heterodera glycines
agaaaatcctcaatcacttttttttgaacttacgcaatttaaataaaaaattaatttaccattttgcttaattgattaaaataattagttttgattagaatttattttaaattaaagaaaataaattacaaaatttcagtcagacaaaaatg

SEQ ID NO: 114856 - DNA, 166 bp, Heterodera glycines
agtaaaaaactgatttccatattatgtatgcaatacgtcgtgaatcacatttaatttttaaaatatttttggaaaagaaaaataattgcgtaataacatttaatgcgaataaaacattaaataaattcatttaatgcaataaattcaatttccaaaagtaaaaatg

SEQ ID NO: 114857 - DNA, 353 bp, Heterodera glycines
tttttcgtcagatttggcattttttgaaaaaattggtaaaacaactttcattttttgtgcgctttttattattttttggaaatttatgctcggtaatatttttcacttttctactgaattttatcagatttggaaaattcaaaaaatattacttaaaaacttgaatatttatttgaaaataaatgcttcataattccgatatttttcaaaatatttccacttttttcctgattttttttgccaccaaaaaatatataattagtttggttaggtcataaataaatagaaggaatagcgttgagtaataacacaaaaattagttgcttaaagccagtctgacgtcatttcaaatg

SEQ ID NO: 114858 - DNA, 219 bp, Heterodera glycines
tccaagtccatcgccaattgactaagtgaaccgaaccctgcaaaaacccaaacccgagccccaacggccctccctcgttttcctgacttggcgctcctggccgacaccgaactgcaccgccttttggaagactccgaattgctctcgccgattgcacacaagaagcaaagcgtggaaaagccgtgctgttcgccgtctctcttcaattcgccgaaaatg

SEQ ID NO: 114859 - DNA, 68 bp, Heterodera glycines
cctggcaggtcaaagcaattacctttatgccgattgtttttttaatgacggtgacttctttttcaatg

SEQ ID NO: 114860 - DNA, 123 bp, Heterodera glycines
gaaagacattttaatcagatcaacaatatctcgaattccatccaaacccaactaaacacactacgagaaacaaattctcaaattttagaagagcctgatataaaaatttggtttgacaaaatg

SEQ ID NO: 114861 - DNA, 1003 bp, Heterodera glycines
tttgcagagtatgtcaggaggaccaggaattttatgaaaaccaggaacagaaaagtcgggagcttgaccaagaaaaaaatatactcaaaatttatgtaaactaataaataaaatcagtttttcacaattgaccaaatatttcatgaaattctgaatcaggggagaccaaagttgcattatgtatgatcattgatcaaagatgcagttccgccccaaaaaactttgaaattcggaagctgtaagttttttcaaccaaaaattttgttggtaatttgggaccgatatttcctttaattttaaagttttcctaaaacctttaattttggtggtacctacgaatatattttactgcccaatattttcccaaaattttttggtggatagagagggccggcgctgctggagaaaacttgaaaaattcggctttattagttaatagattttgcgctcaaatatgttcatttttgggtttttggcagaaaaattttataacaaaattataataaaacaacgttttcttagtaatttcattaaaaataagaagttccattgatcacttccgaaaacctgtttgaactttaaacagaaaaaatatttttcacctttcaatccaaatctccattaacatcattcatcatcacttcactttttttgattcactcaacgcaaaaacattaaaactccccgagaaattggccgaaattttcaccccctcaaaaattggataaacattaagagggaattctcgttcccgccaaaattacgaaaattaatttggcaattattgccgtgggaaagaaaaccgataaatatttttgtgtatataaatagagttgttatcatgagaaaagtaataaaagatacaaaattttgtatacttagtcaagcgattaatggaaaatgcaatttttatttatttttaataaaaaaatttgatgattttttttttgttttttcatatatagaattaaaataaaaatatattttactcgtttataaaatg

SEQ ID NO: 114862 - DNA, 1003 bp, Heterodera glycines
gaaaattttaaaaattcttgttttattagccccactctgctttgactggccatatctcgccagggagtggcggtagaccctttgttgatacatttgaaagggtagagcgcgcctagctcattcgaatagcatcaaattggtttgcatttgtcccgaaacaacccgcttatgacacgtctaaagaaaatccgttaaaatttgcattcacaaactccattttttcattggcaaacgtgtaaagcaaacccgaaattgataggaaatatatattgctcataataaaagtacaatttttatttgtcccacgccattttctgggaaaacttttccgcgaaaagccgaaaaatttccatcggcctcttccaacggcaacagatgcgtttcaaacaattgacaatataattatgattgaagtcaaaaagcctctatagaaaatgatcaataataagttgttataaatgttcacgaagtacctttcttgttattgacaacacatctccattcaatttacaacagatacataatgtattgggatatgagcgaacatttagaagaattatctctacactctgtcagtcacagtccaggaagcaaagacaacgagaagctagaacactgacaccacggactcgcccttccgccaggtgccgtccccccgtcctttatggccatttgtgccatgaaattcccaattgttggcccatttttcgttgttttttggtttcccattaaattcgtttgtttttctcttttaggaatcttactttttctgggccttcggtgtccatgaaccgggtctgttcaatcttttgttgttgtttttcgactcattcgatttccacagattgttttgccgcggttgacgttgaaagtggcaaatcggccattttcccgcccaaaatgagtccggacagtgcaatttgggacggaaagtccgttttttcggaatttcaattttactttttccttaattttatttttgcagaattcagcccgaaaaatg

SEQ ID NO: 114863 - DNA, 71 bp, Heterodera glycines
agtggactaaagaatgccgaaaccccaaaattaaaaaatgtatggagcgacaccaagagcaattgagtatg

SEQ ID NO: 114864 - DNA, 178 bp, Heterodera glycines
tgcaggtcagaatgggccaaatggctcgcaaaaaatgcttctcatcaccgttttatttttcattttctcatcggcacttttttttggaagcgttcaatctgcatatgtcaagtttattgtaaataaaccattgaacaaagacactgaaaaaacttgcaggatgctctaaaccaatatg

SEQ ID NO: 114865 - DNA, 705 bp, Heterodera glycines
  unsure (1)..(705): unsure at all n locations
tttattatgcttactctatttgcatttgctgttttatggcaataaattcatctcattattacaattaaaaatattttttcgaattgtttttgtttgggngtttcttccactgcgaaaaaatcactcccttccccccctcatcagtctcggctttatttagtgtaaataatggcgttttcccagacggcccatccatcttttccgccccaggccatcggccaagcgacgatcgatcggccgacccggcggcgattgcttttgcttcggctttcgctcctttcccccccccccggcgccttccaattccgacgagagatttcttcactcaatgtccaattcatctgcataagtcatttttgaaatgaatgcccaattaaagccaatttcggcttttcgttggctttttttgtgctttcccccattaattacccccaattagggattgatttccatgtcccttctctttggtccccctctttttcttcactgttgccttttccttctccgttccgccgtttccgtccccgcggtgcccaaatgttcgcagcgattgttcgaagcaaagagcgacccgtcgccgggctctaacggctttagcatcgaaattcgagaagcgcccccggggatggacggggacagcgacgaattgcaggtgaaaaacgcaacaaatatttttggcattggcaaacggaacgccaacgaatg

SEQ ID NO: 114866 - DNA, 71 bp, Heterodera glycines
ggtacacaaataaataaataaaattattttaaagaattgtgccaataaattttattataaaggtcatcatg

SEQ ID NO: 114867 - DNA, 1003 bp, Heterodera glycines
atatgaggcgtgtttttaacttttatttatttaattgtaaaaatttttatttagttttttataactttattgaaaaataattaatacattgttttgtttatacaaaatttagtttatcatgccatattcaaacgtgtaggagcagctattgctaactttatttacgcaaggtgcttgcgcgttttataaaaaccgccacctagtcgcgttttataaatccgccagtcgcgttttataaatccgccacctaacaattcgcgttttataaaaccgccagtcgcgttttataaatccgccaaaatggaaaggcgcgttttataaatccgccagtcgcgttttataaatccgccaaaatgggtttgcgcgttttataaatttgtcaatatgcaaataaccaacaaaaatactaaatttatttttttttaatactaaatagatcgataaaaatatttttatgtgacaatatgtgccagtcagactgcaataatatttgccaatattacagctgaataaaaacaaaaatatttgttagtattgcaattatattctataaaagcattaaattttaaattaatacccatttcattttattttttattttataaatgaaagctaaattttatttattagcttatatattactagtatgctgctgctcaaaactttttcatggaattagttttgaggaattaacatcaaacaatcacgccaaacccttaattgatcaatatcttcgaaaggaaataaagactaaaggagaattattggaaaaactggctgaaatcggagtcgacctaagcttgagaagcttggaaagatatatttcaaaaataaaaaatagaaaatcaacagaaggaaacaaagtagatatggaaaatgccgaagtatcgcaatgtttttcaaaatttgataacaaatttctttttatcattgggcatgaatccgaatatcgaaaattcaataaacaaacgagagagaaggcgtaatttatttgtactgtatg

SEQ ID NO: 114868 - DNA, 650 bp, Heterodera glycines
attttttgctcgcaattcatttttggtccattttaaacaaaaaacttttttaagaaattgcgccaaaacttccaaaaaacactcttcaatttttagggccagactgggcaacttttttcaataattaaaaaaatgcatttatcccttcccggcctgattaccaatactgaatccaggatgcagacttacttaaagttccgatcaaactcttaaaataatttcagttattaattatatttgtgtgtcgtatgctttattttgtgtaaacaaattttttttatcagtacacgctcttagaaaccaggacattatctgtttttgcttaattattttacaagcaaaattgggataaattcaaatcaggacatatatgaaaaatcaagacattttcgatttttttattaatgccaaaaaagagaaaaaaattgagcaatattaaatgaaaatttttcattattataaaatatttcactattatttatttcaaattgtaaaaatgcatttttggcaattattattttttatattttgctttgtttataaaattgaatccgtcaaaatccgaacaaattttgatgaaatatttggcgacggatgggacaaaaatgaaagtgaacaaacagtgaaaattgaacaaaatcagcaaaatg

SEQ ID NO: 114869 - DNA, 1003 bp, Heterodera glycines
catagttcgtttctcagctttacacacatcaaaacgcagaataattagccgagaattaattaaaatgctatcgctaagttccgggtttttcataaaaaaaattatattaaaaagaatatatttaccgattattttatcataattttatttacttaatgaattttattgaaacgtacattttttattactttcagaaccaaagtttcatttaaattaaataattttaaaaaaaattaaaattttagactgattaagattaatttaacattttttgagcttattattaacaaaattttttggcgaaataaaatggcgactgatacggtaacgacaccgtttttgtccgtccattactgtatgtgctgtggcaaattgcacaataaaaacgattcattggcgtgtgagggtgacatgttgcgcgaatattgggacgactatttacacattcaatgaatgtttttattaaatttgcaaattcgtgttataaaaattggaaatctttatttattttcttttaaaaatttcatttttctttttgcactgtaataaaaaaaatcaaaaaaaaatttcaatggactgaattttgactgaatattttgatggtttttcttttgcaaaaataaaatgttttgattatatttctatggttaattgccataaattttttaactgccattaaacggtaataaaaatccaataaattcgactataaatttatctctaaaaatgaataaaaatgaacaaaaaatactggctaaattcagattcattctaaatttaaccaaaagaaataaaatgcatattcttttttctctttttatgattaaataccattaattttaaaactttcataaaaaggtaataaaaaagccaataaattcgactataaatttatctctatagatcacctcatgaattttcatttttaagatgaaaaaatgaataaataacagaaaatttactggattaattcattctaaatttaatcgaaagaaacaaaatg

SEQ ID NO: 114870 - DNA, 79 bp, Heterodera glycines
ggtcattcacaactttgagaaagcattttaatcatattctattgctccttgctgttcaggatgccggtgagtacaaatg

SEQ ID NO: 114871 - DNA, 566 bp, Heterodera glycines
tttttttgttgactattttcggaagattgggcatatccttcaaaagttgggcagcattttcaagccataattaatttaattaattctaatttaagttaatttattaattctcatttaagccatgctcgagaccaattatatcttaataaaacattgtccactcctccaattatttttcattaaagctgcatcagtgcggcccaattagtccccaattaagcggtaacggctgtcgatcacctccaattatttctcgattaagacatgccccgcccatgtagtacgacatttgcgggttgaaaggttaaatctgatttgactcggcgcttattggtaccgacagactcaaaaatctcataaatttaaaaattaatatttggaagaatccaaaatttgaaaaagctaagggtaaatgaaaattttattttttcaataattgtaattattaattttttgtgaaaatattttaatttaataattttttttatttaattataagaaaaaatctcatcatattgaacattcaaattttgattttatttttttagaaagtcaatcctcaaatg

SEQ ID NO: 114872 - DNA, 141 bp, Heterodera glycines
ttgaaattatttattttggcttttttattatttattttttttgaatgaccaaataaggatttactaaacattttagaaaattgtttttcgaatttcgtttttcctaatttgtaatataatgcttggttttagatgtttatg

SEQ ID NO: 114873 - DNA, 559 bp, Heterodera glycines
tttttccccggaatgtttttttccaacattttttgttttccttatccttttttccttttggaggtttttttttgctttaaaaacctttttttgtggcgccttttttccaaaattttctgggacagaagggggggggggggttccggcggtgccgacaggcgccgccggggaaaaaatttgaaaatttgaatgcaatttgttaacagattttcatcaaaaactgcctaatttttgcgattttaagccatgcgacgactttttttgtttataaaatgggttttttttacggcgcgcttttaaaaaaatttttttgaggataggggggtccggaaaaatttgtaatttttaatgcgagttgtttacagatttttctccaaaaatgaccaaaatttgcgatttttggctaattttttaagaaaaatagtgacttaatgccataaaatttcaaaaattctcaaaaattacatttttaaatgacataatgccataatttaatcaaaatattgttgaaaattacaaagatttctcaaatttctttgtttttaaacttttccaaatg

SEQ ID NO: 114874 - DNA, 133 bp, Heterodera glycines
gaaatttatcaccaatttagtactaatcaaaggtaattaagcatagtagttattgttaattagggtacttaacagagtggtagtagggaaatattgttatggtaattaactgttaattagccacttgtcaatg

SEQ ID NO: 114875 - DNA, 60 bp, Heterodera glycines
cacatcttcaaaattaacaacaacgacaactactgtcttttttatgccttggaactgatg

SEQ ID NO: 114876 - DNA, 689 bp, Heterodera glycines
ccagcgattttttggctataacttttttccttgtcaaccaaatccaacattgtagcattcgaaagccataaatgtcttctattagcctgcaaaatattgaaaaatttcgttatggttcagaaaagttatggccagaaaaattcaaaaaagcaaattttccaacctttttggccataaatttgttcaaaattgacgaaattttttggatttttgcaggctaatagagcatttgaagggctttcgaatgataccaaaaatctttgatttggatgacaaagaaaaaagttatagtccaaaaacttgctggggcccaaacgtgccaactgacgtagaccgtcgtaggattgccgaaagacctcgtttaaaaaaatatgcgaaatgatgaagcgatccgtcaattagtcatcgattttgacaataaggaaaacaaaatcgatgatgatataattaatcacattcatacattgcaataccgcctatggatgaaacttggaagaataggacttaaagagtgattaaacacatgttttttttaatcaatataattgttgaaatttttttggggtcacttaattctgcgccgcaaatgtcgttttgattgggcgccgcaagtgtcggcgccgcaaaagtcgttttgactgggcaccgcatctgtcggcgccgcaagtgtcgtcgccgcaagtgtcatg

SEQ ID NO: 114877 - DNA, 97 bp, Heterodera glycines
tccgccacttttctccccctccaatggtcggcgtcataaagccgtgccaacgttcgcttcgtccctttcgcccccggcgccgcccatcggacggatg

SEQ ID NO: 114878 - DNA, 95 bp, Heterodera glycines
tgtgatttattgaatttatttattacgcatttaaaatttgttaagtgtaaattcaattccccattcattttaaggtgtcgttaaccgatcgaatg

SEQ ID NO: 114879 - DNA, 149 bp, Heterodera glycines
aatttatgcacaactaaattttattctcccttttcctttcctttccttttccttcccttcccctattagtgaatcgattaggaataaaatttatattaaaatttattttttagctttgatttgttctacaatatttgcttccttcaatg

SEQ ID NO: 114880 - DNA, 306 bp, Heterodera glycines
ttattctctccaccgaccattcgccattttttataattttattattattgtctcttggtaaataaatatttgttggttttattcactcggacaatacacaacaaatttggcgcagtcagcagtcgtcttcaaccaacaagacggactgcacaccacaaaaataatagtccctaggcgggtgaggtctgcatatattgcagttaattcgccgaaaaaccaacagacctaagaaaggttgcggttccgcaataagcggtttttcaactttggactctcaaattcggcaccggcaaacatttcggcatg

SEQ ID NO: 114881 - DNA, 361 bp, Heterodera glycines
aaatgatttttaataccatatttagccatttttgaaaattttactttgatttagcgaatttgaagaaattttaaactcaattttgaaaaatttatgtccatattttgacatttttgccatttatgtccatattttgaaatttttgccattttatatccatattttgctatttttggtcaatattttatggccatatttcgcgattttatatccatatttttggatgccctataatatgtatttaagaaaatagggtcctactttgttagacttcaaaaaaaacactatttttatttcattttcttttatttaagccctttaatttaagaataaaatgctagaacccgttcatcagcggatg

SEQ ID NO: 114882 - DNA, 81 bp, Heterodera glycines
ggtccgttattacaaatattaataaaataagaaatccaacaattcaaggtcaatcgggcatctgtcgcttgtggaccaatg

SEQ ID NO: 114883 - DNA, 57 bp, Heterodera glycines
gctttgaaagggccgctgatagggcaggactcaaaaaaattgattttggacacaatg

SEQ ID NO: 114884 - DNA, 58 bp, Heterodera glycines
aaaagaatttgttaaaaaattaaggcgttaccgtgccgaggcggagttggccaaaatg

SEQ ID NO: 114885 - DNA, 971 bp, Heterodera glycines
tttttatttatttttttatctccgcaaaaaaataaaaatttttttgtttcatctaaatcccatcttggcttgctgatcaatcgggctgggagtttcagttttccaaaaattttctgcagcttttttttgatgagaaacccatggaaaacaattttattttcatctaaagccaaaaaaatcattattttggactttttgccaactaaaagaattacgtcacttttttggacttttgcaaatttttttgtcaattttgctttttgaaaaaattcttcaataaaaaggcaccgcttttttgacgaaaaaataataagaaaagtttgacttttcagtgtaaaataaaagtttattaagtttcattcaaaagattaaacttttttttaaaactcgaatgagtgaaaaatagtttttaccgtttaatttatttcatagaaaattattattttaaattttaattatgtaattagtgatgcccccgttccgcttctcctcgcccttaccctggcatgcaaagtgcacgcttggaagcggcaccgcaagtcctgctggtggtaattggccgcctccgttgcgctgaagccgcgcgtctccgccaactcgcggtcaatgtcaatgcttcgcttggccgcctttgagcaggcggcgtggaaatgaaagtgcgaatttgtggcgctgaagtgaaggaacaaagagaaatttagcaaattatttaattcgattcttttttcattattattttcaaagcgatgcaattcattcataaaaaatattaattgaaagcccaattaatttgatcggtttgtgtcttcgattcaaattatcatttgcttttaggcttttcccgggtatttttgcttctctgtccgatttattccaattaaaaatgccctctttattttatactttaggcaattcattgcgcgctcaaagtcctcgcggtgtttaagacaaatgtgcgattggggcgaatg

SEQ ID NO: 114886 - DNA, 1003 bp, Heterodera glycines
atatttctttagctaaaagagatatgtattatttaaataattaaagtttgtttattattatttttaatcttgaatgtgttataagcaaatttttcataattttcacgttgcttgcctttcacgactcccgctttgctcataacgaagcttacttgcctttttcttggcctcactttcaattttctcagaaaattcaacctatttttggttttttcttcttttgctacaaaattttgtaagttaattattttattattcattaacattataatatgcatttcttttacaattatttggactgcttaatttcttttttcatttttaatcgattatttttaatgagattatttattgtcaaaaaagtttttttttaattatctccacctggggttatgagcacaaaatcaaatttatatgataatgattttttgaattattaattgtctaaaagcaacgttcaaatttatcatccatcattcatattgttttttcggcaatttaggggccatcctatgaacttaattttactctaatgatttaaaattttatttcatgattgatattgaaaatttaaaaattatttaaagtttataatttttaataaaaatttatttgaattgtcgcctaaaataaaaataaaatttatttaaaaaaataataaattttggcataagtttttgagcaaattttccattcatagggatgtatttttcacccctatttattattaccaaaaaaccaaaaataggaattcatttacaattttaaaatttaatactctaaaagttgcatgtgttcaattatacaaaaattatttaatattttactattgtatttgccttgtacgtagggttcagcggtaccggtaccggtaccggtaccgaccggtaattaccggtttttttggtactggtaccggtaccggttttttcaaaaatcaaagtatcggtaccggtttgtctagtaccggtaccgccggtaaaaatttgcactggtaagaatg

SEQ ID NO: 114887 - DNA, 191 bp, Heterodera glycines
catcaaaagtttttgagctgtgccctagtaatccactgacggacactccctaccactttaagcttcactccagccaaaactttgttgatttgtccaaatgttatttactaactgaattccgaattcgcaaagaaaatgagcatggtcaactgattgacctcgcagctgacgaagttgctccgatccagatg

SEQ ID NO: 114888 - DNA, 871 bp, Heterodera glycines
  unsure (1)..(871): unsure at all n locations
caaattgcggcactttcgcaccgcccngcgcgagtcgaacgaattggcctaaaactaacgaagttgttgcctttaaaatgcacgtttaattaacgaacaaaaacgagatggaaatgactaaacagacttttggccaatttgatcttagctgatgagaaggatagaaggataattatattaaaaataaatttaattttataaaaatattttaagaaaataaacaattcttatcattttttatttttacccttaaattcgtctcaagaaacggactattattaatagtcttctcacattcattaagtattatgtaattattggatgccattactcatcattagaattgatcaaaatatcaattaatttttataaaattgccctctttacagcaaaacaattgtttttgtgattgctttgtaaggatcgaaccttaacaaaaaaaaatgagaaatttggccataaaatgcatgtaattctccgataagtcaaattccattgtttatgacatccgtagcacacattttgatggttgagaaagaatgaaagaatgaatgataaccaacgaaatgaaaaaaaggagagaaattttgggatggaaaagcgaagagccgacgaaaaatgaaaggaaaaatgaaacgaattgggggggggggggcgggggtgaccctccccatggccaaaagggtaaaagcggcgatcatttggcggttgggcccattcattcattcattcactcattcactcattagcagcagaggtggccccattcgttcagtgactttttgaactcttcgcccattgctacgcaatttggccaaattgaattaatatttgccttttttatgacattttatgatttttccagaaaatg

SEQ ID NO: 114889 - DNA, 413 bp, Heterodera glycines
gtattaattcacaggaaccgcgagactcacgcacatccctcacgccgtaccctcttcttatttctaagaaaacttttacaatttttgaaaattaaaacttccataattttaagtatttttcaacagtttgatgggcggtgccaatcctttaaaattaaaaccactcaaaaaaagaagcagccaatgctcaaaacaaaattaaattgaatttttgttaacatttgatttggttagttttaagccaaggttatgccaaatataaacggggctttttacgaaacagcctagcagttagagcataataagcactacttttgtcgcttttgtcctttattctcacatatattaattaaaaattgataatgtgcctaattatttgcaaagaaaaattgtgtgcttaatcattcaaaatg

SEQ ID NO: 114890 - DNA, 65 bp, Heterodera glycines
agtaaacaatttgattttttaataaattaaagcgaaatttattattatttttaaattttcagatg

SEQ ID NO: 114891 - DNA, 1003 bp, Heterodera glycines
tatataagaattaaagtgaaaataaaaatcttcacatgttataagagttgaaacacagtaatttagtattaattagtaaaaaaaaaatacttaaaactctttttcaaattataattctatgaattctctttaatgaataataaagatgtaaattctagcccataatttattaaaataattataaacattaaaaattaatacaaacatatatttaaaattttacgtaaaaaaatttttctctgttttttcccaattaatatactaattaaaactattgtgaatataaataatagacacaataaaatgcaaaacaaacaaaatgaaaggaaatttgaaaaaagtaacaattaaaatattttaatagttttatgtgtttataatttttatttttatttaaataataacactttcaattaaattttttattttataaaagtaataaataacagtttaatcattatataattaatgaactttctaagatattaatttgaaaaaattaattcaatatcaaaactgaataataaattattttagcaaaaattaaaaacaaatcatttttgataaatgttcgggatgggcctgattatttgatttatttattatgttggcattccgtcccatttagttgtccattcattcatttattttgttcccttattttcccaatcaatatttgaccctgttcgcccttgtccttttcttttgaataaatattattttattcctcttcggactttggggcgtaacaattggcgacgcctcgacaaaatcgaactttgtgcagccaaaacaattttgatttgtggcttgcggattcttttgaaatcagagcattttttgcgctgctgtttatagtatctaggcgatacttattcagctcatccacgcgcacccacttgattagtagcttggcgctgctaacaataagtggtgaacgacacttcacttaaaacgagtactctctagctgaggggaaagtccacgagctgtggttaatatg

SEQ ID NO: 114892 - DNA, 195 bp, Heterodera glycines
aaccatgaattatggcttggtgaattggtgcccacttacaaaaattgagattatgtttatctgagatctataagaattttacaatctcgagatctaagaatttaccaatatgtgtttttaaagtacccataaattaaaatggcacaatacattaagaaaaatttcggtatttttaaaaattgtcatgccgaaatg

SEQ ID NO: 114893 - DNA, 1003 bp, Heterodera glycines
ttttagagttaatagaacgccaaaatagcaacttaattttaaatttaaatagtcttttctttttcgaagaaaaaataatgaattcgcttcgggcgccggacttttcgacagaaatatttagaatttcaggaggggacttttcgacagtaaagagtaataagtttttaaattagaggtgtaaatcgtaaaattttatcgaaaaagcaacaaaattaagccagatcagtattgagataaattatttttaaaatcaaaaattattaccaagaaaataaatagataaattttggagagtaatttttgagaaaatttttctttcttcttagaggtatatttttgaaaactttaggggccgattcttaagggtgtgttttctgaaatttttcattgtaaaaaatgtaaaaatcgtatccctagtaataatgatttaacaatacattttagtatgttaatttaaaataaatttagtaaaactgacaagcaatataattcattttaataagaattagttgtttttgtgtttctgtcgaaaagtcctttgctgtcgaaaagtccgggagccaatggacaatgccaaaatgcccagtatgtaattttttaaaaattactaaaatttacaaaaagttgtaacaaaaaagctcgaaaaatttggctcaacaattttgacgctaacttttttgaaactcattaaaatttttagaattttttgcataataatataaataataaatatatatttcattgctacaataaattataagagaaatacaagtcattgtatctataataaaacgtaaaaatttattttaattgctattgtatggctatggccagaattatccacctttcatgcaatgtctataatcaattataattccttcagagaaattttattttttacaatataattattattattggttatataatatttgtttgatgcaagaaataaatttgaaataataaattatctttcatatttttttagaaaattgcaaaaatg

SEQ ID NO: 114894 - DNA, 710 bp, Heterodera glycines
ttgtaattagagaccggacaagagggtaggtcgaacggtttcggttaaaaaccgaaaaaaaccgaaaccgaaaaaaaccgaaaaactcaaaaaattctcggtcgaacggtttcggttaaaaacccgaaaaaaaccgaaatcgaaaaaaccgaagaaaatttttcggtttatttcgatttttcggttttttttgaatttgtaaaatttaatgaataaatttttatttgtaattaatcttttacgagatataaaattttggaccattcggaccgggacaatttctccgtaaattcaataatggtaatgattttagtgaaaaaaaaccgatgttttgtttggtttattctgataaaatgtagagtaatttaatcaatttttaactgctgacttcctgaaatataaatagcagaattacattgttttttttattttatatatttgcctataaaaattttcttattttaatttaggaaatttccgaaattggaccaacggcaaaaatcgacgcagttcaactaaatccacttttcgtttcaaatggcgcgaacccaattttcacacttatataccaaaaaggtgtattgatattgtataatttcttgccttttttacatttttttaatttaaaaatataaattatgaaagtttttaaatacaataaaatgcaaatttttctaattttaatattttgcatcttaaatttagatatg

SEQ ID NO: 114895 - DNA, 77 bp, Heterodera glycines
aaagcttttcaaatatattttcttaaatttgtttttttggatattttagccctgtgcttttgtgaatttttgaaatg

SEQ ID NO: 114896 - DNA, 95 bp, Heterodera glycines
gattgaagccctgttttcataatacgaagttatctttaaaaaaaagtcacaaacaagcctttttatttagctcatcaatcatcactcgcagaatg

SEQ ID NO: 114897 - DNA, 622 bp, Heterodera glycines
tttatagataagtcgaaaattcacttaataattattattttaaaatagggaagtagtacttatagattcagatgtaaaagtagaaacgttgtaacaaataaaattttcgctgacccacaaaatgtccagcccacgaaatgtccaagtctcgaatttgagttttttattattcagatgggcctaaggttaggcaaggggtaatataaagggtatattcgtattcagcgaccccgaaaaccctaaaaatcctaaattagactcattttgtttttataaattttgaaacattttggacatttcgtgggtttttactcttttggacatttcgtggcttggacactttgtgggggtgccaaaatttttcataaatttcatgattattttgaaaaaaattaacgaaaattgtcattagagcgattattttttatcgattacaacaatagaggactgtcgcaagaggagttctcctgctgctttttacatattttgtaaaaaaaatctcatttttagcttaatcaaatttgttggattacatataataagctttaatgtattttattctttttttatttttagccttccttttttattgtgctcgccaaattgacactagcagagaatg

SEQ ID NO: 114898 - DNA, 372 bp, Heterodera glycines
tgcgctactaacttgctaaaattgaaaaatttaattaagtttttcagaaggtatacaattttttcatttttttggctagaacttttgaaaaacttaataaaattttttgaaatttagaaagttaatagcgcaattcaagggctatcgtatgataccaagaatgtgcaatttggttgcgtctgagaaagttatgagttgatttagtcaaaaatttagcaaattttgcacttttcgtcggtccaccaaccacgggcgacgaattgtttcctgctgctcttccacatttatttttttgcgctgttcagaaaccgcgaggcgcacttgcgcattttcctgcacaatttgcactttttgctgtccaaacaacagatg

SEQ ID NO: 114899 - DNA, 133 bp, Heterodera glycines
aaatgttggcacccccgcgaagcctataaataggtatgataatttgagtttttcactatcaactacattctcaccaccaaaattcaaatttttgagagaaacataaataacaaaaaaaaaacagtagaaaatg

SEQ ID NO: 114900 - DNA, 533 bp, Heterodera glycines
atcagcaactccgaaaaccccaaaaaaagtgtttcttatgacttttgaaaacataaaaaaatttggaaaagggggggggggggacaatctgaactattaccaaaaaaacaaccgccattgctatttttagtatcatatttcgccagagtcatatttttaactttaattggctaatcataatgatgtatttgtatgtacaattgtcactggaacataaaatgaattttgttacatgcatacataggatattggttaaaaacaaatggaagaaaatgcaaaaattaactttgtatagtgccagaaaaaacatatttatgcaccttcataaaatcctaaatgatgaaatcctttaagaatgtgcgcttttatagacgaaaaaatctgacattggaggcaaaagagaaaaaccatttgtcagtgtaaaaatgtgttataaatagcgactgtttccttgttttgcatcattcatttattctcttggccaacaatcaaagcatcgaacacaacaaccaacaactacaacaacaacaatg

SEQ ID NO: 114901 - DNA, 1003 bp, Heterodera glycines
aattaaattaatgaaaattttcaattatttcaaacaattaatcatttttggactaaatcatcgaatattaatagaaattcagatttgattttcacatcactttttttcggagcgctttttcaaaaaacttttgggaaagaaggggtccggcggtgccgataggcgccgccgggggaaattttaaaaatttgggtgcaatttgttaacagattttcaacaaaaaaaggttggtttttgcgattattaagctcaatcttacatttggcataagaagaattgtgaattttgtcaaaataaaaccaagtagagtctttttcgttggtcatttggtctaaattacaaagaggaaaattgtctataaaatgaacgatgaatgtataaatattttctgattgcatattccatttaaatgcgcgagaaaattggaattttggtcgttttcaaaattttataccttcaaatctaaatattcaaaaaagaaaatcgcttcaataaattttctttataaaaattttgccctaaaaaatgcgcggcgcgccgcgcacagaaaaatcccgcggtcgcggatcgcgcatcgcggattcaaattgccgcggtcgcggatcgcgcaaaaaaaacgccgcgaatcgcggatcgcgcatcgcggatcgcggtcgcgtcccagccctctctccacctaaccaactttcatttggaaatcccacggtcacacggtcatctggggaccttcctttgtaagagtcgtattttccgatcctgaatgaaaattaggtatctcgaaaagttttgatttttcgaaaaaggtttaatattaccgatttcggtatgcgagtaaaatctaggggaaaagggattaggtaggtataaatgtttgacaaaactttgtcacaaattgcaaattgctgttgtgttgttttcattggataacgtttttatttgttccactattgtgttttaaccacattcccacccctcctagcattaaacctcaacgaacaaaatg

SEQ ID NO: 114902 - DNA, 301 bp, Heterodera glycines
ctttttcatgtactacttttttctcattatcttcttgcatttcctgtgtttttgcttgtttggttcgttttaatacgatggcttaaaagtcacggtcacctctcgcgcagcgaggccgagacagtaatggaagaaatgaaaaatatcccccgacaaccaccaatattttttgcggcaaaatgacgcagaggttagagaaactgctcttcagtatgacaaaatcaataatgactcatgctgacggagcattctcaaagcgactcattcttcatcgtcattcatttttacaacacaaaaaatg

SEQ ID NO: 114903 - DNA, 190 bp, Heterodera glycines
  unsure (1)..(190): unsure at all n locations
agttttaaactaacgaccaaacaaaaaagaaggttgcacaatacgccgatttatagagaaatgttaaatctcgttcagagaaaacggcaagaaaaaggatagaacaggggagtggtatagccctgggagctgtcttgatacctgtcctgagtgttttagcncaacatttattagaaaaaataacatcatg

SEQ ID NO: 114904 - DNA, 840 bp, Heterodera glycines
caaaaaagtaaaaattttcagtaaatttttttgaagtcttaagctattttcttaacaaaattgcattaaaatactcaaaattttcccggcggcgcctattggcaccgccggacctccattttaccatatttttgaaaaatggagaccaaaatggcaaaaaatagtaatttttggcgaaaaacggctaacaattttgtaaaatacaccccctaattcgggctttcaaaaaacgaaaaatacgcccctaaaaatcgactgaaaaaagaaaaatacacccctaaaaatcgaatttttcacttcagccccccccaccgaagccaagggtctgaattttcgataccattcgattgctctaagtgttttctattagcctacaatatttcaaaaaaattacattaactttaaaaattggttatggccaataatgctggtttttgagtccaacttctttgaaagtcaacagaaaaattttaaagtctaatagataacattttgggctatcgaatgatatcaaagaataaaatttgattatttttgaacaaagttataattattttcaccaaaattttccatttgatgttttttgagtaacgcccattacttttttagtaacgacccagcatcatcaatcagtattgtgataaaggattttaaatttgacgatcaacattgatcatttaaaaatttggtctaaatagttctgctctggaatcctgatctcaagtccaccattttgctcttccaaaattgattagtgtccaaacagaggtcattaagtaagtgtcaattacataattgtttaattaagtagcacataaaatttaaaatgatgtcattatg

SEQ ID NO: 114905 - DNA, 698 bp, Heterodera glycines
tgctgatcggataaagaaaataaataaatgcaacggctgtcagctgtgatttgtgctgactgaatgcttcccctgtcttttgctttgcctcttctcttccactcactctctcccctctatttctctccttcactcccctctctctcctttctctcactcccctctatgtctctcttcactcccctctctctctcctttctctctctccccctctctttttctctcttcccaccctcaaaatatgttcgtttctttctccctccctctccattctctcccattttccccgtttatttgttctttcctttttccctcttttcttactacgagttcaatagcatttctgaactgatttgatctgctgattggatctttccgttgattttgttctcttcctccaacatggtgttgatcgccagccgcaatgttttggccggggtcccggaaggcggcgcttccgcggtgatgcgctccgaagttccggcaccgcacgcggtgagtgactgttaccgtagtgcaggtgcctgttttttcgactgtcgcacgccctctctccccttctctctctacttctctctctctctttcccccttctctctctctccccttctctctctctcttgtgctctctctctctctcttgtgctctctcatacgtccgtctgatcagctcggccgttcgcgctcgcttgccgatg

SEQ ID NO: 114906 - DNA, 143 bp, Heterodera glycines
tttatgcaaatattaaaaagaaaatttggaaagtccctacggaaacgaaatcaaaaacgccgcaagggaaacgcgtaaaaaaagtaaaaaataaatatttaaaaataaaaattaataccaaaattaaggtaacaacaaaaatg

SEQ ID NO: 114907 - DNA, 849 bp, Heterodera glycines
ttaccaaaaataaataaatatttttgataaatgctaaattttaatttttgcttcgaagaatgataattaatgtcgccattattaaaagtgccgaccagacaaagccggcaataaagtgaccagtccgggcaactccttctgctccggtgaatttcacacttttcactcccaaaaaagtgaaattccaaaaaattcctaaattgattaaaacatgctaaatttggtcacaaaccattggaatatcaaagaatggtcattctgtacagctacgaacataaaagtgaattttcaaaattttgagttttcgactttttttcgaattcgggtccgggatcccgaattggttgaaatggatgccatattcgtaatcagcgaccctgaaaacccccataaacatgtttccaagacttttcagaacaaaaaaaaacccatagaaaagttagaaactacaaagaaatgttgggcaccttggcatttatgctttttcttttcttttttcttattttacctccaagaaagaacacaaagtcccaaaaagcgttggcgcccccgccgaaattgccctgctgctgttgcgaaagagcgtccgttttttcgccggcggaattcgacggaccaaccacaatttgcctcacatcttttggaaagtgaaaaggtcgaagaattaaaagcggaactgatcaaaacggacagatctgctgttcaactcattgtcagttaccagaaggattgaccggcggcggaagcggcggcgcactttcattggccattttttgctgcaattccaacagtttctggcactttcccttcgcttaccgccttttcggttggcatttcgtcgtgcgaatg

SEQ ID NO: 114908 - DNA, 190 bp, Heterodera glycines
tcatcgtattatgtcattggacaatcaattcatttgattttacgtcattttaatgctgccaattgattcattcaattgacgtttttcttcgcattttgctaatctttaaatattataggctattttcatttatattatttttattattttattttttataattttataattttatttaatttttgagatg

SEQ ID NO: 114909 - DNA, 1003 bp, Heterodera glycines
tttttctctcgttttctccgcttttccctccaaaaatcgatttccgctcccgtcgtcattgttcagtgagcctcaggcgaggaaacgactgaagggggagcagcacagtcggggatttcgtattcatcgtcgttgtcatcgtcccttgtatttcttcctcgaatgctccttatttttgttttgttcattacaataaaaataaaattgtcgcactctaattgcattaaggtcatttcctcacctttgcatcaattaaaccccattttttggttcattttccatttcccccttatatcatatttcggcataattttaattttgcattttatttttagattatattccaattttgtatattcatttcgtatatagcagcagcaacacatcccagcgtttttatggaattccctgcgtcaacttctgtcaggcgactgttttggacgtagtccgttacctttagtgttccttcaacttttcgccattttcttatgcgccagtagaaacatcatcgccgtcgcactccatttggcccgtaaagccagcacaaatagcggaataccaaatttttcgtctgatcatcgccgactcccttttccccgaaatattggaccctttaattgacaacagtcgagcatcccaaaacaaaggagcaacagttgccaataggtttatactttcaagattgattattcaaatttaattaaaatccaataattaattttccattcttattgaaatatgcatatgaaaaggaaacaaaacgaaaaaattattcgttcaaagccaaaagctgccattcagaaatcgacaacttcattgacttgagagtgcggtgggcctttggcgtgtttgctgctgtttcttctcaggcggctgcacaacaacagtccattcattcattcactgatccgtgcgcggggcagaacccaaaattgttggccaatagtgcgtcgcactaatcggcaaaacgggccgactaacgggcgtttctgtcgggccaatg

SEQ ID NO: 114910 - DNA, 342 bp, Heterodera glycines
atcaaacaatttcaattgttttatttaacgatttctgcctccattttaattttttatttcctaactattaaattttgatttgtttgaaaaaattcttccagccttataatgttttagtttcattttctatttttatccattttaagagaccatgatttcaaatcttcccgggcagggtgggattggatcttcaaaagcagacaattcctttgtccgccttttcccaaccggtcaaattgggttttcccaaaaatcaccgggcccattaaaaacctagcccgcctctctctatttttacattacaaatttattttgttttagccacaaatagctctgataatg

SEQ ID NO: 114911 - DNA, 871 bp, Heterodera glycines
gtttttagtgcacataaaagcatatttaggggttttcgagaataaatgcatatttggccatttttgcattttgagagcatatttcggtaatttttggcaaattttcataagaaaaatgcgaaaaaagcgaaaaatacacacctaaagatcgactttttggaatttttttaaatttacacccttaaaaatcggaaaaaaaattaaatttttgtcagaacttttggaaaaaaaaattatgtttttagtatatgctccgttccataattatagaaccaccattttttttttgcgttttacccacttcccatcatccgatcaagctgaagctccttagcccttgttttggtgttttaaaagtcaattcttaatttatacacaatttttggcattttttgagggttaaaagccattttggcagtttattaaggcatattttagtgcatattttatgtgcatatgtatttggcattttttagtgcatacattttgaattagcgcgcaaaaaattacgccaattacgctatttggcgaaatgagcaattttgtctaacactaggcttgacccatagtagtgaggcgccctttttaaatgaactgattgttagattcgtggtcaatcttcccgaaaacccactaaaataatttttatgacattaaattggaattttttaaactagaagctagaagcatcgtcccacttaattgtaaacaagaaaaattccttttttactttaaattttatttgaaatctcgacgttttaaaaaaatttggacatggacctcggaccgtgttggaacagaaaatgattttcctattttaggtagtctataagtgataatttatcactgttaattattatcattaacaatg

SEQ ID NO: 114912 - DNA, 592 bp, Heterodera glycines
  unsure (1)..(592): unsure at all n locations
tcccccattaatagttaaaagtagcgcacaatcagcaaattattcatttaatcactttcatatacagagattattcaattggcagaaaattagattaattctaaaaacacatgttttagtttgtttgaatttcatattatatatganagtcaagaaatgaatttaaaaatttcactgtaaaggagaggattttattttgatttttcaaaaaacattataaaaaagtcattaaaaactctctatgttttgagaattttaactggtaactttgcaaaaacacagttaaaattaaaaaagaattattttaaaactcgtgagtattttttcatattttttttgaacatggacaaattggcggatcatgaagcgtttgttgagcactgatgatgcgggcggatgtgcactttttagtcggacaagacgatgagcaagaggcgagtttttttaatacattttaattgaatttattattttacaatatttcgaaaagtttatcttttaataatttaataattatattttgaattaatttaaagcttctgccagcgcgtaaaccattttgagagttgcgtccgatgtgttcgatgcaatg

SEQ ID NO: 114913 - DNA, 858 bp, Heterodera glycines
ccagattcaaacagtagttgtacagtgtaaaaaaacggcctgtccctaaattttttcaccttttttaaaagctattttagcggtttgggcgtgtggcaaaatttttgatgaaataacactaatccgtcaataatttatatcatagacaaaaataaaagtcagattctttttctgcatgtaaaattaccctagaaaaaatgtatttatttattttactatttaaattattaaataaatttacgttaaccacaactcgagttgtggttaagattccttaagaaagattaaaccacggttagatgagcataccggttggaaataaaccacggttaacttgcgttaaccgtggttaagaagggagtaaaccacggttaactcaaccgtggtttatccttaaccacggttaaaaagggaaggacgagcataccggttaaggatttttaaccacggttaacgccgttaaccgtggtttagctctaaaccgcgagacgagcataaggcccctgggtaattcgcctgtccacctttgcatttctttctttctctgcctttgaatttttgtgtcttgcgtttgtgcacttttcttttttcttttctctgccgcacaaaaaaaaagagcaaagaaaaaaaaaatgtttttcctttgaattttcgtgggtccgaaacatgaaatgtttgatcctcccttttgtacattacatgcgcattttattgtattaatttgtttgctattgactcggcggaataaaattttcaaatgactataataataaaaaaaaacaatttttattgtattttgaaaagcaaaaatcccaaaatttaccgccatagttttcagatttttttcccactaaaatg

SEQ ID NO: 114914 - DNA, 198 bp, Heterodera glycines
ttatcgtagccaatacagtcggatttcgcattagcattataggaggaatattgcctaaattcaattattaaaaatttaattattagtttgagtaaattacctaacccaaacattggaatcattaaaatctttgccgccaaacgatactcaatgaaattttgtccagaaaatgttgtatgtataaacaaacaaaaaatg

SEQ ID NO: 114915 - DNA, 361 bp, Heterodera glycines
ccgactccagcaaatgcaacggttgctgcgaccactctatttgccgcaccatcatcatcatcaaccaatttgtcaatattggtggtggtctgtattgttttggttgcggttttgtgtatcgcacaggtgggtttcatttgattattttgtaattttgataataaatttttgtgataaaggcagtgcgtttcgcactgaaattgcgccaatggttggccaagcgtgccttcaaaaagaaaatgttgcgccgcaaccgtcaaagtatgtttggaaatttttatataaaacttaatcaaaaaaaatgtaatttctttttttttttacaggagcgagcacaattcgtcgctaccccaccgcaatg

SEQ ID NO: 114916 - DNA, 1003 bp, Heterodera glycines
attcaattttcatctcaaatttcacctagaatttgcaaaaaaaatttcccggcggcgcctatcgacaccactggatcgacattaatcctgtagaattgagtcaaaaggtgtgacatttggtcattttttggtcaaaatcagttaattaattgataaaattttcaaaaaaaatttcagacggcgcctatctgcatagacggacccctttgttcctagtttttgaaaaaattgcgctgaaaaaaagcatttttgaaaagcaaaaaatagtcaaatttattaaccattaacagatttgatttccgatctctttttaccgtctgaaccattcgaaaaatcttagtcgcctttttaatgcatcccgccagcccctaaaatttcttgtcaggtttttttttttggaaatttcattgaaatttttcaaaatttctaggaatccgcaatcctgcgcgggatcctgcaaatttaaaatgcatgattgcaggatttgcaggattaatccggccggatccggccctgcaaaaatttttgaattccaatcctgcaacaggatccgcaaatttgaaatttccgggctctagtggcttgacaccatagtggatgaaggaatcgaatactgtcccaagaagggatgggggcagggttggaacggattcagatattgaaaaaattgggcctcggaattccgaaaattcttggggcctcggaatgacatccctggtgatagagcggaaaaaggagggtgaagaatttccttctccgccggcgttgcaagggatcagacggaggagagcgaactgatcgagagaaaatggatgagatggagaagagaagggcgggaggagagaagttggacggatgggatgctcttctcttctttagctgtaatctccttggcttttataggggagagcggactgtcaagcgaaatatgcggctgatagtaatgactgcctgatagggatgtgcgagaaatgattttaccgagaaccgagaccgataaatg

SEQ ID NO: 114917 - DNA, 143 bp, Heterodera glycines
ttgcccaaaaattgtttatctcttgtttctccggtggatttgaccgcaaagtggctacctgcttttgccgtctccagcatgctctacctcacactcacacaatatttgaaatgctagctaaaagaattcttgcccaaaaaatg

SEQ ID NO: 114918 - DNA, 266 bp, Heterodera glycines
gtgtgttcacatatgacacaaatttgtaaaactattttatacaatataaaaagaatattgtaataatattatatttcattatatattgtgcaaaaatgaaaacaaattttaaatgcttaattctagtgaaagttcggcatcggcagtgcttttccatgttcgtcaaagctttaagccgcttccaaaaaatcggcgtcctgaacaggtgccaaaaagggcagcatttttaaaatgccattttactttcaattaagttgtacgctatg

SEQ ID NO: 114919 - DNA, 80 bp, Heterodera glycines
agggtcaaaatcgctttttacatcaattcctggcccagcgaatgcgcagtgaaggggttttggtgggggggcatgagatg

SEQ ID NO: 114920 - DNA, 1003 bp, Heterodera glycines
ttgggttgaatttctgttcccccgggggataatccaggggcaaacactcgaaatcagcgattggcgtgggaatgggcgccgatcagagccgattgggcaaaatgtgacgagggaatggccaaaaaaggcacagtaacagcttaattttaatgtttacaggcaacgtttatttgttgtattttgtgtaactgttaaaacacagaattattattaattaaactccaaaatatggcaatttataaaatgccaaaattggcggcttacaccgaattttggtgtcaattaaaatcacacagattaataaatgtttgtttaaatgatgacattctgtgacattcgtagtccaaccgatctgctgatcagctgctgatcgttgttttgatcacattttgtcgcctctgtccgaatttttttttatttacccaatttgcgaacaattaattaattaattattaacgagtaaattttaaacaaataccacacgcatgtgttttcatacaataaaattatttaaaaaatggcgacgaaacttgaaatattcgacataataatctttgtttgatttgtttaacttttatttatttttacaattcatttttaaaagtaattttgactatttgttttgctaattaatagtcaaaaaatgaattggcttttcaaaaataaattaatagttttaaatttaaattttcttcattcgatttcatttttataaattcataatgtgtcaaatttatccagttaatttatcagttaattcttttctcatcacagatgtgcaaatagacacttttttaattgatgattttattaatcggtaccaaacttaattaatgaattgtccgtttttccttctccgtcacttttttgctgctgactttccccaattttcgcctttcctttcctatggtttcatctccgtttcttcctcaggcactttcattttttctttgccttttgtccttttccaatgctcaaaactccttaatgggttacggttatg

SEQ ID NO: 114921 - DNA, 282 bp, Heterodera glycines
tctaattcaaaattaaagaaaatgtttcatttagaaatggcggaaacatctcactttggtggagaaggattagaaacgctgctgaatacagtggaagcaataaaagaaaaaactcaggaatttttttaattttagaaaaataaaattttgaaaaaaattttaggagtccgacagtgactacgaatcagcaaacgaaaacagtagcattgtttgcaaaatgttgacatttttaatttacttttaaacattcagattcgagtgaaccgtcattagcggatgatg

SEQ ID NO: 114922 - DNA, 361 bp, Heterodera glycines
ttttggtttaaaggggtcagttaatcgatggcatagcaggggggagggggtcttcacagtggcaaataggaaacggggcggcgtcgcattcctattgcttcccatttttacataaattgttcacaataaaaagcataataatttttgttttaaataattctttttcttttttagctcaaaagcttcccagctcgttcacaattttttattgatggcggacaaaaatttgtcagcaattgatggtaattttttctttacattttcaatggtctataatttttttgttttctcacaagggtgtctgcgcattgacaccaattcgccaaatggagaagtgtccgcaccaccgctaccaacgatg

SEQ ID NO: 114923 - DNA, 510 bp, Heterodera glycines
tcgtcgaaacgtccagccaccgaacaaattttcggtcatcatcataacccgataaaaaccggtcaaaaaatcgccgggttccgggccggattgcattttcaaaaacgccgggttccgggcccggcctctcaaaacccggtcaacccggattttccctaaaatcgccgggcccggtaaaacgcggtagggcttggcgcggctcagtcttagaaaaaacccgtttttaggggtaaatttaaaaaatatatatataaaatttttcttatgaaattttttataaattctcaaaaattcccaaaatatgcaaaaaaaaataaaaagaaaaaattgcaaaatacgtactaaaaattccaaaatatgtacatatgtaatatgtaaaaaaatcccgaaatatgtatataagaaattttttacgaatttacccagattttcgcattttttcgcccgcaaaaattttgtgtttaatgacttttttctgacataaagtgaatagaaaatgtttataggatg

SEQ ID NO: 114924 - DNA, 60 bp, Heterodera glycines
tgtacggcattggcacaattggccactctctaattgctttggcatttctcgcaggacatg

SEQ ID NO: 114925 - DNA, 57 bp, Heterodera glycines
gccgcaaatcgtgcatgataacgagtgcaatatggcaaacaaaagttgcaaaccatg

SEQ ID NO: 114926 - DNA, 380 bp, Heterodera glycines
gttcggggttcggaattgatcgaaatgcttgccggattcgtgatgagcgaccccgaaaaccccccgaaacatgttttcatgatttttgaaattaaaaaagaaaattcgaaaaatgttcgaattcgggttcgggattggaaataggacgaaatggaggtcggattcgtgctcagcgcctcaaaacacccctagaaacattttataagaattttcagaaaaaatttaaaaaaaaaattttcgggaccaatgatcgacatgattgccggcttggtctaggcctatgcttcagcttaggcttaatattttgaattttgtccgtgttcgggattttgaattcccaccctgctttttagacttagctcaacaagagctttaaaatg

SEQ ID NO: 114927 - DNA, 385 bp, Heterodera glycines
tttttaattcaaatttgagtctccacattctgacggggatatttctaccccccccccccctcgtccgtcataagggggcggcagtaaaagaggtggggtgtgggcaccgacgaagggggaaaaggaaaaatcttaaaatttgaacaaattttctaaaccaaattcattaaagtcgcaaacttcacccggcggcgcctaaaatcactatttcttctttttttaattggttcaaaaatcataaaatttggtgcgaaaagcaaaaaaaaaggtcgccgctgggaaaattttggaccttcgtgtcgaaatttggccctggcgcaccccttgcgcgtatattattgcattcgggagctattttataagtagtattaatggtcagataatg

SEQ ID NO: 114928 - DNA, 118 bp, Heterodera glycines
ttctcttaaatttttttgaacccaattcaaaaaaggaaaaaaatttgcagtcaaaaaattattcgaatttctccaattttgtttccataatttccgaaagttattcggtatcataatg

SEQ ID NO: 114929 - DNA, 527 bp, Heterodera glycines
gatttgcgaatttcttgttcctttatttgttagagatatggtgaaaataacatgccaaaggaagagaaaaagaaaaatgtatattttctaatccgaaaacactaaaattttgttaccgtattcttcgattattagacaaaggtcttctatttccaacccctcgcaaaggggtcttataatcgaaaaaatatagtaattttcctgttttattgctatgcaaagtgaatttaacatataaaaaaagtaaatactatttttctataaaaaatgaagtgatagtacgccaaaatgaaaaaaatgcaagaaaaagagaaacaacgaaatagtacaaggtttttctcacagtggagttgaccaatagcccataatgtattcgccatttgcctccattcattagggaggtgcgagatctaggttttttggtctagcttctcaggaacatttgcttattaaaaaactattatctttcatttcctgtcattgagtaatcaattcttatttattttataagaagaaaactgaaaatg

SEQ ID NO: 114930 - DNA, 104 bp, Heterodera glycines
atttaagttaattggtttaaaagattaaatatcaaaaaaataaaataatttacataaaaattatttgtcctttcttgattagcttatatttcaatgttaagatg

SEQ ID NO: 114931 - DNA, 169 bp, Heterodera glycines
agtgcgccatcggcttcttttttccttctcataattccctttttagtctctatttcggtgaaagactgggcgtaaaatgtggcgaagtgtacgacgaaaggggcgccacttttgagccgaaacagcccatgctgcagttgaacagaagcgacggaccaacgggagaatg

SEQ ID NO: 114932 - DNA, 91 bp, Heterodera glycines
aattttggaatttggcttttcgctgccatcgacatctgtcacaccaatcggcgatttggtgctgttttcgacaacaccaactgcgccaatg

SEQ ID NO: 114933 - DNA, 269 bp, Heterodera glycines
ttatctttttagaaaatataaaatattttttcttcgatcagatgttagtctcctgatcaagctaccaaatgaatttgattactgatcagtcagggggtagaccaaattgttggccaatttgggcaaaagttttatatgtctcattaattaattggtctcccaaagggtcctcctcatcctcctcactgcctgtggactttgcccaaattgtgatggcccccaatgggcgaaatgacgagaaatttgtgggacgacaatgggaagcaatg

SEQ ID NO: 114934 - DNA, 416 bp, Heterodera glycines
tttggcgcgtaaaatgtaaatatggctattttaaaatcttttttaattttaattttaaattttaaaaattttctaccagtttcgaattttttcaacagtttttcttaacgctgtattttctacaacattttatttataaaagtacaaaaaatttttgtatttacgaatattaacgttaaaaagaagattgttccgaccaaaaacgagttattgtggatattctcacaaaaatgaaaactgttaaaatattcaaataaatataagccctagtcataatgataaatacgatcaattttagtattgttcaaaataataacggctccctaaaaattcacggttttgacgaatcgacaaatgacagcgtcaacattgcggatattttccctgttgtgcctatcgcaaaacacacaaggatg

SEQ ID NO: 114935 - DNA, 1003 bp, Heterodera glycines
ataatttgtaatctcaccaatgaaaaataattaattacatggagcaatttgtgactgaccctccaaatttcttacgccacaaaaaatcagaaatatctatataggtatgtatgtgtttggaaaaagttatttgtatgtgtcaaattttgcttaattcccggtcctccggggtactggtcccggtttttgaaaagcctaggtctcggtcccggacgaaaatcgaggtcctcaggtcccggtcccggttttgccaaaaaaaaaattccaggtcccgtgacaccctactagtttaaacttctgctacatacgtctattcaattgtatgttggccagttggaccttgaaattctcaaaaaagtgaaaaaaaataaaaattttgaccaaaaaggggtgaatttaatttaacatacaattaaatacatatatagtacctttttttttagcttttttatacaaattaattatgacagcaaattttttttttgtgaaatttatctgaacaaataataaaaatgtacacataaaatagtgtaattattctaattttggatccattttattcgctgtgctttccttcctttccctttttaattagtatatctaaatggttaacaaaaatagacaagccttccttcatttcaatggatacaaagatgcttatcgatgtggacaaacaattcaaacacaaagcgcttttaaagttggatgaatctttccgcaaatacaaacataaaactaaccgatttattttttgataaaatactatcattatttaaaaaaatatttgaattaattttcattcaattaagaaaagtctttgttaattaatttaatttaaaattaattattaaaaaatttttttaaaaatttgaattaatttgggctaataggtaaattaattttccctttttgcatgtttaggcttttaaaaaaaatatattaaatttctacgacaacataagccgttaaacttgggcaatttgacaaggcaacaaataaaatg

SEQ ID NO: 114936 - DNA, 290 bp, Heterodera glycines
aacagttacagtaaatttaaattatttatctttttaaatttatttgcctccattttttcatacatttatttttttttgtttaccgcataaaatcatttactcattgttagtctcatttaaaactaaaagatttctttttaaaaatttgtcattagaaatttgcaaaatatttttaaaaatttaaactttcatatttggagttaattaatcttctctttttttgtgtttttgacaagcgccgcccggaaatctttttttttgcaattttcagcaacaccgctcggaaaatg

SEQ ID NO: 114937 - DNA, 137 bp, Heterodera glycines
ttttcgatcgctgtgttaagaatcaaagaatcaataattttaaatcaattttgttctcctttttatgtctctgaactttttgtgtgtacaaataaatgttcaatattcggcatttttgttctaggtgaattgaaatg

SEQ ID NO: 114938 - DNA, 125 bp, Heterodera glycines
attgtacttgtggactggtttgatattcgtgagcaaaaacgacttatggtattgcgagcttcatctgcagaacgcggtcgttatgctactctatatgagaaagtgttaccaatttcagagcaatg

SEQ ID NO: 114939 - DNA, 526 bp, Heterodera glycines
gtatttttcattttcttgtatttttattgcaatttttctcaaaaatgccaaaatatgtgcaaaatatgtgccaaaccccaaaatatgtgctaacatattttatgtgccaaaacgccaaaatatgtgtttttatgtttttataagtcgctctaaaccaaaaattgttcggagaaaatgctatttttgggcttctctcgccataactaagccgcaaaaaaaatatgttaaaacataaaaatcctagccctaataatttgtgatattcactttgttcgaaaaatgagtggataaattttttactattattaaataaagagaataaaatggacttgagtgtaacggagaacctgggaacaaaaaaacacagattatcacacttttggcaaatgcagaaacacaaaaataattaaacataattttaccagcttctatggaaacagtttcgaaaattttgatttttaaaaatcgtgaaaacatatttaaggggttttctaattaaattcttttttttcgaccgaataaaatg

SEQ ID NO: 114940 - DNA, 505 bp, Heterodera glycines
cttttttcatgcctttttcgcgattttcgtgccttttcatgcctttttttcaatttttgggtgcctattatagtgcctgtttcacgatttttggtgcctttttatccgagctctagtgatcagtccaatttaatttaaatatttctaaattttttgaaattagaataatttgtaaaatcaaaaatttttttaccaagaaaaaaagtttaggggattaattttgagaaattcttttttaatttatttttgaaatttccggtctattcttacaaattagaggcgtatttttcatttttattgcatttgttaaggaatttttcgaaaataaaaataaacgctaaaaatggcgaaacaaacataaaattggcgaaatgaattaggtaagcacaaaagtccaaaagctttttttaatactttaacaaaatttaattcatttcgttttcggcctaaaccacaaaactaattaacattaagctggaagcaaacaaaggaatttaaataaatg

SEQ ID NO: 114941 - DNA, 535 bp, Heterodera glycines
ttgcgacgcgccacggcccacggaagggcaactccctgcaacttctgattgtcagtattgggtgtgctcaaggtgaacaaaaccattaataacaatgacaaaagccatgggaaatctcggaaatgctttttagctcaatgtaacataaatattctaaattgcactgtgttccccttggcccagtggttagtccctttgttttgtctgtctcggttcgacttgcccccacttcccaatttgtctttgtttcccgtttctatggcatttgatgctttcaacttagttgtagctcaactgtgccggtacttcacgggtaaattgtgatttattcggactgagtgcagaatataatgccggagtatattcctctgaggtgttgaactgttagaaatattcgtttgacatggcatttagtgtacatttttatattttttgggattttccctttcgtgattaagctaattatattaccctgccccttcctttttagctgtttgtggcgtaactttcccacccatttgtcgtgccaaaaatg

SEQ ID NO: 114942 - DNA, 1003 bp, Heterodera glycines
ataaaatcaaaaaaggaatatcttatcaagggtgacgcggcggtagcattagagtacgcgaaaatcagacaatggtaaagattattttaaaaataaattttgagaaaattgtatattttcaggaaaattccgaggcgcaacaatatgagtaaaaacggtactagtgcagttggtacgtcataaagaaaagttttaaactcgtataaaaataccgggggtttttttcgggggagaggggcgcgtgtttataaaatcacacaccctccattccagactaaattcagaagctccgcggacatcaaattaacacagtgtaaaagtcaaaaattctcaaaaaacttttaccaaataaatatgatcaacaatatgtcaaaaattagagcaattaattttcgcatggacaattttttacgtcgatttgattatctaaaaaagttaaagcacagctattccactgaaatggaccaattaaataatcattgacaaatcacaggatgaaattattgatacaagccatagatttgtcagttacgacgtcagattcttgatagaaagtgcatccattgttgggaaaatcatgacaattttacgaggggtagaaaacccgaaaatttcaataaaatagcaaactttaggaattaaaaaattcaacgggagatcgacaaaaaaatttaataacatatgccaatatttttttccttaacatcatgccaatatatttttttcaaacttaaagtgacaaaaattaagaatttttgactgcatcatataccggtaaaaaaaccggtcaaaagttcgccggacaggtttggcattttcaaaacgattgttttccggttcggcctcacaaagccagtcagatatgttctaattttttatttttgatcaaattttattgaatgttttacatttttctttattaaatattatttaaaaatttcgcgattttgtaaataaatccccacctattcatctccaaattttcagatttttcaataagatg

SEQ ID NO: 114943 - DNA, 1003 bp, Heterodera glycines
cctgcaaaatttggagagattatatcgattttagtgcgctaggttcgatgaaacttttaaaatatacgcctaaactttttggcctgtttaaaaaggaattaaaaatttttaaaaattttattcatctcccttttgatagaaaaagcatcagagtgccttaattaattttttttaaataaaaaaatttgactagaccaatcgaaagctaacggtcgacctaatggaaaaaaatccccgaaggagagaatttaattaattccattccttcgggggtccgtgccgggtgccgcggggtaagcagtgctggtttcgtttcatcacggcccccatccttttgactagtcagccagcgttgcttaacttgtcagatcggacgggtacgcatgattccaattttccaagcaccccaccgaaagtagaacgaaataaccaaaatataaggaaaatattttaaaaagatgttattcatctcccttttgatagaaaaagcatcagagagccttatttaacttttaattaacatttggtgcgtttcagagcacgttctaaaaaatatttatgaattaattttgcaaaataataaataattaatgaaaaagtcagaatttcgaaaaattttaaaaacaacaagcgttggcattttttcaggttaagttagtcctttacaatggagaaggcctgcaaaatttggagagattatatcgattttagtgcgctaagttcgatgaaactttttaaaatataagcctaaactttttggcttatttaaaaagcaattaaaattttttaaaaattttattcatctcccttttgatagaaaaagcatcagagagccttatttaacttttaattaacatttggtgcgtttcagagcacgttctaaaaaatatttatgaattaattttgcaaaataataaataattaatgaaaaagtcagaatttcgaaaaattttaaaaacaacaagcgttggcatttttcaggttaagttagtcctttacaatg

SEQ ID NO: 114944 - DNA, 65 bp, Heterodera glycines
atttgtcgcttctaatttgtctgttcaaattcatcctttgggatccaattggtgccgagaagatg

SEQ ID NO: 114945 - DNA, 279 bp, Heterodera glycines
  unsure (1)..(279): unsure at all n locations
cgaaatnttgatttccaatattgaaatatantgaccactatgtctctaatatttggagaatattctagatttcagatacgaaatttgtagaattgttaaaattctaaaaattgaatcttaacctttttggtccatgatccgaatgatcaaatatttgaggaattccccaaattggatcgggtccgtgcagtatttttagattgcgtaaatttaaaaataaaaatttgtttaaaaaatccaaaatttttcctttttaagggatgtgtgatagtgaaaatg

SEQ ID NO: 114946 - DNA, 127 bp, Heterodera glycines
ttgtgtttgggtgaacggagaagaagaatattaagttatgttttagttaaatggcctaaaaatgaaaatttaactaaaaaatgaatgctaaaataagaataaataaataaatgtttagattaccatg

SEQ ID NO: 114947 - DNA, 455 bp, Heterodera glycines
tgtggtgctttcggttcctctaaaaaaattcattgttttcgcgaaattcaatgggttttctggcttttcctaatttcttttattgttccttttaaattaaaccatttttattttccttaaatttttttagagttaaactataaattatttattttttgtagagtgccacgggactgggaatttttggcaaaatcgggaccaggacttgccgggacctgagaagccgggaccgggacggggacctcgattttcgtccgggaccgggaaccgggaccaacagggaatttttaaaaaaattcaaaaaaattttaaaaaattcaaattttaatttatttcaagtgaaaataatacaaatttgttaacagattttcaacaaaaaaggctggattttgggattactaggctcaatttgtacggattttcatttaaaaaatgataaaatatcaaccgaaatg

SEQ ID NO: 114948 - DNA, 167 bp, Heterodera glycines
ggtcgatcaatgcgcagtgaaaaaatgttcatttgtccctttccccatttattttcaataaattcccttaaaatttggttgccctggcaacaaaaatgatcaattaaaaaacccaaaaaagcggcacatttcgagaaaattttatccttcgcgcagctgacaaaatg

SEQ ID NO: 114949 - DNA, 304 bp, Heterodera glycines
actttgatgttgtcatatgacaaaactgatagcgtatttttcgctcattatcagcacctttgacaactcatgagtgaaataaaaaatcgtttaaatcgggcattttatattatctctaccattaccccacaaaaataaataatacgtaaaaaattaacacccccgcctttcacagaaattggacaccgtccgttctctccgtttacgcgcgttggagcgcggtcgggaggccgaattgagtgcagcgcggctgaatttgcatgagttagagacgacggtggtgcggcagcaatgcgaaaaaatg

SEQ ID NO: 114950 - DNA, 659 bp, Heterodera glycines
agcgacgacggcacttttgctgcttatcgaatattttgaatctctgctgatggatggatttgataattaatgttcttttttttctttaaaatgattaaacttttgtcgattttttctttcgatttgacggatttttattcgaaaattcaccttaaatttatttaaaaaaaaatattatttggtcggattaaacagtaatttgcatctgttgtatatttttacatgcacaatttgacttagttttttttgattatctacagcaaatttcattgggttcttttgtgacatcatttgatgaacagcaaagaagaaaatgattaatcgaattttgataaaaattcataataattttatttgttaagcgaatttaactgaattttcaatggcatcgcccgccaaaaaaaagaaaaaattttcttccgccgaccatttcttaatttcttcaattagtgaaaatcagcagcaatcattgtcgggttcatcatttgagacagcatttggagaagaacagaagcagaaaatggaaaagcgaattttgaagaggaaaatgtgagaaaaaatattattaaatttaaagttaatttaacacagtgttatggccataacatacatcacaacatgggaaaagcggataaaattctaacgtattaaaaaacatg

SEQ ID NO: 114951 - DNA, 1003 bp, Heterodera glycines
ttcgtttttgatttttatttcttattttagcgggatttatttatttattattttttgattataattttaaattattgagtaacttttgttctcgttcgtatatcataataatttaaaaaattacttattccattaactcgcttaatgggaatatctgaatttatatgaaaattatttggtaatttttgcgcaaaattagcttgcccaattttgattttgtaaaagaatgaaaatttcaatttttttgtactattgttgagattttcattacaaaaatggcgcttgaattttgcgtttcctcctgtttttataacatatataaattttatatgtttgttgcttattttattgttttatatatgtatttattttaaattttccaccacattttcacatttggattaaatttaaataattatttttatttatcatatctaattatgtattttattgaatttgaattataaaacgcatgaaatttaagaataattaaattttaaaaataaaagaattggtgactgttcagcaaaaataattagattttaattagagatcggatacggacgggatccgtacacggatttttacggatccgtagtccgtaatccgtattttaaaaattcaaattttaattttttttttaaagtaaaaataatatataaaaggaatcttaaccacaactcgagttgtggttaacgtaaatttatttaataatttaaatagtaaaataataaataaattttttctagggtaattttacatgcagaaaaagaatctgacttttatttttgtctatgatataaattattgacggattagtgttatttcatcaaaaaaatttgcacacgcccaaaccgctaaaatagctttttaaaaaatctatgctaatattgataatacaaacaaaaaataattattataataatttaattatattttttttaatattaattatttttcaatttcacgataaattctcttaaccacggttgagttaaccatg

SEQ ID NO: 114952 - DNA, 1003 bp, Heterodera glycines
gagactgggagattatttttcgttgatttatttagtggaaaatttttgaaatttattttaaacatgtcgccaaaaaatgtcatcgcgtcaaaaaaaaaacatttttattgcatttatgttaaagaacttctgaaaatgactccaaaatgacaaaaatctatcattttcttgcttccggtatgcataaaaattggaatttttaatggtgaaagatggacgaaacgatcacgaagaagcctttttttattttttttaatattaattttaattttaaaagtttttagttttttttggcttttctgatgattagtgtcgctacttttagtgatttaacgaatttttttgctcaattgttatgaagaaaggagctcaaaaaacgtattttttcgttgaaatttttcgattctgatgtcactatcgggcactagaaatcactacctattttggcgcttcgtactaaaatagtgaaaatttactatttcgacatttttaggaaaattccttaacaaaaatgcaataaaaccaaaaaaatacacccctaagaaacgacctaaacattttttcaaaaataccactaagaattggaaaattttcttaaaaattcttcccacaatttttttttcttgacaaattttgattaaaaatgttcagtattttgataagggaatagttcaaaggaaaagtacctcatttgcaactccaattagtgaataaaattattttggcttaatttttgactgaaaattaggtcactattcgtcactatttcggactttttgccactattttggaatttttactcactattttagttaactatttcgagattttccgtcactaaaagtagcgaccctactctaatgatgatgcagggctggatggagtcggagatgacaacgaattgttcatttattagccccttttactgttgaatgattttttttggaaaatgtgccaaataaattattaaaaaattctatttatcccccctggcacataaatg

SEQ ID NO: 114953 - DNA, 189 bp, Heterodera glycines
  unsure (1)..(189): unsure at all n locations
tattttgcgcgttggcaaacaaaaaaaaagcggcaaaaaaaaaattnaattaatttaaaaaagctctattaaagagcatcaaattaattttctcattcaattctatgattttattaccaatttaaataaatttttattaaatctaaatattttatttcgaaaaaaaaattcttcataataataaaaatg

SEQ ID NO: 114954 - DNA, 107 bp, Heterodera glycines
ttttttatccgcttttattaattggcactcatcaacaggcaattaaaaagactaaaaggtgtccggacaatgagatctaattaggcaaaaggggcggggcgtaaatg

SEQ ID NO: 114955 - DNA, 173 bp, Heterodera glycines
ggccaccgtttattgctttttcggtcattgttttttgattgtccatgcaataaagcagattataggctgactgttggcatgtatttttctacggatttgacttaatcaatttgtattccgtttttatttatttttaaaaatttaattttaaatttacttttgaagccaaaatg

SEQ ID NO: 114956 - DNA, 257 bp, Heterodera glycines
aagccaatatcaaatcgacacacaaaaccatgaatgaacgaatgtatgatgaataatattaagtaaaaattcaattcagtaaataataaagcatgagaaaggtcagagaattgctggacggtcaaacagaaagagggggaggagagaacgggggggggggggttaattatctcataattcagtgctgtacgatttttatttaaatattttttttataaataattttaaaaaaaactttttagattttttaaaaaatg

SEQ ID NO: 114957 - DNA, 155 bp, Heterodera glycines
tctttgttctccctcatttcccccgccccctcccctttttggcgaacgtcactttttcattttaaatattccttaaacttcgctcgcctttcccctcattcaacgggccattcgaccgtgaagtgttcttcatttctccaaactgttcacaaatg

SEQ ID NO: 114958 - DNA, 464 bp, Heterodera glycines
cccacggtcacaattcacggggtcaattcacggtttttcgtgaaaaatttacactggataaaattgaaaatttacgaattacatattgttttcatagagaaatttggtcattttttgggcaaagttgctaagaaacagagcaaaattttcaataatttccccggcggcgcctatcctatcggcaccgccggctccctcccctattcctgaaacttttttgaacaaagccaactacctatattgtgcgaaaaacaaataaaaagcaaggtttcaaggatgatcccatttaaataaaaactcattaaatttcttttaaaaaatcgctcgaaataaagttaatgtctcacaaaagcattttaaaaaggttggaatcgatttagaacgcaaaatgatgagaaaaatgcaaattataggcgcgcgtgccaatgcacacttcagtacccgattttttttactgaaaaatg

SEQ ID NO: 114959 - DNA, 78 bp, Heterodera glycines
taatttttgccatgaaaaccgagtcatgtacaatttctgctgaaggtgctgcgcgattgggaccgattggaattgatg

SEQ ID NO: 114960 - DNA, 334 bp, Heterodera glycines
  unsure (1)..(334): unsure at all n locations
cacttagaggtnatttggtgaagattcggtgatcgcttttgatgaatgggctgagtggtttactgattatgttggagctgtaggacgaaattggaatgaggatgagaaagttgctcgatttaaaatgtcattaattgggacaccaagacaactttttaaacaattaatccaagcggaggcagctgcccttaactcagcgattactgggattaggcaaaaattggactcaccccaaagacgggaacttactaaaaggacattggcactttgcaaacagagagaaaacgaaactgtttcagaattccttaagcgccttaccccgcttgttgaaatg

SEQ ID NO: 114961 - DNA, 389 bp, Heterodera glycines
  unsure (1)..(389): unsure at all n locations
aactgatgacaagctaatgtgatcttcctgggtaattcttttcntttnagtatnnntgnaaagttctttgaggttntgatnagnttntgaaaaaaaagttaagnntaaantttttggnntgtttaaaaaggaattaaaaatttttaaaaattttattnatntnnnttttngatagaaaaagnatnagagtggntaaantaanatgtaaataaaatttggtgngtttnagagnattttntgaaaaaatatttatgaaataaaaaaatngattttttnaagtgtttgtttggggtattnaaaaaattatggggagaaaaaatgaaatggagaattaaagtagaggatatagggaagatatttttttttttttaggaatttggataaatatg

SEQ ID NO: 114962 - DNA, 129 bp, Heterodera glycines
ttttattgatccctacagtgggatttcaaaatatgaaaaacatgtacagtatttttgcactacggtattttattgcttttcttttcacagatcaaccactgtccgtacgcgtttttctgccgcgaaatg

SEQ ID NO: 114963 - DNA, 221 bp, Heterodera glycines
cctgaattttggtgtgattgaggggggaggggagcagttcacgcggtacaaccatttccccaattgagaaagttttcaaaaaaattaatacaataattataaagataaaaagtgaaaaaaaagtatttgaatattaagtcaaatggattgggctttccttttgagacaaacggtgaaaatttattatggtccaataaaaattcaaattttcggcctaaatg

SEQ ID NO: 114964 - DNA, 109 bp, Heterodera glycines
aaaaaatgatagatttgcatttttttattatgtacctggaaaaaacagtccattaaaatattataaaaattaatttaattttttttcagtcactttctcactacaaatg

SEQ ID NO: 114965 - DNA, 277 bp, Heterodera glycines
tttattttcagatgtcaattttggcacaaaagttaaccgaattgcaggaggagaaaatgatgatcagtgaagaaaagtcacggtccgcagaatgttcttttaatttgattctaaattcccatttcattgcttaggctgaggacagacaacgccgttttgcaggagagagtccatttgcttgaggagcatttgcatgccaccgaacaaaggcaagatattctcacatttcgtaatgttttttcaaccgatttctttgtttcaggtgggcagaaaaatg

SEQ ID NO: 114966 - DNA, 63 bp, Heterodera glycines
ttggcaccatcactcgatttaggtgcagcaaaacaaattctgttggttttccccaacctcatg

SEQ ID NO: 114967 - DNA, 75 bp, Heterodera glycines
tcatccaagtgggcacggattagagaatgaatagacaaatgatttgacaattgaaaggcacccatcggaaaaatg

SEQ ID NO: 114968 - DNA, 80 bp, Heterodera glycines
aacagaatatattttttaaagcaaaaaacatctcataggctcccaacataacagcaattgccggccgttcccacattatg

SEQ ID NO: 114969 - DNA, 60 bp, Heterodera glycines
ttatttcgcttcttctttgtgttttttgtgattttcgacagtaaattgaattcgacaatg

SEQ ID NO: 114970 - DNA, 92 bp, Heterodera glycines
atggacctaaaaaggttcgcgaaaatttgctcgattttgttaatgaaaatgctgcaacgaatattttaaacaaattgaacacttttgaaatg

SEQ ID NO: 114971 - DNA, 562 bp, Heterodera glycines
atttggactttcctctccgtgcgttttgcttggattatttaagtgattagtgcgtctttcttctcaagattacacatttacgcttaaaaatgctcgccaatggtccgttttgaccaataaaatcaccgtcgactaccaaaaagtgctcgtcgctcagccttttatcaccgaaactttcgcccattcgctcactccgtggaaagttttggacggaaaagtgcggagaattctctgcttgggtcttcgaggttcagcagtgaacagtttcttcgccaccttatcaacaaaagtcagctcattttacgctttttgttctctcttaccgtattagaacaattcatacagtatgaggttactgtagtcgaaccaaaccctgcgctgcattacatagccaagaaatggttcgcctttgaggagacggaacaccaccgcattcttgtggaaaacccggcgttttacctgacggcacgatcaagattaattgagcacccaaaaatgggtaggcacaaagatactgtaattttgtacttttttctactaactgaatttttccggtgaaatg

SEQ ID NO: 114972 - DNA, 67 bp, Heterodera glycines
ttccccgatgcgattggtgatgatttggtggaccaaatgcaactgttggccaagcgttgtccaaatg

SEQ ID NO: 114973 - DNA, 1003 bp, Heterodera glycines
ttttgcagagagatagtgcaaatttctattatttttttctttttcttttcattttattttttaaattttatttatgttaacaaaatttttttttagttggatttaaaatgttttcatattttaattcctaatcttggacggtttgtctgttaggtattagtccaatttttaatgaaggcaaataatcaaaaatataattattgttttaatcacttaaacaatttaaaaattatgttttgtatagaattcaaatgctttattaatatttcttaacaaaaaaaaattagtttaaatttggataattaaaaaattaatcaattattagtgatgtcaaaataaaaaaatgattaattcaaatattagtcatgtcggaccatatcagacgattggattgctgataataataataagtcaatttgttatttgcaatatatttttctaatacttttattttttaaatgactcatctttgaccattcattatcttttttatcttttctatttaatgggagtgcaaaatacataaaagtccccctgacaaatgtttattttatgcattgtgaatgtgggaagaaaattaatcggccgatgcctgctgctgctcatcgtgatgataaacaattaatccgcgatattcggccgaaaacagagagattttgtgtattaatttatttgtttataaagcaagcatcaatttcatcgtttaataattaattattttctcgttaaaatcagaattattatttctaaattttaagccaacaaatgcgtatttatatttgagtatttagtgtaaataacataattagcacctaattaaggctattaagcagttattattgaattatattttaaaatgagttctaattattatgttgttaaataaatattatattttttcattaaatttctttctaataagaacgtttaaaattaaaaagtgaatctgaaaataaaatttggacttttttataaattatttaaataaaattattttagaatg

SEQ ID NO: 114974 - DNA, 1003 bp, Heterodera glycines
aatttttcaaaaaaatcattttttcgtcgaattttctcgagaatattgaataaatttaaattttctcaaaaatgcaagatgcccatgaggatagcatccatacaaattttcgaagttcacataaatattcttaatgagtttaaataatctttctgtttagatgattttaagatcactttatgtatttgaatttggttcgacccaaaaactcgaaatttgaaaaatttaaattttcgaatttttgttcgagtaatgtgtttaaaagttgaaccaatgactttagttggacaaaaatttttttaaagtttcagggggttttaggggtcactggtcacgagtccggtagccatttcgaccaatttcggacccagaaccggattcgaacaatttttgattttgcatatgctttatatatattatatatcaatcgattcctctaattgtcagttagaagttaaattcatgatttgtgaacagacaaatttttttttggacgacaacgtctcaacagacagacgaacccaaatgaaggcagcgaaccaaaaatggaagtgtgttgaaactacaaaatattcagccttttatacccttttgagactcataaagctatttttgcaaatttgtagtttttgcgggaaatgtatgtataaaagggcgtgcgtttttccttttgctgtcatttctcatccccattgtcttcctttccctctattttgcgctgcatattcatcgtcaaattgtgctgccgacattttctttgactcccaatggtgcatttttttgttcattttgtctgtgtattgtttttgtttgtttttcaattcgttttccccaattaattaagtctgatgatgttgctcttcccgctccttccggtgccgtcgatgactttgcgcagcgcatcagccaattcttcgacttcatccacggcggaaacatcgaccgattgcgtgcgctgatcgactcgctgagcgccgatgagctgaacaccttgctgcagatg

SEQ ID NO: 114975 - DNA, 369 bp, Heterodera glycines
aatttgattggttgtacatttttaaattaccgttgtttaagctgcgcaacggatgcccatggttcaacccgcgaatggcaccacatcaattatattcgcaaccacaacaaatgcacagccaatgccgcaacagtcgacccaaaatgtccattttcagtcagtgatttttcaattttccatgctttttcccagaatattcacgcatttttaaaagctttaatagccaacttcgtcagaaatgcatttggaatggaaaaattttttgatttccttttaaattttccgtttacccaccccccccccccccgcttcagacgcatccccagccaaagttcattcgtcacccattcgtcctcccccactccgatg

SEQ ID NO: 114976 - DNA, 392 bp, Heterodera glycines
acacaaagtgacgcccggggaaggggtggggtttgaccatcatttttaaaaatcttgccaaaaatactaaaataaatccgtctgttttttccatttgtgcctttcctctcatttcctccgcttcagtgagccccgaagtgttgcgcgcccgtcagttggcctttcggcggacgaatacggacaccggcggcggtgccatcgcttcggcgttggtccgactgaaagcactgaacgaaaggacaccgcaaaaagcagaagcgagcagcagcagaaacaatatttgcgaacggccgacgcgcaatttcaattttccgctcgcccgcgtcttaccgcagccgaggaaaacgaatgcaaacagagaaagggagggggaagagacagcactgacaatg

SEQ ID NO: 114977 - DNA, 891 bp, Heterodera glycines
aattaattaatcaattaattaatcgattgattgattgatgcgattatgtgaccgaaaatgatgtgatgttacattgtgttattgttattacttaattaccgtatatgctctaattatagcccagtctctattaatcccccattctctaattatccccccttttctgaggaggttgaaaaataatcccccatgggctataattagagcatatacggtatgttattgtttggatgtgtttgacctttgcttgctcaccgcaaattcgtccatttcctttgtattttatttatatgtaattacataactcattaattgtgattaatcgttgataaaattgctgatgataaaatgtgacgcaacacaataaatgccatggcacaacaattttagccaaaattttgaaaaaatcaagtccttgacgaaaaataaaagcaaaaaattgtttgaaatcgggtttgggattcgaaataggtcgaatgtatgttcggcacacatccgaccaatttcagtcgtaaacaggcactcacgcgaaaacgtaccccacgcgaaaacgtcctggcccccaaaaccgggaccttggtactcagttgtgcgctaccaggtcccggtcccgtggcactctattttttaccatagaaaaagtgattttgtaagaaatttttatttatttattttttcgggcggaacaccaattccgaaagattaccaacaaaaagatacaaaaacttcatcaattccttttcatgactataaaaatgtttgttttttcgcttttcctcgcatttgaaaaaaaataaattttctaacgcaataattctgcaattattcttccctctgtgacgacgacatcattcggagctcggccaaaattgtgttaattgccaaaaaatg

SEQ ID NO: 114978 - DNA, 1003 bp, Heterodera glycines
caccggcccttaattttggcaatcatcgtctccagagaccaaaattcattccgaataattcctgaaatatttatttttttagaccaaccgcaaaattcagattaaaatgccaaaaaccaaaaatctttctttactcatttcccatgcctgcgggccggacaaaagaatttcttgcaaaagattgcttataattttgctgatattgagttcgaacgcccaaattgtagagtcccctcaagaaaagcaaattaaaggaatttcagtggataaagaaatttgtgaccatttttgtgcccatccatgccagccgactaatttaatatttccaaccgaagaaaggaatacaactttgggatggacttgtggacaccttaagccaaaaattgtccctcaaagttggtcctcatttttttcggaaaatgcttggacaattggcggcatcatttttactcttgccggcatttccttttgtgtaattcgcgcatatttgtggtcaattgaacccgattcaattgaaattaatgtttgaattttcttttctttaaatttgcaatttccccgcttttgactgcgtctttaattaattccatatgtccaaagttttgcatttgtcctgccatttttttttcttcgtgccaaacatggcagccgacggaaagcaattcatctcccgtcccctcccccatttttttgctctcccgtcgcgacattagctttttgcggcgatgactctcccctgccgttcgggaggaaaggtttttgccttttttccccattagctcgccgctgttgtaacatttgaaaaaataaattgcatttttgctgtaacgcccgcccatcgtccactcggatccctcgttattaaggccggctcatccgtcagaaaagccattcttgccttcattctcatttttcctccgctccttatttttcattttttccattttccattttcttttttcaatttttatttttatttttcagtttttcatttgtttagatg

SEQ ID NO: 114979 - DNA, 845 bp, Heterodera glycines
cttaaaatcgaaaaaaccaaattaggtatgtgaaatcagcagattcctttttaaaaagtgaaaatcaaatgaaaaaacacaaataaaaaatttggtgatcaattaagagaaaactttcattcttaagacggctggcgcccatttgattggcgcccattggcagcgctcaaatggcgttgcccattttatccattcctgcaaaaacaaaacactccccgtccccgtttctttgcaaaacccaggcgacaattgcaaataaagtttgtttcaatcactcaaaaattatttgcataaataaaaaaattcatttttttaaattgcgaatcgcaaacatttgaatattctgtcagtgagtgagtctcttttgtgtgtttgttgtttctgcaataaagatttaaaattggaaatttgcaaattttaatgagactgactaacaaatgaatgaattgtgctcaatttaattgtttatttagctgacagatgagcataaaactgaagtatacaaaaataaattagcaaaaaaaaggtaaagaatttgcatataaaagcacaacggtaaagaaatttttgaaagcattgggcagccttaagaaataatgccaaaaaaaggcctttccaaatttgcaagtttttttgaacattttggtgattccatcgaacattttttggaattttggtcatggaattcgagtttttttcgaaaattagacccctataaaattaattttaattccatcgaacattttttggaattttggtcatggaattcgagtttttttcgaaaattagacccctataaaattaattttacccaaaaaattgaacccatccaactcagaaagatg

SEQ ID NO: 114980 - DNA, 574 bp, Heterodera glycines
  unsure (1)..(574): unsure at all n locations
tatttccttccccctttttgtgtgcttttaggactccctgttttttccacgacagacgangngngacgngaaaanncatcttttgncgggcacaacacgcnacacggnccaaggncancnccgcannaacgagnannncgagacaancnaccngnncannnggngannnnaaaannnannnnacgggnnnnaaanancgacnnancangaanaagaaannnannnngacaacnnacgncaaancngaccaaagaanagncaaannnagaagaannnnnncannnnnaanagnnnngcagnnngcccangannnnnaaaanaagaanccncnnacnnannnannnnnnaaaanannaannanaaaaacgngncaaaacaanggnncaanangcnnaanacaaacncannnnnnnggagcagggagagnaaccanangaagngccaaaaaanccggnnccnnnncnccaggnanggccnnggccngancgnagggcttactgcagtaaattttgcctactatgtttttgttctgctgctgcttccgtcgacgcaggagagctcggtccgcgacatg

SEQ ID NO: 114981 - DNA, 99 bp, Heterodera glycines
aagtgacccaaattgggcgagggctatcgccgcgcaaacatttttctgcccgacgtgaactgtgaacggagctgcgacagcacgtatcgcgacaacatg

SEQ ID NO: 114982 - DNA, 211 bp, Heterodera glycines
  unsure (1)..(211): unsure at all n locations
atagttcttatcatgttcgtgaatatggttacncgtcccccatgagcattcattatattttcaattattttgaaatgtccttattttttatttctaaatgaatttataaattgtaaatatgactgataaattgttggttttaaattgggagcagaaaaaaagtatttaaagaagcttttttctggtcaaaaaactgaactaatttaaaatg

SEQ ID NO: 114983 - DNA, 846 bp, Heterodera glycines
aatattaaaaatttttaattttctttcttaaattgggtttatttatgagaaattttttagattattctataaaaatgctaaaattaaataaattcattaaaaaattcaaacaaacatgctttttaaaattaaggataaaatagataatcaataaaacttcttgaatacactgcatatttatcaaatattatttatatgcctagattagcggaagtataaatcgtttaaaaatgattgtatttattcgcacaaatattttagtaacaaatagcaaataatcattgtaatagacgaattatttatgcatttattttgtttatacccatagattagcataaataaatcatcaaaaaatattaatctattctcgaaaatatttaattaaaaattggccagcaataagtttttagcgcttaaatatttcccagaaaattgtttatgtaattaagcaatttataaaaatgttttttttcacaaaacataattttattgatatggtgcaggatatttagtcaggctaatagccaaaaggggtacagcgataatgagtttggatttttcgaatttttgaaagcaattttttgaaaagacatgaaaaaaagataaaatatcaaaagcaaaaaaaaaaaggataaaaaattgaaaattcataaaaaggctcaaaaatgtaaagaaagttaccaaaattcgacaaagtaataaatcaaattctacaaaattattttaaatatatattcaacataagatggataaaacaatgaatgttttatctctgtttaggaatcactcaaggtcaaatgcgctcaaagatgggcccatcaaattgttggtactcatcccaagatg

SEQ ID NO: 114984 - DNA, 433 bp, Heterodera glycines
aaaaattttcgtttttggtgttaagctgtgtcagtggaagacatcggagattttatcacaagaattgtcagaatcaatgcaaacacttaaatttggggaacataacgaatcgctgtttggaatgatgctttatcgtccggtattaggtatttcatttataaattacttaaatcctaataaatatacttaaaattagtgtcgaagttagcggaccgtcattgggctgccctacggaggtcaaatgaaatttcggtaaatgcgattttgtttttcgagactcattgtcagaatgattattccgaagaataaatttgtttttcttttttcgtttaatttgtccttaaaatagcaaattgcttcattaaatatcttaaagcataattcttttttattttttaatgaattgtttgatattctgtcatccgttcaaatg

SEQ ID NO: 114985 - DNA, 267 bp, Heterodera glycines
tttgtcccaccttggcaatgtcgcacaattttaacatttgtcttccggttgacatacctttttggcaaatatgtcaatattcccctgctggttatcattgttggccatttgtccaacactctggcaattgtcccccgattttggccatttgtcccatttgattgtttcacttttttggctttaaaaatagcaaaaaatgcatttatgcacccaatttattgtgccaaaatgtttgcttctccacagttgcttcgaccaaccaaaatg

SEQ ID NO: 114986 - DNA, 887 bp, Heterodera glycines
  unsure (1)..(887): unsure at all n locations
aaagcgcaaaaaaatcattcatttaaaattcctcacatttccttaaacgtcgcctcanttngcggcaatagcagcagcaccttttgtcgtaagtttgtgattgcgaaaaatgacgttaactaaaaattttatttagattagtttatttatattaaatttttgagtaacaaattggaaaaagcaaataaacggcgaccaaaaatttatgccaggagcaaaattggcactttttgatgccgaagggttcaaaatttgatgcaaaaaaaacaatgcgattcctcatcaaagtcaatgaaatggaagaaaaaaggccgaatattcgacgccatccgaaatatttgttcatcatttttgtttaggtcgtacgtgatttattcagacccatgggaaattctattttcattcaatcccggctttcttgtgggtctccgattttcggaaaaaatcctacgcgaaagaattttttgaaaattgtaaaatattggcattatgttcttatttgactcataaaaatgaaatgcttcaaaaaaatttatataaaaggaagggaacagtgcataatccaaccattcttcattcatcactatattttttattttggtaaatttccccttttgtactattttttcggccacaaaaacctttcaacaaaactggccaaataccaaagcgaacattttggtatcatttcatggtctttcaaaatgttgtaaaggcaaaaaaacctaacaatttttctctaaaaacagtaaaagtcggctatttgtcatcattcctctgacatcccaaccccatttttcaaaggcctcagtacacccaccacatattgtacatattatctggaaaagcctgatcatctccatccatccatcatcatcatcaccatg

SEQ ID NO: 114987 - DNA, 1003 bp, Heterodera glycines
agcatttctttacatataaaaatacaaacaaataaataccatagccaaattgagaaaaaggctatttcaaagggaagaaattcaatttataaatatatacaaaaattcaatgtcaatccctttgaaatacctaatctaatttatgaaaataaatgctatcataacagtgctgagaaatgtgaattatttgccaccttatttgccaattcatttaataatagtgaaaccgacccaaccaatccatgcttgggtaatattatagaaattgatcaatgctttatatcggatataaattttaacatcatcgagacccaaaatcttctgaaaaaacttccgaataaaaatggcacttctcccgataatattagttataaaattttaaaaatttgccattcttctctgtcaactgttattactgacttgtttaggatctcattagacactggttcacttccagacatctggaaggaatcaattgtttttccgctttttaaaaagggtgacaaaaataatcccgaaaactataggccaatttcattaacctgctcactttgcagggtaatggaaagaattttaagcaaaaatatttacaattttctattaaaaaacaaaaaaatttcggaatatcaatttggttttgttaaaaataggtctacaacgagtcaattaataacagttgtggaagattggtatgaggcaattataaatggaaaaaatgttgactatgctgatgatgttaaattatatatttgttataaagcaagaaccaaaacagaaattatgcataaagcattgcataatttatcagaatgggcaaataaatggcagatcagaatctcaattaaaaaaacttttgtacttcatttggggaataaaaaccccaaagaaatatataaaattgatggaaatataataaatgttgtggatacaattagggatttaggcataaatattgataataaattgcaattttccaatcatgtcgcacaaataataaagaatg

SEQ ID NO: 114988 - DNA, 692 bp, Heterodera glycines
  unsure (1)..(692): unsure at all n locations
tgtaaattcatataatttataccnctactaataattgaccgaaatggttaaaagatattaaatatttaattttaattaattaatctttgttttttgctcagggcactttcctttttaattacctctttttgtaattcaaatccttccctgtcaaaggaaatctcaaaattgattatttaactaatgtttcccctttttcccaagtccgtccatttcgggcggataaaaattacaacgtaaaattattgcaatcactcggccaaggaaatttgaccctttaattcccgtgaataaagactactaaaccatatatttatgactttaacagaactttttcgatgttttttaattaatatttattttacagaaaatcctcttcatgacaaagtgccgccccgaatcaaaaaatgccgccacagcaaaatattatttccttgctcataaccgagttcccccttttcaattaaaatgataaagctaagaaaaatcccaatcgaacttattgctgaaagcgcccgctttgtacggttcaatcgaaaatgggcaaattgtcgcgtgtcacattcatttgaccactttttgcttgaaaagcatgggaattggttgaatctgatcaaagaattggtcgggaggaggaaaattaaacaatttagctaattagacaagcataaaactattcaggtgaccaaatg

SEQ ID NO: 114989 - DNA, 347 bp, Heterodera glycines
agtaaagttttttgacaataaattttttaaataatttcccattggatccggttggcatttttaaaacttgaattttgaaaccagtttgttgctattcataaagagacatttttaagttcgttagagcttgggccaggctttgccaataggcatcactcagaaattttaatgaatgggataagaaaatagtgaaaaatttccgaaatacagattagtgacccccccccccctttaattttatatagttcgagagaaattgtgaaaaactattgaactttggtgctctagtacaattttggatatcaatgagcatcatcagtttcttatttcagttgctgcacttcatg

SEQ ID NO: 114990 - DNA, 1003 bp, Heterodera glycines
cccttatttctggcaatcatagtctccagagaccaaaattcattccgaataattcctgaaatatttttgcctttctttcaaccaaacgcaaaattcatattaaatgccaaagaccaaaaatctttctctttttattttttcccatgcctacgggccggacaaaagaattgcttgcaagaaattgctaatgacctttctgctattgagtttgaacgttcaaatcgtagagtcccctcaagaaaatcaaattaaaggaatttcagtggacaaagcgatttgtgaccatttttgtgcccatccatgccagctgactaatttagtatttccaaccgaagaaagaaatacaactttgggatggacttgtatacacctaaagccaaaaattgtccctcaaagttggtcctcatttttttcgaaacatgcttggacaattggcggcataatttttactcttgccggcatttccttttgtgtaattcgcgcatatttgtggtcaattgaacccgattcaattgaaattaatgtttgaattttcgtttccttaaatttgcaatttccccgcttttgactgcgtctttaattaattccatatgtccaaagttttgcatttgtcctgccatttttttttgcttcgtgccaaacatgacagccgactgaaagcaattcatctcccgttccctcccccattttttgctcttccccgtcgcgacattagctttttgcggcgatgactctcccctgccgctcaagaagaaaaggtttttgcctttttcttcccattagctcgccgctgttgtaacatttgaaaaaataaattgcattttgctgtaacgcccatcgtccactcggacccgtcgttatttaaggccggctcatccttcagaaaagccatttcttgccttcattctcatttttcctccgctccttatttttcatttttccattttccattttcttttttcaatttttatttttatttttcagtttttcatttgtttagatg

SEQ ID NO: 114991 - DNA, 180 bp, Heterodera glycines
ggatttccctccccccccccatgcttcatctgttgggaccaacagggctgaacgtaactggattttcaaaataggggcaaaaatgacaaactcaaatacccttcctctcatctaaaataccatcaattaaaggtgtacaagaagttgcaaataatagccaagtttggcgaattggccatg

SEQ ID NO: 114992 - DNA, 120 bp, Heterodera glycines
gaatagacccccaaaaattttcagaaaattttttaaaaggcatttgatcactgatttaattatgatcggtcggtcatttcttattaattcacaatttgtcatctcctctcccaatcgatg

SEQ ID NO: 114993 - DNA, 602 bp, Heterodera glycines
agtacgaaaaaatgtaatgatgaataagaagctatttaattataataaagttttaattgttggtttattttgttattcttttttttgtatagttggtgaatgaaaataaaattttaaaaagtaatctttcagcattaaaatattttccattaagaaaattatttcggataaatggtttgaaattatcatttgctatataatttatttatcaaaaaaattaatgctattatataaaattatttcgcaaaattgctttttgaagtttggatatttaatcttaaggagtttgaatttgaatcttttttatgctaatactacaaacgatgatattttggtgattggttcataaatttttttaataccttcaaatttaaagaaaagaaaaaactaataaggttcaataactatttatattattttttcaattaattaattaattatgaaataaaatagttaattcaaatttaaaaagaatattttttgatttataattgcgaattttcgtttttagttcaatttaaacgcttttggattctttttttttaaattttattacaaagcatcgaattttataggtttttatcaactttatccagcaaatg

SEQ ID NO: 114994 - DNA, 110 bp, Heterodera glycines; identical to SEQ ID NO: 98226

SEQ ID NO: 114995 - DNA, 249 bp, Heterodera glycines
tcggcaattgtgatgatcattggtcccgaaattttttaatttaattttcttttcaaaattttttaacacttttctaggggtgttttgaggcgctgagcacgaatccggcctccatttcgaccaattccgaatccctaatccgaactcgaacatttttcgagaattaaattttaaaattttttaaaatttcttttaaaacatggttcttacaaaggaggggtcggcaagtgaccgtgggatttccaaatg

SEQ ID NO: 114996 - DNA, 379 bp, Heterodera glycines
ctgctgtcggttggtgccttatgtgctgctgccattggctgctgatgcttaaatgaacccaatccgatgcttactttccccctccgtcaatcgctccccccccccccccctcaatgcttaaatgacttttgtccgccgtccttcgccttaaccatccctctccctccaccccaccaaatgctcgaaatcccatttctttaggttgagacgggggaggaggaaaactgagaatggcaaaataagtctcagtaagccgctcagaggtgctcaaagaagcagcactacttggccaaaaatgtaaaaaagcaacttctctatttttatataaaaattgtaaattaattcaattaaggaataattttaggaatcattaagcatg

SEQ ID NO: 114997 - DNA, 510 bp, Heterodera glycines
attgtgcacttgacatggatgtgtggagggagtgtggtgatgatgcatttatttgtctgtgagtgacagacacaaaaaaaaagtgccgtcagaaaagtgaattcattttttttgccattgtgaatctgtctccatcattctctctctcaccctctctctaattgtccctaatgtgtattaattagatatatatgctccaagcattatctaacctattcagtgataatgcaacaacaaaaaatgaaatttgtagatgatatgaggctgatgtgtaattgacctcatcatttaaaaaatgttctcatcccttccttcctttcattcgcattaaatatatgcttttaattatgaaactcatattccctttaagaattaaaattgttttatgtgtattagacaatatgtttattaattagtcaattacctaattacattacttcaatcttattcaatttttcaattatatctagcagtgttaattacagacattcaacaatattttagcaaatg

SEQ ID NO: 114998 - DNA, 268 bp, Heterodera glycines
tcctgtaaaataaaatcctttttcagtgggttgaaaaattttagcttatttcataaaataagagcatatataatgaaatttaatattagttttaaaacagcttattttgagattgttaaagatattttccaagcccctcccctttttcactaaaaattttttgattttctatttttggtttagaaaattttgcagtattttatctgagatttttgtccatttatgcttaaataaatttattgtatttaaaaaacataaataatatatg

SEQ ID NO: 114999 - DNA, 59 bp, Heterodera glycines
ttttggaccaattgggtgagcaaaacaaattcaatgggtcaaaaaataaacaaaaaatg

SEQ ID NO: 115000 - DNA, 120 bp, Heterodera glycines
ttcggtgcaaaaggcgcccctgggtgccatcgtcgccagtcggtgccgcaaaacactttctcacgtgcagcacgagaagtagtagcaccgcggaaggtttaccgcgtggacgacgaaatg

SEQ ID NO: 115001 - DNA, 697 bp, Heterodera glycines
atttccctatgcttttggttttctttggtcaaatttgagtattattggttcaaaaacgatgagttagcaataaaaagagtaactgttgacattttatgattaatgttttacttttaaccacagactcattaattcgaatgtgacattaatttcaattattaatttctgggaataatttcaggtttctgttcgcatctgactgataaatcggactttgtgagccttggcatctgcaaattgcctttgaagcccaattaagtgagtccaattaatcaatgacatccaattatttcacacattgggggtgagtgattaattaattaaattgttcgtacacatgcattttggcttcaaattaatgcatttattaaatttcaaaaatggtaattacagtaatttttttttcttttcgataaaatcaaatgtgtgaaaatcaaatttaaaagtttgttttctctctctaattaatcaaccaatccaaaaaaaaataattttgtatcaatgatatgataatgcttaacatatatgtctataatcttttgtttttattttggtgcatttctaataataattgaagtttattgggataaccttaaatagtgttttcttcttaaaatttttttggaattattgatcattggcatttttcaattataattaattgcttaaataattaaagttgtaattcattcagatg

SEQ ID NO: 115002 - DNA, 75 bp, Heterodera glycines
cgcccctatgcaccgatcctcacgccattctcagtggatcaagtccaagtgattcacccggaccaagttgaaatg

SEQ ID NO: 115003 - DNA, 478 bp, Heterodera glycines
tttgaataaaataacaattattatattaataaaacaacgactgtaattttagaaccgggaagtttggacactatgatagtattttcagtttatgcatccaatagacttttattgcgtacaattgattaaggtggaaaaagcctgttattttaatgtctgaccaacagaaacctgttaggtattcaattgcaggaaactgctgcattacgccaaaactccgctaattcaaaagttttggtaattttttagcattaacaaaagccactttaactatggcaaaaggggagtgcctcccccagtttgtccatttattatcgtttttattaaaccgattgttagcgattcacactccgtattcaatcgatatacctttcaatttgtctttactatgcttcttgctttgacttctgtggacacccgcaacgcacttttgtgcgccgccgttccttccattggcgccttcgtgggctcaacgatg

SEQ ID NO: 115004 - DNA, 215 bp, Heterodera glycines
agcttgatgctgaggtctttgaaacataatcccagaaacttggccaaatttttgcgaagcttgaaatgttttcattacctcattttgtttacgtaattcattataatttttgtttttccacgttgaaattcaaaaaaataaataatgaatcactccacaacctaccaatttatatttatttatttctttttaagcaaaaatatatttttacaatg

SEQ ID NO: 115005 - DNA, 1003 bp, Heterodera glycines
ttcatctatttaattaaggggttaagtgaagaagggaagaaagaagtgattaatggccgaaaaaaggaaagaaaagaatgcattgagaggggataaacggggaaaaaagagcgaatgggagtggaaaagaaagaaatgaaaaacggatggacgacggaatgaacggaggaggggggggggggagaaaagtgaaggggaggagggaaagggagggggaaaggaaaagtgagagggaaaagtgagagagaaaagtgaggggaaagggggagagggaaaggcagagagaaaagggagagaagggggggggagggagcactcggctcattgctggtgagttgggcagctaacatttgcaattattttcccattttaatttaatttttcaacaaaaggtaaaagtgccaatgcctcgtcttctctcttccttcgcctttttcgttttgtcaattatttgttcgattgtcttcttcgaacccatccatggccaggacgtgtgtcgacatcagggcaaagagtaccgaaatggggacgaatgggtgggtcgaattaaaaaataaaccaattaatacataattaattaccaaaaccaaattaataggtattaattgacagattgtttccaactctttcattatgaattgcatcgtccattacaaccgatgggaaacaaaggttatttggccatgagacggcaatatttttcaaaatgccatattagctaaatgtttaaaaggtgtgaatacgggggaaggggtgacaagattcatgaagaaagggcgaatttgacttggagctcagtggaagagctgcccatggactttgtggagcgtgggatcggttcccacccgatgcctaacattttctcttcctattaagtcaaatatcactcattagcaatgtccaacaattgctctttctgccagatcatcgcctgtctgtcaatgttaggcgagagaatccccgtaaacggacagatcagtgatcagcacggagtgtggaaatg

SEQ ID NO: 115006 - DNA, 412 bp, Heterodera glycines
tttctgtaaatttttattttttcggcaaatttttaaataaattttttacattaaaaacataaaatgaagaatattgatatacattaaaaggccattaatattgttggcatatcaattttgaatatgctgacataaagcattttccggtgttattaaaggcaaatatataaaaaatatatttttatgaaaaattttcttttataaaattaattgctatattttataaatgatttcataattattattttacacgtgaattttatatgttggaaaatgctcagaaatatttccgatttatgagacatgacacgattttttagcattggaaatccgccgtatgcactagataaataaaaatatttaaaaaaaatttaatttgcatttttttttgaaatttttataggaaataatg

SEQ ID NO: 115007 - DNA, 161 bp, Heterodera glycines
ccttgaaaaaaaaaaaattatttaatatttataatgttttttcctttaatttgtccttaaaattaattaaccttattaaaccaattattttccgtaaatataaaaaagaaacgtacaacaaacataaaactgcatgaaattgcagcaaagaaacctagatg

SEQ ID NO: 115008 - DNA, 193 bp, Heterodera glycines
ccccccccccccccattcgccgcccatgcaaagcccacccccaaggattttgggcgctctcgtgcatacctctaatacagagatatttatttgcattttgaatacataaaaaaggaaacgaggttgttagggcacatagccgggaggacaaaattttgccttttgggcaacagcgatgactcaccaccacatg

SEQ ID NO: 115009 - DNA, 79 bp, Heterodera glycines
atttaaaattatagatagacagaaaaattgtgtaaataaatttttggatatactatagtcaaccccccggaaaaaaatg

SEQ ID NO: 115010 - DNA, 1003 bp, Heterodera glycines
ctaaactgacccggtccgataaattcggcatagaaaaatgcagaatttttttctctattgatttagaaaatttgaagataatctgtaaggcgaaaaaaaagttctatagagcgaagtaaatgttgttttttctattaaaaaaatgaagagatagtattccagagtgagagaaataacaaagaaaaagagaaacgacaaaatagtacaggctttttaaaaagtttttgccttaattgtttgatcattagggatagttttttttatgtaaatacatatttttttcctggattctccataacctaataagtaggaaaaacatgaacaaatgttgggatttttatttacatattttcggatttttctacatattacatatgtacatattttgaactttttcgtacatatttcgcaatttttcgtatatattgtcatttttttacatattttgaggatttttgagaatttatagaaattttttgtgaaaaattaaaaaaaatttttgaaaatgtatccctaaaaatcgaaatttttttttcaaaaaatgaatatcaaaaattaattcttgaaatgctataatgtgattctaagcctatttagatcatttttatgttaatttttgcctatttcaccctttacgaggaatttttttccaaaaaattaccatttaaaaaatttttatttacatattttagtacatatttggggatttttgtacatatttcatacatattttagcattttttatacatattttacttacatatttcgcgatttttcttacataaaaaactatccctattgatcacagtttaatgatgcattatgccatcatttgcattacactatttgggaggaaaggggatggcggaacttaatgacgagactatttttaaataaaattgataacatcgattttcccacgctaaaatcaaaaaaaaaaaatttttttgttcaatttgccttgaaatcagcaaaatgatgacaaatcagcacatctggcatg

SEQ ID NO: 115011 - DNA, 250 bp, Heterodera glycines
  unsure (1)..(250): unsure at all n locations
catgagtatagattactttcagaaagtgtcaacagactttggaaaaatatattgncaatttatcaacaattttgagaagtgagttagaaatgataatcttcacgattcaaaccaatttttggtgctctaattaaccgcgataaaaacatccgaatcaattaaatagcttctgagataataaggtttatcataaaatttcatttaaaaataaaccctcaattattggtatgaacgatactttccaaacatg

SEQ ID NO: 115012 - DNA, 232 bp, Heterodera glycines
agttcaggggcactttttatgagcaggagttggcacgcgtacgtaaggatgatgagacaagctaccgaatagagaaggtcttcaggaagagaagaaaacccgatgggtcagttgagatacgtgtaaaattcataggctatcccgagagggaatggatcgatgaatctcagcttgtataaaagcattcagtttgttcattattttttacatttggataaatctttttctaatg

SEQ ID NO: 115013 - DNA, 664 bp, Heterodera glycines
ggtcggcacggcaccgtggcgcgaaaggcttgctcaaatcgagctgatttctatcgcaagatttttcgagaattaacttatcatatttggactggcgatgcgatctcgaaactttaaagaaggaagggcgggagacatggattttctaacaaaattgctaatttttggatcaactattctgggagcaaatgcatcaaaagggacaaagtagccaccctgatagtgctgctcaagaccgaagattttccgagaccggtccaaaaaaccctagttttttcgagtctcgagtcgagactgagactttttatcagcactaatatcagggatcatggaagagagtaagacgaaaaacgcgccaatagaaattggcactgaaacagttgggggagtgcaggatgccgattttgcatttaattcgtgcctttagtcatcattttgagagtacggcacaattatttaaaaattctcactgttttggacttttgagatcggcacccttacattggctccatttgcatcatttaatgatttaattcatccaattcaatatggcctgatcagtgatttctgatcagttttttgtccccgctgttcagtgagcacttttttgcccttccccaccgaattgtcctccaattcggcccaattgccctgcttcgacatg

SEQ ID NO: 115014 - DNA, 1003 bp, Heterodera glycines
atttgaaattggagtgattgggccccaatgaccctcgtgataaacccatgattttttcttttttcgcctttaattttatccactaaccatcagaacacagcgattgcctgcactgcttttgttgttctccgctcccttactcgctttgtccaacacgtcctcactgctcccacatgacgtgggttcccccgtggtacccacgccctaccaagctaccaactcaatcccttaactatatactaagtcagccgaagctccgcctctttttttgaattagcgggtaaatggtgctttgttgtacataataggaaaaagaaacaaaaaacaagaaagattgtgtcggtgggttgttttcagcaaaattgtgattgtgtctctcttacacatcaaagattagtttgtttcatcattttggtcctccgttgtttacatactttttcattagtttctttccgaaaaatatcgatattttttccttatgcattcttttctcttttttttggttttcctttttgggtattcaaaaaattttaagttctaattgtgaattttaggtccgtattttgatgttttttggtttcagttttactttagagtccagatcattttcttatgcacctaattacgttaatttattaatttttaaacaatcaaataaaacatatcgaatgggatttcaggtcgctgatcacgaataaatgccgtttgttgctaaatctgacttaacttcgttattattggaaactaagctgaaaaaaataaatagaaaatttaatttggtttgaatggatttggatcaataaatcgttatattcgtaatcattgatcagcgaaaaaattccgatcggacgcataaaaatgattcgacgcacaaagtgaaattgaaccattttttgtccatattagaaatttctcttacataataatcgtcctattttattgatattgttttttgagtgtaaattttttgttttattttgtatctttatttagatttataatg

SEQ ID NO: 115015 - DNA, 203 bp, Heterodera glycines
tatgtattattctcctctaaaagcattggcccattcgccgcaagtgcacgtcaccgcgcattggctgttggcctccagcaaaagtgaaaatgacattgttttggtgggtgttagttactgtacttatttttttaaattgttggcgttttgattgtgccgtcaattcaattttttgcgacaggttggccatttgaaaagcaatg

SEQ ID NO: 115016 - DNA, 184 bp, Heterodera glycines
gccacctgcatcttttgagtcccgaggcggggaccggcacggctggccacctgcatcttttgagtcccgaggcggggaccggcacggctggccacctgcatctttagagtcccgaggcggggactggaatcgaggcggcatctcccattgccacacagcagccttaccacttggcttcaacatg

SEQ ID NO: 115017 - DNA, 1003 bp, Heterodera glycines
tccgtgccgaactcacaaagttatggagtgaaatgtgaaatattgttttcaccacaaggcattttttctgaaaaccggattcaaaaatctggggtttggtataaccgttttagaaatagcgtagaaaacagcttcgatatcaagaaaccaagtcaagtccagaaaggaatattttaaaacgatttcgttttgttttggcattatgataccgaataactttcggaaattatggaaacaaaattggagaaattcgaataattttttgactgcaaatttttttccttttttgaattgggttctgttggataaggaaccacaccgattattgattatattttccctttcactccctctcttattgtctctctcccgccccttgaccagccccataaatatgtctccctttccctcactcggggcattctcccattcattccaccatttcattattttatttatttattccctgctgtcctccatatttatttgtttaataaattatttatttatttatttgacaacatttgttttggtcgaagaccaaacatttttattgttgtagtaaatacacaacaatttggcgcagtcacaaacaaaggacctgctctacatcttcgggtgagaaaaggcatcaaattttgttttaaggaccaaaagccgagacggcaaaacaacccatcaaaaagccgggattggctctgagttttgttaaagccgagtcggccatttttcaaaaagcagtcaaagaaactgctagacaccaaaagccgggtcggcgctccgaattcgtctaaagccgggtcggctcatcaaaattcgtcaaaagccgggtcggctcagcaaaaattcgtcaaaagccgggtggctcgtcaatttcgtcataacgcagtgaaaagaaactgcttattcttctaaagccgggacggctcgacaaaatacaacaaaagccgagtcggctcgacaaattcgacaaaagccggttggctaatcaccaaatttgatg

SEQ ID NO: 115018 - DNA, 743 bp, Heterodera glycines
ttagaaagcggcataaacttttttcgtttaattctgaattatttttcgtgaacatgaaattgaccaaaatggaatttatttgtcgtctgagatgtgtcccaaaaatccactaaattattttcatacataattttattcccaaattattttttcttatttttgtttttttatcaagtttcctcccttccaaaagaatattatttttcctaaaagtttgcctaaaatccacaaatatttttgctcagtactgattatattatatttttgtgtgatcttccttgaaattcaaatttaatttttaatttcatcaaatgacttacatttgtcccccgttcaaaaatttatctctataagttgaatatttttaaatttttttactaatataatagttcaaacattgccttttcattttttctctcattcttttcattttataaataaatcactatatttatataagcgtcgcgtgtaacagttgcgtgatgttccaacatcgctggcatttcccacactttagcccgctgctttttatccattttaggtttaaaaagtgtgataaataagcacacttaaaataatttaaaaactgacgttttcttacggaaggatgcgaatgggtgtaaaaataatgaattcgctcgagtcatttaccgaaattgcagtggctaattttccgggattatgtcgactgggtgaatttgattaaaagactatgaaattaattttatatacagcaaaaaatg

SEQ ID NO: 115019 - DNA, 302 bp, Heterodera glycines
ataataaaacgaaataataaaaaaccaataatgaaaaaataaataataattattaataaaaaatacatttataaataaatttacacacaaaggatcaaagattcagcaaaattaaatttaataatggcaatgggtccatcaaaattatccaaaaagtggaacaaataaaagatttaaaaaaattaattaatagattaagtgtcaaatcagcaaaaaaaaatggaacaaaaaaaaaattaagatattaaattataactaaaaaataaacaatttatatttaaaggacaaaaccgaaaagcatg

SEQ ID NO: 115020 - DNA, 125 bp, Heterodera glycines
aggaaaattcatccaaatcagtggaaaaagattcctaggctcgctcaggtaattccaaaataaagcagaaaaaagttatttttggcaatttatgggtccccagagaataattttcagaaagtatg

SEQ ID NO: 115021 - DNA, 126 bp, Heterodera glycines
tcgacgaaactgaaaagagtgagaagccaaatttgaatatacaggaaaaaagacacaaagaaaccctctctatccccctccctcaattaagcgatcacttccgatcaaaaaacgggtggcaaaatg

SEQ ID NO: 115022 - DNA, 905 bp, Heterodera glycines
tttctaaagctgtttatttgaaatttattttataaattcatgaatcaaaaaaatgtatggctaatgttaatttggcaccaatttttataccttccgaattcatcattctttccttcaacagttaattgctataatttattcagaaaaacatattcaaccccttaaattattatttgaaaaaattttcgttggctaaatcaagcaaaaataggaaagacaacacagaattaattttctatacaataattttctctttatttatctttttaataatttaaatttttattttgtgaaaggagaaaaataattgaattttaagacgaagaaattaaagaaaatccaaaaccaattagccgaattacaataaaaatttataggaaaaattatttttgtaagaattatattcatttcttaaattatcattttgcttatcaaattttgagaattttttccttaggcaaatcaaacgaaaataggaacgacaatatgtacagaattattattttctttttatatttcccttattttttgatgctaaatagggaaaaataattgaatttaaagacgaaaatattaaagaatttcaaattccgcttaaaaattatttttaaagaaaaaatattgtaaataaattttaaaagatttttactcttttaataatgaaattaattgattttaggcgtgaaaactgttttttttccgaatactcaatagtttatgatttcttttattactacgtaaatctatcaaagaaagaaataaacaatatacagttcacaagcgcgaaacatggatcctgaataataataataataataataataataataataataataataataataataataataataataataataataataataataataataataataataataataatg

SEQ ID NO: 115023 - DNA, 801 bp, Heterodera glycines
cctgtaaaatgtgcggaaaaaacgaaaactacaattttgaacaggcctgatagcgtgacttgacgcagctttattcgtaattgtgccatcaacggctgacaattttcgttctgtgtcggctttcaacaacttcgtcgttggacctgttgagtcggccaattcctccccagccttcgaaaaaacaattgtcctcaattggccattccctttcggtgttttcactttgctgttgattccgttgccaaaataattcagatcaacaatgatatgacaaaaaacattaaaaataaaaacggggaaaatgagttaaaataaaaacttcgaaaaaatgattaataaaatatttcgagagaaaggaatcccaaaaataaaaatttttaaaatgaatattaactattttcgaaggaacgggcatgtaagcgcaagcaataatttattgtgaaagtatatttgttaatcatgtgaacattaaattttataaaaattagcatttaacatgtgagaaataatcaatgaaattcggttgatattactatattatcgactgaagcaacaataaaaggttcacctgcttaattattttaaatattatgttctaaacaaaattcgaactatgtccaaaaatcgaaacccaaacgaaatatattcagccatattaatttttttttaacagatcattgtcaattattttcttatgaataagaaaatttaaatctaaataaaaaaatagaaacaaaaaaattaataattcataataacttccaaaatatatttgttaaatgttttcagaattttgatatg

SEQ ID NO: 115024 - DNA, 200 bp, Heterodera glycines
gacccactgggaactctgctggactgctccctcttttcatttcggggcagtctcaacaagggtaaggcatcaacttcttaattacgaagaagcaacgcttctctcgtctgtattaccatcggcgaggataatgtgccaaaccatgcccattctcccaatggtttttattaaaataggcaaataaaaatttaggattgatg

SEQ ID NO: 115025 - DNA, 506 bp, Heterodera glycines
aaatttgaattttcgactttgttcgaattcgggtccgggatccgaaattggccggaatggatgccggattcgtgttcagcgacccaaaaaacctgtggaaacttgcttttagggcaaaagaatttttgaaaattctttttcaaaaaggaggggcaaactacagaattaccaaattgtctccaattcatccaagaaaataaacgaaatcaaaaaacaaaacctagaatttcttttgattaattttaaaatcttgattttttttaattctaaaaaattccttttgccattacataattttcatttaatttttgttagagcgcgcctctcttgcccgtcccagtgttttgctgattgtagacgttgagaagctgtcgcccatccgacttagcgcagccattgacgacgcaaaagccaaaaaggggttcctcttcattggcacgtcaaacgacaggaaaagagctgtggaggtgttcgccaacatcgacgagtcattgtgcaggaaaatg

SEQ ID NO: 115026 - DNA, 387 bp, Heterodera glycines
actccctaaatgccaataatttcgaaaaattattatggcggttcgagagtctcggctcttgtttaaatggagaaatttatcggtttctttctctcaggaaatctagggtctcaaacctaaatattcatattatcctatttttctaatcttttctcttggccctaaccagggacggtccggggggggggggggggagcgacgagtacgtaccagtgatggcattccgaggcccaaaaattattcggacatcggtattcagactccataaataggaatttcgtaccagggattagatgaatatgtcatatagatgttttaaaaacacaaaacaaaaagggtttagatgactattccatatatttttagcaaaaaacactttggcccatg

SEQ ID NO: 115027 - DNA, 96 bp, Heterodera glycines
cgtaattcatgatactgatctattatactatatcccctgaggggttgaaaatttaattttttaaaaatattgattctcaatttttagccaaaaatg

SEQ ID NO: 115028 - DNA, 1003 bp, Heterodera glycines
cattaacagatttgattcctgatctctttttaccgtctgatccattcgaaaaatcttggtcgccccttttaatgcatcccgccagcccctaaaaatttatttttaaaaacttcaggtattttttgatttttggaaattttttgaaatttaattgaaatttttcgaattatccaaaatcccgcaatcccgcgcgggatctcgcaaattttaaatgcaggatttgcgggattgcgggatttgcgggattaatcccgtgggatcccgtcccgcaaaaaattttggattcccatcccgcagcgggatccgcaaatttgaaatttccggtctctagtttacagtaaagtttaatttattttttttaatgttatttaatcaatagtaaacttatgtaacagtgggattgtacttaattgagtttatcgaggaattgatcgctaaaagatttaaattccgataattcgacgaatggatgcgctcagacccacatgttatttcatattttcatttgcaagatttttatacaattaaatttttgtgtatttcagtccaaggactctcatattaaaatttttaagtcactacaacactcgataggacaaattcagaaacattgttacatttctaagattggacaccccaaataaggacatttctcagaaatatgggcaaatcttagcaataaggacacatcttaaaaataaggaaactcagaaatggggacaaacattagaaataaggtcaaatctcagaaataagggaaaatcttagaaataaggacattagggcaacgttcatttgtttttattccaaagcagataattattttaaatttatttgaagcatcatgctaatattatctgtaaatttggctttctcttacatcaaaaattgttgtaaaagaattccattgaccgtattgtattattttctgtttttgtatttgctccaatgggatcagtacaggcgcatttggttggcattgcgccaatcaaaatcaaatatg

SEQ ID NO: 115029 - DNA, 56 bp, Heterodera glycines
tttttggcacctaataaattttatgtgccccgcggggcggcacaatgtgagcaatg

SEQ ID NO: 115030 - DNA, 428 bp, Heterodera glycines
taaaatttttttaaacatttatatatatttttaaataaagtaatcaaaattttctatattttgtttatcttttaaatattaaaacccagtttattttgatctgaacaaataaatagtcggaacaccaattttttttctttttttattcaaacatagcttcaataaaatattatttttattttttttgaattgaaaattaatttattttgaatttgtatccctttaatatatttgttcataatttcccctaattttaattaaatttagacaaattgtatctatcagaccatgtctaattcagcaatttgcaacacgacaagaatttttgtcaacatacaaaattgggtatttaattttaaatttgatttttcttatttaattaataaataatattttaaatacattatttttaggtggaattttccatg

SEQ ID NO: 115031 - DNA, 223 bp, Heterodera glycines
tttcccaattatttttttccaattgacgtgccgttcttcttcagttggtcaattgtgccaccattcttttgtcgccctcgcaaaaaaaatgtaaaaaatttaaaatttttataaatcctaaaaattcttcaatttttcaaaacgccttatttcgatggatacggtagacggaacgtattttttttatcaaggtagcaacaccagcaacagtaataaaactatg

SEQ ID NO: 115032 - DNA, 490 bp, Heterodera glycines
ttttcggggagaaaagccggttcctttgatcaaggcttcccattcagagttttgtcttccggtcaaatttttttttgaagttccaaaagataaagatcttgccaaaaaataaattgtgaaaatactattttacttcgttgcggttattgtgagattttcttattctttgctcatttttttcatgattatcacatgtgcgaaaatgcataaatttaaattttaatttttaaattaaaaaaaaaatgaaaataattacatttctaaaagggtattcaagggcaaaattaaaaaaaaattaatttacttaagagggattcgaacttgtggggggaaaaagtaaaggtgagagcacaacctctgcaccactaaacagcacaaaacagtgcaatagattattcaatttattgggataaaaaaagtttggcacgtcataactcggcactcgtacttatttggcagaaattgaaaccatttttcttaagaacccatg

SEQ ID NO: 115033 - DNA, 1003 bp, Heterodera glycines
atcaatgtaattttttgatcctataattgaccgttcacaacttgcaaataaaaataaacacataaataagcaatattaaatttaaatgataattgagactattatcgcaaattattttttgaattattagtaagttttgtttccatcatcttcttcttagaacttgctttgtttttttatttttttccaaaaccaattttattaaattttttaacttgacaatttcacatacccaaacatttgatcgttataaatttttatatatttttatcgaaccgatgaaaattttaattctttgtgagataaaatagagaagaggtgcgcagttttgccagttaaataaattaattactattaatttttgttttttaagcgtttattttattcatttgctcccctcaaaatgatactcagaatccccaatcacacagggattctgaggtctaaacgatgtcaaaagtaaaatctgatcacgtattcgtgatcagcggcccaaataacccctaaagacatgtttttgggagatttttgtcgaaaaaattttttcactcaaaaatcctggccacccccctttggttccgaattccaaaatcactttgcgcgaagctctcgtatgagttcaacaaatttaaaaaacgggcgcgaagcgcccgtcttgagcctcaatgtggactaataacctctaataattttttaaaaattcaaaaaatctctccaaccaattcaatcaatttgaatcgcttcacagtctaggtagcgaagctcccaaagcgcgaagcgctttttcccagcccagatccgacggttcacgcacccgctagttatatatattataaataaagaataaatagaataaatattatattagtgtatatgttttataataatgaatcccaatattaagcgatttcatcactgactactttcttaattggtaagtcacacatctataaagaaaatattaaaatatttttaaaaaaacatttcaatttaaggccagatg

SEQ ID NO: 115034 - DNA, 86 bp, Heterodera glycines
  unsure (1)..(86): unsure at all n locations
ccatccaaaagggaggatggcggcggacgttgggtgcccattgaagctgcagtggccgcgatcaaactcgtcgcgcccgcncaatg

SEQ ID NO: 115035 - DNA, 175 bp, Heterodera glycines
ttcgtttttcatgtgatcatttttggtttaccgagaatatttgtgtaaactttttgttcgccaattacccaatgaaaagagcataaattacccccaaaagtaaaacattccctccctttgtagaaatgaattaattgctcaagaatgtttgatagactcaagaaatatttagatg

SEQ ID NO: 115036 - DNA, 1003 bp, Heterodera glycines
gaataaaaattggcataatgtttgtaaattaattatttttaatagagaccggcgtgggatcctgcgcgggattttgcgggtcccagtcgggatttgcgggattaatcccgcgggatcccatcccgcaaagaattttgagttccaatccctcagcggaatccgcaaatttgaaatttccggtctctaatttttaagcttaagctatagcagataagcttggacacggcgattcaattttgggctccaagtataattaagttggttttttcgtaggtggtctgtgagttagtcaccaaaaggggggtctcaggttcaaatcctcctcatgttgtgtgttaatttcaatttcttcgtttaaagaagaaaggaaaaattattttccattaataaaagttttcgtgtcaataaaaatcatattcaaaaagcgttggttaggtacatcatcgataattttatgaaattttccagacttataactcgggcaataataggccaaatataataattttatattcattttaaagagaaaattctggagaatattgtaagttttatttgatttggctttaaatagcgcacttggctaaaaaagagttaaatttattgaaatttttactagggtcaaaaaaattttcctcgggtcagattttcttaaaattttgcataggcccatattttgaccccctctatcgaatcacattttattttttacctgtctagtttttaactcgagatcggctcttgtgtttttacaagggaaaatcccctaaaaaatttaagtatcgcaaagttttggcgttctgattacaaaataaataataaacttatttgcactgggagcccaaaattgaatcgccgtgtagagtaattaaagttctgcttcttcacacccagagaactgatggcaaattcattcatgcaaattatcattgttccttcataatatttgagcaaatctaatacatattatcttaaaatttatgcatttttaaattcgaaaatg

SEQ ID NO: 115037 - DNA, 511 bp, Heterodera glycines
cgaaggacaaagagtaaaaattcaagcaataaaacaggcgttattgaggcaaaaaatgacgcatcaaaaagtgtgaaaatatacaaaattgccggtattgccaattttaaatataaataaaaattagattaataattgtaaggaaaaccgaacagaaataatttacttttacctgtggttaaatttgctaattggatcaatccacaaaactcgaagacttttatgttgtttttctcatcactattttatggggatacttaggaacagaagaggggtcgggcggtgcctatgggcgccgccggaaaattttgaagtttttgatagtttcttaacagattttgtccaaaaaagcatttaaatttatttttagagtgtttcctacttttttcagacatttcgccaaaatagtgattaaaaatgaatacagaaaacagagaactaatgcatattttcttttttccataattaagatgttaaagaggatgcttttcttcttgatcattatcaaatg

SEQ ID NO: 115038 - DNA, 157 bp, Heterodera glycines
aaattattttttaactgaaaatattaattggaatttttcaatagaattagccccatggcaaaatggagtagtcgagcgtttaaatttaaacattaaatctgccttaagaaaaacaattggtaaaaaattaattgattttgacacatttcacacaatg

SEQ ID NO: 115039 - DNA, 564 bp, Heterodera glycines
tcttaaaggcctgacgagttatgtttcgacaaacatcctgtacaccataaatcgatttgcaaatttagtcgaactatataaatttttcaaaaaatgattcatcttttttatggttagcgcatatgtctctagctttatagaaacggtccccgaatctgcgaggaactacttttttgagaatttctatagattattattctgcatgaatccttcgcttaaattcccatttatcttataaagtcagattaaattaattactccgatttgttttagaattggtccaaatacgcttgctaatagcttttcttttcgaaaagagaggcgaggaaaaataaaggttgcatccaaatgtaatttttttttttacattgaagcatttggatggcttgctgtttacagttggctaagtcttctttgcaagaagtagcacaacttttgtttgggccaacgaccccaaaccattcgaatagcaatcgattgggctgactagactcaatatttgattacaaggaatacttatgtggaaattgtggtatagagcagaatccgggaaagccaaaaatg

SEQ ID NO: 115040 - DNA, 891 bp, Heterodera glycines
aaaatgctaatttctaaccaaaaaattgctcaaatttatcattgacaataaaaaatataacatttgaacattttaaacgtgttttgaataaatttgtaaaaatgaggcttttagacccatctgcgagccctgacaaatcggttaacaaatcgtattaaaattacaaaatttttacctggcggcgcctatcggtaccgccagccccccttgttccccaaaagtttttttggaaaaagcgccgcaaaaaatcaactttggtttttcatgcttagaatttcacaaaatgcttatttctaacaataaattgaaaatacatataacatctgaacattttaaacgtgttttgaaaaaatttataaaaatgaggcttttagacccaaaatgaggcttttttgcatgccaaatgaggcttttgaaaattttaacctgggaaccctgattttacccagttaaaatatgcatttacatattgtgtaatttgacaccacaaaaaataatttcctctaaaaaatttatatattatttttttttttgcaaattgagaatcagatttcacagaaaataaataaaatagatagtttattttttggtacatatagcacaacacagaaactattttgaaaaacaaattcaacaatttatatgttatagaaaaatatcgaaataacattgagtcggagtcagcatttttcaggaattaatttatagatttgcaatttttttcccggcataccgattgctattgccggtcggaaaattcaaaaattgactaaaaaaaccctttaaaattactcattttaatgggcctaaatctcaataaatattaactatcaaatttttttgctaaaaaactaagacgccgaagatgtgtagagctaaaagttcgacatg

SEQ ID NO: 115041 - DNA, 64 bp, Heterodera glycines; identical to SEQ ID NO: 99473

SEQ ID NO: 115042 - DNA, 1003 bp, Heterodera glycines
ttgatggttaagcaaatcgaatgtttagcagttaaattatgattcactcttctgctgctgctctctttgtcggtggaccaaattttcgaacatttttaatcataacattttgaaatttaaataatttttttgaaatttggcaggataatagaaaaacattgaggatctatcgaatcatatcgtgaattaaaaatatgtttgctttttagcaaagttataagtaaaatttatttttattaaaatggtttttgaataacgcccatttttggtcagtttttagacaaagtctgtcttataaaaaatgtgaaaattggatgaatggacattgattggcatattcagtaagcaaataaaatcctaaggcccaagatacagcttaaaggaagaaaaattgaattggacactgaaaacggtacaaattccgttccaactaaaataaaacttcctcctatttatgtaagattataaattgattgtttaataattaaaaacttttcaaatgatgataataaatattctagtaaggaaagttataaagatggaaaaatatcaaaataattatattgaacttttgcaattgtgaatcatcaacgacgaagtaaaatagaagattaatgatgattagtacgtttggattaaccatttgctcaggcagtgaaaaggttgtgaaaacggtgaaaaatcattgctaagagtgctctaaaatgagtagatgtctacggatgcttgtaagtgttgtttatgaaatgatcaagtaagtgtatgagtgatcgtgtgactagggacgagtgagtgattaggaacgagtgtgtgatcaaagagagacacagagagatcggtgtgagtgagtgataacagagagtaagtgatcagaaaattaatcagtgtgtgtgtgttaacatgtgagagagagtgatcgggatgagtgtgatcataaagacaatgattagaaggtgatcagagtgagtcaatgtagattagagtatgattaggagtgagaatg

SEQ ID NO: 115043 - DNA, 164 bp, Heterodera glycines
tttggataatgaaatgccaatcttttctagagactgccaatagaaagcataattttaatttgaaccataaatcaaaaaaaaaaaattttttggcgttgcccctgggtcatttcaattgttaattagcatcactaatgagagataattaagcaagagttcaaatg

SEQ ID NO: 115044 - DNA, 85 bp, Heterodera glycines
cgtttgctcattatagttaattgaggaggataattattgtgggaattatcgatttgaatttttttgatggaaaaagaggggaatg

SEQ ID NO: 115045 - DNA, 1003 bp, Heterodera glycines
ttcgtaaaataaatggaattacttaaattagacttcttttgcttaaattatgaataaagggcagtttcggcacaaaatcaacaccgaacaaattttaaatgacgacgaaacgacggcgttcactgatggtacaatgtttaatgaggctaagcgggcactttgcatgctaaggtagcaatggcactaattgcagcacgcagaatttgttggagcattctctaaaaaagtaatatctacgaattctcggagattttaaccaccgatttgtatattttcgcatgaaaaatgggggatgatcaatcaatgtgccaaaaaatgcacaaaaatggggaatgcgaagggatcccccatttaggggccattttcgggcgaagagggggcgggggatggttaaattagtccaatcaacaaataataaaattattacttattatctgaacactaaaaagaatgaaatatttttctggaattccaacaaaagagaacaaaaaaaatttagagaagggagtccgaagactttttttctctagcccataaaaatttttctcattgctatttttcaaaattaggagcaggaggagaaaaatgttatttgggcagaatttaaaaaagagtaggcctaaaaaggactgttattattagccgaattattataaatcattatcgtattacttttttgagtgtttggtcaagcaatttttggcctactgtgcatatagcccattgaaatttgttaaaatataattttgacatggtcctattttttatgtttgatgattaataatgatttttgtttgacctaccatatccctaaattaagcattgatcagaagaccaaaccctccccattctctcacattgtcgtattgcggctaagccaaaatttccatccattcgttcgtttccgtatattcggcgtcaaaatctttgcacggcgcgatgtcctaagcaatttagggatgaaatattaaaaaaattaaacatcgtacagtaaaccataatg

SEQ ID NO: 115046 - DNA, 345 bp, Heterodera glycines
ttgctcaattgtcgtcgttttcgttgtacacagagaagggatgattgatgaagatgaattgccgataattaatgaatgatgaaaataatggcaaccaaatgaattttttgtgccttttatatatgaatttatccgaaaaatttgactcttccgactaaaaaatttgctatttaaggcccacactttttgcttatccacgttcattccgttcattcattccatccacttaattattcgtcctcctccaccgccacttaaatcgtcagtttatttaggtaattaattgttttgttatgtgcattttcattgtgctaattgccccccccccccatttttcagcgaatg

SEQ ID NO: 115047 - DNA, 167 bp, Heterodera glycines
actgaaaaatttaaaaaaatttgtttaatgacaagcaaattatttaaattgaaaagtgtcgccaaaaaattttttttaaggcacggaattaaattaattttttaaaatgcaattaaaatctttaaaaagctcccccttatttaaaattttcaccatttttagcaatg

SEQ ID NO: 115048 - DNA, 53 bp, Heterodera glycines
tttattttgcagttttccgtcacaacaaacaacgaccttcccttttcggcatg

SEQ ID NO: 115049 - DNA, 163 bp, Heterodera glycines
caccaattgtgaatgaataccaatggtccgtagccaatgatgaatggaatttgtttaattatttcactgactatttaagcaagagaatatgtctaaatatgccaatttaaattagttaaaatattaaaaataacaatgtaataattaaattccagacaccatg

SEQ ID NO: 115050 - DNA, 87 bp, Heterodera glycines
tccttgggcaatgacaaagagctgctcaatcgtttgattctcgctccgcacattgacacgtgtgatgaagtcaacgagatcatgatg

SEQ ID NO: 115051 - DNA, 250 bp, Heterodera glycines
atacaaatgtttttttttaataattctttttttctgtccacaaaatcctcaaaagatttgcgccattctccatttttctttcatctcacaatgttacgcaattttctcggctcagtttttttgtccgtccgcctccaattggtccttaaaacttttgcctctttttccccattttattttttctttttctggcattccgtcgccccaacagatggacaaaatttttcaggaaaatttcttcgaaaaaatg

SEQ ID NO: 115052 - DNA, 177 bp, Heterodera glycines
ttttccctccttttatacatcccaaaaccaaaaagattcatccggcgacattttgggtgctgcagtgcccagcagaatttgcgtataaaaggctcacattttgatgactcctgccatttgttttcaatccctctacacacattcatattttcttcacttttgcgacgacgacacatg

SEQ ID NO: 115053 - DNA, 1003 bp, Heterodera glycines
attgaaaaaaggaagccaaaaaacatttttttttaaaatagtgagaaaaagtgccaaaatagttaaaaaaagtccaaaatagtgacaaatagtgactaatacaaaacttttaatatcactatgatgaaattaccttacaaatagagatgattgaattttctattcataactctttcaatacctaatttaattctatgaacttttattaggtgccagttgaaaagttacccacagctgctgagggttagtcaaccgggttaagttacgttcaactcaggattgactcaaaataaaaaaaaaccaaaaacacaaaaaataaaaagtgtaaaaaaaaatatgaaaatgtcatctatttaaataagtaaaatgctctttaaacaataatcgtatctttgtacaaagaaaaaaatccgctttcaatagaaaaaatatataaagaaagaaaatagacaatattatcttttttgaaaattaataacctaatatgttataaaaatggatataaattatattcttttgcatattttttctgcgcatctgtaatgaagaaagaggttcaaatttttttttataattttaatgctattttttaactgattttgtctaaaaataacaaattttgagattttgggcttatttttttaagaaaagaaagtttttgggggggccgacgatgccgataggcgccgccgggggaaatttttaagaatttttaatgaattttgttaagaaaatggccaactgatttttgataaaagtcggtcggttttttcggtttgctcgtcccctttttctgctaagttgctgaatttatgcaccatttatgcatagactttcaaagcaaaataaatttacggcaaaatgattatccaaaaaaattacatcactttcacaaatgcccgtctcatattatcacaattgccattttatatcagtaaaaaatttatttttattaattaattgtatcacaaaaaagaggaggtgcaaaataacataaaaaatg

SEQ ID NO: 115054 - DNA, 153 bp, Heterodera glycines
agcaaagggacggcggagacaaaagcgaaggcaccgacggaattggagggattggagcaattgggggagggggaggggagggagcagcgaatctcgggctgtttgaagacactgatcgatcagttgagcgacgattgcgaatggaaagcgatg

SEQ ID NO: 115055 - DNA, 241 bp, Heterodera glycines
aaaaaaaaaatttggggttttgggggccgggggtgccgataggagccggcccaaaagttttttggatttttaattaattaatataaagaaaattgttaaaattttaaaaatttttcaacctttctcccctttgttgtgaaattaactttttaagtcgggggatcggggtcggggagctcgggggcggggagcaaacactagtatattagataatcaaattttcttgaattaattaaaaatg

SEQ ID NO: 115056 - DNA, 119 bp, Heterodera glycines
tgttgttctgttccgataagaaaaaagaacaaattcaggaaaaattaagaggctattaaaagaataatattttacttttttggcttatttatattttttaggtgtttttctgtaaaatg

SEQ ID NO: 115057 - DNA, 859 bp, Heterodera glycines
atccctcccttttgtgcactatttcgtttcaaattgaatcatttttttttgtcttttgaaataaattgtgaaaaatatacgaaaattattttcggttttaattatgctgtacaatgcttttaagccccgcctgcggcggctccccttttgtgcactattttagtttttaaaattggttccggactttttggctttttgaaataaattgtgaaaaatatacgaaaattattttagcttttaattacgctgtacaatgcttttaagccccgccgtgaggcgggacagttccaaaattttgtaccacattttactgtggaaagtccaagtaccttattggacaactacgtgtcaatgagcacagtcgcctttggccagttgtggaacggaaaaatgggaatatcagatggggtgcgctcttttctaaaaattcctcttttcgtctaaccatccctcccttttgtgcactatttcgtttcaaaattgaatcatttttttttgtcttttgaaataaattgtgaaaaatatacgaaaattattttcggttttaattatgctgtacaatgtttttaagccccgccgtgaggcgggacagttccaaaattttgtaccacattttactgtggaaagtccaagtaccttattggacaactacgtgtcaatgagcacagtcgcctttggccagttgtggaacggaaaaatgggaatatcagatggggtgcgctcttttctaaaaattcctcttttcgtctaaccatccttcccttttgtgcactatttcgtttcaaaattgaatcattttttttggctttttgaaataattgtgaaaaatatacgaaaattattttagcttttaattatg

SEQ ID NO: 115058 - DNA, 560 bp, Heterodera glycines
tcgggtggggaaaatgcaaatccttcccttttctcacatttaattaaaaacagcaaataatttaaattaatttttttacttcttaaaaatgtgacttttaaaggctttcggtcgacaaaatttcaattttcgcttctcaatgatcacaacacttttgcttctttgttaaaagcagtgaaaatttgggcgaaaagtcagtctaataaaacactgttttataattatattcaaaattaaaatttttttatttttcgatcgtctgatttatgccggaatatttggctatttcaatggcgccgcattggctttaatggcgacaaaaatttcgcttctttacccaaatgcaccattgatttatttattatatcaattcttccgaatttactcacaattgtatgccattgataaacaaaacttaaaaatttatttaacttcaatttctgcttattcatttcatcaaaaaatgataaataaataaatgcaattttcccgttttttggcattatttaattgtttaattcagtgattggcaccgttctcagctgatgattgacaaaatg

SEQ ID NO: 115059 - DNA, 864 bp, Heterodera glycines
  unsure (1)..(864): unsure at all n locations
ccatgttaatattagttcaactgagtaaatttgcatcttattaaatcaataaagattttaaaacaataaataagtaaacagtgtaatacttaattaaaaaataatttctctcttaaaattcggcaaatgcagcgaataaattttcaacgcaagantttggattttgaactggtcctagaggcagtatagtttacatatccgagagtgtttattaaaaagaaaaagtcattaaattaacaattaaatattaatgaatacataaataattctatttaaaaacataattgttaaaaaacaaacgcttggttaaagtgcaaaaagcaaaaaaaaaaaaaaattagaaaaataatatggagattaaaatgataaaggaaatattaaagaataataaaaaaaattaatgaaaaagtaatacaacttactatatagaatcttatgtttttccttgtgtaaaattaaaaaaatgataaaaagggtccgaacgatgatcacatcattcatttaataaaacaataagaatcaagaggaaattcgtaaattaaactaaaaaatattaaaattttaaaaataatatatgaaatataaaaataatatattaatttaaatgcttttcaattaatttgagttttaatatcgctttttaaattgagaaaaatggctgatatatgataagatataaaccagaacaaatgtcttaactattataagaatttttaagaatttaagaataaaacacataagcgacaaatatatttggacaaaattcttaatacgagcataaattaaaacaaaaaatcaaaaactaccaacataattaatataacttacgttcataaaaatcaaacaactaataaatatactatg

SEQ ID NO: 115060 - DNA, 157 bp, Heterodera glycines
tttcgtttctgatttatgaaagaaatgtgcgaatgtgttgttgtaatgttaaggacactatagggagttataatctatatcttaacggtgttgtatatattgacgacgtatcagttaccatttcttttttcgagaaggtgaacaccgttataatatg

SEQ ID NO: 115061 - DNA, 577 bp, Heterodera glycines
ttaaatctttaaaaagaataataatttaacttttttatcttataactttttaaaacaacatttaagcgatgataataaacatagaaatcgatgcagatttttttctctatcgatatgcaaaatttggtgcagattgtatggttagaaaaaaagttatatggagagaaggaatgttgtttttcttaataataaaaatattagatagtatgccaaaaggagagaaaagttagagacaaaaagtttctctgcactctctctttattgacacatgtctcgttttttgactcggtgtgtatatgatcaaaaatcactattcctattaatgagaaaattctttatgaccaaaaaccactattcttaactaattagaattaaattttgccaatggatttgcccggatagcctgaaataagtgctataaaagccgaactaaatttacaaaattcattaaatataatggctacgtttttccttcacaaatgggcggctacgaactcgctttcgaaggccatatgtaccaaaaaaagaagcacgaagggaattaatttattggcgctgtgaccaaaacaaaacaatg

SEQ ID NO: 115062 - DNA, 946 bp, Heterodera glycines
tttcgaaataaacttgttttatgggttttctgggtcatagaattcgattctgatatctatttcagcccgtttcgaacccctgaccctgactcgaacaaaaattcgaaaattcaattcgaaaaaattcaaaatatgtatgcagccaaatgcattaaataaaaaggagtctcgattcagaaggcaaaacatagtaattcgtgcatttgaaatggttttgttgcatattttgaattttttcgaaaattgaattttcgaatttttgttcgagtccgggtcaggggttcgaaacgggctgaaatagatatcagaatcgaattctatgacccagaaaacccataaaacaagtttatttcgaaaaaaaaattttgaaaattttctttttcaaaaaagaggggggggggtacaaagtacactatttattattaccgacccgggtcttaaattgttcaactcccttaaaagggagtcttataattggagaaatatgtaaataaattaaaaatgattcacgctcgtgtatcacggcgattttctgcgcgtccgcgtcgcttttaaaccgcgttgcgccacacttttttggtccgcatcacccgcaaaactttaaagttaaaaaagtgaaattgaaatatgccaacatggtcttagtaatacacagttttagcaacaaaaaaaagtgcataacaattatctttgtaaatgagctatcgaataataccaagaatgtttaatttggatgcttcaagaacacttctgggtgcattaatgttgccaaaattttttttggtcttgtaaactgcaatagagccaattttttgctgctttccagttatcggcgagataaacaaataccattccacaattattcaatttgttttcagcaaaaagggaaattgtttttttgctttgtttaccaattgttctgatgacaacgcttgatgcgaagatg

SEQ ID NO: 115063 - DNA, 121 bp, Heterodera glycines
  unsure (1)..(121): unsure at all n locations
tccttccagcagaatagatcngtataaaggggtcgtcttccctcgactttacattcttctcttcttcttcttcaccacactccaaccaacgaaccgcttcagtgcgcaacgcaacgcaatg

SEQ ID NO: 115064 - DNA, 384 bp, Heterodera glycines
atcatcggctttgtcaatccaaagcgaaacaacaaagatgctgttttgaacgaataaagggcataggttattttgaagaagtgtcaaagaacatgcagcaataagcctgcaaaatctaataagtggaaaatacatgagtatagaatttattttcagaaagtgtcaacagacttttggaatatatatttgcaatttatcaacaattttgagaagtgagttagaaatgataatcttcacgattcaaaccaattttcgttgctctaattaaccgcgataaagacattcgaatcaattaaatagcttctgagataataaggtttatcataaaatttcatttaaaaataaaccctcaattattggtatgaacgatactttccaaacatg

SEQ ID NO: 115065 - DNA, 1003 bp, Heterodera glycines
  unsure (1)..(1003): unsure at all n locations
caccgccagcaattaagcaaattagcaaaaactcattagcgattaaaattcgctaaaaaatttgattggaaattctctgatcaaccaacaaaaaatgtcctttttaaactgtttagttattatttttttattcttattattgggcataaatttgactctgctactaagtttggccaattcaatttgttgagcctaaaaatagaaactagaaaaatctatattaataaaaataaattaattagaaagcattgaattcaaaacggtcacatacatttttgagtaaaataaatgtttttaacagaaaaatgagttttaagcattgaccgatcacgtggttttggagatgagttcttttggcataattgttgagtattgccgaaccaacgaaaatagtaatgagcaagtaaatttcgaaattgatgctatgatgaattttaaccggctgaacagggtttgaagcatttacatcatctccacagaaaacccgaaaatattctgctaaatttcgacttaaaaattttaaggaaataataatttcaccagatccattttgagataaatttggtgagcttttgggttgtcccgcactcgaacccggagtcccgaaacccgaaccgtacgccgaatttctttgaacgtatcccccgacccgaatcgcgactcgacacttttcttgacccgcggttttagttgaaaggttttatcaatcttttaccataaattatttttaacattgcttttatttttctttaatcgaaaagcaattagtgagtaattactaattacgactgtaaaaggtgttgaagctaaaaaaatatttcaccatttgttctaattcttaattaaagcatttattagacaaatgaaattaattaaaatgccctttggggaattgcttataaatacatttntatttattggtttttctaatacaattaatgcatttattatttttaaaatcataataattttgaataaaattaaaattagttttagaattatg

SEQ ID NO: 115066 - DNA, 117 bp, Heterodera glycines
ccttaaatacagtaagaaatttatgaattaattattgcttcgattttcactttattataaatttacgtattttttaatattgttatttaagcaattttattaccctttatagatatg

SEQ ID NO: 115067 - DNA, 53 bp, Heterodera glycines
ttccgaggccccaaaaattttaggaaaccggaattccgtgcccatccctgatg

SEQ ID NO: 115068 - DNA, 78 bp, Heterodera glycines
ttttgagcgatttttcgatttggcattttcagttttttcctcgaacgtcaaatgttttcgcactttttgcgcattatg

SEQ ID NO: 115069 - DNA, 137 bp, Heterodera glycines
ttagtgtacaattagattgtgatgagtacatgaccaaactgggttttattaaataagtactaaaatacaatttcatttttattacatactgagaattcatttgaacacacacagtcatacgctagtaattacaaatg

SEQ ID NO: 115070 - DNA, 407 bp, Heterodera glycines
aatttagattaggaaatcggaattgatcaaaataatttctggattcgtgatcggggaccccaaaaaccccagagaacaaatttttatgactatcacaaaaaaaattttgcaaaacaaaagggtcccccctttttaaaaaattttcaaaaaggcccactttccatatagcgcccaaaaatgtatgtccctcacaatttatgtttttggagatcagtttgagttcgattcctttccataacataatcttttcatttaatccatgtttagatttagatgccctatttatcccttgtaaaatttataggaaaataaaatcttagtgctttcagcactctcgcactttctccatttaatttacgactaatttaccttaactttaagtttcattgctttttctattgaaaatg

SEQ ID NO: 115071 - DNA, 772 bp, Heterodera glycines
aaacgaaagattgagaaaagaatgaatgagtcatcgaaatggaaaaaaggagaagcgattgaaattccttatttaaaagtgaatcattcactgatcggtagtacattaattaaacaagaggaatgttttatttgctgctaaaaaggcgcgatgagaagagcgaagagagaaaggaacgggggaaggcatgacatttgtgtcaccgtaattttctctgctaaaattggggaattcttgggcgggggagtctgtaagtctgtaattacgggtttagtcttttttttttaaagtagcaatttggggcgctcacacaacaaagtcaaatccgattgcgcggcacgcgccgcaatgattcctttcctcaaagagtttttgcgcttttccactcatttgtcagcccactttttgttttgaaaatgtatcatttgtaaagcaaaattaaaacccttatcagaaatttcgaaaatattaaaataaacaataaaattcgcaattaccaaaatgcattttcaatatcagcagaatttactcctcaatgagctcccatttgccagttgttcttcgaaaatctttgccaatttccgtggagggcaaaagcctttctccgaccaacgaccatcggccaatggcaaaagagagacacctgacgaagggggggggcgaaagcgacggacggcggtgattcgataaaccgatcatcattcacaaacaaacaattaggaacaaatctttcaataacaaatcttttagcccgatcaaagaaagcgaaatg

SEQ ID NO: 115072 - DNA, 72 bp, Heterodera glycines
agtttgtgttctataatacattcattagtccgaaactgggatttccaattaatcaggggggggataattatg

SEQ ID NO: 115073 - DNA, 359 bp, Heterodera glycines
ggtttgtttttctgctgcctcactattttaatcaacttcttgcaaagaatttcatgttccatagtttgtaatagacagtgttttcgaattttcttcccctttcgtgaaaaagtggaacttggataattctgctttctctcctcaaaatttttatacaacaatatgaaatgcttctctgctcttaagccaaaggattaaatcaattccgctaaaattttttcgtttcctagtctttgaagcgttgcccggtgctcaactgtggtctcggctcaaatctgacccacgtcattgtgacctcaacgaggctccagcatgactggagcctccaggattggctccgccggaaaagggaagagatg

SEQ ID NO: 115074 - DNA, 79 bp, Heterodera glycines
ataaacccataattgtgactactactgttcaccaaattctgttgatcattttttgcgcaatcaacaacataaaacaatg

SEQ ID NO: 115075 - DNA, 678 bp, Heterodera glycines
tgccatgtcatttggtcatacagttcgtccttcataacaatatcgagacatggcattgcaaatatcacatgtcatgccattccatggtaataaatattaaaaaaaaatatttgagcgtcctttcttttaaaaaaggtagtagttatataaactttcaccccccccccttcatcctaattgccttgatgacctttgaactcggatactcatatttctttcctcgataaacattaaacaacaacaaggcgaagtgaaaatcagttttttttgtagcattacacctttatttactgcagctttcaattgatatggaataaaaaattccgtatttaaaaacgttatgacacttgactaccacatttttttcaatatcaaaaacaaaattaaacttcagattttttttttgttcaccaactcgacaatgtccaattcgcgggcaagttgtcattaacttatcttcatattaaaaaatttagaacttcgctggtcttagggcaccgtctggtgttaataatggacaaacagattttgtactgttatggttttaaatatttatcaattcctaccctgattcagcctgctacttggtgtgatggattcacttttccactgacggctcatccccatccattaatgcctttaccaccagcaccaccgctgttgctttcgccgcatatg

SEQ ID NO: 115076 - DNA, 1003 bp, Heterodera glycines
cccctcccccctcgaggggaagtgagtgagtgtaagtgaactcgttttcggagaggggaccccgcactgcattatcagcaagtttggcgcgcgccatgttccgcagctgtttccggcgcccccttcgactgggcaattttgtccatttttgatttgggtgggcaaaaaaggaaaactgttgaaaatttaaaaaaagaagttcttggcataatgtttaagttttaagagcattttaaaatgccaaattaaatgaaaaacaaaatttaactcatttttaaatattatttaaaattaatttttgttttaccgtgttttttaaactgacactaccgtatccctcccccccccctccgccgcttgttgtccaatcattttttgccccgcgggcatttgggcggagtttctctttttttcgcccagcagcagcagcaacacaacgccaatgggccggggggagccaataattgccacagggctcttcttcgcttgagttgttgcgccctctcgcgttttacgattctcgggcatcaaaatggaacacacaaattacacgcgccccgaggggggggggcattttgccaaaaatgggaaatttaaaatttaaaaattaaaaaccaaaattttgttcaataattaggccacccttttggtaaaaatgccgtaaaacgcgggagagggtaattttgccaaatgtacacattaatttttaaaattcattaaaaacacccccctgagaaaacggcactgtcgattaaattgtgccaagaaatggcgattttaaaatttaattttaaaaattttgctctattttatggatatttttttatgtctaaatattacttatttcaaatgaatagctccggataaatgtgctagtaaaaccccaaaaagcttatgaccaattaatatgtcccatttgtggtcattaaaaaatgtaaaacaattgcaacaaaataatgcgctaattaaattaaacagattgtgagtcatacggtagataatg

SEQ ID NO: 115077 - DNA, 155 bp, Heterodera glycines
attaattgattttgaaatcgaattttaagtaccgacgtgctccttattaccgggtcgcgcgcgccgcacaacgaagtccgtgccaaaatcatttaataaattgaacatttaatttaatttttaaataggatgttcgacatatgttcgaaaacatg

SEQ ID NO: 115078 - DNA, 253 bp, Heterodera glycines
  unsure (1)..(253): unsure at all n locations
aaaatttctgccttttatacttntttgaaaaaaccactgagaaatgtatgataaatttctggatatttaagcggtgaattccccaccaaaaccatccattcattcaattgcactcacttccattgtttccctccatcgatcgaatcttcatcctgctgctgctgtacaataaagataattcccgtcagttttttttgttttgtttatttaggttttcaaaatgtattaaattttgtgcccttttttcaggatg

SEQ ID NO: 115079 - DNA, 1003 bp, Heterodera glycines
tttctttttctgcacataataccatgggtgaagcccaaaatattaaaaataaaaaccctgataaacctgtgtgaatttttggcatagcaaaatattagatggagttttaaaattcatgccctatttgacaaaataaaatgaagaaaaaaatatgaaaaatattaaaaaaggtatggaaaaatgtctagacagaaaagatttaactatgtgtcaagaattagcagaagaggccaaacaatcaatcgaaatagctaaaaattatcggcaagaaattgggcaaatttatcggaccgcttactcgcagccagatttaggtattggagatttggcaaataaactaaaagaaacaatgcgcgaaaaccaaatacggtttgaaaggcaaagacctcaggaagaatttagggatgaatttattgcttataaaatttaagaaaaaaataaaaattcgagaaaatgaaactgcatgagaatcaaaggttgtgggacataaaccaaaaacaggtgaaaagggaaacaggtgaaaataggtgaaaaggaaacaggtgaaaacaggtgaaaataggtgaaatttcacctaaaaatatataggggcgtgcatttaatggggcatattagagaatgtctcaactagtatcaataaaaagtgccaaaagaaaattttgtgatggttatcgctattacaaacataaaacgaccaagttcaaactttggtggaaatgtgaacttaattcacatgggtgccagggctggggttttgaaaaggaagggttttttacaatgacgcgccgacacaatcatcatcctgaccctatattaattgaaatcgaagaggacataaaatatcataatttttctgcgggggcaaaatgctttttgggtgacaacaagaaatagttgatgatgctaagaaaaatccgagactccaaactgaatttagagatgaatttattgtttgtaaactataaataggatcaagaaaaaaaataccaattaaataaaaatg

SEQ ID NO: 115080 - DNA, 361 bp, Heterodera glycines
tttttgtcctataattgaactcattgaaaatttagactgctttgcctctaaaaaggctcttgagagatttattttagagctggctaggggattataatatagtaattttttatttttgatggagtggattttgattttaaagaaatttgaattaatttcacataagcataactttttccggcaaagattaggtgcaaaagggcctaagttttctgtttccaatagtagggcagggctggatactgagcaatattttgggaatttagctaaatatttatttctcaactcaaaataatgttttaaatgcttacagccaccaggggctctcggcaaatacaacgaaaaattgctttccgagatg

SEQ ID NO: 115081 - DNA, 799 bp, Heterodera glycines
acagttgcgtcgcttccctttggaatttgctctcccactgcgtgtcactgccttggcatttgttggcatttactcccaaacatgccctggtccgagtttgcgcaaaaactgacattgggcaaaagttaagttgacaaaaaaaatgggacggactccccgcggagtgctcaaagcacagcgaccaatggttccaaggtgaccattccgcgttgagtggcacaaattggagaaagaccaggaagagggtgattattaagcagtggaacatttgcccaaagcatggcaaaacaattaaagtgattagcggcggaggaagaagcttccttcctccccggcggcaacggaacacaaacaatcggaagacccttccgtccctcactcactcacttcccccgtccttccaatccctttgccctctcatcttctcgacctaattatacgagcaaaaaaacagtaatttgtttgttttacactcaccaattttctaaaataagaaatgaacacacaacaacaaacttaagcagacaaattattgtttattcacttattaatttgttttgtctgctattttccacaattcccttgacaaatggccgaattgccgtcgctcgataccaaatttatgtggcagcacacgtggccaagtgcggatgtcctctgttcgtttcgtacaatctcatctttgggaatgtgatttttcaattgtattttcggtgaatttattgcgagcaattcggagctttggcgcggtgctttcattttggaactcggtgccggaatcgcggcacttccgtcaatg

SEQ ID NO: 115082 - DNA, 78 bp, Heterodera glycines
tttgcctttttgctctacgagaggtttccgtcctctccgatctcgccttaggacacctgcgttacgctttgacagatg

SEQ ID NO: 115083 - DNA, 397 bp, Heterodera glycines
aaaaaaaggggaaacagagataaaagtcaaattttagagggtctcaaagaaaagcgtgatttttcaggtacataacggaccgccgcatgacagcaattttggttattcgtacgccagacgaatgatcggtgggttggcaatgatcagctaaataaattcaaatttccaataaacaaacagatgtactcaaccgcggatatgctcaggagcacaatcgaaagtatcgagaaaaaataaatattttatttttgattaaatattttaaactttctctctccacctctctctctctctccacctctctctctctctccacctctctctctctccacctctctctctgtatttctttattttttttctctctctctccccgatctctctctaataattaatg

SEQ ID NO: 115084 - DNA, 494 bp, Heterodera glycines
agtccaaggaggctcggcgccgaactgtcacataaagacgacaaaaaagagtcagcaaaaggtgctcgccagcaacagcagcagtagcagtggctacgagttgaaagtggaatcgcccgacgcgttggacaaacggcaaattatcgccgaatcgggacagggatcgtgatcgcgatctgttgatcggtgtacacaaacacggtaaataatgccaaatcaataaattaattcaatccatttttagtcttagtatcaattttccgttaaaattatcggaaatcggaatcagacggcccaaaaaatttcggcaatcaaaaatcggatttttttttttttgtaaaaacaacaaaatggttaaatacttaattaattgcttcaaaatgatatttttcaaatgcgttttttgttctaaaggaatggaaaattgggagcaattgcgcgcggatgaaaagctttgttttacccaaaaaagcatccaatttccgaacacgatg

SEQ ID NO: 115085 - DNA, 140 bp, Heterodera glycines
tttggccagcttctgaacgacgtcaaaatcgaaatcagcagcatcgaccaactgacggaaaaattctggatggtgtgctacaaggcgaaggatgagcacgtggtggagcacgacaccagcaacgtcgccattgccctatg

SEQ ID NO: 115086 - DNA, 172 bp, Heterodera glycines
  unsure (1)..(172): unsure at all n locations
caaaacatgcggttcgtcagaaaaccgctcgacgacntgctgaagaaggacgcggaatggaattgggcagaaaattgccgcaaagcatttgataaatgaaaggaaattttgacttcaaatttgctgctcactcattatgacccgaatttggagatcatcgtctcggccgatg

SEQ ID NO: 115087 - DNA, 70 bp, Heterodera glycines
aattgacacctattggtgcaatacttcaacgtttattgatttcgggtcgaaacaataatcgtctacaatg

SEQ ID NO: 115088 - DNA, 876 bp, Heterodera glycines
  unsure (1)..(876): unsure at all n locations
aaaattaaataaatattaaaatgtttttattntaaaggatatgaaataaaatttataaaaatcnaataaaatggtactagtattttaaaatgaaactcaatgaaaatatatccgaatntaaaaaatagaattacgaatcatttggattttgtttaaattattccttatttttattctaaaacagcagataaaaaataataatttaagagttattgaaaaaactaagtgaatcaaaatcaattatggtttcaataattataatttaaaaaatataaagtaaagtactaaatatgagtgctaatcattttaatcaattttttaattagaaacaacaggatgataataaataataaaggtaacatgtgatttcgtcagaagtgatttcgtcagtgagtgatttcgtcagaagtgatttcgtcagtgagtgatttcgtcagtgagtgattttgtcagcgaccataataattttttttttaaaaacaatttagtttaattaaggctaatagtttattatccgtattaactggttaattttaatttgataaaattgataaaatcagttcagatctcaataaatttaaaatactttatatataaatataacaagtgaactcaaaagttcggttgatattttcgccggccactcttatcagtaaaatattggtttttgtgactcgtctttgctagtttatctcttgtatgttaattaatttctcgagggtcgccattatcattctgcattaacatcgagactctcgtgtgttcgttcatttctcgagactcgccacccatttattcgttttggattaacctttgaattttcacatgaaattgcttaccacaattttgcttttctcttttttgagttattcaatg

SEQ ID NO: 115089 - DNA, 860 bp, Heterodera glycines
  unsure (1)..(860): unsure at all n locations
tttgatagtgaaggcatcagagagccttatttacttttaattaacattggtgcgtttcagagcacgttctaaaaaatatttatgaattatttttgcaaataantaaataattaatgaaaaagtcagaatttcgaaaaatttaaaaacaacaagcgttggcattttttcaggttaagttagtcctttacaatggagaaggcctgcaaaatttggagagattatatcgattttagtgcgctaggttcgatgaaactttttaaaatataagcctaaactttttggcttatttaaaaagcaattaaaatttttaaaaattttattcatctccctttttgatagtgaaagcatcagagagccttatttaacttttaattaacatttggtgcgtttcagagcacgttctaaaaaatatttatgaattaattttgcaaaataataaataattaatgaaaaagtcagaatttcgaaatattttaaaaacaacaagcgttggcattttttcaggttaagttagtcctttacaatggagaaggcctgcaagatttggagagattatatcgattttagtgcgctaggttcgatgaaactttttaaaatataagcctaaactttttggcctgtttaaaaaggaattaaaaatttttaaaatttttattcatctcccttttgatagaaaaagcatcagagagccttatttaacttttaattaacatttggtgcgtttcagagcactttctaaaaaatacttatgaattaattttgcaaaataataaataagtaatgaaaaagtcagaatttcgaaaaattttaaaaacaacaagcgttggcattttttcaggttaagttagtcctttacaatg

SEQ ID NO: 115090 - DNA, 980 bp, Heterodera glycines
  unsure (1)..(980): unsure at all n locations
gtttgaaaaattttcgatacgcagcacctgcggttttatgaaancgatattgtattttcaaagttttgtgcgtaatgtattcagctacnacagataaaatgatacgtcaatgaaatattgcgcaaagaatatgtgaatattatcggaaagtaagggcaataatatgtgaatcatttnaatcgaagtaaatatgtgaaaataatatgtgaatcnaattaatggngaagtaatatgtggaaattaatatgtgaaatcaaataaatgggaagtaatattgcgcaattatagcaatcactttcgtatttattcgcatataattaaatattgtgaatcataaaatgtacctatccagttatttatatggttttcttaattccatgaaccttcggtttcaaaattcttaaaagcgggccctggccggccggagaattcccggttttctttcgttcccgctcacctttagtattagcaaattgtcaaaaattttggatctggaatccacaaaattcttggttattaaatctatccatatccattttcaaatcaaaatccaggaataaactaggcaacttttatgaaatgaatagttttttcttaaatttctacaataaatttaaaaaagcgcttaaatactctcaccggaaaattttcttgcatctttcataaataaaatagctctagtgcagaaacttcattcgatattttcatgtctttgacttctgttttctttcagtttgggttatttgatttctggataattttatttaatatttattcgatttggatccaggttaaaagacctaaaagccagatccatatgatattgatcaggatttggagtttaaaattgcgctttgcgggaaaataatgattatttatacttatcatattttaccgtgttgatgaattttggttttcttcttgggtggccaatagccataatgccaaattttcagataaatttgaacatattccaaatg

SEQ ID NO: 115091 - DNA, 382 bp, Heterodera glycines
tctaaaaaatttgttacattaaagattaaactatttatttgaaaaagctatttagggatacgatttttaggctctaaaaaaaaaccaaaaataggcactaaaatggaaaatagggactaaaaagtctcaaatttggaaaatgacaaaatctattcaaaaataataaaataagctaattaatattgagataaataatttaaaaccaaaattcttgtcaataaaaaaatataaattttgaagatgaatttttctgaaatttccatttcttaggggtgtatttttgaaaattttcggcttggttcttggggggtttatttttcttttttattactagggttgtaaattatatggattaacatattttttctgcgcatatgctatg

SEQ ID NO: 115092 - DNA, 107 bp, Heterodera glycines
  unsure (1)..(107): unsure at all n locations
aatgccacagcaggacgaagcagggccgtcaacatctgctgcatcggccgaagaagcgatggagccaccaccaccaacntccagcaccagtgccaacgccggagatg

SEQ ID NO: 115093 - DNA, 331 bp, Heterodera glycines
gtccaattttttcgtgatttattttatcaataaatggtgattattcatacaaaaagtgtcgtagatatgaaaaacataaaaacaataagaaaactgagtaaagaactatcagcatcaccattccttgcaaatgttcaaatctcttttccgagtcatattcatagtcaagagtcaaatttccagcagtcatattggccgtctacaaatttgatgtggtcagtagaaatgataggggcccaatgtgtatttaaggagtcaatacttatgtttggtattcaaaaatttcgaaatgtcttcctccgtcccatccaaaaaatcaattagcgaaatg

SEQ ID NO: 115094 - DNA, 1003 bp, Heterodera glycines
actgaaaggggtgtgtttttaaaatcaaaaaaccaaataccaaaaaattggtaccgctggttttcggtattttcagttcggttaaacgaccgtgactaaccctagtttaagttaattatctattcattactattattattattttattgcatttttatcattatttaaatgatttttttttgaaattatatacatatattaattagcgttattttttaaaaaatattaatttatgaataatcaaatggaattaaaaagaaacgaatttttaacacagtcaaagtgattttatcattaatattaatttgttaaccaattgtcaaaataataacattcattaatttctgtgtcaatcatcgctttgataaattaaaatgaattttcatgtggacaattgaatgtaaagtgattatgttgaaaattttattgtttaatcaacgattgctgaaacgaaatggcgctttaaaataaatatttaaataatggcaaaaacctgtatgcgagtgaatgggaggatttaaatgtccccatcgaaaattcaatgtttacaaatatattggtcattttgttgagttcaattttgatgatgtcatgcctttgttgtgccttgcgcaaggaatgtgcaactttggatttatttatggatttttctgtctggataaatgggaatggattttccggaacggcaaaaattgaaaacaaataatcaaaaagttatgtagtgtattatcaaaaattgactgatttggctcatttttactaaaagaaaaattattatgcacttttattgtggaaaaaagattttttatacgctgtttagttttgttataataattaaaaattgtattatttttttgtgttggttttaaaccaggacctcaaaaatacgaatgaaacattgagccattattttgaatagaaacattcgattaaaaattattttctacaagaaaattactaatttttttatttttttcaaatatatttcagtaaataataaatg

SEQ ID NO: 115095 - DNA, 302 bp, Heterodera glycines
  unsure (1)..(302): unsure at all n locations
ccaaaactttgcaaaacttaaaatttttntggggattccctttagtaaaaatagaagagccgatctcgagttaaaaacataacttcgaaaaaataaacagggattcgatagagggggtcaaaatattggcctatgcaaaatttcaaaaaaagttaccaattgggaaaaattttttccaggcaaaaattcaactaaattcacaactttttttaggctttaaatgttattacacgtaaaaaaactgataaattaatgaaactaagcaattcggggaatgaagcaaagcgaaaacggaaggaatg

SEQ ID NO: 115096 - DNA, 325 bp, Heterodera glycines
tctgtcaaaattgtaaaataaaaataaaataaaaatgaataaatatttttaatttattttaaaaatgtaaaaataaaatgaaaaaaatagatttaatttaagtgttgtaaaaacaaaaaactgaaacatttaaatttaatttaaaaaatgtaaaaatataatataataaatatttttaatttaaaatatttaaaaataaaaaaatttaggttttattttaaaagtgaataaaaacaaaaatgaaaagatttaaatttaatttaaaaagtgcaaaaatatgaaataaatattaatttaaattattatttacacagcgatctgcatg

SEQ ID NO: 115097 - DNA, 87 bp, Heterodera glycines
ggttggtggtttggtgaaaaagcataataacagtttttgattaattatgaaacaaaattcccaaattagtcattgagcattaatatg

SEQ ID NO: 115098 - DNA, 1003 bp, Heterodera glycines
actggaaactttcattttttgttcattcaatcctacaattgttacatgttacatgtcacatgtaaattataatccatataatattttttcctttgttcattcaagtctaatttgtttacatattagatgtcaacagaaattccctatgaatagattttaatttcatttttgttcattaaagtcaaaattaattatttgttacatgttacatgtaaacataacttccttgggtccaccactataaatatactggaaactttcattttttgttcattcaatcctacaattgttacatgttacatgtcacatgtaaattaaaatccatataatattttttccaattttgttcattcaagtctaatttgctacataatacatgtcaacagaaattgcctatgaatagattttaatttcatttttgttcattaaagtcaaaattaattatttgttacatgttacatgtaaacataacttccttgggtccaccactataaatatactggaaactttcattttttgttcattcaattcttcaattgttacatgttacctaaatgtaacatataaacacaaattccctatgaatagactttaatttaattttcacgttttcaatttttaaagattgcttttattatatggaatccgtttcatcttctttaaagtcaaccgagggccagacccagcagtaagcacgccggcgtcttccatcggaagtaaaaaaagaggcaggccctcgaaagccggagcgaagccaatcttggctacgcaagaaagtgtgtctttcattgacacacctcgaattgccgtcactcaaagtgaccagggttcgccgtgcaagaaaaaagggaaggttgacgaccaccaacccatgtttgctaatgaagcaattgcttctacgcccattaccacacaaaaataccgtggagggcgacctgccaaaaaaattggaggcccaggccgaggcagactcagtgattccatgagcaaaagctcaaaaatg

SEQ ID NO: 115099 - DNA, 566 bp, Heterodera glycines
ggtgagaggtaacgtaggattacccgctaaccaaaataaatgcggacctgccccttgaggattgtggttcgtgggcctgccccgttgggtgattgtggtccgaaaggtttacaatgaattccttatcgttaccggccaaaatccggtgcgaagctggtcccgcactttaccaagaccagtggactggtgagaggtaacgtaggatatcggagtcaaccaaaatgtggacctgccctttgaggattttggtccgattacctgccccttcgggattgtggttcgtaataagctgattgaattcgccaatcaatgcttaattttcatctgcattcttaacgggatgtgtgagccggtttctttcttcgcaacacactgtgcgaaaattggacatgcgagccctggcttatggattcgcagcggcatcatggtggcattcaaggaatatgcatcctttttcacattttcaatttttttgataaatatttgatttcatgtggtttaacggttgctttccctaaatactttgccgcatgtacacatcattgattcatttttgttttcagatg

SEQ ID NO: 115100 - DNA, 547 bp, Heterodera glycines
aacctgatacaaagcggcattttagggcagggatcccagccgagactcgggattttcccaaaaaatgaaaattcaagtattttttctaacaaaggctgaacattagagtaaccaaatttaatcattcaaatattagaaatgttgtaaatttcgcaatttttaatatatcttaagaaaatgatcatttttccgagaccaataccgggattcagggttgggaatcatatcgggatatggttgtcggggggtccgaatcccaggttttctttattgtttcccagaaattccattctgaaaccctgtcaaggtgaaattagcaaatcttctcaaaatttgcgggctccttatttattaccaaatataataaaaaggcttaggaatttagttatattggtttattaatttttagaatgtttattactttctctattattttgattgttttaattccgtccaacggtctctgggtgatatatattcatgcttaaacttacggttggattttgtaaagtgtgatcggaatgaaaggggtgaaagaaacgcaatg

SEQ ID NO: 115101 - DNA, 250 bp, Heterodera glycines
acatacatatgatcatttttggacaaaatctgataagaaacgaccaaacattttcaaaaatttatcgaatagcaatttgaaaaaatgatgcgcattatgaaaaattgtccttttatattagagttgtgagcaatctcctaaaacaaaatttcatcaccatttcctggctataaaagagccaattttctgtttttttttattattctcacatatcttatcttggcgacactattgcctattctttactatg

SEQ ID NO: 115102 - DNA, 1003 bp, Heterodera glycines
attaattaggagaagattatttttaatttctaaattcttttaacaaaattcgcgcactctgcgccttcccaaatcaattttatggtggtataataaaaaaaagggaaacataaaattgccattaaatttttgagttgacaagaataaatgaattgttttgctcattttcagtttattttatcggaaaagagacaattaccaaagcattatattttttaggcttttttacattattaaaaatttaattaaattttccaaaattcaataaaattcattaagccattcatactgatgtgagtgacttctgcggtgcgttcttatttttattttttaggcttttttacattattaaaaatataattaaatttaccaaaattcaataaaattcattaagccattcgtactgatgtgacttttgcggtccatttttcctctggccccccccaacctaagcgaccattaattacttaattgaccaccagctcttttctctcacgcaaatattaatgccatcaataattttgcactcctcctggcttcccccattttggcattgattgtttcgccatttttttcattttttcaaatccgttgccacggcaaatgcgcaaagaaatgccgcagcaggggaggagaaggtttaagaaatatgatgaatgccatttgtgatggctttaagtggcatcacaacgccaagcaaatgcagagaaaaaacaattggggcaaaatttgaaattggcacattcaaaaaattatggtggcattgatgccaccgttgaaaattgagtccatcacattcatttaattttcccatctgccagtggttttcagtgtctgtcttcataatataagtgtgaattctaactgtttaaattgaatgtcagttttaagtatgtaatgtaacaatgatttatatacatcatttattttttcatataatgaaaattgaggtaccactaatgggtgatatgtttagacaaaatatttgccaatatgcctaatg

SEQ ID NO: 115103 - DNA, 131 bp, Heterodera glycines
ccgttcggcaccgctttaaaagccttcccattcaaaaccttcattgatacaccattaataatgaatgatcctacccttggtcgttctacaaatgacaacaaaattttttccagaatttacgcgttagcatg

SEQ ID NO: 115104 - DNA, 290 bp, Heterodera glycines
atcgatgagcatagaattgggccgacaaacgccaaatgcgaggccaacggaggctgagcaaatccgttgcgacacgtcggactttgagctctgccgcttcgctctgatcagaccccactttggacttgcacttcgccaacacaacaaaagtcacacgagtggcaatgagtgccctttgcccgtcactctctgcggatgggtccgtcacaatttggcgttagttcatccagaaacattaaacatcgccgggttgagaccgaggagtgccgttttgctcctttcgccaaatg

SEQ ID NO: 115105 - DNA, 1003 bp, Heterodera glycines
tgtccacagagagcgggcgccgtacacagcgaaaagaattagccattggggcccatcggaagtgaaatattggaaccacttaatcaaatttataaataaattcttatggaattccgattaccaagtctgctgatgcgttgtacgtcataagaaaattcacttgaaacagacagaaacttcaatattttaaaaaactctttaaatttcaatcatcgaattaagttctctatttttttaattgggaatttaccaatgagcaaaaaaataataataaaataaataaaagttcgtttcccattagacggattaaatgaacagactttacgcatcacaatattttttaaatcctttactcaaataattccattactcatttttcatcacttaattattttttatgttcactttaatttaattcggcttctttagctgtctccacttttttccaatgctttgtgctcattaatctttggggttttcatttttcttggtcaatcaaatccaacaaatttaaatggctctacaggtttagtagttatctatttagtttgctagcctaatggcctggcctcagtttttgattaactttgtcgaatgttcagaacagtgtaaaaaaagaagaataattaatagagaccgagccggaccggatccggtaccggatttttctggatccggcaatccggtccggcgattttgggaaaaatccggattgaccggattaccggattgaccggattatgagagaccggatccggaatccggtcatttttgaaaatgccaatccggtccggtccggcgaatttttgaccagatccggtccgactcggtctcaaccaaaaaccttcttttgttcatttttctttgaaaaatatctctggcataatgtctttaacatttaatcattttgacaaatttcaagtgggatttatgtgtaattttaataatctaaaattttttaattgataatttatgtcttctttgttttaggtttattaaaatg

SEQ ID NO: 115106 - DNA, 278 bp, Heterodera glycines
gcttaaatttttgttaatgattttttattaattttttttccaaaatttcaccctcaaatttcattttgaggaacttcagcaggtacgagtggaacagcccattgctccaatcgcacgcgagccgccagatgtaggcacggtacacatgcgtcacctgtacccagagcggagggcggcctccagctcaatgtgcgtgacagttgtcgaaaatcctatcaagaaaaatatttgcttaattataagtttctaaacccacccctttcagagtcctcaaaatg

SEQ ID NO: 115107 - DNA, 56 bp, Heterodera glycines
  unsure (1)..(56): unsure at all n locations
aaaggttagaatttttctttgtcaaccaaatcanacatttgttggtagcaaaaatg

SEQ ID NO: 115108 - DNA, 173 bp, Heterodera glycines
caaactgaacaggtagattaagctccaaaaaactacaaaaacaatagcaaaaaaacccaattaagctaccgaatggtggaagtagtgctcgaaagtgcgctgaatgtctgttcatcttcccaaatggtgggtgctacgactaccatctcagcaaccacgctccagctccgatg

SEQ ID NO: 115109 - DNA, 1001 bp, Heterodera glycines
tttttttgacaaatgaatttgcccgaggggtgcattcttccctcgtgaccggaaaatcggtcagtggaaaatgcgtcagtggaaaatgcgtcagtagaaaatgcgtcagtgatgcaaatattttaaaataaaattctatggcattagtattgtaatatagaagtaaacttctataagaaaatcattctcaattttttaccccggacccaaactcgaacaaaaaatcgaaagtcaaaattttcgaaattagtgtttttcttcaaatcggtttaaatacacagaaacaaactgaaatacatcaatcctgcaataggagatcatgtatgccgtttttgaacaaaaaatgcttaattcgaaaatttagacttgcaactttttgttcgaattcgcgtccggggttcagaattggccgaaatggataccagattcgtggtaagtgcccccgaaaacgcaaagaacttgtttttatgacaataaaattttcactgacgcattttctactgacgcattttccactgacgcattttccactgacgcattttccgggcgccagccggagcagtgaccaaaggcgtcgccgggaagtttttcataaaaattgcaccgtaaagaaagttttatgaattttcaacacgccactggtagaagttggttttaacctcataagtgcttgttttagggcccatttttaattggtatttaaaaaatccgacctccaaatattcataaaaaattatatagttatttgatataattgcagaaatatatttttacattattaacgattcattgtcgacattataatgccacgctttcctttgttaatgcatccatctcccatttacgtatttccattcagtgatgggcgtgacattttatttggcatttcattaccattctttattatatgctattaatatatatttttaaatcacaattttataattattaaaaaattttttttattgaaataattcctgtttagaaatagtaagaaaatg

SEQ ID NO: 115110 - DNA, 216 bp, Heterodera glycines
tttccaatggcaatttgcattataaattttattttacatttgcagaagttgatggcactgcatttattgacagtttggaaaccgatgtaaccagtgggggaaatgaggaattaccattaactggtcggcaacagctgaaggtcgttgaaaattcatttttcaatttaaatttttcaattttaatcataggaatttcgtgaaaaatttgtcaaaatg

SEQ ID NO: 115111 - DNA, 518 bp, Heterodera glycines
ttaataaccaaaatcaaaatgccaacattaaatgatcacatgtcgtcctcccaaacttaggtacagtaagacttcaaaaacagaaaaaacgaaattacggttgccgaattttttttcaaaagaagtcgtctggaatttgcgttatctctggaaaatagcttaaaataggtcaaatttgccacaatatataaatatgagcggtattattcattcaaaaaccagataagcaccaattttcgctcaagtgatcaatagagctctgagtcttgaaaaaatatcgatcgcgattcgggattggaatcattccgggatagttttactgggattcaaatcccgattttatcggaatccgatcccggccctttttaagaaaaaagccgcgatcgggattgagaccccgggaaaatcccggcgggatttcgatcccgtccgggttctcgtgatcagaaatcagttattaccattatccaccgacttttgtatatttcaagaatatttagattgaacaaaaaagtatg

SEQ ID NO: 115112 - DNA, 142 bp, Heterodera glycines
tccttgactttttgtcgggtagctccatttttcaatttcttcattatcttttctatcaattttctttatttttaggtttctctgttcgctcccttttcacaaattgtcaaatattttttcatttaaaaaaaaattcaaaatg

SEQ ID NO: 115113 - DNA, 696 bp, Heterodera glycines
tttgaattatatttaaaaatggaataatgaatgcataatgaacgaaggagaaaaaaagggcacaagcaccgaaattgccgtcgcaggacataaaatgacgcaattaaatgcccaaatttcaagcacacattgatatgccttgatgctttggtctatcaaacacctgctaatttaaaataaagtcacatgcaaatgagtcgaataagcggatattccataggtcaaggtcataaattatgcttctaagtaaaaattgcgaacaccccaaaaatccgacatctgctaattctcactattcattttaaaatttggctaacattttgcattttttttaatcaataactatctcatttttgctgttaatcagggcggttgatcaaatcctggtctccgtttatcctgacagcatctcttttagctcttcatggtagatcaataaacttttctaatttcccgagccgtttaggtgccctgtcgtcttgtgcttcatatggcagtgcgcagctcatcaggccaagatttgtttgccattaaaaaatatgattttttaataaaataattaaaattatgttatttcatttcatttgtgctttttccatttccattatccgtcaattataaaatgccacaagtctagctattttactcatttaaccaaagttaatccctaattatttaaaatagattacaaaaatg

SEQ ID NO: 115114 - DNA, 559 bp, Heterodera glycines
  unsure (1)..(559): unsure at all n locations
ccatttctgctgaattcatatctatgtgnnttagtggtacgggatcggaaacagggttcttgtttgttttccacggactcaggttcggaaatcaacttttttaggtattcccggcctacaaaaaaagtctaccggcttattttcataaaacaaagtttatctaaaaagaaaagtaaatttccgagcaaatgttacaattgttggtgagaaaaaggcaaagattgctcaagttgcaatcagtcagtttgatctttctcgcactaattaatacacagtgaaaatagaattttcaaattccctcttttttcaaaatttctggcgattcgttttgagttttcttaaactttatatgctggcgttaaagttggaatcgatgtccctagagcccgcaaagttcgaatttgcggtcccgctgcgggaatggaactcataatttttgcgggacgaaatccagcgggataatctcgcaaaatccccgcgctggatccctcccgttccgggaaatctgttgttttaattttttttctgatattttccaattaaatattcaccggttatg

SEQ ID NO: 115115 - DNA, 309 bp, Heterodera glycines
aaaatagaattaattttcatgtacgaaatcaagaaaaaaattttttcaattattttttaaattgtttcacttaattcaatcatttacaaaataaattcaatttagaaattgaagaaatgtaaattaaataaaatattaaatgcaaccaaacaaaactaatataataaataatataataatattattttttgtacaaaacacataataagttcgagcgataataactttttaaattctttcaatgtgaattaaaaataaattgataaaaaatataaacaaaaatatttgtcaaaatttaagacaaaaatg

SEQ ID NO: 115116 - DNA, 373 bp, Heterodera glycines
gtatatacattatacatgaagtaagcgttggtgtgggtggtgtcatggcataagccagcagcagcactccgtttatttattcgtcgtaatgcttgttaacggggggggggggggggatgaggtgaaaacattgtagggttgatggttatacacactttataaaatccattcaattggattttacaaattctctgaatagagagagaaagggaatgagaaagagagatgctgcacgcattaaatgccacgtttgatttgtgccaaaaaatggcaatttaagcgcggcgaaaaggaaaaaaatcagaatttaaaaatcataaaaattcaaactcatcaaattcactcaacatcatcaccaaccgtgaacattatg

SEQ ID NO: 115117 - DNA, 700 bp, Heterodera glycines
ggtgggcaacgaactgataaatggacaaatgggcacagcgcgtccgtcctctcacttttcacttttataattgagttatttactcctggatcaaaactcggaaaatcgagagagatattgtacagacttttgcagttgggaagcaacgatttaaatctcgccaactaagccaaattcagacatttcgccaactaatataaaatcattttttaatttatataatgtttaatgttattagtcattgctctgaattgttaagagagcaaccgacacattgctgaatcgctgatgagagcctggtttctcatagataaacaaatttgcatgaaattttattattgtttcataattaaaatcagttttaatctacatagttggcaaaattagttggcgaaacgtccgaatttgggtgagttggcagggaccagagcgtttgggcccccgtttttgggcccccgcgtttggacccccgtttttgggccccggggtcgtttgggccccaacccaaaaatagaaaaatgtgcttttttaaaaattaagattctaaaaactaagcctgagggatccctcgccacttggcataagttaggtttaattaacattcgctcattttttacaattttacttattccaaatcctattattttttaatagttaaccaatttgatgtacattctgatttgtaaatttttcagaaatg

SEQ ID NO: 115118 - DNA, 427 bp, Heterodera glycines
ttcccttcaattaaaaattcatttgttttaagtgcttttcgcattttaccgaaataaccgcaaaaatatgtatttcagtctaattgtaaggcacaaataaaataggttttagcaattttcgcatcgaatccattttgtgcgtccaatcaaaactttacgcgtcaaatcacagattaagtgtcccagcaatgactatataggccacattcttggtatcaattgaaagcttaaagtatacagaagtttttgtataactaatttgtgctcgaaacagtaaacaaaaaattatttacaaatatagtcgaagaaaagtagagttataaaatacatcataagtcataaccagacaacactaaattatgttcacaaaaaacaaataaattgttacaatttaaggtaagctaaatatttccctaaattgcaaatg

SEQ ID NO: 115119 - DNA, 1003 bp, Heterodera glycines
tcaaatttaattttggagattaacagcctttttctttcttaatgatttacaagtcatcctaatattcaatttgctcagactaacagcaattgaacacgatataaattataccagctgggaagctcctgtcaatctttgatcattttggatcgcatttaacacaaaaagtttgtaaattaaaatgtatttaaagatatatgaacttttttgcctttcccacaaaaaaatgccattcattagtgatgtgaaaatctttcactccaaaagggtgaaagcgaaatcaaaccctgctggaaactggaagtctttataaattgaaaatttttgaaaaaataaaaatgtaataaaattttaataattcattgattttcatgaaattattctaatgcgatttgttaacagattttgagaaaattttttcaagaaaatatatatttttagggtcgggcggtttttatttttttataagtagccctaaataaaaatgttctgagaaaatattttgggcttctctcgccataataacgcatagaaaaatatgatttaaaattccgggctctgttctaaaaacaaatctccctgagttggttcaactcattcaatccgctctcctttcttcagaacaatcattaatgactctgatattaaaaagtattataaattcattcttgctttgacttgtggtcctaacaatgattccacatgttaatagaaaaaaggggatcttcatgaattaccaaaacacaagtactatttaatgaagtagttaatcttaaattgtttttgaatatgaaactttccaaaataatcaaagattgataagggcttaccagcatttggtacaatttattttttgcttccccggccctcgggaatagctttttctctttttttataatgatataaataaaattttcattcatttttttttgaaattgtgtatatcctcaaatgtcgggtcctcaaaagtcgggtcctcaaatgtcgggaatatccgcaaatg

SEQ ID NO: 115120 - DNA, 91 bp, Heterodera glycines
ttttgttgcagcaaattattaagacagttttcggcactttttcagtttcgtaaatgggctttattttcttagaaattcatatgaaaaaatg

SEQ ID NO: 115121 - DNA, 651 bp, Heterodera glycines
tttttggcctttcatcactgttcaaacaaacaaacaaaaaaacatcaaaaaagtttcgttctcagtttctccttttaacccgaaaaattattttaattcaatcaaatcgctggaaagtttttcaataaattgtttttttaattttcttattaagaaatttcttaagaatttttttggaaaatttcggtttgaaatttttaaaaaaaatttttcgggggcgaaacgacgcggggggaggagaaacgacgactcgctcccctgaatttgtgcgtttcgcctcacaaaaattttttgcgtctgaatggttccagctattgggggaagagggggctcacggctgcatgcgtaggccttgaaatcggggtttcattgagaattcttgaacgcgtgcgtcattttttgaatctttgtgattcctgggtggacccttgggccccgttgtttctgcactctctcacttttcacaagtgccgtcgccgctggggaacagtcccggctcacagccctggcacgtgttcagtccgctgtggatgtgaaaggacagccaaatttgctcggcggtgccaatgctgaccacgtcctcgtgccgcacggtgtggctgacgccgggctgaacattgcgaaattgggtttgaaaacccaaaaataatg

SEQ ID NO: 115122 - DNA, 283 bp, Heterodera glycines
ctcatctccttctacttttccctgcttaatttgttttgttatgcctttggcattgccaatttttctcactttttgtgttcaacaactgttcaatttactcatgtcaatctcttcttttcgatctgttcttttggctatgtctcaatgctctccatttttttcctcttctttcgacggacggacaaattaataaattgttttattttgggataacatttaattattcatttggatattaatgttttgtagattttgtataatttcatcaaatctttgagaaatg

SEQ ID NO: 115123 - DNA, 896 bp, Heterodera glycines
cggttgcacaattgtaaatcaaatacatttgaagattttcaagcgtaaaaagttttcgatcgtccgccaaatcatggccaggatttttgctttttgaaaaatcaattcttaggggtgcattttttgaaaaaatttatgtggattcttaggggtatatattttttaaattttttttattattgcattttcataataatttgaaaaaatagttttttttttaaattcacaagtcaaaagagttattaaaaagtttcataagcgaaaattctgtagttgaaaatagttgctaaaaaggcgctatatatcgaaaagtgttcgaagaaaatttgttttttgcgcttatcagttgggactggatttgtatggatttccattttttttttgcctacaaaccacgtaaatagtgtttttagctttgtttgatgcttctaggatccttttttacttcatatttttccatatttcagatttttgtccatatttccatatttgacaatgtgttggactcataaagtttaatagagttaaaacatttgttttaattaacccttattttcctaaataccaatattttaagtgaagaaatattgtaaattttcaactttcaacttcaaacgtcaaaaaccattgccagaaaatgaggaaggagaacaacaaaagcagtgccgcctcagcagattctgatgccaatgccaaaagtggtggcgatgcttctctcaccgcccccactgaagaggaggcggaagaaatcagtttaattattataatacgtttggtttcactaaaaattctttctttaaattaaattgtcaaaaatatttggaaaaataaatgtaacgctaatccctttcttcgagcaaatttgcacctaattaatttatttacatatagatatg

SEQ ID NO: 115124 - DNA, 419 bp, Heterodera glycines
atcagggcttctttttttatgtacctgttttgttcctgcattctccatagcctaattagtaggaccccactttctttttcgtgtttgcgaacaaaaatcgggacttttatttacatattccgagctttttatacatatttacacatatttcgggtttttgtacatatttggtacatattttggactttttagcattttttactaatgaaaaattaaaaattttttttgaaaatgtacccctaaaaaatcgttttttttaaagatattaaaaatcaatttttaaaatactaaaaatgtgaacgaattgttgcattaaaatgagaatttcccgactaaaaatgtgttttttgtgcacttctcagtgaaacgaagcaacagaaaaaaaaaatgaaaaactaaaaatcccatccctgcagatg

SEQ ID NO: 115125 - DNA, 107 bp, Heterodera glycines
ttttaaactgacatttaaaaataaatactatttaaatttgtatttaaatatttaactttgcaaaaatgcgcgccaatttgtcttttctcctttttgtcttcgttatg

SEQ ID NO: 115126 - DNA, 78 bp, Heterodera glycines
atatttatccatcaacatcttaaaagaaaagtcaaaataaaaagtaaagggaattaattcacttctcttgggaaaatg

SEQ ID NO: 115127 - DNA, 556 bp, Heterodera glycines
agtcagtcatttaaatatttttatccaaaaaaatttttttgggtttcggggcagtccccctgaaccgatgcgcccagatttatggggagaccgaatccttccggaatagcttcactatagcctgtactttaattctgcgttggatttttgctccccataattgtttgagtaccccaaacggacacttgaaaaaatcgatttttttgttttcggggcagtccccccgagccgatgcgcccagatttatggggagaccgaatccttcgggaatagcttccctatagcctgtactttaattctgcgttggatttttgctccccataattgtttgagtaccctaaacggacacttgaaaaaatcgatttttttgtttcataaatatttttttcagaaagagctctaaagcgcaccaaattttatttacaacttaattttagcactctgatgctttagtatcaaaaaggaagatggagaaaaaattttttaaaaaatttttccttatattttggttatatcgttttgcttttggtggggtgcttggaacagtggaatcatg

SEQ ID NO: 115128 - DNA, 178 bp, Heterodera glycines
tttcgctgcccacttagagatggcattaattcttcataaataaatactaattaatgtacaatgcaattttgattaaaaaaacccttaataatttcacccaaatttcatactcttagaaatattcgcgtttaaattaatttttttatttatcgtgttgtctattcaaatttagaaaatg

SEQ ID NO: 115129 - DNA, 1003 bp, Heterodera glycines
aaaatttttctgcaacttcgtacatatgcttaataaatatttcagctcgattgaccaacagaaacttagtatttgccatttttcacttttttcccatttttggcattattttttaaagtaagcatattgcattgacaatttaccacagcagcagataatttaaaaatttgattgaccatttcgcaatggcaaaagaatatttgagcaaatggttgctatacatttatttgtttttaataatttttcattaggtccatttttatgaatttccatattttttcctcaaatattttggattaaatataaattaaaaatagttaattatagcttggttttaagtttttaagtcaggactcccatcggatgagttctagtcaaacaattttgactaaagactttttgaaattttatgactataactttttttttataattttgtaaaaaaaaaattaaattaatattctgataggagaacatttagagctttagaatgacaccatgaaatatgattttttttttgaaattgagccaagatacgaatttatatgttttacattttttatgttcctacaacttggcagttttaagaaacgcccatggtggcgctttttaagaaacgaccttcggaagggttggtcctcaaattccccaatgtttttggaagttcttaaagcctaatttcataaatttttttatatcccaccccccccccccccacaattatataataataattataataaaaaagaaaaataaaatattgtacaaattatatcgtcacatttacgtaaatgcgccggaaatccaaaaaatggcaataacaactatttttttcatttacgtaatttatattaattacaataatataaattacatttgcaatattgttggctttgtaaggctcgacaaatgtttgaataaagcaatgaaaaatggatagacgattttaataatatgttttatttaattccaaactccgattgaacaactaatttttcagatg

SEQ ID NO: 115130 - DNA, 443 bp, Heterodera glycines
attaatttattaattaaaaattggaataaaactattcccagagtatcgtcgtcgtcaaccgtgccccttccgttctgtatatcacttgtgaccctaagcatcacacagaatttctgcggaataatggccaattgctaaaggagataaaagaggaccatggacggtgcctcatcaacctgaacaaaaaaatggaacgctttgagatcagttgcgatttaaaacatagcggcaaccgatcggcggcaattgagtcgtccaaggcgcacattgagaagatcatcaatatgttggtgggttgtagaagattatgagtcaacaaatgcccattctctgtcaaggagtccaaggtggttcaccacgtgctcattccaattcgccaccatcgcaaattgggcccacacctcagctcccttcgggagcagttcaacgtccgtattcaaatg

SEQ ID NO: 115131 - DNA, 1003 bp, Heterodera glycines
tttgcttatctgataatgtaaaggaactttcgaatgataccatgtttgtttgatttgtccaacaaagaaaaacagttatgtaaagttgtctctcagacgcagttggcccgttccgtcccgttcataatttaaatcgacctgaaatacattaattaaatgaaatttaattggtttttttaatccgggccaaagccattcgggactcaaccgtcggggcgcaaaaatttggtccgtcccttccgcattgtgtgaaatggttgctgttcggtgggacacatcttttttttcgtcacaggcggaagcgccaatttgaaagaaagggaacaccgaccgaacggcggagggacgaaagggcaaaatcgaaaaccaaaaattggtctcccgtccccaaaaaatttattattttttttcaaccactcgtaagtttctgcgttccattccattgctcatccgtacgtttttgtcccccgaaatatttgccgataagctaaaatatttttaaaatttagaaaatttatttttgctttagatttgcttattttaaagatatatttttgcttgcacataaaagggtgatttcagccttacaaatcacaattttttaacaaatccaagcatcctttagctataatagcttcttttctttaatttctttttttaaataatattctttatataatggaaaatgcggataggcgccgccggaaaattttgaaaatttgattgtgaagtgttaacagattttcaccaaaaaaagacaaaatttttgcgattttggtcaatttgttaagaaaaattgtgcgttattttttggggttgggcggtgccattggcgctgccgggagaaaaattataacttttgacccttttaaacagattttcattgaaaattgtctatttctaggttaaatttagtaaaaattaataattgttttgacaaaaggccaaaaaatttaattttttttttcataaaatctacatttttacttcatacgcaaaaatg

SEQ ID NO: 115132 - DNA, 1003 bp, Heterodera glycines
aatgatagcaaggtttaaaaatttggttgttttagagcaaagttataagaaatttttttttttttttgatggttttagaaataacgcgcataatgatggtttttaaataatgacaaagcacccaaaataccatcaaatgggaaatttttgacagaaataattcataaccttgctcgaggaacaaaattttgaatttttatattatttctaagaaaattttttgaactttggcatgaaatagagaacatttagggctatagaatgatattaagaaataaaaatatggttgctttttagaaaattataagcaaaaaaaattttaaaaaatttttgtacggtaattcaaaatttcaaaatttgtcgactgactgttaggccttatacaaatgtattttttctgaaaaattttacattattctgacaacagcattttaaaacttcgtgaattttaacctaaattcccagccctactaataatgtgataactgaaaaattaatatttgtacaagtaattcgaaccggtaaaagcttacaaaaattttggaaacaaatattttaatttttaaaaaaccgagcttatagcatattaaaaacccatttattcaataatcgtaataatataaaacattaaaaaaaaattattctgaatttgcactttatcatatggatatattatagtcaatgaaaataattcatacaaaaaattcatcatatgattcgggcatttctcagcaaatgtgtttctcttcaatcagaaaaaatccattcgaaatattttacaaaaagaaatgctttattttatttaaaaaattattattattattatatatctggcccaaattatatagaaaaatgaaaaaaaaaattaatatagaaaattttttggaaacctttaaacgctttttatctttttttaagttcttaatcattctaaacaattcacccattttttaaataatataacgattaaaccgttaaaggttaaaagcttttctttagaatg

SEQ ID NO: 115133 - DNA, 85 bp, Heterodera glycines
ccctaagggcattgatccgccgtcgttggatttgttggcacagcacggcattttggccctgcgacgtgccaagcgccggaacatg

SEQ ID NO: 115134 - DNA, 488 bp, Heterodera glycines
  unsure (1)..(488): unsure at all n locations
ctaataataatgggttcaactttttggcaatttccggaatcatttgcacgaactttgancactgggaataaccaaaacaacgcatacaacaatgctaatgaaagtgggcaaatggtaaataacaatgtcggatggatggattgatcacaaactttaatcaattttgcaaaatagttcatgtatttgaatcatcatttcataataaatttaaatattaatcattataaatttctttaatcccctttggtgtttgaatacacccgtaaatgtgacaagcgcatcgccggttagcggcatgatgcattagtttctcttttgtgccggttcagaaatgccgcacatccctttgttatttgaatttgaccccgttcgcatcggtcaccgaagcgtcggaccttggctacacagatggccacgatcccgcctcatataaaagggcacatgggaaagtcgccctcttttttttcctccattcaccaccaaaaatg

SEQ ID NO: 115135 - DNA, 155 bp, Heterodera glycines
ctttaaatctttaaaaatggttaatcttttttaattacatacacttatcgaccgtagttattagtcgtatctttttgccttttgtaaaattagtgaccaaattgctaaatgtttttactttaaaaatataattaaataatttctttcataaaatg

SEQ ID NO: 115136 - DNA, 1003 bp, Heterodera glycines
ccaccaaaattcaaattgctttgttggttcctttttgttttgtgcgaaacattgagccatttaaatgagtcagcgaacttccacttaaaaaattttgttattctaatttcaaaagttttacttaaattaaatcaattatatgtctatctggaaaggtttttgattcactgtattataattagacagcatgttcaattttgtccattcactgcacatctttaattcatatcataattatgattattcctcaaatgaatccgtctgtggctatttcaatctataatcgtcgtccagcataacgcaatctcgttcaaggataattctctcacctcccccccccccctccccccactttcttccactcatttttcctctttatctcttccgcctcccctccctctttccttcctcttcttgatggtcaataaaacatgcaaatatatggatttctttggttttaaatagggttcctccccgacatgtttcggggaattagtaaattgcacttgaaataagatggaagaatctttaaatgagtttttaagacttttttgttctggactttttctttttgtgtttttttagactttttatgaaaatttcctccccgacgaaggtgttgctccccgacattttttaaatttctccagccatccccgacaaattcattcgggggatttcctccccgtttcccgacattttgctccccgaggctcggggaggaaccctagttttaaatctcaaattgagtaggattcaatttttttttttatccatttttggctcagatttttagcatttttcaaatttttgcctcattttagttttttacaaacgcacttaaaagaaatgtgtttcaacccacatacaatccaaatttttatgaaatctacactaattttgcaaatctttcaagtttcagccaaaatattcattccatttttgtgccaacaatttcccagccgatggcacttttttgtctgtaaaaattgcgccaaaaatg

SEQ ID NO: 115137 - DNA, 1003 bp, Heterodera glycines
tacaaaaatgatttagaacaatattatagtacttccaacatgaaaattatatacaaaattcggttaaaaaatatgtttattatataattagcattaatagattattttttagcatgtgttgacttttaattttaaaaattaatttgcacaataattaataaagaaaaaagaaaattatatagaaaatcggttaaaaaatatgtttattattaattagcataaatagattattttttagcatgtgttgacttttaatttttaaaaattaatttgcacaataattaataaagaaaaaagaaaattatatacaaaatcggttaaaaaatatgtttattattaattagcataaatagattattttttagcatgtgttgacttttaatttttaaaaattaatttgcacaataattaataaagaaaaaagaaaattatatacaaaatcggttaaaaaatatgtttattattaattagcattaatagattattttttagctgtgttgacttttaatttttaaaaattaattagcacaataattaataaagaaaaaagaaaattatatacaaaattggttaaaaaatatgtttattattaattagcataaatagattattttttagcatgtgttgacttttaattttaaaaattaatttgcacaataattaataaagaaaaaagaaaattatatacaaaatcggttaaaaaatatgtttattattaattagcataaatagattattttttagcatatgttgacttttaatttttaaaaattaatttgcacaataattaataaagaaaaaagaaaattatatacaaaatcggttaaaaaatatgtttattattaattagcataaatagattattttttagcatgtgttgacttttaatttttaaaaattaatttgcacaataattaataaagaaaaaagaaaattatatacaaaatccggttaaaaaatatgtttattattaattagcataaatagattattttttagcatg

SEQ ID NO: 115138 - DNA, 1003 bp, Heterodera glycines
agatgtgtaccaataaatagagaatgccagagaaaaacattatctttttttctctaattttttgtctccttttggcgtactatctaatatttttattattaggaaaaacaacatttatttcgtgacgtttaacttttttcctgcacgttaaatccacaccaaattttgtatatcgatagagaaaaaaattctgcatctaatgataggtcaggttaatttgaaaataggtcgattcgagaatttattcaaaaaacaaaatttcaaagcatcatatcttttttctaactcatctaattgcttagcatttgcttacaaaaagcttctcctcataaagagctttcgaatgatatcaagtttttccaatttggttgggaaaaaccttcaaaaataattcccaaaattcggcattttttaatattttggacaaaaataaataaaaatattcatgttgcacaacggactcgaaccaccaccctttgtccctttactatcttacaaaaaccactgagccacacatgcaaatcttttctggtacaggagctcatttctgggatggtgtgccctaaaagtgattttgggcaataaacgtgaattttggtgaaaagatgaccgtaaaaaaaccttttttcctattgatcaattgcttagcttttgcttagaaaaagcttcttctcatcaagagctttcgaatgatatcaaaattgtccaattttattcactcgtgtaaacacagcggcccaattttgggctcccagtgcaaataagattattatttatttagtaatcagaacgccaaaactttgcaaaacttaaaattttttggggattttcccttgtaaaaatagaagagccgatctcgagttaaaaacttaactttcacaaaataaacttagaatcgatagaggaggtcaaaatatgggcatatgcaaaatttcaagaaaatcgcaactttggaaaaatttttacgactgcgcgaattttcaatattttagagctaaaaatg

SEQ ID NO: 115139 - DNA, 747 bp, Heterodera glycines
aaaccgccacattgggcgtttcttaaaaccgccagggcgtttcttaaaaccgccagggcgtttcttaaaaccgccaggtgggcgtttcttaaaaccgccactttgggcgtttcttaaaaccgccagggcgtttcttaaaaccgccaggtgggcgtttcttaaaaccgccactttgggcgtttcttaaaaccgccaactcatatgattatgtatgtatatccgttaaattaaatattcaataatatctattaatttttatttgttgtgcaagtaagtgtcagccggaaatattattagtctagcagtgacagactaaaaatctttattaaattaatttacaattatttacttaatttttatttggttgtaccaataggtgtcagcaggaaatatgaggctggcagttttattacaatttaaatggtataagtagctaaatttctttaacatacatttattataaaaaatattattgccttaattcctttaataaattaatccaatgttattagcatttatattcttttcattcataaatattattaattgtattagctttgatgaatttgtttcaaacaatggcgcaaaaggcttggttgaccaataccttaaaaaagaaataaaatccaaaggagaattgttggaaaaactagccgaaattaagttgacctaagcttcaggacgctggaaagatatatttcaaaaataaaaaatcgaaaatcaacagaaggaaacaaagacaacatg

SEQ ID NO: 115140 - DNA, 1003 bp, Heterodera glycines
tttgaataataccatacaaataaatacgatattgagttgataaataatgaaaaaaaaagttttttaaaaaaggaattgaatacttaaaagataatttaataattacataaaataaatgtttaaggacagaattacaaattaataattaaccaaataatatttatcttgtttcaaaattatcctaatacaataaaaacaagaaataaacattaatataaaaaacttaatttaaaacaatttgaataaaattattcaaaaaccaaagtttttctgcttaaaatgtaacaaactcctatataagacgagatttttttttgtaagaatatgaacgcgaaaagtatttggtattatattaaactaatatataaaaataaatataactccaacatccttgagaaaggatcagctctatagttttataactaaaatactgaacaaaatattaaagattaataaatttataataattattaagtacttttaaaacaataatattttcttttctaaaataatcattaaataaaaattatttatttcgaaagagataaaagcagaaaaataaattactttcacagatactacaactaatagaaaaaaaattaaaaaattaaaataaaaggtgaaaaaatcagtttaatactctgcaacaacgaacaatgactcaacaacaagatagaaatgctggttcggatgaagttaaataatataaatatataaagtcaaattacatagctaaaaatgggaaactactaaagattgtttggacattttcaaacatgttttaacttaaataaattttaaattattttacttataatagggtatttacacacttttgggtattaaaataaataaataattaatcaaccaatcacatacctctaaatataagtaaattttctataaattattaaataaaggtattaaaaataggaacacttataatttttttggtttttcttaattttcatcaaattgattgaattagatttgatagtaaatg

SEQ ID NO: 115141 - DNA, 453 bp, Heterodera glycines
tgttttaatcaatttaggaactaaagtgagaatttttaaaattttgagttttagactttttgttcgaattcgggtccgggattcgaaattggtccaatgaaggtcatattcgtgatcagcgaccctgaaaacccccataaacatgtttccaatactttccagaataaaaaaatttttcgtcaaaaaggggggggggtaccatctatagtattgccgtcatcggcacttatcttggttgtagagatggccacctgctgtagctttggggtatttcttttggtgtcatttgatgttgcataacggtacagaataataaaggcttaaaatgtttaaaatttatggtcgaatttaaattaattaataaatataagaataacacaattaatttgacaattaattgtccaaataagatcgcaaaaaacaacaaattttctttcctaattaatcgacatg

SEQ ID NO: 115142 - DNA, 789 bp, Heterodera glycines
ataaatattaaaataaatcggtgttaaaatgtaaaaaccatttttttatttaattgtggacgcgtgtacaaaatatgattccagggtatattaattattaattttaaatgtttaattactattttttcaccagactaaaatttaacaattattttatctttttataaaagtttccttgcataacattaaaatatttctgcaactaaatttaaaaaaaaacctctgccatgcaaaaaattagtaataaatattttcaaatgatttaaaactttttaattaaattttttttagtaatgacgcatcacaaatttgtaaattttttgtttttttttctaagcaagtcatggtttttacggcattttaaaaacgcatggtgaagtttggctgtacctgagaaggtatgcgctctctacattgcgaaacttgggcatgggccgaagccgactgagtgacgaagtgaatttattaattttttagctttatccacgaccggaggccccgggttttttttgccatttttttaagctcaaaaccgactgtctatttccgtcgataatacccataacaaatgaacggtataaactattcaagccgacctcattaaccctattttccgactttggaatttggcatatactatcgacctgatattctttttttggcattatgcagaccgattgcaaatgatttcaaataccattagccaaaattcggaaccccaaaaaatgcttcctacaaaggggcggaatgcaattaatttaaaattaaattttaatgcttttttagatg

SEQ ID NO: 115143 - DNA, 62 bp, Heterodera glycines
aagcgatttgtgtgcaaacgggacagcagcagcaacctcacaacacgatcaacatacaaatg

SEQ ID NO: 115144 - DNA, 151 bp, Heterodera glycines
gcacgcggtcagtccgctctttgtgctgcaccggcacgcgctgcgacgcgtcaaccaccggctgatcagtcagcacagagagaccaatgggacggcacagcggcgcaaaatgatcaaagcgacgcccaaatgggtgccccggtgagaaatg

SEQ ID NO: 115145 - DNA, 392 bp, Heterodera glycines
agaagtgggaactaacccagctcaatttaaaatgatgatttaattttaaattaatataagtttcatcttgccatgaattatttaaatataatatttctattccatttccaatgatcttatgtcgctttgggccttgaaaaagctctcccttttgtctgcattttatattttggtttcttatatttagcaaatgtccattaaaaattatgaattgcgattaagcaaaaatgcagatgagcagtcggaagcattttattgttatttgaagtcagtgattgaagaacggagcaaatgtaggcaaactgtcattatcggattttcaggtgtttgaattcattaccatttgagtgtcttttcgaatttgtcctcatttttccaaaggtggttcgatg

SEQ ID NO: 115146 - DNA, 114 bp, Heterodera glycines
cctgggcttttatactccccggaaaattaggccacgcccactttttaaagctatttaagccaagattttctcgcaaaatcaaatcagtcttgcaaaatttcatcaacaacaatg

SEQ ID NO: 115147 - DNA, 543 bp, Heterodera glycines
cctgcaggtcccccccctcatttatccatctactttcattttaatccgctcaaatcccaccacattccttccctttacaacatcatcccattttcccactatcccattcccatcgcggattggcttagattggattacatactttggaacaaaatgattgagctttcagattgcatttgttttttcccatagaaatatgtaagtggaattaatgaaattcaaagtaaaatttaaaataaatggcctatcagcactaatcatcttttacagatccctatttacttaattagttcaaacaaattgctacttgttaaggatcttctctatataaattttaattttataattttgataattttcatttttttttaaattttattttaattctatttataattttataaaaatagtaaaactttaacatcaatatttttgtgtcaatttaagccttattttcctaaatagcaacttttaagtaaataaaaaaacattgtaaattttcaactttcaacttcaaacgtcaaaaaccattgccagaaaatg

SEQ ID NO: 115148 - DNA, 1003 bp, Heterodera glycines
ttttgcaggccaatagagaactgatagggctatcgaatgatgttaagattaaatttttaattaggcttgagcaaagttatggttagttttttgttgaaaatttccatttgatggtttcttttttataacgccctttttggatgacttttttataacgatatattagagtgccacgggaccgggaattttgggcaaaaccgggaccgggactttccgggacctgagaagccggtcccggtcccgtggcactctacgatatttcgccactaggatctcctggtacttatatggttcgtacgtaaagtcgaaatccctaaaaagtcgagaattcaaacgtgcggcagtgaaattattcaatttgtccatgatttaagtaagaataagtgcttaggaaaattatatatgtcagttgcggtattatatgaattcgaaaattgattccccattattgttgtttctttgcatttggttatattgttgaaaaattttgaattttcgacttattggggatttcaattttaggtcgaatcctttccggggttcgaaattggtctaaatagatgtcataatcgtgttcagcacccctgaaaaccatataagtgactttctaagtaaaaaaaataataatttgtggcgtacgaaccatataagtaccgatctccttccctcagcagtttgggggtataattacaatttactatgacaatttggaaagttacatttttttttttgcaatttacgcaaaattaataatttttataaaataattctcaaattgttaacaaaaaattattatttttggttaatttttcatgacttttctgcactttttcgttactttttgagctttttatgactttttcgtccaaaatttaaaaaaattagtagattcaatttgaatgggtagcgggagagatatgagcgctgagattaaaaatcaaataatttttgaagttttaactaaatgccaaaattttgccgattctttagttataaataaatg

SEQ ID NO: 115149 - DNA, 86 bp, Heterodera glycines
ggtgttttaattgaaacatcatattaaccaaaagtttatttcgttgttagatcgacgaaggctttgaaattttcgatgacatcatg

SEQ ID NO: 115150 - DNA, 61 bp, Heterodera glycines
tgttttatgactcttaataagctttattaaatacattttttcatgcagttgtgctcaaatg

SEQ ID NO: 115151 - DNA, 724 bp, Heterodera glycines
tttgtcaaagtttcacatattcttacattagagacgcctccttgtatttctgtatgttttgttggagattcatgtgtctttagacattggacggtttcagtcccgggtctgtaactcttcagggagtggttgccgccaaaattttttttcatattctttcatagagaccgagaggagtcgattgatattatatttacattttcaatcccgtcagtatcttcacttttaccaaaaatatataaattcgcaccctactcatttccaatgtttttgagtaatttttattttgaaagctttgatcaaaaataggtacatatgtacctatgtgtcccggaaaacatttttttgtcccgttaacctcgtttaattacctgttttagacaaatttgtttgttttgttgaatttccaaatgctgcttattttaaagaattgttttggtcggcttcatgttatttgtcatcaacttacgcgcagaaattttcgtcttcttttgcatcgacgaaaggaattttccgtattccattaaacttcctgtccacaaaacgaatgaataaatgttttagaaaccgattttcttcagcgtcggtcagccaaagtcttctttcactggtggaaatgcatcgggcggtagcggcggaatgcctcctaaccctttgtcggttcgtctcggcaccttttctaatactttcttttagtcagggcatgtcaaactggcagaaaatg

SEQ ID NO: 115152 - DNA, 92 bp, Heterodera glycines
ggtttgacaactgcgacccgcaatggctgatcagatgcccgggccgagtgaatctgatcggcgagcacatcgactactccgtgctgctgatg

SEQ ID NO: 115153 - DNA, 80 bp, Heterodera glycines
ggtattgaatgggcgtagttaattgatcattaaaatactttaatttcaaaaaggtaaacgaagcgggcgagacgctaatg

SEQ ID NO: 115154 - DNA, 455 bp, Heterodera glycines
  unsure (1)..(455): unsure at all n locations
atttgtgccaatggcacatccggcaaagttgcattgccaatgtctttaactatcaagcgacaagggttgtatgcaaatgaaanatccctaaataaaaaaaattatttttttgaggaaatgaggcagattaagctacttcggaaaaatttgcaataaaaaatttactgtaaatttcgttccttttccacaaagaaaattttataatttaatcattgatttattaattattattatgaaagttcaatttaaaaatttgtttttccaaaggttttggaacacaattgaatcaaactccaactgcctatttaatttagcgtttaaaattccccagtcagctagataatggcacctcgttttggtcgtgtcagagttactttggtgcgcggcattttttgccgctaattcaaagtgtcccacattatttaattattttagtggttaattagaaagttatg

SEQ ID NO: 115155 - DNA, 263 bp, Heterodera glycines
ttctctttttggcggccggaggatccttcggatgggaacctcgaaaaggggattctttccccgtttcatgcggggaattaagaatccccgaccccgaattttcattcagggaagcagaggggaatacagtacccctccatcaaaaaatcgattaccgtaatcgatcgccaaaaactgatataaaagaaggaaatttgatgacaatttcattccttcgccatcatcaagctccaaacaacacccagcgcctcagcaaaaccatg

SEQ ID NO: 115156 - DNA, 83 bp, Heterodera glycines
ggcaaaaaaataatgattttaaataaatatttattttgaaaatttaaaagatcattttcaaggaaattccgcgcaccaaaatg

SEQ ID NO: 115157 - DNA, 478 bp, Heterodera glycines
tgcctgcaattagcgctacctagaagatgtatattaatgtctaattgaaaaaaataactgataaagtgcgggagaggaatgtaaaacgttatgaatttatacgaagtcaagttgtccatccagttgtaagtgtattaggctacgagatcgctaaaatgttaatgagcaacaaataaatgagcggatttgaagacggaatgaaaaaatttctatgtgacttcatttctctctacccctttgttaattttactacacactactcgattggtaaaccaatgtacataagtcgagttaaatacccggaagataaacactaccccttgacaatactcaaagttttggatgatttctttagaaaattcgatattctgttttgcccgtcaaagtggacgacaggctctgattctctttatgtatgaagtgcaccaaaaaccatccaaaaggcaggatagacgtaaatacatatgcaaacataatg

SEQ ID NO: 115158 - DNA, 257 bp, Heterodera glycines
  unsure (1)..(257): unsure at all n locations
aatgacgactgcttcgcctatncatctgagcaatccttaccagggcaagcatctataatcagggaggacgcacttttcttccaatatgtgaatggagaagagcatgccgacaatgtggagccataacctatgcgaattatccacataaatgtccagcccaaattggccaaacggaatgggtgcgctgtgcacgatgctctggaccccatcaaagtggagacccttgttttattcagcctctcaaagatgaacctatg

SEQ ID NO: 115159 - DNA, 281 bp, Heterodera glycines
attctgattgtgttttatttagagaacccttttccgccaatggatgacttagaaaaattgcgcaagaaaaatctggtcgattatgtggagaaggaattgctgaggactgaagaataataatagacgtcaatcggaatattttattgtttcctttccatcgattattatgcttgtttccttttttggatatacatatatccgaccggaaaaaataaaacaaggattcccgaagtaaattcagttttttattaacagagataaagaaatagtacaccaaaatg

SEQ ID NO: 115160 - DNA, 226 bp, Heterodera glycines
ttttgaacgatcccattgatttccctggtcttattctttccacattcattcaaataaaaatattcatataaattattttcgtattcttttgcctttcttttttaaaaaaattcaataaaaatattataaaatttagttctaatatgttagaatgtttcactcttctctaaattaatattcggtatttggaattggttaaattaaaattgttttgtgcttgcagatg

SEQ ID NO: 115161 - DNA, 224 bp, Heterodera glycines
aacaaaattttggaaaagattcgttagaggatcaacaaaattttcaaaaaaatacgttagaggaaaaaaccaaaaaattccaaattcctgaggatctgttggtggattctaaaaaacaaaaagcttggaattatgtgtcagaaaacattccaaaagtggtggcacggtcaattttggtgtttattgtggataatcaagtggaaatcgaactgaggcaaatcatg

SEQ ID NO: 115162 - DNA, 203 bp, Heterodera glycines
aaagcatgttttttgcccaattccgcacctcaggcgtatttttctgggcattacatggcattagagaatgaatggcatcaattttatccattttttgcttgtgctagactaaagtaacttctttttttgccggaatcccggatttttttgataaaaatttattaatccaaaattagtaaaatttaaaaaattggccaaaaatg

SEQ ID NO: 115163 - DNA, 198 bp, Heterodera glycines
atgaacatttgaggggcgaagggacatttttgtttttgtttggactattattttctatatttgttcttttagtcgtcattttttggttacactttttccttaggattattcaaatcctcaatatttctctcattttcctctttttgacatttttatttgaattgtccgtcgtttatgttgctcaactgaataataatg

SEQ ID NO: 115164 - DNA, 549 bp, Heterodera glycines
  unsure (1)..(549): unsure at all n locations
gtagagaatcaaagaataaaagatagaccgggaggggtcgtttagtctggccggtttagtcagaggggacgtttaagtnccccgctagtaaatagagaattcttagggctatcgaaatataaattaattttggttaaatttcattttaaagactttaaaattttaaatgtttattattatatatgcattaccattgcaaaaaacatagcctgttcaatgctttataacttcttttatacttaagttaaaaatataagaaaattatattctgaaagagaacaattaaagctattgaatgataccccgaaatattaatttggttgaatttgagccaagctattaatttaattattttacccattttttgttttcaaacccattggcagttttaacaaacgcgcatgggtggcagtttttaacaaacgcgccagcacgactaaaaatcattggaattgaatcattttcactatttttaaatgttatttagagttttccatcaaagatggcacggctaatcctcgttcatgccgagcaggaccaattaaaatg

SEQ ID NO: 115165 - DNA, 686 bp, Heterodera glycines
ataataagaaaaaaataaaattaaattaaaatgattttttattattttaggggaataaactcacaaattatttaagagaatgggggaaaggattagaaagatttaacaaaacatacctgaagatttgtttatccctttttttaatttattttttagtatttggggatacggtcatgcacagtatgccatccgccttttccatttcattttacaaaaataaaatactcactcatcactcccttttttgttttgtgtaattttggttgttttaattgttgttcattttttttgatcatttggccatttgattgttttggccattttggtcaactttcgttcttcgataaatgcgacaagaaatgcaaaaacaaaaatattttttagttattaggtaattaattaattctgactcgggagttattgttttggttaattttctgttgatcaaaattagtgttccaaaccacgagtgcttcccatttcattaaattttgttgatattttcgtccgatcactctccgccgtcgttcgtttgatttttgatccgccgatcgtgcctttattttcgtgctaaacgctcttcataaaaagagtcgcaatttgcactaaatctcacaatgaatcccttatttttttgtaaaattattattttattaattttaatattttatgttaatagatcaatg

SEQ ID NO: 115166 - DNA, 100 bp, Heterodera glycines
  unsure (1)..(100): unsure at all n locations
cggcaaattnaaataaataattaaattatgacagcattttttaattttcgaaccctgtacggtaccacagctgcttgaactgtgcgcaataagttcaatg

SEQ ID NO: 115167 - DNA, 656 bp, Heterodera glycines
  unsure (1)..(656): unsure at all n locations
aaatggtttgaaagtaatattntcgtcaaatcaaattacagctcgcgctttctctcagtaaactccgtttttattgtgggttttatatcccaccgttgacagcgatatccatgcgtcgaagacttcatttatttgtaaaaaaaagattaaacaatttttttaacaaaaaaaacaaagagaaaaacattttttaggaatgcccataaaaatgatttttttttaatttacagaaaattttttcgatttataaatgtataattttttaagaaaaagtctcagtttcgagtcttttgggtctcggggtcaagactccgagcatcactattacataataattttcaggtgccgaattaaaaaattcaataaatctcgaatttttttatgtcctgatgaaaactcaggcccaggtttcttatcccggcaagtccatggtcccggtattttccaaaatatccggtctctaccaattttaatttaattgaaacgcaaacaaataaaaatacgttctcattttacattgcacacatttatcacaaaataaaagaacaatttaaatgaaaggatgtggattttattaagaatgagaggtttcaaaagtgaaattttatttacaaaagtgttattgagttcagctcataaaaaacaaataattaatg

SEQ ID NO: 115168 - DNA, 108 bp, Heterodera glycines
tgatgaatcccctaatgattttggtaaaatcattaagttaaggtggatacacatcttgtcatatgatcaaatggtttcgcgaaaaatcaataatcagacaacaagatg

SEQ ID NO: 115169 - DNA, 1003 bp, Heterodera glycines
gctcattggcaagtgcacaagtgaaaaatttttttttgttgaatttgcacccctaattttcaattttttaatgcatatttcgtgcatatttgacgatttttgtgcatatttgatgcatatttggcaattttatttgcatatttatgtgcatattttggtcatttttcgtgcattttttggcagccctgttaatgattcgttcttttttcgatttttaactatttatgtttcttttttgtatttgtcttttgggctaatttttgagtaagtaaaattttcagtactagcaaaagtagtgcagaacatctttgccctgttgttggagattttaatttaattaagatatttgttttaatttaaaattattatggcattttatctctatttattttatgtttgttgacctctttaatttatgtttggtacattttttttcacttctcattattctcattaatttgttttccaaaatttcctctctaaatttcgttctcaatttgcttcacattggtgatctcctcggacttcaaaaataaatattgtgtgtggctttgtcttcgtgtgtttggtctccaccccccaattcaattgaaggaaaacggttttcttcctatttggcgctcctgaggaacagcaggtaaacggggaaaggtgagatcggaattaggtagttttgtttgaagtccgaaccggacaacaaaatcaacggaattgaattgaccctgagccagggcaaatttcaaaatttgaagaaaagaagttggagtgaagttgaagaaaagagttggagttgaagttgaaaagaagtggagttaaaaatcctgagacaggataaagggcaacaaaacgattcgagtcgaacgttttcaaattgcaacaaattcgagccgaactatcgcattcgccgtcctaatcgccacgccatcaaacgaaaaagtggaaaagtgtcgacagcggaaacttttgttttgtttttgctatacctgagccagatgcaaaaatg

SEQ ID NO: 115170 - DNA, 178 bp, Heterodera glycines
  unsure (1)..(178): unsure at all n locations
aaaaaaaaatgtttgggaccagtaaaacncattattgccgtttaattttagctcaaatacaaaaaaattcaaataaataatttaagctggccgtaacgtccacaagatgggccgagattgaaggggaggaggagaagagggcgttcgtccggcgggaggtccggcggttagagcgatg

SEQ ID NO: 115171 - DNA, 103 bp, Heterodera glycines
gagcagacggtcaactggcgacatccatatgacaacacgtacaagggaccttttaaaagttttacttttacccccaaacaggaatatcaatgtaaccgtaatg

SEQ ID NO: 115172 - DNA, 627 bp, Heterodera glycines
gatgcaaatacatatttttcctggattctctatgctctgaaatagtaggaaaatcctttcttttttgtgtttacgaacaaaagtttggacttttatttacatatgtcgtgattgttatacatatttcatacatgttttcattttttttacatattttgagaatttatagaagaaataataaaaatttatttttgaaaatgtacatcaatgaaaatggtgttttttcaaggcggaaggaatgaatggaaattttttgtgaatgaatgaataaatatattcaatcaatttcatttcccctctctgtgctttggcaatctttggcctccaaaattgaccaaagttttccattttatattatttaatttgcaataagcatatttaattcccgattttttttattttaaacaatttctcttaaatattttgaaattatcgactaatgaaaattccctttatattgtttaataagaacttaaggattttttttctattttatgcatttttaaataaataattttaaaaattttctcatgaaaatctcttcacatttttttttcttttacctttttaaatttagaagaattttttctgtaaattttatcaaattttctacaaaaaaaggcaatg

SEQ ID NO: 115173 - DNA, 453 bp, Heterodera glycines; identical to SEQ ID NO: 115141

SEQ ID NO: 115174 - DNA, 354 bp, Heterodera glycines
aaaaccggaaaaaaaccgtgactagtcccggtctcggaacttcggtactcagttgtccgtgtttaggtcccggtcccgctcaactctacttttgagcatagaaacaaattatttttcatttttggtggtttttgagtaatgccttaacatcattgagttgaattttaaaggaaaacatttcttgctttcgtctaattacgtaaaagattatgaaatttgtcttatgtataaaaattttactgcaaattttattcattctaaattttgactgagttagaaaaaacaatttctcaaaatcagtgtgataaattcctaaatatctcagtcctcgtcataaaatattgtttaagaatg

SEQ ID NO: 115175 - DNA, 1003 bp, Heterodera glycines
actctaattatttttgatgtaaagttgtgtaggtctttatttgaacacttcgtccttaaaatttcttcagtccatttgcagaatttaagccggacagcgcaggaaaggtcctatgatttggctttagtcgagctagtcccagtcaaagtgaacgggatcggaactaaaagtcgtatttgccgggactctcgtcccggtgtttccagttcaggcttatggtgaaaatcttccatttatcattaagtcccaatttttccttaaatttcctcaactttttaaagttttgtatcaaaaaattcacaaatttttaaaacaacaaaaaattctcattttcaaaaaaccctttttaacccctccaaaagggtggggggaagtttgggcaccaaaagtttgggcaccgggaagcaatgcaatttttaaaaaattaaaaaatatttttgttaattaaattttatgcatttgttgattatatgttaaatatataaaagaaaaaaataattaaaaagcaaatggaaaaataaattaattaaaaagtaaatgactaaattattagtatgtatttacttttcactgatttattatataaataatttgagataaatgttaattaaaataatttgaattagccaacatttatcagctttttgaaatcgttatctttagtctgcacatctgctgtttacataaacattaatatataggatgaaagtgaataaaaatattttcatgaataacttaagatgggaattgtccattataaattttttctgttttctgtgtttaatttacccaaagattttcggttttttacaatttaaattttttacatcgtcgagcggaagcagctttacgtgccttatacaatggcacttcccgaggatcagaatttgtgtcaagcgattcatctgaggggcagcagaaggagcccctcagcacataaattttttgtaaattgtttcaaaacgccatggctaggaaagtaaatcgcttttaacgcacaatg

SEQ ID NO: 115176 - DNA, 683 bp, Heterodera glycines
atggcaaatataaaaataattaattaattcaagtttaattaatatttttatttttttcatgcaaatgaaaaacctttttaatatttactttattaatgctcctctttttatgttgtgtcataaatattgtcctacttcgattacagttgaataactttagatttctcacacttttcttgacataattaagttattaaactattttaaaatattatcgctatttttgacataaatctgttcctaacaaatcgggtcacaatgatttttgataatgttcgaattaaccaacagtatttaagcaaattgaaaattacaacctcattaaaagaccattcatccattcgatcattgaaattattcataaataactgatcaaaaattaatccaaaattgaccagtgccaaaaagttatttctcatttccccgccgatcagtgagttgcgtctgttttcattggtacgtgaaaaaatccgtgacaaaggtcaccgtgtcctcctccgcgttgtaccacccgttggccgggtccatcagtttctaaagcaattttccaatattttaacccttcagttaaatgccccggtggtacgccgtttaaaataataatattaaattaattaggaaagatatttatagaaaatagataaaaccaattattattattattattttatcagaaccatatg

SEQ ID NO: 115177 - DNA, 497 bp, Heterodera glycines
aattaaataataataatttaatttttttctcaaaaatttctccttctcaaccgatttccttatctacctcatttttcacccagacccctttcttaccagtgcttattttgactcgaaacctgaccaaaatcatcgggtcgggtttcgtgtcgagaaaaatgtcgggtttcgggtaacccgcggcaactctgatatggtcaatacagaaataatacataaaattaaaaaaaagggatgaactaccactcaggacttattttctgaataaaactctttcacgagttttttaaatttagctaacaaataaacttccgatttctatagctgttttgggtaagcaattccattattactgcatcttttgttttgaagcctaatttttttttcgttgctatcttgataaaaattcggaaaattagaaatattttgatggcaaaaataaaatataaaacaaaaaattttgttcacttaatccaaagatcaacattgacaaaatg

SEQ ID NO: 115178 - DNA, 302 bp, Heterodera glycines
tatggtcataaaatttcaataagacttgagtcaaattgtttgacaaggactttcttaattgatatatttgatattctatatttatttttaaaatttcaaaaaatttattgtttcaaaaaattcttgaaaaaatctaactcattacttattgaaattttattactgaaattttatgaccaaacctttttataattttgtataatttataaaaaaaaatattttttaaatattctgataaagaacacctagagctttggaatgaaaatgaaatattaatttggtagaaattgagctaagttatg

SEQ ID NO: 115179 - DNA, 1003 bp, Heterodera glycines
atgtcgtttacagcccataaaaaaataataatttttaaatcaatttataaacatttctaggggttttcggggtcgctgatcacgaatctgacatccatttcgaccaattttgaatcccggacccgaattcgaacaaaaagtcgaaaattcaaatttttcaaaaaatcattttacggtgcgaaaattacaaaagttcaacaaaatgccatgaccaaccacagacaaaatcaacgctcgcatcgatacaattcatgggtctgtatcgttttggcgccgccgttttggcgccagcccaagttttcggactataacttttttaattgttaaccaaatccaataatcttggtatcattcgaaagcttaacatgtttagaagatatttctaagctattgcttcgcgattagacaattaccaaaaaagttataacatgaaaattgtgaaaagtcgaaatttttgaagtttttttttcataacttttttccaagcttgaaaatcttttcgctttttgtaaagctaatagagcatgttaagagctttcgaatggataccaagattgttgggtttggatgacaaagaaaaaagttataatggaaaagcatgctggcgcccaactgaggtaaaccacaaaatcccactcttttttttgcgaggatgtctaaccgggcccgatttttgcccaaatacccggacccggccagccctaatttaaacgtgcagaaaaaaaagaaacatttttttctagacattcaaaaattgtaattctttaatttttcatgagaacattttgccaaaataaatatttttgatttttccactgaaatcgtccggtctttcactaaaaaatcaccccctggcataaattgtgccaaaatacaaaataaatatgcaaataaaaaatctaagtaatttgttattaattttcaaagatccattattttttagcgacaataaaaaaaacccgctgtgctcccttttcccaatttttccatttcaaataaaatg

SEQ ID NO: 115180 - DNA, 1003 bp, Heterodera glycines
tcgcggcagtccccccgaaccgatgcgcccagatttatggggagaccgaatccttcgggaatagcttccctatagcctgtactttaattctgcgttggatttttgctccccataattgtttgagtaccccaaacggacacttgaaaaaatcgatttttttgttttcggggcagtccccccgaaccgatgcgcccagatttatggggagaccgaatccttcgggaatagcttccctatagcctgtactttaattctgcgttggatttttgctccccataattgtttgagtaccccaaacggacacttgaaaaaatcgatttttttgttttcggggcagtccccccgaaccgatgcgcccagatttatggggagaccgaatccttcgggaatagcttccctatagcctgtactttaattctgcgttggatttttgctccccataattgtttgagtaccccaaacggacacttgaaaaaatcgatttttttgttttcggggcagtccccccgaaccgatgcgcccagatttatggggagaccgaatccttccggaatagcttccctatagcctgtactttaattctgcgttggatttttgctccgcataattgtttgagtaccccaaacggacacttgaaaaaatcgatttttttgttttctgggcagtccccccgaaccgatgcgcccagatttatggggagactgaatccttcgggaatagcttccctatagcctgtactttaattctgcgttggatttttgctccccataaatgtttgagtaccccaaacggacactagaaaaaatcgatttttttgtttcataaatatttttttcagaaagtgctctaaagcgcaccaaattttatttgcaacttaattttagcactctgatgctttagtatcaaaaaggaagatggagaaaaaattttttaaaaaatttttccttatattttggttatatcgtttcgcttttggtggggtgcttggaacagtggaatcatg

SEQ ID NO: 115181 - DNA, 229 bp, Heterodera glycines
tcagacttgtgcgtctcgggcaatatctctgtctcaaaatgcactcgaattgacggacttagactgcccaccgctgtaccccctcgtcctttactttttgccatgccgtcgtggacgacgaccgctgctgctgttgttgtggctcaatttgttgtcgatgatgctgttgtagcagtgcccgtgaggggtatttgagtgccgaacggagttggtccgatgggtggccatg

SEQ ID NO: 115182 - DNA, 444 bp, Heterodera glycines
tcttttaaataagatttaaacttggccttttatttacaaataaaaattctatatttttaaatttaaaatttacacaaatcttttatcctttccaaggcatcgtaaaaaagttgacagccaaacatttttgagttctaactttattttatcgcatgtttgaaacgcattttacactaatctcgcataatctgcttacttaaattacgtgtattacatacatatacggtatttgcttgtataatttagttgtgatctctgaccagtaaacattttatttctttattgtgatacattaaacaagcgtttgtgaaaaagaattgatgtctgttttaattattcggttcgttttttcaacctaattgtcttgtaaagtctgaatcacttagaaatgatgataattgtgacctctacaaccgaacggttgtcgtctgttacacacgaatg

SEQ ID NO: 115183 - DNA, 168 bp, Heterodera glycines
agtgagcaaagccttctttttatgtgtaaacaaatgcccgctcgttgcaggaaggaggacagcggcgtgtacacgtgcagagcgagcaacgaagacggcgaagcgacttggaccgcttctttggttgcggaagggcacaccaaccaagacactgtttttcaccggatg

SEQ ID NO: 115184 - DNA, 469 bp, Heterodera glycines
tttgtgttatttttccttgttatttaaatattcctccccatttattttgtgtctttttcccctctgctccaaataaatattgattatttgtttgccatcggccggcataacaattagcgacgcccgtacgtattgcactgtgggcttatttatttgaaatgtggaagcagttttggatttattggtttgcttgaagcaaccaacaaactttttccaaactttggactcttaattggagggagaggtcaacagcaatcgaaagtcatcgctgctggactgcatttgtttattatctaggcgataataaacaacatttttgttggacctgctaacagttaggtactgttagtagttgaaaatttgcgctgctgattttgtgtcttggcgacacttttcagttcatccacgcgcacccactctgttaacaagctaggcgctgttagcaatagagtggtgaacggcaagaatg

SEQ ID NO: 115185 - DNA, 905 bp, Heterodera glycines
tttttttgaactattttatatctcaaaattattttaaaaatttcaatgaaaaattgacatttttcctagcaattttttagtacaaaaaggagctttacaaattaggtaccatcaggccaacttttcacaaaatcttttcaaaaatttattttaaacaatcataaattcagcgaaacttagaaattttcctcggcggaacgcccgcctctttcggcatcgccgctctccaccccaaccatcgctaaataattaattaatttgaaaaagactcatccaacaaaagcaagaaaatgttagtaaattttcattctgcggatgaaagaggataaattgtttttactttattccattaatatgcctatttttgaaggttttaataaatatatttcttatttgtagaatttatttcttgacaaattttaggcaaaaaataaaataaaaatttatttaaaaaaataaaattactaataaatttaaaaaaaaacaaatgaaggcacacaaagctgacaattttatgaaatttaagcacactaattaggtttttcccccagcaagcttcgctttttaacactgacttttctaaggggcgctccgtgccgtgtcaaataacttttgttagatggcaatttatttttgatgccggaaattcaaaaattttcttcttctttctctttatctttcctattcctattttttcatttaaaatgtattttaaaaaattttaagatttcgatggcattgaagaaataatataaatatattttttgttgtttggtaaatggcattacttttttttattgttataatttcctattaaagcgaaacattttaagtacaagccagtttaaatacaatttattatttaaaaattctttttcaaataaaagctttttcaacaaaaaatg

SEQ ID NO: 115186 - DNA, 491 bp, Heterodera glycines
tccattttggactcttccgactttctcacctctcttttatcaccaaacacgcttaaagagaacatgaacagcaccaagatggacgaagccggcaaattggagactatcggtgaaagcattgaacggactgcgagttcgaccctcagctgtagcagcagaaccgagaagagagggaaatgatggaaggacaaaagaatgacggcgaaatacaatactattgattttatgtttttctgtataacagtgattagcgtaaattggcgcaataaattctctctctctctctctctcgctgcattttttctagactttgcgtttttatttaaccaattattaagaaaatgcaatcgaaattcaatttcaaatttaagttccaaaattagctcaaattgccaaattgaaagaccattactgatttttttttctaaaaccgtctattgtgttgttaagtaacatacctaataatttttacaacttttagcaattcaatg

SEQ ID NO: 115187 - DNA, 1003 bp, Heterodera glycines
aaatacaaatgtatttggggctttcgctatttcgtcactatttctgtacatatttggccaatgtttccattataaattcatttattagtgactatgtttttttggcgtttcgtcactttgtccttgccctcgtcatttctccaccactgttttgccctttcggccagaaatattaaaaatcaatcaataattggccctgttcattctcgaataaacaacaattccactctctctctctttttctccccattctctctctctctctcccctctctctctctctctctttctctctctctctctctctagcattctcttttcttctctctctttctccctcctctctctcttctctctctcatcattatgtattcccgtctctctgcctcatttctcgagaattcgcttttcttcaactcatatttttgtgttgctatgggcggtttgttggcatagcgaaggacaatttgtgaacttatttttttatgtttaaaattgaatcttttgcctaacggctgaattattctaaaaagaattatcattggcagttagcacaataaaataaaaaggggcaatttatattttgtttatcaccaggtattttatatttcaatttcatttatatttttaataaaatttggaaacaaatttaaatcaaattaatcattgcctttttttgaccatgatcattactcaaattgggaaattttctaaatattattttaaattacaaaatttatttcgtcttaaaattccccctccataatataatacgcatgaatcgattccttaattggtttcgtaaacacaaagcatttccagtcccttctatcagtgatgatggccacaaaacatttgataacaaaattttcttcaccacttttagtcatacaaaataaaatgcagtgattattttcttgaaaatgccaaaaaaaataatttttcaaaataattttccatttaaaaaattatttccttacaggaaataattttttcaaaaaatg

SEQ ID NO: 115188 - DNA, 172 bp, Heterodera glycines
atcctcaaaataacaacaaaaatataaattcaaaataaaattcatattttccccggcggcgccttagagagttcacagtaaaataatatttcttaattaattaataaagttgctttttacgaatgccaatgccgaagaagagaatcataaagtgaaaaatgataaagaaatg

SEQ ID NO: 115189 - DNA, 94 bp, Heterodera glycines
ttccccctttaattcgagcaggaattttatgtataatttattaatgtttgctttaaattttaataattacaaaaataaaactttcgataaaatg

SEQ ID NO: 115190 - DNA, 365 bp, Heterodera glycines
cttccgatccgtcgtcattttatgtcaaaatgtttccgcgccttccgtttttggcaatgatttttcgcctcctattggcacttgtccaacccctcgagcccattggcaacagttgaagctgaactggttcaaaattgttttaataaaatgcgattctcgtgtttttctcatcaagtattatccgtaaaaaataggaaaaccctaaaaatccaggctttatccaacgcaattatttttctgctatttgtgtgacatcattcgaaattcaacagcaaattttgctaattgccaaaaaatgaaccgacggtaagcacaaattcgtcatttatttacctaacaaaacttttttcagttcttaagatatg

SEQ ID NO: 115191 - DNA, 294 bp, Heterodera glycines
ttctgcagttcgcactaattatcgcagttggctgcgttcttcatcgatccacgagccgagtgatccaccgataagactagaattcattcttcaacagaagtgtaaaaaaataatgaaaaaaagaaaaagctggcggtgcccgagctgacactcattgagtcttaagccacgtgctaggccaagcacgggccctaccgcgtcgtctcatcacggccacggacgtagcagcaagcacaaacacaccgctagttacggcacgtaagaccgggaacgaaaccaccatccccagtcatg

SEQ ID NO: 115192 - DNA, 719 bp, Heterodera glycines
tttttaaaattcttcagccatccacgacaaattttgtcggggaattgaattttctccctgatccccaaattttatttccccaagggtcagagaggaaccattgttttaagtgccattcttacaaataaaaattgaaaatgggtatcaaatgtttttgatttctttagtgctctgctcccttctcttccattctccgatgccattaacaactcttttttcaatttggcaatatcaattaattaatcgtccggccattttgctgtgctttgtgtccctttttgctggcttattacttttgctcgccttggccactgacaaacacttcctaatcattccattccttttcagctgtgtgagtaaaaatttttggttttaaaaatcaacagagaaatttttttgggtttttacgaaaaaataattgcaaaaatagaatgaaatgatcttgctaactttataatgagaaaattgttgattttcggcagttaagttgtcactgtgaaaatttaattaaaaaggaaataaatttccctgcctatcactgtgcactatgataattagagatagctagctcgacctggacctagacccaggcctgtgtttttcctaggtataggtttaggccatttttcggcaacctggtttttttggcaaggattttgtacggaaaaaataggtccagggtccaacatggaatccaggcccagacttttgtcaaaatg

SEQ ID NO: 115193 - DNA, 75 bp, Heterodera glycines
tttcaatcactgggtactcaacccaacagcatttcaatcactgcgtactcaacccaccaacatttcaatcacatg

SEQ ID NO: 115194 - DNA, 134 bp, Heterodera glycines
ggtatttttccatattttacttatttatgtatttatctttaaaagattggtgttccgtctttgctaaatatccgattttgctgaataataattggtccgacactttttactacgaaatttcagtcaaaaatatg

SEQ ID NO: 115195 - DNA, 101 bp, Heterodera glycines
agtcggcgagaggggcgggggagggggttgatttgaaatttaaaaaaattgaaatttcagcgggggaagaacagcagcagggcacgggtatagcgacgatg

SEQ ID NO: 115196 - DNA, 1003 bp, Heterodera glycines
tttgggatttgggaggattaaattaaaaaaacgtatagccgattcttctggaacgttttaaagaccatcgaatttcaaaattcgaaattaaaataattcttttttaatttacaattgataagagagaaaagggaggacagagaaaaagtgaaaggccaattcatattatcatatcagcagaattcctttgcttaactttttttttgcacattaaatttagcattttaattgtttaattttacgtttttttttgtctataaaaatgcttttttcacatttgaaaatggtttttgcatgggatttacgccagcttacaattagtcctttttttctgttccttcttagcctttcccctccattcccccgttgtctccccttttttcccaattctctcattcgcttaaatgcactcccccccgatctgtgcagcaaaaaatatcggtaaagttcatgaatgaatcacatcaaaagaattaaaacaacacgcacaaaaaaattaactggtcaaatcaaatgattagctacctctaatagaataagtcaataatctcctatataataaaaaaaaattcgtcagataataaaaaaagagtaaaaaaacagccgatattatcaccaatttcatacgatcaatcaatatcaatatcactgatgaccaacaaccttaatagttaaatcagaactagtattagaaaaattttaaaaaaatagatggaataagttgagaaataaaaaaaaattaggacaaaacatatccaaaattctaataacccaacttaaattaagattaaaaaaaagtaaaaaaaaaaaaaaaattaaaaaaaaacaatgataaatgatcattagggaatggaccacattacgagaagggtcggagctaaagttgatcagagtgctcagagagcactaacataaacagacagtcagaaaattagaaataatatatacaattaatttctagacacttcaccatatatattttgtagaaaaaatagttcaaatg

SEQ ID NO: 115197 - DNA, 245 bp, Heterodera glycines
cctaaaaattttaaaaaaatctatacaaaaatggcataaactgagaccatgtggccagcccaaggcccgcaatgctggccatggtgacggtgaacacgccggccaacgccaaaccaacagccgactcgacgcccagcgagcagcagccatcgaagcggcactgggagtacagcgcgtacagcaacatcagcaagtagccggccaaaatgatggcgtaattgaagtcgcagaactcggccaacatg

SEQ ID NO: 115198 - DNA, 147 bp, Heterodera glycines
ggtgagtcagcgttttggtgccggacgacaaatgcaactttttttgcttaagacgacttgatctacacggcccccctctcctccaattgttactccgtcgtggccaaagactgcggctcagaccaaccccaatttgtggtgctgatg

SEQ ID NO: 115199 - DNA, 247 bp, Heterodera glycines
  unsure (1)..(247): unsure at all n locations
gggagagagagctcatttcnagcacaggattcatatacacacgcggataaaggggtttggttgggtgatcgagggggaaaaaaggcacaaattgagggaagtgcctataactgaaaagacatacgaagaaaattctcaaaaaaattccataaaatttagcttattaattgtttaacaattgaaaaagtataaaaaaataaaaagaacaaagttttaagcaatttcagcaaaattcctttcccacatg

SEQ ID NO: 115200 - DNA, 185 bp, Heterodera glycines
tatcaaagggggcgcccgacgtcgtttggccaaagtccaccaccaagttaatggcaaatgtctgatcaaggtcgtgcttccgtgacttttttggcaaattaccactttttaagttatagattcgaaacgaggacgaccaaaacagtaacaactattgcctgttctatgctctccaggcaacgatg

SEQ ID NO: 115201 - DNA, 146 bp, Heterodera glycines
ggtaccaaactcaaaaaaaaaaattttaaaaccataaacactttaagggacacgtgtgcggagaaaaattctgtcagctctgcaacaacttccacagcaccgagcgtggctgtttcattgcaccacttgagcctaaggaagagatg

SEQ ID NO: 115202 - DNA, 686 bp, Heterodera glycines
tttgctaaaaaggaattaaaaaaattatcatttataaaaagtgaaaatttacgattttcgactttttgttcgaatccgggtccggggttcgaaattggtcgaaatgaatgtcatattcttaatcaacggccccgaaaacccccggaaatgtattttcatgacttttaaaaaaaattttcaaaaagggtaactttcaatatagcgacggaaaatgaatgacaaagagaaaaaaaagttgcgaccttttttgaaaagtaggtaatccgctgcaaaaatttgtttataaattcgcgaccaaactccattttttgtcattatttactttttttaaactgcacaaatgtcgtttccgtttattttatttaatgtcttctctaatcatacaatttccttgtaaagttccaaattttccctgtgtttatttttgaattccaaaaacattcattcccggaattaaaactttggaatatgctattgctaattgctctagaatagactgtccttttttcagcttacctaaattggacgcctaaagtgcaattgaacccaaatttagcaatttttgttttccaaaacttgaaccataaaagaaataacaaaacgcttttctaattgcttttttcagcgatacttaagcacacatatttgtctactaatttgctgttgtccgctgccaatcaaggatg

SEQ ID NO: 115203 - DNA, 240 bp, Heterodera glycines
ttacaaaggcggaaatttggcggacagacaagcgaaagaaaggcaaaagcgacgtcagcttaaaaacaatacagacgcagattagactctgttaacagatttgtcatcaattttcactgatttaaataaatacacagattttttggactggtgtgaatttttgtcgagactaattcaatttatttccttaatttattgacaatccgttttgtttttattaatggctaattgtaagtgatg

SEQ ID NO: 115204 - DNA, 275 bp, Heterodera glycines
attaattgatgctaatattgtgtgtcctttggtccgctgatggctttgtgcttttcaggcgtttctctcttcaacaaaagccgacacgacgctgtccaactcgtctcccattccgccagggaagtgcgtcttcaacttttgcgcttcccttccgtctctgaggtgctcgctcgggcctccccttctcctccgagtacgtccaattcttcagttttgattatcatcggtgatttatatgaaattttttgtccgattttgcagccattgccaaaatg

SEQ ID NO: 115205 - DNA, 150 bp, Heterodera glycines
tttcagatggattacataaatttgcaaactggaaactcattttatactctaaatcttggccactcccatccaaattcaaatttgactccaccatttttcaaagcaaatttaaattaccatcccgaatcccaattcatttttgccaaaatg

SEQ ID NO: 115206 - DNA, 85 bp, Heterodera glycines
aagtgtaagagggggggggggggggggagggcattgactgatcggaccgaccgatcgcaggaagggctctcttgtggaccaaatg

SEQ ID NO: 115207 - DNA, 347 bp, Heterodera glycines
aaagacgacgacgaggattttggcaccttcatcaaccggcaaaagaagcttctgcgggatttcaacttcacgaaattgaatgaggggcaattcaactgtatggttttgctcatttctttgaaatcgccgaaggatgctactttacggtcgcgaattttggccaagttggcagcggatggtgacaatgtcaagtatgacggtgtggtagacgacctgaagatctacatgtcgaccatcgccgaagccaagcattggagcagccacatgtttcgaagcatttgttggcagcaaaattgaagggccaaaagagaaagaactcggaccattcgtcgaatgcgagcagcatg

SEQ ID NO: 115208 - DNA, 523 bp, Heterodera glycines
aaaaatgatttgtttaaaatggatgatccacatattaatattcgtaaatgttatgttaaaccagacgcggacaatttatatgtaatgaaaaaatatttgtttttttttcttatgatgtcatttttggtgatatttcctgtttatttagttgcaaaaatatttttattaggtgaatataaggttgaagaaaaccaccatttaaattgattttcaatcgcaaatttttttagcttattccattacttacaaattattgttttaatgaatgctcaatgcaattgtaaataataaattctttgaaatttaatcaaataaattaaatatccaattaataatttcgctacccttttattatgttattttattcttttctttttttaatatttaaaaaaataaaaattaaaaatatttaaaaaatatagctggcgaaaccgttattctcgttttaccagtttttagcaggtcgcaccctaattaataattatcatatatttttagccactttttacgcattagccaaatg

SEQ ID NO: 115209 - DNA, 71 bp, Heterodera glycines
gggagtattcgttggccgttttttattttttggaacttccaaaaacaattgccacacattcacagccaatg

SEQ ID NO: 115210 - DNA, 226 bp, Heterodera glycines
tgtttggacagaatgaataaacggttgaaaaacatgaaaaaacacaaataattaatggaacatttggcccaattaggaacaaattaaattttgcgggaggcacgcaaaaaaaaaatgccgacgcaagcgactgtaacggcggggcaaatttgttagaaaatggaggggcacgagcggggtgcggacaatccatcagtggacaatcaaggacaatccgtcagtaatg

SEQ ID NO: 115211 - DNA, 539 bp, Heterodera glycines
aatttttaaaaaaagtatattttaaaattttattttcacctattttggcgttttgcacaaatttccttaacaaaaaagcaattcacccataataatggttcgaattttgaaaaatttattttttgtaaaattccttataattttgattcctttttctaacagcaaaaaaataagttaggttaaaatttaaattgaaattatttattttttccatgaaattggtgaatggactaaaaatgataataaaaaaaaacttcgaaaaaatcaaccattttgcagacataaatttgtgactttttagagcatagtttcccgcttttggtcataatttgctttttttagattatactttttactagaaatagaggccctagcaataaacaaaacaacgagaattgaaaaaaacgcattttaaaaaacttttagttttaaaaattaattaaaaaattttagacttaagggcactaaattaaattcaatttttcttaaattttttgcccatgtaatattctgaattgtagaagaacgaatggcggatg

SEQ ID NO: 115212 - DNA, 986 bp, Heterodera glycines
cgcgaagcgcccgttcgaggccgcgaagcgtccgaaaagcacaacaaaaattagaaacgggcgcaaagcgccgttcgaggacgcgaagggcgcgaagagcccatcttgagcctcgatgtggactaaaaacccataataattttttaaaaattcaaaaaaaaatctccaacgaattcgatcaatttgaatcgcttcacagtctaggtagcgaagctcccatagcgcgaagcgctttttcccagtctaatcacttttgtacctcttttaatcactgttgcacctcttctaacatttgttgtacctcttctaatcacttttgtacctcttttaatcaccgttgtacctcttttaatcacttttgtacttcttctaatcacatttgtacctttttaatcaccgttgtacctcttctaatgacttttgtacctcttctaatcagatttgtacctcttctaatcactgtcgtacctcttctaatcactgttgcacctcttcaaatcactgtcgtacctcttctaatcactgttgcacctcttctaatcactgttgcacctcttctaatcacttcacagcctaggtagcgaagctcaagaagcgcgaagcgctttatcccagctaaatagccgacggttcacgcacccgctagttatatatatgttatataggttttgagtttcgtttcaaaaactaattccggccggccgaaggccggccggaattagttttttatatatacgttatattgacaaggcaactcatctcaaaaactaatttgagaagaacggctaagcgcgcggggctgaaattttgcaccaaggggtaactcgagacggcgcatctgggaaaactataggttttttggtccgaggcccaactgagtaccagcggcttaaaaaccgactttgccgacagtctcactgttacgaaattttttgcttttgccttcagcgcttattggaccccaaaagcgaaatgccccaactatg

SEQ ID NO: 115213 - DNA, 313 bp, Heterodera glycines
tttaattaatttttatatatgattttaattcttttttttttgttggccatccgtcggcggatcgcattttgaatttatggtggaatccaataaatgtacatagtttaaaaaacataccctttaaaaagcaattttaaatataaaagaaacattgaagtattgcatttaatgataaaaggtaacgacttacttaatctgatcaccttgcaaagtataggaaatattctggaaaaatcccggctaaactaactatcatatttcctatatttaaattgatttttggtcgattaaatatttccgttataaacatatg

SEQ ID NO: 115214 - DNA, 366 bp, Heterodera glycines
cagtttgatgcgtgccaagagagcaacaatattattataaacatatgcagtcttaagaataaaaaaatcaattgaagaataggtaattaattattaatacgacgaagtcctgtgaaaaacttatttaggcattaattattttcttcgtttcaaaaataccctaaactttttaaatttttatctgagtttgctggaatctctgctaagtttttggattaaagtctaagaggtaccaataaccttgaataagtaattatttaaaggagaaacccagaaaatagttaacaataagtgtttattttgaaatttgtacccacctgtctcaattttttaaagcaccaccaggcacacttcacacatgtaatg

SEQ ID NO: 115215 - DNA, 103 bp, Heterodera glycines
ttaaggatttggggagcaccgttttttctgctttttaccacagggaaaattcttttcgggccacattaaaacccttcatttttagatgaagcggcagaaaatg

SEQ ID NO: 115216 - DNA, 482 bp, Heterodera glycines
ggtgcgagatgtttaagaatattatatatctcatatgatgtttgttcaattaccattcaactgaagttctaccttaatcattcattttctatccacatacgtatttcattccatgagttgtaagaaaaattcatatgtgtataatgtgccaacatctcagtatgtattgtaggctatgatttatgtatataaaatagaccggcttaattctatagaatccatttttaatgaactgttgttgaatacttaaacagaaaaaaacgtttgagtgaaaatccaagatctcagtgccgttagttaaaaacttaaattttggcattgttgttatggcgaaactattattttttataaaaacgaaattaggtaattactaattaggattaggcatttgtttgctacttatactgacatattttctctttttccttgtaaatcgcatttttttgatttttgcatactttttacaacttcgattcaacatg

SEQ ID NO: 115217 - DNA, 503 bp, Heterodera glycines
tctgaacatttaaatttagttaaattatttgtaagcgcaaggaaattcaaaatttagagtcagaagagtgttaggggtcatgagatattaaattcaattaatataatgggaatttcaactttttataatttaaaattcaaaaaaattaatagttttaaaaagctataacaaaaaaaagattcaaaatattttttatttgtgttttttttgtaaacaaaacgattttttagaattttgaatgctcagaacatttgagctcttcgaatatacaaataaattgtactatttatttgttttgagcaaaataacaatgaatttttggaataaaaatgggtacaatgtccataatattgcgactaaacgaaaacgaccaataaaaaaaaaattgggaagagaaaagcggagttattgattcagagagagttggaatatgtacatggataaacaaagataaaaatgaaggaatgacgaataggtaggtcactgaaagatgctattaaatg

SEQ ID NO: 115218 - DNA, 707 bp, Heterodera glycines
aaattgatattttataggcaattagcgaatttgtgaaagcgaaagactcaaatgggtcgatggaccgcttgttgggctttttggacgagttcaacagaacgaatcgttttgacatggtcagaaaggtatgtatggatcataattaatttatgttgatttctcaatgatcagtttatatgaaacaaaaatttacgaagattttgaatctgtcctgtttttttagtcttttaaaataattattattttattaaataaataaattataaaaattgaaaaaaacagtaaattaccgtattttctctaattatatgccccgtctccatttatctacccgtgtctcaaattatctccccctttctgaggaggttaaaaaataatataccgtggcatataattagagaaaatacagtagtcaatttttataagaattggtttcaaatccgcaaaatatgttatttgaaatgttgtcctaataatttaaaaatgtatgctaaatgtccgtccattcccatttgatcagttcgccggtcatgtggacacctaaaaaatttatttgttttaattgaaattattaaataaataattataaaactgaattttatgaaatgaaaagcattaaattagtcaactctatgaatagggtttgaattacaaaaaatcctgttttacccaaattttaattgttggtcctaataatctttaaaatg

SEQ ID NO: 115219 - DNA, 440 bp, Heterodera glycines
ttacacacaaaaaagacataacaaacgttaatcaagtcttaaaaaaagtcattttgaaaaagcgcccttttttatgcaacgacctagtattatttagagggccaattagtttcaaggggtttaatgggtcttcaaaagtatgaaattttccagtttttggcttgaacttttgaaaaatttaataaaagttggtcggtcgcccaaattagcacttttcgtcgtttgacatagcatcccaaaaagcgggcaactagcttcgttgacaatgatggaaaatttcgatactctataattggctctaaaccagtttgctggggaagggtgctgatcatgaatctgacttggatttcagctcattggccgcgaggtttaacatcattaattggggagtcattccgacattggttgtgcttaaggaggacggcactttgataaccatg

SEQ ID NO: 115220 - DNA, 121 bp, Heterodera glycines
aaaatcaaatatttaataattttgaaattacaagttctgctgttaaattattattagtcttttatttacccattttataattaatttttgtttaaaatttttttgtgtaaaggtgattatg

SEQ ID NO: 115221 - DNA, 459 bp, Heterodera glycines
ggtggcacgctgcgcctcctgcacttgttgaattttttttttaaagaaaatttggtttttatttattttctttataaaatcatccgaaagttttccattaaattttttgaaatttattgaagaaaaattcatttaaaaaaggttatttgaaatttcgctgttcgtttatcagtcatttatttggccaatttgtccaatgaatgtttcggttatttttttaatttataaaaaaatttattttgttgctttcttcagttttcatctgatagctgataaacacaaaaatttgaaattatctcacagatgcatttaaaaatattcaatgtgaagcaaatgataattcattcattccttgtgaacttttcgcttgttttaaaattattaacttaaattaatttaatttaaattaaattgaaagtaacaaattataatataatttaagcatttttatccacgatg

SEQ ID NO: 115222 - DNA, 158 bp, Heterodera glycines
tcagttggaagtcggccacgaccacaacgggcagctcgccaagccaaatggtgtaaatggggccgaacttacgtgcccattgttggtagatggcataaggacattttgaactgtttgatgtaaacggggggaggacattagaatggaagaaaataatg

SEQ ID NO: 115223 - DNA, 128 bp, Heterodera glycines
ttttttcttctattcaatcacttctttttaatctggtcagaaaaaaagtaatagaaacgtaatatagaattaataattcaaataatattggtatctacatatatggagatggtggattttgcaaaatg

SEQ ID NO: 115224 - DNA, 480 bp, Heterodera glycines
ataactttatttaaaggattggatacaaatataattttttaaatattaatgttaaaatgagacttttagagattttcaaattttttcaacgagagctttttgaattagagaaaaatgccctgtttttcaatccctcggtaccagtgagctcttccgggcattatttaaatttggcctccctgttcgttagtagaatctgccaaaagttaaaaaaatgattaaattagtaattgtaataaaaaaaaattagtttcgcgctagctttgcttacgtcagtcattggtattcaatatgatgccacatttttctttgttaatgtcttcatcccctatttgcgcgtatttcatttatgggcatggcattttttataaaaatatttttttatttatgccattatatatctatttttacatcagatcattattaacacataaaaatttttaaattttccatagtaagaaactgctttcagcaccaatg

SEQ ID NO: 115225 - DNA, 190 bp, Heterodera glycines
agtgttccgcgtgctggagtacgagcagagtgacgaccagctgttcagaccatacattgctgagttcatggcgcagaagatccaagcatcaggatttgactccaaaatcaaaggcaacgccgaccaagaagcgcagttcgtccaggaatgctatgagcagtttggaataagcattgacccattgaaaatg

SEQ ID NO: 115226 - DNA, 224 bp, Heterodera glycines
  unsure (1)..(224): unsure at all n locations
gaggaaggcggcncaatacagcagacgacnatcgaagaaatcgaccaccgaaaaagcgccattgaaacaaagcaaaaaggacgaaaaaacattgttcgatggatttaatggcataaggtaagtgaagcagcggaggaggaggaattaatgccgaatcagactaattgattcaattaattaaatatagcaaatctttaaatacctaattaagacaacttcgaatg

SEQ ID NO: 115227 - DNA, 157 bp, Heterodera glycines
cctgaatttatattttaatataatttttgaattattatggttaattttttaaacatatattaccgagtccaatcgtggaaatgaaaagaatttttgctgccagacgattctcaatgaaattctgtccagaaaatgcggtgtacacaaacagaaaatg

SEQ ID NO: 115228 - DNA, 242 bp, Heterodera glycines
tttctcttgccggcagcgacgacgaaagtcaacaaccacgcccaaagaaaaagttcaaaattccgaaacgacgctcagcactgttacgacccatcggtcagcagcaaagtccattgcaaggacaacacaaacgccgcaagcaactacaagactcaggcttacgcaagttatttcaagccatctcggaccaacaaggaagcagcaaggccaccacaaaggtcatcgaggaaagccgagaaatg

SEQ ID NO: 115229 - DNA, 686 bp, Heterodera glycines
gtgtgcgctttgcgagccgaaattggccaactgaagcagcggaatgccaagcagtgcccgcagttggagaggcaaattgacgacttgaaaaaggtggggcaaaaaacaaataatcgttctcatgcattcttgttcaattaaagggcctcaacttttttatggttttttatgctttactcttggcgataaactaatatttgacaatattaatgttttcaaaaaggtattttgaatttgaccgctgtttactgaataaatttttttattcaccccacccctaaaattaagcaaaaagttttttctcgaaataatcgccctccggcgtcattactttatgatgctattgtatgtgtattcccatctaataaggaaaaattgtttgttctcggggcactgccctttcattctcccctccctctgcttggtggtgacgactctgctttttccagtcgcccattagcgtttttcggtccgtttgttcgctcccccccccccccccctttgctcctcatttacacataaacgcaaaaggaaaaaagcatggaatgaaacgacaaatgtttgtgggaatgcaaaaacacctcttttttttctcccatttattatcaataatttctttggtatattaatttttttgtttcaagaacgatcaaaataaagaaattttgcttggttcttaaaaaatg

SEQ ID NO: 115230 - DNA, 331 bp, Heterodera glycines
gaaaaatagctacaaaaattgggtaaacaaaataaatttttgtttggttttaaaaaagttatcgacatttttctttgaaaaatattttactgcataaacatatgaccatgactgtatattcaaaaacaattcttctcatggacattaaatttgtaatttttttttgattttgttaaaaatgtatttattattttatcattaaattctcatttaatttttgcattaatttgttttttcaataaatgttatattaattttcaaatgaattcttttaattgtaaattcttttcaaataatttctttctttttttagcctttttggaaaattatg

SEQ ID NO: 115231 - DNA, 675 bp, Heterodera glycines
ttgttggccaccaccatcaaaacaccaccgcccgccgttagaggaaaaagagccgatgatgcaaaaagcaattaattaattaattactataattaaaatcttcatcctctctcttttttctgtccatccatccatttgttgttttgtttgtttattgttgatttgttttttaaatttattttatttttttttgaatttttcttgaccagggcttcttctatcgaagaaaatttttcaaaatcaaaacattggggcttaaaaaaataaataaaaaattttgggaatcagaacattttgccaaattgtttcagatcgattattattttgttacaatttaatcgttcaaaaatgtatcaaatattattattagggatgtaaataaaattttttttaatgcttatttttttggaaaaaattcctagtaaagggtgaaacaggcacaaaatgcacataaaaattacctaaattggcttagaatcactttttagtattttaaaaattattaaattgaaacaataattagtgaaacataatgttttttttctctaatcccttttcaatttattattattcatcatattttaattcacatttcaaatgcaatttcatcagtgagttaattaataatggtaattaatttgtctaatcatttttaattaggtcgatgacaaaatg

SEQ ID NO: 115232 - DNA, 841 bp, Heterodera glycines
  unsure (1)..(841): unsure at all n locations
ggcaaaaacatgaaaatttataataanaatttttatactatgaattagggtttttatgatctctttgaaatgaaataaaaaatattattttatttctcaaaaatgcgaaataaataaataaatacatctgtttaattttacatttaaaaggtgggatttgtacaataaattgtaaattttgagggggagatcagcagcaaaaggggggggggggaattaatggtcacaaagggacggttgagcaacaaatgagcgaaaagtgcgaattgtgtcgatagttttacatttttgaacataaaaaacacttaattggcaaccgatcggcacaaaataataataacagcaccaaatattggcaaaaatctgatcaaacaatggcaccgtttggctctgttttgcttcgaattgtgtccgtccaaatggccattccgccggttgtcctttcgccgtgcttttccatttgcctcccaatgttttggctattttccatcccctggggtgccattgtggctgacgttcccccaattatggatgactccgtcgtcaatgtcgactgtggcgaattgcactgtttcggcttggcgttccgtcgttgttcctcgtcctccgcctcctccgatttgccggcctcgcgccccttccgtttctgcttcttcgtccgctttttcacttccaatcctttagccgatttcctcccaaattcaattccccccggcaatttctgtcgaatggcttttcttcgagtgttttgtcgtgagaatgtgcagatcagtgtcaccatggcggccaccgggacgaaaatgacgacggagagaagggccaacacggagccatccaaatg

SEQ ID NO: 115233 - DNA, 613 bp, Heterodera glycines
gatatgtatgatgattaacctgctgctggattagtctagtagaaccaaagtaagaaattaattcatttaattagtcgccattaaattttaattgtttttcggcactcggttgggccgattcgaagtgccgtgaaaatggcattgaatgcacggcagagaattgtcgttctatgcttggtccggcacttttcaacatacgttttccgcttttgtcaaacgtggaatttgcgaaggatattgataaaaaaagagattaaaaccaagtttaaactcattcaacaacgagtgtcaactttttaaaataattaatttaaataaataaaataaaaatttaatatgctttttcttataaaatataatttttttaaaattttattccattttttatccatggagaatattggcacaaattaaaaggaaatggggaagcactgatcagaattgtttgggctttaacctttttcgatgctccaaaagaaggtgcgaattaactgttaattaatgctaattacaacgatgattaatttccatttagacgaaaattggagttgcaaatgtcctgcaacttttcgaattgtctctcaaaagaacgatgggtcgcgtttgaagaatg

SEQ ID NO: 115234 - DNA, 301 bp, Heterodera glycines
ttttgttcgtgggacaaaaattcctttgattggccacgaaatccgtgaaaatccattattttcatttcatgctacacattattttcctctttacctattctttaaggtgaaattaaaatttttaaatgtaatgtgaaatactctgaaatgtataatatatatatatatatatatattcaatcgatttatcaataattaaaaattaatacgtgggcaaaatcttgtggcattttaatgtagattagcattgccaaatatttattcatttattttattttttttgcaattattattaaatatg

SEQ ID NO: 115235 - DNA, 1003 bp, Heterodera glycines
gacgaccatgaaaaagaaaatatgatcatatggcctttagctaaaaaaactcaaaaacagatttatagatttgttaggtgttgaaaactaaagtcgcataggtccgggtaggcgcaaaattttcgagttttttttccggcccaaaactcggtttaaatgctaagacacaatttttgatcttatattttcggcgcatagaaaaacataaaactgtttttgagtctttttactgtgggagattaagcgatttcgttggttgctgcccacctttctactctttcaaatgctgtacattggttggtatttatataatattaaacataattagagttggggtttttgtgtgctaaaaattctttaaatatgtaataaaaatatatgctaaaaaggggtaaaatatttgctaaaaaacataaaaaatgtataaaatatttgctataaaaggaaaatcaggtccatttttgcataaaacacatcctcacaaaatctcattcattatgttggatatgtcccagggttaccgcgggtcacacgaaacccgatacccgaaacccgacatttttctcaacccgaaacccgacccgataattttctcccgacccgatccaaaacctgacccgatatttttctcgacccgcggcaacactgatatgaattaggaaccctaatcaagctagctctagttgtatcagcagaaatggataaatagaaaaattactaaaaaaaattttatattaagatgaagaagcagaaggtcgtttttgagcatacatcgatgtatgcaatttcgtatttctgagttttttttcaatttttataagattgggttttaatgcacaaaaaattaatttttgccaaaaaataaataaaaaaaaactttcaacaaataataaaaattaataataaaaaaaaaattactgctgctgtcgttgaatggtaaatataaaagccttatttttaatgttaaaacaaatattttttcagtgatcataaaaagaaaatg

SEQ ID NO: 115236 - DNA, 107 bp, Heterodera glycines
ttacggggaaatttatttttattatttttttgaaacaattaaagaattgattggaattgaaattgataaaataattaatttaagtattttaaataattttgaaaatg

SEQ ID NO: 115237 - DNA, 495 bp, Heterodera glycines
attggttttttggaaaatcattagacagaagaattccgctgaatgaaagcttttttgaaagtatagatagaagatgaaaaattcagcaaaatactgatccaaaattcacattaatagaaaaaatttctttcattttttcctgtttaaaatgttcctcaacgcgctttttgagttcctcgactgttatggcttccatttcgttttacatgggacaatatttcatgttaatataaaacaattggacttttttgttagcgctgaaaaattatttccacccaaaccaaaaagcccgctggcggtggataaaagagtattgagaaacgaattaatatatcatattttggcgcgattcagttatttccaccaaaattaaatatgaccgccagggatggcattccgaggcccaaaaatttttcgggaatctgaattctgaccacaaaatgttaaaaatcgtaaatttttttattatatttcattttaaatgttcttcagatg

SEQ ID NO: 115238 - DNA, 385 bp, Heterodera glycines
aaccaaattttaaagagacatcgcgacggttctgattttttggccaccaacaaaaagctcgttgttttttatttatgacttattatttatgctcaaattatccaggaaaatcggttgttggtctttggttgaccattaatcgaaatacctaataatggttattagcctactaaagatttaaataatctctcgctattaaaaattctaatgaccggtttttcagagaaaaatattgagaccaagcacatttcactaaattatattttataataggtattcgcaccgcacaagtttacattgcttcgaaatatcatattcattgtttactcataaatatgggttgagaaacccccttaagaataattggcgtaaaacaacaataatg

SEQ ID NO: 115239 - DNA, 63 bp, Heterodera glycines
taagtgaaaatttgcacacaaattgtgccaaaaatggtcatcatctcgaaatgatcaacgatg

SEQ ID NO: 115240 - DNA, 1003 bp, Heterodera glycines
tacaaaacctttagttttttccaagtatgaatttggtttatttagtatttatttttcatattaacaaaattttagtttgtctgataaaaaccgcattttccgtatttataagttttgccattttcaccataataatgtccataaactattctcatttcttcgcttttgttataaataccaaaaaatatatttaatttataatttttgatgttgacatgctccaaatctgttatcgaaaaatgatgaaatacataaaaaaaagtcttctgctggaaactctagtcgtgctggcgcgtttcttaaatccgccaataggttcgaaaacaaaaaatgggtaacaaataaaaacttcacccaaattaatttttcttggtatcattcaatagctttatttgttctctatcagaattttattttcccaaattttttacttaagtataaaaaaagttattgtcataatttcaaaaagtctcatgtcagaattttttgtccagaacttttttgaaactcaatgaaattttctaaaattttaaagctaattagagaatttttagggctagcgaataaattaattaattttggctcatttaaagactttaaaattttaaatgcttataatggatatatgcatgaccattgcaaaaaacatagtatgttcaatgctttataactttttttattcataagctaaaaatttggaaaaaatatattctgaaaaagaacaattaaagctaattgaatgataccaaaaaatattaatttggttgaatttgagccaatatatgaatttatatattttactaattttttgttttcaaacccactggcggatttaagaaacgcactagcaccactctagttaataaccgatttgccccttaaattcttcgaattcatgaaccaattctcaccatctaaataatttattttagttgttttttggcacttgaaaaataagataagaaaataaatagttttttcggtatttataaattaaccaatg

SEQ ID NO: 115241 - DNA, 89 bp, Heterodera glycines
tctaaaataaaaaaaaattaagtaattataaaatgatggggaggaaattattcctttttgagccttgccaaaatgacctcgtcaaaatg

SEQ ID NO: 115242 - DNA, 155 bp, Heterodera glycines
aaaaaagagaaaagattcaaaaatttgaagcaacttttgaaaagttgaagcaaaaaggaaaataccaatggaaaactggcaccaaaattgagaggaaaattggaaaattattaggcacatatcgcgaaaaaatatataaatggaaaaaaaaaatg

SEQ ID NO: 115243 - DNA, 56 bp, Heterodera glycines
ctttttcagagtcggtaaaatcatttaaattctccctttaattcgccttaagcatg

SEQ ID NO: 115244 - DNA, 664 bp, Heterodera glycines
  unsure (1)..(664): unsure at all n locations
gatagttttgaaattttgcaatataatagaggacacttagggctatcgaatgatactaagattgttggatntggtttgcagaaaaaaaattagggccaaaaactcgtcctggtcagatataatttgtgttagacactaatcttntcatattcaaagaaattggtgacaaagacaaaatatgagcgccgctctctgctgctgctgctgtctttaaaagccgtgttattgcttatttgttagcttggatgagatcatttttattttgtttcatccttttgttttgtcatccccaaagttatttctttctttgaataaatcaattacactttaattttaattgatacctttttaatgtttgtttaacgggccacatgcccggaggggatgatttacttgaaatatggagactttttgggtttgacacaaaaaaaactatgcctatatgtaaagttaaaacattttgctttttcttgatacaaaaatgttgtgggtttggccaaaacgaaaagttatggccaaacaaaccgagggtattggacgcataaaatgaaggagggcctaattttttaattctttgaacagcaagaaagcacttttaatacctttttttgtttaggttatattttccaattttgttcaaatttcaattttaagcccgaaaatg

SEQ ID NO: 115245 - DNA, 181 bp, Heterodera glycines
ggtcagtgcgagtgttttaaggctaaaaaagcaatttgtttcatccatcccaaagtctttatcattcctccgtccttcactttatttccgtctttagctggagagagcgtgcaaaagaattgagcgtgactatgaccaagtgacggcacagcacgaacggcgcgaagaactgcagaaaatg

SEQ ID NO: 115246 - DNA, 218 bp, Heterodera glycines
tttaggagaggagaggttagctagaattatttttacgggattacaaattgaccctaaaaattgtggccgagaaaacacaaaaaatccgggattaaaaaattcgacaaatttaaatgagaaaaactctcaaacaaatttccaactgaaaaaattaataaaattaatttaaaacttataattggtttctataagaattttcaaaccaaccccgaaaaatg

SEQ ID NO: 115247 - DNA, 648 bp, Heterodera glycines
ttttgctctttcaggactccctactactcctcctactattacccctactacagttggcgcagttattggccctaccgttacagagactactcttacgtacgttttctgttgggttttcctttcctaccgtactggtaccgtttagtctgacctctattcatacgatcgctacagttacttctccccgacgtactaccgttcgctgttcccttaccgtcgatactattacaggtgaggggaaggggggggggcaaaagcaatcggacggcttcatcaaacactgcctttcagcgactacatcagcaacccgtactattggtcgtcttcgtactcctattggggccgctacagaagctatttgtacaattggcggggatatcgtaataaattgcacataccgtacacttaaggtccgactacgattggccctcctattacaatcgctggtcagttccatttgaatttctgttgcttaaaagtgtgttgttctctttcaaaaggtactattattggtaaaggtacgacccctactacgattcgtattcgcgcacctaccgttaccgctcttggcttctagacagtatccaaatttagcggggggggggggcactcgagtgaacgggtgaatttgtcctttcccaaggtatg

SEQ ID NO: 115248 - DNA, 54 bp, Heterodera glycines
cgtcattttgtcccttttctgatcacccattcctttttcttctattttcagatg

SEQ ID NO: 115249 - DNA, 706 bp, Heterodera glycines
aaatttagcatttatcaaaaatatttatttatttttggtaattcttagagctcgacattttgaaaaaagcctagacctagactccatgttggacctggatttcctggacgaaaacccaggaaaacccaagtccaggaaaaatccaggctcctcgagacctggatccaggtctggacctgtattttttgaaactcattttaaaaatcaaaaaatatttcaaaaaaatcaataattgcttgggaacaaataaatatattatttacaataataatttgtttttaatatatttaatcattttttgaaaacttgaaaaaaagatcggtcatttgaaataataaattctaaaattttacccaggaaatccatgtatttttgtgttttgcctggacctggattttttttcacatttgacctggacctggatttcatgacaaaaacccaggaaatccaggtttcgaaaaatggcctggacctggatacaaaaaaatccaggcctggacccaggtccaggtcgagctctagctaattcttatttaaatttgccctttagctgcaaaatgtgaatgtgagcacaattcggagcatcgaagatgctttggtgccgttgatcaagttcactttccaatttgatcaaaacactccgatcgatttcgacattggtctcgtcacttttgatccgaatgagcaaatattcaaatcaaaaatg

SEQ ID NO: 115250 - DNA, 343 bp, Heterodera glycines
agaacctacatacagccctaccaaaccaacatactcgcctacggtaccaacatacacgccttcgataccaacagacccgcctacggtaccaacatacacgccttcgataccaacagacccgcctacggtaccaacatacacgccttcgataccaacagacccgcctacggtaccaacatattcgccaactgtaccaaccttgactgtcccaaccttaactgtgcctactgtaactgttccgaccttcactaagcctaccgtaaccattccgaccttaactgtgcctaccgtaactgttccggtcttcactgtgcataccgtgacatctccaacaataactatg

SEQ ID NO: 115251 - DNA, 119 bp, Heterodera glycines
agtataccttttaaatataattatttaattagttaattaattgcctcaatttggcttattagtgtcaggattttaacaatttcttctgtaaaaaatgggccattgtgcgagaaaaaatg

SEQ ID NO: 115252 - DNA, 113 bp, Heterodera glycines; identical to SEQ ID NO: 109579

SEQ ID NO: 115253 - DNA, 265 bp, Heterodera glycines
tcccacccctccactcgccgacctcttgacggtgcgcaatcgacttgtcacaaatgcgatgcaaatgcaatgtaatgagagggggaggggggagaggagggcacatttcaccaggggccgaccgccggaagagtttatttgtacaacgaatccatccatcggcacgtcgtcggataaaacggcgacggacggtgctgctttttgagccttttcgggaagtgagattcaatgactctgtcgatcattctgtttgttattaattatg

SEQ ID NO: 115254 - DNA, 237 bp, Heterodera glycines
gagaattttgtgctgatcatttataaaaaaaattgtgcctccagcacctttttaaaattttttatgaatttttgaaaaattaaccacttttatcgatttttcgaaactttgatcacttttttctgatcagttttggggtcagggccaaaaaagccgaaaattggcaatagcaaatcgactatgctctacacgatagaagtggttttaaagtgatttgaacacttacagttcgaaatg

SEQ ID NO: 115255 - DNA, 1003 bp, Heterodera glycines
taaaaatgaaagaataacatagataaatgtttgacataaaatatatgaggtcatcagctcatgaaaataataaacgaacacggaaataaagtttttaatattattaaataaagagaatcaaaacttaacattgcgcatacttaataaacaacataagcaataaaaaaatttctaaggaataaaacacagacagaaaatcacatatcgccataaatttgaaagattggtagtttttggtagcagttttacataaaaatggccgatttttgaggattttttccaaaaatcagagtaaatcagtaaactttctcaactcgtaaattttcggtctcaagctacactactaattagggggtccaattttaccaaatcccccccccctccctttaccacccatcaattaaaaaatgccgcaaatattttgacacaacattctgttataccaccaccatctccgttctcttctcccgcatcgacagcaaaacaacaaaattgtcacccctacgtcatgactcccccggcgttgtcattgaagcggacgcaattttcggtgttggcgaagtgatttgattttgtgatcgatggggttggcgaaatgcgcaacccccgccggggcgaagcgaccaaaaatataaaaataatcacatttttcgcgtcgttatcgacgtacgagcagctttgactgcttctatttattcccgaaattagcatagctccctgttagtcgttcattggatcaattataattagagcttggcacggtaaaataatcgcgataaatgtcgactttaggaaaaccctctaaaagatagataataataattgcggcatttattaccgcttactaatttatggaaaatcgcgcttaccaaaggaaattatatagtgttggaatttggcaatttgatactattttcaccgaaatttttagcattgttttggcattttgaattaattttacatttactatacatttactgttgttacagtaaaaattgaaatg

SEQ ID NO: 115256 - DNA, 1003 bp, Heterodera glycines
ttcccaattaaaaaattgggcatttccctgagcatatgactttttaaatgggacgaaattgtgccattttaaatttaaagattaaaattacccaataatctgagttaatgccgtctaatgtgacggttttgaacataaatttgacaagcattgcctcctctgctgtttcatttggcattatgccacagtttctgaggctccttaatttgttggttttaatttggcaccaccgtaacagattgggacaacaattggaatgccgaacctccggtggcagtggccgaccaaattgcccaataccgaagacatcggcaggaagaagcagcggcagcggcaaacaaagcgaaaacaaaaggcaaagcgcagcagtgccaacagcaattggccggggcagtgccgcaagaagtaattagcagactaattagcgaaaaagcagggaagcacagagacaaatgtgccatttaatgataaaaaccatcaagaatgggggaaaacaatttataccaaagacaaataaataagaatttattgcctccacttttagtaaattcgaagtggcaaccgattaaattgtgccgaaatgtcccatttgttaaagatagaagtgatcattcaattttcttattatttttgggaccttgaatttaggccaaatcgaaaacaaattaaattttaaattcgattaattttctgttgtgagttcagcaatgcgtcgatttgttcagcgaacttcagcccaatgtgaaggcgccaaaaaaggcaaatttaaaattggaaattattgtaaaatcatgaatgtttcatttagcttttgctgaagcaaaagcaacagatcggcatcaaacagcgcaatttgttcgctgtacaaccggccgaaagcggcttctccattgaggttggcaccacaaaaaaaatgccgaattgaatttgtcaagtttaatttacgatttaatttctaataaaataaaaggttttttttaattttgccatttttgtcagaatg

SEQ ID NO: 115257 - DNA, 1003 bp, Heterodera glycines
tttgttttcaaaactcatggaaaaatgtttctcccaatgtattttcggtttcgcgctgatcacgaatagggcacatccatttcgactaaactcgaacccccgggcgtgaattcgaacaaaaagtttgaaaacttcaaatttttcgagtttcgcatttttgttttcaaaacaacggcttaaaaacaaagaaacaaacaaaagtcatcaatgaaaaaaaaattgttagaccatttttgagaccaaaaacacgcgattctaaatatttgagttttcgactgtttgttcgagttcgggcccggggttcgagattggcctaaatggaatgccagttttgtgaaaaactttctaatgacattttttgggttttcccgaacttacttttttcaccccatgtaaaaaaacgaaaattttttgtataacttcccgactttttcacaattaatgtctttgcatttaccatatatcaattctccattacattttagctccgtatccctgcttctgtcttctgtataccaatccgtctacaatttggccgaaatgactgtggacatcgtcacgccgggcaccacccaaacagcgactaggacaaggacgaggaggactgcttcacgccgtcgcgcgtcaacagcagcgcgttcggtgagccgtccctggcgctagtggtcggtcaactgcgtctaatgagacaactttaagaagccatcacatttttcggcacttttgctgtttggtgaatcccgaaaagacagaaaaagtcttacacgcgctattttcgtgtttctctttctctgcttccactgccccttgttatgagcggtagagacgcatacttttataagtaaagcaaaagcaacattttttttaaaactgcgtctctcctctcataacaaggggacagtggaaacagagaaagagaattgtgcaaatagtgtgtgaaaatgaaattctctgtcgttctttttcgggacccccttaaacagcaaaagtgccgaaaaagatg

SEQ ID NO: 115258 - DNA, 797 bp, Heterodera glycines
agccgacaactgcggccgcctggcaccaaatgcgttcgctgacaacgttacagtgcaataattaaaaaagaaaaaatgtatctgaaacggacattttaatgtggaaaattcaattgaaaatgatggaacggactggatttaaaccgtcgtcccaaaaaaaggtggaaccgaacgcggacttcgacttgttgagtcccacaaaattggacactaacaattttcgtaaaattttccattgaaaaatttggcaaaaaatgagcttttaataggccaatttagtggagaacattttagttacaatcaaatgaaagttttcaaggccctcagaaactgttttggccacttcagtcccgtgtcaataactctttaaagagtggtcgctgcaaaatttcggattattttattacagaccgagaggagccgaatggtataaaatttctatacaataagatgcatattcttcactttaccaaatccgtaattacttcgtccaaaacgccgtaatttccgtaatccgtaattgcgtgcagccttagtattttattccccttttcaaggacagataaagctaaaacatatttccgtttcaaaattccacaaaatgacgcatttgtcaaactgaacaaattgagggattaacgaaaaaaatgaaatttaatttgcttagctgtgattctgtgatttgaatgggaaatgaaagcacataaaaggagcgaatgaatcagtgaaattattcaactttaatttgactgtgcttccgaattgtcaaaatcattaattaattaatcgcaaaaatg

SEQ ID NO: 115259 - DNA, 1003 bp, Heterodera glycines
atggaaatcctttcacaatttttgatgacacaaaaggacaaagtcaaaatttggcatttatttgacttgactttggcaaaaaaaaggggggaagcaattaaatttaaaaaatgaattttaaaatagaaaaagtaaaatgtaaaacagtgaatccataggatttgtgttactctggccttttgccacataatctttggttgttttgccccgattttctctcccatccatttttctttgtctgtccaaaattggcacaatttccgcaaaatttgcaaaagtgggctccggcttttgatgcattgaaatggatttttgttcgcctcgggggatgaaaacaatgcgggaaaaaaatgagtgccctcggggggcaattggggaggggagggaaagggcacttggccatcggaaaagcggaaatgaaacggaatgagacgggggggggggaatgtacgaacggcacaaacagcagaagatgaacgagggatgagagacgatggggaaaaaagagtcgagacaaattgggcaaaatcatttccggcatttaattgccacacaattgcccaatttatacttattcaaaaaaaaattgtgaaagaatgcgatagaatttcattaaaattatttcaaagaaaatattggaacaaaataagtggtaaaattaatttgcagaagccccgcataaaaataaataatgttggaaaaccatattcacaacgaaggcgtaaaacagcaaatctcccgcggagtgttggcattttaatttggccaatttcgccaacacttttcatttggcctttgtcgcttttcctctttccgcaaaggacaaatgagccttggacaattgagtccccggtactcagtccaaaattcggtaaaaaccggcaaataatttttcattcattcgacacagcaaaaattgtgccaatttttgacagcagcggcggcacacatagaagcagtgtttgaatgacaaagtaaataatatttattggcttggcaaatg

SEQ ID NO: 115260 - DNA, 129 bp, Heterodera glycines
aaatggtgattctaagcctattttggtcatttttatggcattttgtgcctattcaagtaattgtccaattaagatttgacacaatttgcatttcatttcttcctaatttttgttctacatcgaatcatg

SEQ ID NO: 115261 - DNA, 783 bp, Heterodera glycines
ataagcaaaatgtgatagggaaaaagtgatctgaatatgtacaaaattagtaccacaaattaatcgataaatgactgaaaatacgtaatattgctgattaatttcaatctaattcgatgctaattactttgtctagctataagagtcgatttgtaagaaaatttacgatttcttaatccatcttccggtttttttagcaaaattatttaatatgctaaacggatgggaacgacgcgcaatttacaagcgcgaattacgcataacgatgataatgtccaaccagtgtcgagtccgtgttgcaggccatgaaattgggcatgttggcgtgaattggtgggacgaggacagcgtggaccacatgcaatgggtatttttttgacaacgaaattgaattttggatagaggagaatatttaccaccctcagattttaagtgacgttttatggcaaattttatataacaacaaaaaaaaattgacatagtcaaaaagcgactagtgaagcgaagaaacgggattttttagctgatgcttattttaaatttcggcgctgtttttttgtctcggcgagatttcgggttgagagattttggcggctatatttctatttgtggccaaaaaatatatatatgatcggaaaaaagagggtttaaaggagctgaaatgctttttttttgaaaataggtcagtatccagcctgactaagtagatggatctgatggacacacaatgttcttcacacaaagaacatacacactggcacaactcaaatcaaaattggcatg

SEQ ID NO: 115262 - DNA, 372 bp, Heterodera glycines
ttttgtaatttagaagttttttttaatgaaaattaaataaatttactaaaaaaagaacagattggagcaattttttaataataaagattattatcgcaaactaattaatttgaattgaccaaaaaatggttcgcatataataaaagagaaacattgatttgggaaaggaaaatgaagaaattcatttcatttgggtgttgtcataattaaatgacgaggattatgtgcctgtgtcattcaccgatggcaaattatcattcaaatttttcaaaaaaatgatttcttgctcaaatatgcaattattgctttaaataatttttaatttcattatattatttgaactttgtatcttttcattgtcagatgaaaatg

SEQ ID NO: 115263 - DNA, 1003 bp, Heterodera glycines
tatgccgattatgcgatgactaaatacgcaatttcgcgtttgcaagagggaattcttttcttggcatttgccaatccatttatgggccatgaatttatgccgagtggagagtgagctagtaaatcaatcaaatggttcaaggaatatcgtggaaatttttcttactttggaaaatttgtttgaaaattgttaatgaactgcaggaatttaaaaatgcccaattttcttcactttttgtgttttgaatcggttcaaaaaccggtttatacttgtcggatcaacttcccccacccctagatcgatctgtctcatcgagagctatcgattggtaccatattcgtcgagattggtccacgagaaaaaaacatcgtataagtcaagaaaacccactgaccttttaacggtgtcatgacaacttgtacaattgcttaggtcaggcctaggtttttgtaaaatatgagttgggtttgtacgaattagttttatttggtgtaaaaattgacctttttgagtttgtgccaaattgcgcacccattaaaacatgccaaaaaagtggccacacaaattatcgtgaaaatggtgccgagtcgctgaaatgcaaaaccaattttgtttttggtccgacccgatacattcggccttcatttgttatcggaaatttttacatgcccttgaaaaataaacgggatttcagcttcgagtacccgaggaaaatattaaaaaatttccattataacgggtgccattctgcaaatcagtaactaactttttaaacggcaccttaagatggtttcgttttggtaaacatttgaccccctccaccctcctctcagcggtggttttagtctctgctcggagggcaaagtgcgcaaaagtgggcgtcataatcattcactcattcatttgccctttcatttcgccctccacccaaaacagcgacaaattcttcgccaaattcctcccaaaattacaaaatttatgccaaaaattcaattcaaaaatg

SEQ ID NO: 115264 - DNA, 614 bp, Heterodera glycines
  unsure (1)..(614): unsure at all n locations
tttggcaattcagcaattaaaagaattaagcaattggaaataaatgttcgctttgaaaggaaaattggcaataaaattaatttatgcttttaaacgcgtttaattatttaattattaatttttattgcttccgtttgtctattaaattttgttaatattttcttaaggcaactaataccatattagggaagcaaacggaaatatggctttatatttattggcaatttatgcttacacatagtgacacgttaataaatgttggctggtagtgcgtggattttcaatgtaaaaataaaaaaaaatcgtcagtgccatttgggggatggtggggcctcggcagtgccattttcgtcggtcctttcgctttgtccaaaaagaaaagtaaaaatttcataagaaaacttctaaaattcaaattcgaacaatttatttgaatttttatatatttttgcattattttattatatgagaggaacaaaaaacacttctctgaacatttatttataaatgactttagcactaaaaaacacttaattttccgctgcgctttttcacaaatattattttgaaatattcaaaaaattaaataatttattttattattntagatcatg

SEQ ID NO: 115265 - DNA, 711 bp, Heterodera glycines
attgaataccggtgattggactggcggagaattgagtcccagattaaataaagagaagagtcccagttagaatgccggagaattgagtccctgtgattttctgccgtaaaattgccgaaattgagtcccaagattaagtgcaaagatttttttagaatcagtcccagtgatcggaagggataattgagtcccaataattgggatgccgaagaagtgaggagaatgacttccagttattagaatgccggataaaattactgagattgagtcccaagattaagtgccaaagatttttttacaatgagtcccagtgattggaatgccagataattgagtccttttgttttttgccgtaaaatcgttgaaattgagtcccaagattaagtgctgaataatttctagaatgagtcccagtgattggaagggataattgagtcccaataattgggatgccgaagcatttttgagattaagaggcgcatgcttgcaatttttaataagcaagtccttttataatttcaacagggactgaatagtgcgataaaaatttaaaaatgcgtttttttaggtcaatttctttcaattcggaatgtctaaaacgattttgagttttggaccaaattatttatgtttcattaggtttttctttgttacctattgtgccacaaataggctgctttatctattttctttttaaatttagacaatatg

SEQ ID NO: 115266 - DNA, 123 bp, Heterodera glycines
actttttctattttctttttaaaattttttttaggtatcaatttaataaaaattcattttcaatcagcgacgaataaatgtccgacaacgtctcgaattcgatccaggagttaagggcggatg

SEQ ID NO: 115267 - DNA, 1003 bp, Heterodera glycines
aatatgtacaaaaaaccccacatatgtaaataaaattttttttaatggtattttttgggaaagaaattccctgtaaagtatgaaatagccacaaaatgacataaaaattactttttttggtattttttggcaacattttcaaacttattttttctttataaatcttcaaaatatgtacaaaaatatttgccgaaattttggattttttttgaggatttccaaaaatttccgtaaaaaatactcaaaatatgtaaaaaaaatgaaaatatatatatgaaaaaaatccaaaatatgtacaaatatgtaagaaaatcccgaaatatgtaaatatgtagaaaaatcccgaaatatgtaaaaatatgtaaataaaagtcccggtttttgttcgcaaacacaaaaaagaaagtgtttttcctgctatttagagcaaggagaagccaggaaaaaaatatgtatttacataaaattggcagccctagtgattaaaaaccaatatttttttgaatagtttggtgtttttcgaaattgtttggcatttttcataaacaaaaattatcccagtaattagtctttgacacccacgaaattgttgtgcaaaacattcattttcattcattcattcgtccacctcacatttcttttattgatttctttttctcacaaatggagaaataataacggataaccactttgttactccaaattgcataaaaaaggattttataaaattattttatttaataggagtaaaaaacccataattagcgcgcgtaaataaatcgaaaattacacatttctgaccataatttatttattggtcgctaaaataccataaattttgattattaattttgttgttttgactttacacttatgccaataagataggcattattgataaagattggcaaaccatacatttggtctttcgttaacagtcaattggactcataaaattaatggactcatttaattaatccaggaaaacaaataaaaaagaatg

SEQ ID NO: 115268 - DNA, 105 bp, Heterodera glycines
tccgaactgaccattttccgccctgtggacgatagcgttggatcactgcaacacttcctcgagactttggagcgtgtgtgccgccaacttttgagcctcaacatg

SEQ ID NO: 115269 - DNA, 965 bp, Heterodera glycines
  unsure (1)..(965): unsure at all n locations
ggtcgaaactttacaattgggcggaacggagctcaccttcgaacgccggggcaaacttaacgccatcacacagtcagaagttgtgcacattggcgaacaacagcaacaaacggtgccaaaagaacagcaaaagtcgggagaggaagggtaagttggccaaagggaattggacaccaatgaacacaaattaattgaaaggggcgcaaataagcaacaaaatggaggccatttgcaagcggaagaaaatgcaatgggccacaaaacggaggtaaggacagacagttttaagaggcatttcctttttagttcttggcaattctcatcagcccctaaaagatttttggaaaaattgaagaataaatttaaaaattcgttcacttttcatgcgccggggactgactgtccggtagtgccggcaatttattatgaagattttggtaataatctcttcattaagaaaatgatatttaaagtttgtcttattgttgacttttttcctcgannaatttgaatctctttcggtgagattcttcaaatatcaaaaacgaaanatatggaacctataattaattactcatctttttaaaatttctttttgcatatgtcagaaattacggcgttctgtcaaaggcaactccatcgcgtcttcaacggatggacatttaaggcatcgtactaatgagaacaaaaaagcagcaaacgcattattggaggggatggcacagcgatttccaacggtggcggaggttctgtaaaactaaaaaatcaagttgaagctgcagaacatttcacacactccggcttactatgattttctctcttttatttaaggtcgaaatgccgtcgcaaaatgatgacgaacaaaggtaaaatggacgaaattgccttcaaaaaatgtttataagctaaggcccgtggctgcttcgaaagtttcattaaaaaagggacgaaaagcggccaaaatg

SEQ ID NO: 115270 - DNA, 1003 bp, Heterodera glycines
caatttaataaagaatgtcatttaattatttttttaaatattcaagaacaataatccatttaccagtcaaaaaaaaacattttaatacccaaaataatccatttaccagtcataaaaaaacatttcgagccataaaaatggcatttttttagttccaaaaaatggacaaaagtgttcaataaataatcatttaattatttttgaaaaatcttttcaaaaaattaccaaaagtggtcatgggaattggcaaatccactcccgcctcctcctccacctcctcggtgatgaatgggggcaggcaaagggcgaacagcaaaaagcgtatagaaacgccaggacgaaaacgaacaataccacaaaaatgctaaatgctaatggcaccaatcattttttttataaataattaacattaaattttaaaaaaaagagattgcatttttttgcttacaataaaatgaactgaagaaatcggccgaagacgccttgcgtttccatccacaatttgctgttcagccctttgcctgccatcgagagattgtcccgataaggacagggaataacggagggggggggatcagctattagctgagctaaaggggtgaaacgagggatggggaggggggtggataacggcaaacgttccactaaacataccggaaggaagagggaggggattaacaacgcaaggaagggggttaaaggccgctaatagcgggcgtaagcatttggggggggggggaaagcgattaaggtactggggagagtactgtatccattgatcagcccgtccgctctctctctcgcgcattctctctctctcattctttgcaataagtttgggatttatggatcgggagagggaggggaagggatccccaaacaggtcaataggtttgggctcatgattggatgaccaatcaaattatcgaaatcaatcgataatttgattgggaatattatctactttaatatttttttttgctcttttaaaatttcagtcatg

SEQ ID NO: 115271 - DNA, 87 bp, Heterodera glycines
gaagagcaagaaacgactcgcgtattttcgaaaatttacaacaaaaaaaagtattaaatattttacagaaaattagtgccaaaaatg

SEQ ID NO: 115272 - DNA, 677 bp, Heterodera glycines
attatgacccctcgaaaatggtagaactttgggcgccatggtgccgataggcgatgccagaaaattttgattttcattgaatttagttaagaaaatgttgcacgcactttgaagtcataaaacgaaattttttgcgatttttcaagaaaaaatttgtttgttttttgaaatttttaaagtttttggtagcagttttgcataaaaatggccagattagatcattttaacaatcattctcatacatatgttttccttttttcacatagaattctcttcttatttcggttttgattttagcttacaaattttctacaaaaaattttcatggatttggacgcattttttcgtttcttcgctggggtttgcaatttattttaatgtttgtcttaaactttttttttgtccagccgcgcagcagccagcaccaatgagtatttacgaacgctttaacaaggaagtttgcgaaaaaaacccttgagcgtaaatctaaaaatgtacatttagttcttaaaaaattggttgcgatcaaatactgtggagtcaattaacgcaagaagcgttgaccacggaggaaagacgcctttgatttgcgccatacagcgtgaatgtttgttgttttttctatttaaaaataatttttatttgcacttttaatagcacctcttgcgtgcacgatg

SEQ ID NO: 115273 - DNA, 115 bp, Heterodera glycines
ggtgcgcgcatttttgaatttgctttactgacattgtgtttattccttctgcaacgcaggcacgaaacgattcgacgcctctgacacgggggaccgagacattcagcggacgatg

SEQ ID NO: 115274 - DNA, 304 bp, Heterodera glycines
ttgcccccgtctccgctcacttcgatgctttggtggacggttgtttcaaggttctcgtaattaatgccattccatatttttaataaaaaatggtgtaaggctggagaatctgggctccaaaaaaacattttctatagtaaaaggccagctcgccggaggtttccggggctttgatcacgaattgatttcagaatttcgacatttttaattttagaacatagatttcctgaatttccgcccgtgtttttagaccaaaaagcgcaaattgcgacgcctttggatccgtcaggccattctcaccatg

SEQ ID NO: 115275 - DNA, 477 bp, Heterodera glycines
tctaaaaatcctcatttttcattctcctcctttgaccaacttctttatatatgctctcaaatttaatatcacattttttgacaatttttgagccacacatatttaatataaataagtttttatgttgaaactatttattgtttattctctaattattttatcaatggacacgccgtcacatgtatctgatcgcaaggccggcgatggtgttggtaatgctgatgcaccggcagcatgccaacagcagcagccgagtttggccgatgacgaaccgctgttggtccgacagccaaaggaaacacctgcgcaacacccgatggagaatgaggaggaaccgcgacaggaaagcgcactgcttcctcagcccacacatggggatgacatcagccaaacggtcagccagttgccacccaccacagtgcacaaaacgcgaaattgtcaaaacaaaaaagtcagttgctctcgtttgttaagatg

SEQ ID NO: 115276 - DNA, 211 bp, Heterodera glycines
tatccgtttgtgaattatggtaaaaaatctgcttgcatttttgaaattttccttcgcttaagacaccctttatccggtgggggtccctaaaattgtggtgagcagggaattcgatgtgaattggacggtgcccgacgatgtgccctatgatggtctgctaaaggtgaaggtcatccccccaaaggaactgctttatcctctcctccctatg

SEQ ID NO: 115277 - DNA, 196 bp, Heterodera glycines
ttagaggcacttttccttcgcgcgagtcgaagccaattgtttattggacgaacattttaaatgcactgacattccttcgaaatgcaatcgttctgaacgaacaggcgagggtaggacagaaaacaattgcttttaattaaccaattaagtgcaatttgtcattaaaaaattttaaaaggattatttggcatcgatg

SEQ ID NO: 115278 - DNA, 449 bp, Heterodera glycines
aaccgacttggcacaccccatataaggacttttttttgaaaaattatatttgttggtcaaatgacaaactttttctttgtaattctgccgagcaatacgccaggctttgttggaaataaaacaaacaaattcaaagtacacttgacaaagaagttggtgttcgatggggccgggtggatggttggaccgtcaggcataatttgcccaaacaggctggggaaaaacatggctttggggtcctttttgtgttaagttgggtacatggaacccacaatatgtaatagttcacctatacagcagcaggaaataccgtttccgtgtaccaaaaggtaagctttctgtcgccacaattgcatgagaggggcaaacagacacaagaagagtgaaggcaaaatgaagagcagcagagaaaactaagagaaaatgaacgtaaacgctcgaggaatatg

SEQ ID NO: 115279 - DNA, 408 bp, Heterodera glycines
  unsure (1)..(408): unsure at all n locations
tcctctctctgagtgccaatgtcccctccgcccctctccttaccaagacctncnccgtgccgaagtcgcgtggcagcacatacccctaaggaattagcctaaaatggaagaatttatgtgattttagaaatgttttttctacttttgagtggatggatcgcggcaaactcgcggaggaatagggctgacgcaataaaacgcccatttccgccgattgacgcaattcgtccaattcggccgccaactgacgagccaatggagaagtggcggcacggccgctgaatcaacaaacaaacgatcattcaatttggcaaaggagtggttgacctgcttgaagttgagggttgttctgcctgtggggggtgctcctgggggagtttttctgtggacaattgatggggcggaatg

SEQ ID NO: 115280 - DNA, 1003 bp, Heterodera glycines
atccaatggtaaattaaatttcttaaattattctatttcatttatctaacgcgaaaatatgaaaatttacaaattctgactaaaatttaaaataatataaaaattaaattatcagtgaattttaattttcaatcgttgaaaaaaattgatgaattatttttatttttatttaaaataaaaactgaccaaattaattaaaattaaaattgaaaatttttacattaaacctaactaatagagggaaaacgcaaaatgattaaattttacattatctttatgaaaaataaattacttttttaaaaatatttggaatgttttatgtttttaataatttggctgacttttagtggtaagaaaaatttaaaatttatatgacaaaatagctgagactttaatctataagaaatatataaatattatttattctggtgtctcccgaattttttacgaatttttttcctacatacgatgtaggaaaatcgctggttccttccatgtatgtctacatacgattttcatagagggaggctcatcgtatgatgggctcgtcgtatgtagaaatgttttaatttgaacgcacatacgacatatcgtacaaataatcgtctgccgcagacgattttacgtgcgatgtgacgatcgcatcgtagatgcgatgatacgatgaatttgaacgtacatgcgatgacttggtgtgataaatcgtatgcgggagacgattttaatttaaacgggcatcggggctatgataagccatcacatcgtatcatcgcatcgttgatacgatgctaatttgaataggcccctggattttggtctcgaaaatccagacccagccagatccaggttagacacgaaaaaaattccctaggtccaagtctcaggctttccaaaagttgaactcaaatgttcaaaaaatatttttttaaatattaaaaataaataacaaatataaacttattcataatttaattaattttagttaatataaatgacaaacatg

SEQ ID NO: 115281 - DNA, 1003 bp, Heterodera glycines
gattttctcaaaaattaatggcgacaaaaaaatcttatttacgttaaaagatacgtcaacaaatgcactaataaaatacccaaattagtgataaaaaaaaaacctctaaataatttcaatttttcttcctttttagcctttcttttttactttccactgactgtgccttttgtccagctttcgtcttcaattttcttcatccaaaatagcggtggaaccaccaaaaccagtgacaacatcttcgaggacaacggcatcaaagtcctcgactcgttgtgggccgccgtcgcgcacgctccaaaatgtgtggcgttcgctgccggctttggattggcaaaaaatgccgttatttcgctatggatttaggcgcttgaatttccattatgtgtagctttttgacatgcatttttgcacaattttgggcataatttccaattttcttggtataccattgacggattcaccacgaaatccatcacatgccatatttttttgaaaaaacaaagttttttctgaacagcttgccatgggcaacatcgaaggccttgttgaaaaggtcacggaaatggggctggaggataccattaagtcaaaagaaggtcaaattcgtgctcagcgcatcaaataacccctaaaaagtgttttttgaatttttattcctttttttgtgggaccaataatcttcatgattgccaatattttattttttcataaaaaattgacacaaaatcgcaaaaacttttcatttttaaagtctgttaatgctaattttttgtcggcaaaatgctgattttgaaaattttaggttgggagccctggtttaaaagaattttttggtggccccaagcgtaaaagtgccgaatttaccaacatttaaaattaattacctgtgcaaaaaactgaacatttggtactcattttctttttagaagcaattcaattttctttttttaaatacctcaaaatttcgtctgcaataatccgaaggcttttttcgtcgatg

SEQ ID NO: 115282 - DNA, 428 bp, Heterodera glycines
  unsure (1)..(428): unsure at all n locations
ttttttancaatgcagcaaattaaaatatgatacaaatgtgcaaaatatcacataattgtcaatntcatntaatntagtccgacatcctgggtccgaattcgaacaaaaagtcgaaaactcaaatttttgaatttcgtttttttgtattgaagtactgctgactatttgtttttaaacagggtttgaacccaaaaatgcgaaactcgaaaaatttagaattccttttcactcttttataaagttttgtcactttttcttgaaaaaaggaatacggtatcattaacaaatttcacccaaaatgtctgttgtcttgctaggcaaaaaatggttcaacaagatgtaattaaattgttatcaacataaaaattttcggttgcctgaagtcaaaatttagtttatttattttccagaattggatttcaaaatg

SEQ ID NO: 115283 - DNA, 71 bp, Heterodera glycines
atagtcaatacaatccgttttttcctttttatgcttggtatcattgcttttccctttagctattgcccatg

SEQ ID NO: 115284 - DNA, 184 bp, Heterodera glycines
ttttctctatcaaatatgcaaaatttggtgtggatttaaccagtaaaaaaagttaaacaggatgaagtaaattcggtttttctctaataacagagacaaagaaatagcacgtaaaagactttcacgttctgttttaagtcagatacggacacattgaaatttgaaatttatcattgaaaaaatg

SEQ ID NO: 115285 - DNA, 278 bp, Heterodera glycines; identical to SEQ ID NO: 109672

SEQ ID NO: 115286 - DNA, 343 bp, Heterodera glycines
ttcccttttcagctacatcgaccattccgtcattgaatttctccgtgccaatcaacaaatttggaacaaaggcaccaatttgagcttgtgtgttccttttgcaaaagatgaccagcagccaatttggcgtgtttttgtccgtgaaatttggccaatttttgcacaaagcattcgccacttgagcattttcggcaatggcctccttttggacaatttgcgtcgtttcatttcgcccacaattctcactgatctcaacattaattcaatcagttccggctatttgttgcccgatgcgactgatgatgttgacgagccaaatgcaattccaactgctggccaaatg

SEQ ID NO: 115287 - DNA, 64 bp, Heterodera glycines
ggtatcgtccattttttaatctgcaatttcattattaaccagtaacttttaggtgccaaccatg

SEQ ID NO: 115288 - DNA, 390 bp, Heterodera glycines
ttgacgaggggaatggccacggtcatttggaatagtcatgggcgcagcattcagtttcaacctccggcattttcttcagattcactcgtcacttcgaccagtacttgggatacttggccaacattgtgctacgactccaaaaccgcataatcatttactgtgattcattggtcacttcctatcttcagtccttgggaaagcgcatcaattgggagcggattcaagtcagtcgatttcagtctttttggagtttttattattatacaatattcttttttaggttgtggagctgtctttgcaggaattgccttattacaaattccgaaatgaggtgtttactctccctccaaatgccaaacaattgtggccccacagattgaagagattatg

SEQ ID NO: 115289 - DNA, 102 bp, Heterodera glycines
tttctctataaaaataaagtttccaacgcaattaattcttcttccctttgtgacgacatcattcggaactcggccaaattgtgctaattgctgccaaaaatg

SEQ ID NO: 115290 - DNA, 470 bp, Heterodera glycines
tatattttataacttttcttaaaacaaaaaatgaatgtttaactcaaacaaaagtaacgccacagattcaacaatttaaaatttttaactagcactattttaaattttgaaaaatccatccggctttaattcaatgcagattctgatgttcgaccacattttgctctcattcattttttattattttgtaattaattctaatttaagcattgtcaaaatattaaataaatccatctcatatgtcacctacaaaaaacaaaagtattaattcgcagtcaacgatatttcttagtccaagcgaatcaaattcttccaacacgcaaaaaaagtttgctattctaaaaattacatctttataatagcttttcccacatttcaaaagcagtcttgacaaatccattgagaatgtaatcatcagtgttagggatgagtttgggtatctgaaccaactctgggacactgttcacatg

SEQ ID NO: 115291 - DNA, 61 bp, Heterodera glycines
ttttgtgcttttgtaccgatgcaaatcgttgctacgaagcccagcagtgtttacgaatatg

SEQ ID NO: 115292 - DNA, 1003 bp, Heterodera glycines
ttctttacgtaataaaattttttttattttataaatgaaattaccgtatttgctctttttatatgccatggtatattatttttcaacctcctcagaagggggtagataattggagattggtagactaatggagactgggagattatttttcgatgatttatttagtggaaaatttttgaaatttattttaaacatgtcgccaaaaaatgtcatcgcgtcaaaaaaaaacatttttattgcatttatgttaaagaacttctgaaaatgactccaaaatgacaaaaatctatcattttcttgcttccggtatgcataaaaattggaatttttaatttgaagaaaggagctcaaaaaacgtattttttcgttgaaatttttcgattctgatgtcactatcgggcactagaaatcactacctattttggcgcttcgtactaaaatagtgaaaatttactatttcgacatttttaggaaaattccttaacaaaaatgcaataaaaccaaaaaaatacacccctaagaaacgacctaaacattttttcaaaaaatgcacccctgagaatcggtctaaaaaatttttcaaaaataccactaagaattggaaaattttcttaaaaattcttcccacaatttttttttcttgacaaattttgattaaaaatgttcagtattttgataagggaatagttcaaaggaaaagtacctcatttgcaactccaattagtgaataaaattattttggcttaatttttgactgaaaattaggtcactattcgtcactatttcggactttttgccactattttggaatttttactcactattttagttaactatttcgagattttccgtcactaaaagtagcgacccaccctactctaatgatgatgcagggctggatttgttcatttattagccccttttactgttgaattgatttttttggaaaatgtgccaaataaattattaaaaaattctatttatcccccctggcacataaatg

SEQ ID NO: 115293 - DNA, 552 bp, Heterodera glycines
tgctaaaatgagaaatgtttgaactgaaacaaagcattgaaaacaatttcaaacttgaaacaatgaagccaaaacgacgagaaattgggccaaaccgaacaaaaagcaaagggttcgattggacacgcgaaaacagctgaggaattgcgtgtggtgatcagaaatgttaagcaaataccaaaagcgcatttctaagaaaacgaaatgaccaaaaatattttttattttttcactaaaaatttgcgataattttaaaatgttaaaccaattgaaaagtttggaataggatgcgtttttctgtcacttttagcccagcaatttcttaatggcaagggaacactttgtcatgcttcacactttgttcagttggcactttttggtgctaaattgactttaatttgttgtggcatttgtcaatttaatttttcttcaccaaatctccgaaaataaaactcgaaatctccccggattcttcctttactaatttcagcatattacaatcacaaattgatcacccaaatttagggcagcaaagtctaatttgctgctatg

SEQ ID NO: 115294 - DNA, 758 bp, Heterodera glycines
cctgaaaacaaaatttgatgccttttctcacccaaagatgtagagcaggtcctttgctgactgcgccaaattattgtgtatttactacaacaataaaaatgtttggtttttaaccaaagcaaatgttgtccaataaataaataaattatttattaaacaaataaatatggaggacagcagggaataaataaataaaataatgaaatggtggaatgaatgggagaatgcccggagtgagggaaagggagacatatttatggggctggtcaaggggcgggacgagagacaataagagagggagtgaaagggaaaatataatcaataatcggtgtggtcccttatccaacaaatataaacttcaaaattttaactattttccccatatagttcgtcgtgtatccttttttcctcaccattccgattttctaatttaactatttaattcttgaaattaagatatccctaaattaaaattaatatagtatagtaaaataaaatttttttcattagaatgcactatttaattatttgttatattaattgtttattcaaaaatttaactgatatagaaaaattaaaactattttcgtactacagtaaaacatttttcttttgagcgtttttgatttttttctattctaacgaataaatatttgtggctcctctgtatttatttattaagaattttttaataaaatttatttattcatgcaagattcagtctgattgatttattatcattttataattttagcatg

SEQ ID NO: 115295 - DNA, 344 bp, Heterodera glycines
agtgtttttaataaaataaaattaaaatagaaaaaaattaaaataaaaaaatcaataaataaatacattaaatttatttaatgaagcaaaaaaaaaatttttaaagaaaaaattgaaaaaataataatttaatgaaacaaaaaaaacagaataaaattaaaaataaagaaagtaaaaaataattaattaaaaaatattaaataaataaaaaataaaatttaatgatacaaaaaaaacagaaaaaataaaaaataaagaaagtaaaataaaatgagtttaaaatatttatttttaaataatttaattaggcaaaaaataaaaattaagtaaattttaggattatg

SEQ ID NO: 115296 - DNA, 357 bp, Heterodera glycines
ttgtctgaaaaatggctggttgtctctcagaggtaacatttccgaccttaaaagtttttggttttcaaattccaatatcaatcaattcaccaacctttttgtctcttaattttttctccccttaaggactcattgcgaaatttgccaattcaaattccaattaaaacggtgcgttcgtccgtttgccccggcataaatgcattccccccccccctccccctcagcactgcgccctctttctttgcctatgtccgttccggccatcctcgtcctgtgttcggtcttccgttgacaattcgcggcactcttctcaccgatttattgtgcttcctcctgctaacgccgctcgtccttatg

SEQ ID NO: 115297 - DNA, 267 bp, Heterodera glycines
tttctcaaccaaattaaacattcttggtattatttgaaagcattcgaaaaatgctattagcctgcaaattttcaaatatttttatttatgcacaaaaaaatcagagcaaaaaaaagttcgaattactgggtttttgagttccttctggccataacttttttgaaacttaaccaaaatttttgagattttgcaaattaataataaacacatagagctatcgaacaacaccaacaattcttaatttgattgacagtgaacaaagttatg

SEQ ID NO: 115298 - DNA, 423 bp, Heterodera glycines
  unsure (1)..(423): unsure at all n locations
tttattaatctcgtgaatgacccaaaaagcccaaaagtgaaaaacggcacatttaattcacttaattattgcatttgtcctcaggctatatgtagtaatagtttagcttttcaattttgctttttgaattgttcagtaaagaaaacccactcaaaataaacaaaagttgtttgaaaagctttgtttcttttctcaattacatattgcataaaatgaaatggaaagagcattacataataatttaattttccaaaaataaaattggtcaattgagggaaacaaaaagaaaaaagtgaatggagaagagggggggggggngggggggaaatagctgaagctgatgaactttgtgccggtgctgttatggtgcgttaacaaccacaggacccttttaaccggcaccattaatgagaggagccaatg

SEQ ID NO: 115299 - DNA, 308 bp, Heterodera glycines
cgtgagtgcgtcctgcctacatgatgggagctagcagtttgtccctcccttccgccgaattttatatttttcaagcagaattttttttattaaataaaaaatcctagaaaagttttctgtgatttttcttaaaattgttggaaaaccctattaatttaccataaaatttttgaaaagattactgagatattataagaaatttgaacaatacggagggggggggaggaggaacgtaggctcgtcctgataagaatagggattgtatttgatatgctttttaatcaagttttgaatttcaggtcaaaatg

SEQ ID NO: 115300 - DNA, 271 bp, Heterodera glycines
attgaataaaaaataaaagaaaaaagaaaaattcattcaaattttttgtaaaatttttgttcattatttgtaagaaatttgccggcatcggaggacagtggcaacccgctcaaatcttctgaggataaccaaaaacagcagcagatggatgaaggagaagagaaggaagcggaggagagcaaagagtaaaaataaaataaaattaatatttagttaataaataacattcaaattttttgtcaaatcttttttaattatttgtagcaaaatg

SEQ ID NO: 115301 - DNA, 544 bp, Heterodera glycines
tctaaaaaattaatttaaaaaatgggattaaattcttttttgtttaagccgccagtgaaattttaatttaatttcgaaatgccaaatttaatttacgaataatttattctcttataaatagggatgatatttataggcactaaaaaccgccaaaataggtaggctctaggctctaaaaaacccccaaaataggcactaaaaaatggaaaataggcactaaaaaaactcatttttaggggtgtaaaatgacaaaaaattattcaaaaaagtaaaaaaattaggccaagtcagtattgagataaataattttttaaagcataaattcttgtcaagaaaataaataaatacattttggagatgaatttttggaaaatttttcatttctgagggggtttatttttagaaatttttgggtcgattcttaggggtgtatttttaaaattcccaaaaaatcgattcttaggggtgtatttttcgtttttattgcatttttgttaacaaattttggacaaaacgccaaaaatccattttttgaaaagaaatg

SEQ ID NO: 115302 - DNA, 1003 bp, Heterodera glycines
ccccgcccgggtccattttccaagtcccggtcccggccatttgggtcggaaaaacgggactaaatttcaccagtgaaactgccccaaatgtgaaaaatttaataattatttttggcgaaaggtcttttatttaaaattttgaagatggaatttgggttttctacatacgatttaaactgttaaaaagatcataaaatccacctaaaatattcaaaattagatctaacatagcatttttggggaaaattacttaatatgaatgtaaaaatttatacaaattcttacgccgggcccataaaaatccttattttcttaaaaattgagttgaaatcgcaaaactttgtcatttttttggtgtaaatctgtttttttcatgttaaaaatcttaaattatttcttaataaacagccaaaaatagggtaggaaaattaaatttaatttagaaaaacctgtttatttaaaacaaggctaaatctctaaattttgtaaaacgcatccgagcattaaaaaattcataatgaaatggtttttcggtattttactcattttttatgaaaattaaggagttggaaaaaattggaatttttccttatctttaacagattttcacaaaaatggccaatttttggatagaattttgactataggaattttgaaattgaattatctataactaaagttacaaagaaaattgaaatcgagatatgccgaagcattaaaatcattcaaaaaataattaaattttgtaattttttttgaaaaacccacaaaaactcaacaactcatttctcttcgaccaattaaaaaagatcacagaatgagtttaaaaactcaaattggcagactgatttaaaattaaaacagcataacataatttcagaaaaaatgcgaacaaaagatttatttcttttaattatttttaatttttgtcggattttcaatttctatgcaaccactactgcctgaaaattgttctacgacattatatgaaagcttaaaaatg

SEQ ID NO: 115303 - DNA, 1003 bp, Heterodera glycines
tgggagagaaacaatgctgaatttgggcacataaaaccgcccccgcccgcgcactgtccgccgaccgtcgcggttcgcctggggagcaaccacctgctgatgctgttgctgctgagacggaagaacggacagaacagcgaaagcagagagaatcaagcttttcataccaccacatcataccatcaccagcaccaccacaatcatcattattctaattaattagtgaaagtaattagctaattaattaatcaccccccgcccattccctcctcttcctcccaattcccatcttcgtccttctttactttcttccactactgctgcacaacaccaccacacacaaatgtatgtatgcgttgtgaaaatcatccatttggaatattttccgaagcacaatattattggtggtcaccatttattggtgcataatattttgaacacttttattacatagatttcccttaattagttaactaattaattttcatttggtgaacatcattaacatgaagaagagttactaattatctttaattgaaagttcgcgaattgctagagagaaacttttttttttgttaagtcaaaacaaactgaaattttttatcatttaattattaacttgattaaatagtgaattttttattagtaacatgatggtggttttgtttttggtacgattacaccagcaaaattattattttttcggtaagttggcgatgctactgataaaataaaaactgattaattacccttgaacggttcgaaaaaatctcattgcaatttacattattttaatattaaactgtagtaaattaattcccaagtatttaagtaaaatagtagtcaatgtaaaatagttgataacctaattcaatttttttattattatgaaatttaatttattctaaattcccaggtgattagaaaaacagcaataattttaatagaatttttgatcattaaaataaagaatcaaattgtgtgatgagtagtgcccgtgatg

SEQ ID NO: 115304 - DNA, 205 bp, Heterodera glycines
agtaaaagacggcacagagtgtatctgaatacgtaaagtatttcaaacggaaaaagaaagtcagactcagtggaagggagcaaatctcccgcagagtctgtatgtcgaaatttgtagcaaaggtcgaccaaatcggccaagtgatcggagccaacggggacggagcaggccaagtccaagtcgatcgcactcaaatggcacaatg

SEQ ID NO: 115305 - DNA, 74 bp, Heterodera glycines
  unsure (1)..(74): unsure at all n locations
gtgatgaaattgaaaaatgtcggaattgcgcgagagattttgagagtgaacggctcagcgaaggcgcacanatg

SEQ ID NO: 115306 - DNA, 88 bp, Heterodera glycines
ggtttgttttgccatttgttggcttagcaattgaggagggccataaaattcggtctgactcccttgaaagaagttggacgtgcacatg

SEQ ID NO: 115307 - DNA, 112 bp, Heterodera glycines
cagaaaaacggcacgcaagtcacgctcaagcaaattgaagaggaattaaggaccattcagctggtgaaggacagcgcactcactttggcaaatcctcctgttgcaacccatg

SEQ ID NO: 115308 - DNA, 1003 bp, Heterodera glycines
tgacccaaatgttgggcaaagatatttaaatattgttgtatttgattgttgctcataaattcataaaaaaacgagttaggcttaaccaatattttgtaacgtaaaaacgcaaaggaaatgactgtgctaacttataacactgggatggatggattaattggtccaaagctgaagaaatagcatcagatttgttgacaccccaaaaatagcaaaaattattaattttcgcatggaaaccccagggcctcgcattttgaggagacttagattttgttgtgattacctatgtgatcgaaatgttggttctcagccatttaattgttgttgtatttgatttttgcttacaaatccataaaacgaattaagcttaaaattaagttttttaccacaaaattaaaaattgctgttttctgcttactcaatccaatttttgtcattccacaaattaaatcaaatataaattgttcaaattggcacacgaattttcgcggtctttccacttaagtgccgccgtttcgccaataagcaattccatcggggaaaagctcagcggaatcgctgaattcagcccagtgagaccggtgagaagtgtcagcgatgtgagacgaagcaaattgtccaactgatcgcaatagtcaaatcgcaaacggtgaatgttttttgtaaaatgggccaaatttgacgggcaaaaacatcccaaaggggctggacatccttcgttttgaatgccacacattcaaatgcaaaagggtttttccggatttagtaatactcaccgggtcataccatcggaaatgttatccaatatgaaaagcaaaacttatttgctcggatgttcataaagcacatccttcgttcttttcgtgtaccagagtatataaagctgacaaaatccccttccagtcatattcttcattcagcccattaattccatccccatttatttgatccttttttcagttcagttctttgggaatattgtctaattaccagcaaaaaaatg

SEQ ID NO: 115309 - DNA, 813 bp, Heterodera glycines
tgatttcaatatatcgagcttcgaaatttcgggtttcgatacttgcgtatcagtttcgagtgctaagccgagcttcgcccgtccctgtctcagaccagcaggaggccccatttcttatgctggactagaactgattttttgaaaaactcccaggaaccagaccgctaacattcgatagcccaaagtgttttctattagcctgcaaaatttaaaatttttgatgaaagttgtgacggaaaatgttaagaaaacatttgagtacctcaggtcacaaatagatttttcaacagaatgaaaattgtttttcggcgcaatcgtttcggcccaacaagtttttggctataactttttctttgtcaactaaattcaacattgttggtatcattctaaagcttaacatgtttataatgtattttaagttattgcttcgcgattagacaattgctaaaaaagttatacatgaaaatttcgaatttttaaagttttatcttaataagttttttacaggcttgcaaatcttttcgcctttcgcagggctaatagagcatttgaagggcttaagaatgataccaagattattagaattggttaacaaagaaaaaagttgtaatcaaaaatttgggctggcaccgaaacgccaaaacggccaatccctttttttagatttaaatgtttggccttctatttcctaataataatttcttattttttacttttattgtaatcgttttcaagaaattgcttgaatttagataatttgattcacatgaaaaatttagattattcttttatttatttaagttgaaaaaaatg

SEQ ID NO: 115310 - DNA, 333 bp, Heterodera glycines
aattatttttaaatttaaattattaaataattttttgattataaaaatttacagcggagcgaatttaattaataattattttggcgaaaatttggtgcaatacgccaaagctgtcaaaattgagtttgatccgtacaaaggttaatatgtaaatgtgttatatcattaaaagggcggcaccccaaaattaaaactgttgaaatgagaaagcgaaataatggctggaaaaattttacggattaattataagaaaagcgcattttcagtaaaagccttttttcgagttaaaattcctttaaaatgaatttcgaatttttcacttcgcttaaaatg

SEQ ID NO: 115311 - DNA, 155 bp, Heterodera glycines
tacaaatctcgtaatgacagggacagtaatgacaacacttaattttatgtgggcagttcatttttcaatttaattttattttgggttgctatttatagaaggggtatataaagggagtgaaaggaccatttgattgataccttgtatcaaaaatg

SEQ ID NO: 115312 - DNA, 261 bp, Heterodera glycines
ggtgggccgcgtctgccgtcatgtgcacttatcagtcgtattaccacgattcttatctcgcggcggagttcgagaaacggagagccatagcatatttatggaccatggggacgaacgccgggaccaattgggcaaaatgggcgggggaggagcagcgaaattgggagagacgggggaaggaaaagcggaaaaaggaagggaggggagcataatttgaatgggaaatcacaaattttgaaattaaaatgaaaattagcaatg

SEQ ID NO: 115313 - DNA, 1003 bp, Heterodera glycines
aaattgaaacatttaatttgcacctcttcggttggtgcacaaaagataaagcctgtactttactgatgagtgttttatttttcgagtttattttaccaataatttaaatgtatctcctccatttatgctcttctttcactatttcaatgtcaatgtcatcactttgtcttcatttttaacgttaaagtttttctcctggtcctttaattgcttaattaagccaatgattggtcaatcaatgaaaaacaaattgataaaagtgtctatttttggcgcaaactttttatagtttcacattacccaatggtatttgaatatattcaattttcggctctgttccagtttacgcgtccaatcaatatttacgcgtccaatgagtgaccatcctcacttttttaaatcataacttttttattacttggtaatccaaaattcttggtattaatcgaaagcttaaagtttagcgtatttattaatacaagaaaaaaacaaatacttacatatattaagaaaaaatttacaatgagaaacccgaaattcataacttttcgcatatattcaagcatagttttttgtcggttgcttttattccagaattttgctatacaaaaacttccccaaattttaagctttcgattagagcacaattttctcccactttttttctatccaaaaatacaaaaatatctttgtttatattaatacgtttaggtaatttctcgtacattgcatctatttttcaaaatatatttgtttacgtttgcattttagtcggatcaatttttttttaccgatggcaaagcgatgaaaaaatgcataaaaacagggggggaggagcacaacgaaacatttgcatgttttttttgctacaaatttcctcaaaataatcacaaagcccaactgaacataaagttttgctgattttgtgccgtggtttttatttcttgccaattttgaaattgccaataattttaccgcatttaaatagataattaaacgaatg

SEQ ID NO: 115314 - DNA, 63 bp, Heterodera glycines
  unsure (1)..(63): unsure at all n locations
tgctctgttaacaaaaacaaaaaaagagcnncatacattccattccaattccatccncaaatg

SEQ ID NO: 115315 - DNA, 380 bp, Heterodera glycines
ctgaaacctgccgctgaaacctacgcctttgagggccttcctggcaagtttccgaaaattctgtttcggtccaacaccctgcgttcagatgtcaaagtccaacagtatttctacataaaacaccggattcgcctactgtaccctcagctcaagtgcattgttgagtaccacaacaagggccattgcaaatactacccattgggtacaaatttttgtccgaaaaaaataaaataaaataaataaataaacccccttaagagttgttggccattgaggagggctgtgagagtgcacccatcgaaaaacctgccgctgaaacggactatctggactacttgaactttcgcagtgggtggcaatcagcactctactgatcaatg

SEQ ID NO: 115316 - DNA, 367 bp, Heterodera glycines
aaacgagcaaaatgaaaacacatcaggagttgatcacctgggtgaagaaatgggaaatggtccaattaatcaacaaaaaagagaaacaattaaaaaatttgatgcaattaaagaaaaattgagagaaaaaggaaaattccgaagcaaagatcaaagcaaaattgagagaaaaattgcaaaattattaggaacaaatcggcaattaatacaaaaatggaaaaatgaattaaatttaaataaaaacaaaataaaaaagaatttttatgatgagaaaaagcgcaaattcattgaacgatttgaagatttaaaagtttatatgcccatggcaaacagatagaatttgcgaaggaattgggcatttccaatg

SEQ ID NO: 115317 - DNA, 229 bp, Heterodera glycines
tcaacgcattcctggatccggagcttcacatcctcacagcgtcatcaccattcgcagattgtggaaatttccgttaccattatctgcaactgagccagagcaattggatcaaaatcgacacacgcaccgctacgatccagaaaatcgactccagcagcatctctgagatccacgaagcctctggagacaaatcgttgttggaaatcacgccgctagtttttcatcgatg

SEQ ID NO: 115318 - DNA, 110 bp, Heterodera glycines; identical to SEQ ID NO: 98226

SEQ ID NO: 115319 - DNA, 817 bp, Heterodera glycines
tggggggcaattgcctcgtgaaatgaaaaattattattattttttttttgcagaaaaaagggtattttttttaatttatacttaacgactttcccgttttcccacgacgccaaaaatttagaaaaatatcactgaacaaaaaattattgggcccgaaacgcaaaaaaaaaagaaacttaaaaacaaatttaaaactgaatttaaaatcaaataaaataggtaaataataataaaaaaataatataataaataaatctaaataatatttaagataaataagtatttacaagtacaagacaagcaatccggtgaacaagtggttagtatgcctttctttgttggtgtagtgtatagggttcgattcccattaattctgattatcaaactttttaattattttttttttgataattacgtttaggaaataaaaataaaaaatttacataaagagtgaaatactatgttttttatgcataccgaatgaactcaaaagtaaaaatttgatccttttttggacaaaacttgtaacaaattgaaaattaatttaaaattcgcaattttcatgtataacttctttagcaattgtctaatcataaagctatagcttagacaaagcttttaaacatgttaagatttcaactaataccaacaatgtaacattgttggatttggatgaccaagaattaacagtataaaaattgacaaaaaaaatgtttctgatccaatttaacagaataaattttgattcatggcttacggaaaattaaaaatcgataaaaattaaataaaacaaaaaaatttaaaactaaaaaatatg

SEQ ID NO: 115320 - DNA, 231 bp, Heterodera glycines
attctccaatgtggcccaaattttaggcccccagccacagccctttgcttctcccagttttaagtcttggatttgtcaaataaattcaagacttcaaattaataatcaaaaattctcttaaaatttttttgaacccaattcaaaaaaggaaaaaaaattgcagtcaaaaaattattcgaatttctccaattttgtttccataatttccgaaagttattcggtatcataatg

SEQ ID NO: 115321 - DNA, 333 bp, Heterodera glycines
gttgaattaattaattacgaattgcccattaaatagttggcattttccattaaatacataaatttcatttaaaattttttcattaaagtgtttgttatatgataataggggctaaaataaaaaaaaataataaataaaaataccaaatagttttttcatttctcggaaaaaaattatttagtgttttttttatttttaaatatttatttctatattaattttttgttcgtgtcaaattgttattaaaaaattcaaataccatcttattgaattagaaccctcggggctctattttcaaccactcctattttcgaatttttagccaatggaatg

SEQ ID NO: 115322 - DNA, 445 bp, Heterodera glycines
ccctttcgatactattgatcaaattcattagcagccagcgccgctgattgacccgaaatgataatggcacaaatcaagagtcctgatgatttttaatgttcttatgacacttcatcaagtgccagatttgaatggaaatgcaggagcgtactaagtcaatgcgttcttccatcaattagactcaatcagtgaggattgacctaacaaaaagcgtttaagcgcatttaaatcaaaatgctcgggtagagcagagcacgcatacatttctgcagttgtcatcaacccatttcggtatgaaaatatcagaaaggccattaagcagatactcgattctatagatgcgaagtcgtctgatgactgggtttgcagaaggaacggccataccattgatgacatgccggaccgagtttcataggtgtgaagactttacacgggctcagatatg

SEQ ID NO: 115323 - DNA, 119 bp, Heterodera glycines
tcatttcgacgcgcaaaactatgacaagaaaatatttaaaaaatacaattgatttattcttaaaaagaatttttgaataatttattaaaagcaaattaattttttatagcacacgaatg

SEQ ID NO: 115324 - DNA, 278 bp, Heterodera glycines
tggatgttgcacaagggacggacgtcacaacattatcagtctgttttcgctcacatcctgctctcgtccgctgtacggaggccggcttttacaaaccgcacgccgagcagttgacaccaggacgcgacgactccgagcgggcgctcatgaccgaccaaacggcattcaaattgccgaaaaagggagtccccctcattttagtccatcagaacacgcccgcgcaacgcgacgaagtctccacttcttcggccaatcctggccagaccgacacggcgatg

SEQ ID NO: 115325 - DNA, 275 bp, Heterodera glycines
  unsure (1)..(275): unsure at all n locations
atgatacttgtgcagttttaattaatttttttttatctttatctatttagtacaaaaaatancgctggtctcattttcattcctttccacctgctaaattaaaatcttcgtttcgggataatgttattcaaaaatatctacttgtaacaatgtagtttttaatatcaaagattgtatatatccttccttttatttttgaaccgtaaacacacacattaatagctttatttttgaaaaataggaattcaaccgagaaactgaaaacgtcttccatg

SEQ ID NO: 115326 - DNA, 75 bp, Heterodera glycines
  unsure (1)..(75): unsure at all n locations
aaaaatattggatttccatataanttggaagccctactaacctttaattgcatataaattgaggcggcggagatg

SEQ ID NO: 115327 - DNA, 59 bp, Heterodera glycines
tttttaattgccaaattaattccgaaatttcagcttccgattccgtccacgagaaaatg

SEQ ID NO: 115328 - DNA, 69 bp, Heterodera glycines
aatgccctcttaattaaacaatttatatttgaaaactgtcttacgcctcaccccttaagttcgcctatg

SEQ ID NO: 115329 - DNA, 1003 bp, Heterodera glycines
tttgttttttcgttcgtttattcgtttcccatcctaattacctaattatttttcatatcatttgataatttctgttttcctcctcttttcccaaaagctatgcttgccacgcgtcccttccgtttcgatcggcccgcgcctcagccgcagcgagtccatccgttgtcactgattcaaatggtcactgctgcgaaaatcgttgacgaacagcagcgggccaaagaacgaacgcagacgccactgtgagttgagagtgacgcgaactgttcaattttggttggaaatgaccaattgctttgttacgatgtccaaattggatagttgggtaaattcagttgaaattccatttggttacgctttgccattggtcggtacttgtacaatttacaccccatagaaagaatttttaatttttcaaaagccatgaaaatatgtttccagtggtatttggggtcgctaatcatgaatccggcatccaatcatttaaattatttttagaacaaaaatatgaatttgaaaaatttaaattttctactttttgttcgatttgggttcggatttggtcgaaatggatatcatattcgtgatcagtagcgaccgaacacccctggaaacacgtttttatcattaaaaatataaaaaacttctatgggtgtaaactgtagaagtacccattggttcccaaatgatttgtcctggtgcttaattaagacagaataacttctacgaagtgtcaaggaagcgagtgagattatcagaaagttttaattgtgaatgaattgaaaagtccaaatttatgaattttgaattgaattaatttaataacaaacccaattttagttaaccaaagggagcaattgaagcgcaaaatcattttggcgaagatcgtcaaccaaagtttcagtttttagtgctttttactattacgttttcgtttagagttcactaaaatttggggtcgactcgcattgaacgtgggagagagttggcgaacacggaaatg

SEQ ID NO: 115330 - DNA, 250 bp, Heterodera glycines
tttttgactattttgtcaaattaattaaacattgacaataagggcgaaaaataatttatttgtttatttaagcagcatcaaacccggcaaatggtttccatatgctgaagaatccattagtaataacatagcaatttttttgcaaatttaatgtttatttttattatttattaaatcaaaagtatttttattaaattttttgttgaaattttgtctatcgacttgtttgaacaccgcacatttcgcaatg

SEQ ID NO: 115331 - DNA, 51 bp, Heterodera glycines
tttgccacagatgcggccaaaattgccatttatgtgatgctgcaggaaatg

SEQ ID NO: 115332 - DNA, 540 bp, Heterodera glycines
cggagaaagcaaaaaaggggatagaaagagaaagaaagaatgggatgtaaaaagggtcaaaaaccaaaaagaaaatgccaacaaaaaaaaaattattttattccccgatttttttttgcttttagaatggcagctcggctcctggggttgcaaattgtctgtttgggtcaattcgaccacatcatgtgcctccattttcacgcttgtcggggtaaagcattttcaaaaaacaaaagctgtttgatgattgatcactgatcaaaaaagttcataaactgaattatatgtataaggaaaaaccaagaaaaatggggaagtttgttgttttcctgtgagataagactactgactcgatccagggtctgatcagtcagactttattgatcagtgttcaaattcgatgactctatccgtttcacaatttcaaagacgtttcgccaatttacgccaaaatgcccattttcaaattgtttcttcgtggcacaggtgaccggcgaccgctatttggccatctgtcatccgttgaggcagctgaaaatg

SEQ ID NO: 115333 - DNA, 729 bp, Heterodera glycines
aaaaggccattatttattttagaattttccaaattaatttttctttttgctttactttctcacataatatttatgtgtttgaattaatattttaaattaacattttttcattggatgttaatgttttgcttgtattagtctcggttataaatgtttattttgatgaattttgatggcaaatttatgccattgccaaccaaagccaaagccaatcaatttgttgtcgttttattccattttcatggaaaattctccaattatcgatgtctattattaaaagcaaaatattttttgtcgaaactttaaaaaattttaaaattatttaaaaactttactttcattttttggactgtgaatttttacggttcttaataaaaaaaagcatgtcatttttggcatttgccttttcatttgttgaaaattatgaaattttgcagaatcaataaaatcaaaaaaattaataaaatatagaatttttgttaaaaataaaacatttacttatgttattatatattttttttgttaatttcctttttccatttaatttaatttttaaataattttattattacaattttaattcatcatttatattcaaattttatgttaaattcaatttccattttctgttttttctaaaattgtaattcgaaattaaatttccccgttttttcataattagtttgataattaatttaaatcatcggcactttttgttcccccaaaatg

SEQ ID NO: 115334 - DNA, 556 bp, Heterodera glycines
ttgatactgaatcataaaaataaaatatcattagcagaggtataatggctttcattacaaatgggcatacaattaatatctatggaaaagaatttctgaaaattcgagtttaatatattcgattcatccattaatttagcagttattttaaaagtcgaccaataaaaaaaacgtacgtttgttgttgtacatacttaaagaaaagggataagttcataaaaaaaaattagatgtgtcataattaaagtcaaaaaactcagaggagctgatagattgatgatagtaaattagggaaggatggggacaaattggacaatcaccattatcattagcaattagcattcgttgtgctttctctctctctctcccttgctccctccctcgctctatactcttctagtagtgtgtctctatctctgatgtgtatatcgatctgagtcgctgaatctttgacatttggggtgggttgatcgaatcgtcgagttgacgaatcgaggggaggcggttgaagctttcttatttgtaaatttccgaattatgatcgcttggcgaaatg

SEQ ID NO: 115335 - DNA, 776 bp, Heterodera glycines
tttgtcctcagcagaaaagcagttcattagtgagtgttcgtaaagcgatgaaaaagcgggcggagaacggacgaaaatgaattaaaaaatgaatggaaaaagcggggaaaattaggtaggggaggggaggcgagatgggataaaatcttaaagggattacgatgaaaaaaggaaaagcggatgaacaaataatagagaggggggggggagggaggcgtaatggggtttttttggggtaaaaaaaaatttaaattaatgaaaagagagaaagggcggcacacttttttgatgaaaaaacacaaagcagctgccaattattattgtttattttattatgagttgtttgtgatgcctaccaaaatatgatcaaaagtcatttttaaggaaaaaaaaaattaaaaaactttcaattttgttaaaaatataataaataattgagtaaaacagacttgctaacattattttgtaatggaccattttattaaatagcacaattaatcgttcgtaagaatataaaattcacgaaaatcagacttttttcccgagtttctgaattcagattatcagattacaattctcggaaacaaggccgaaacctgatagccatgaccatgaaagaacacgagaaattgtgggattggcaaaaacctttttttgtcgagagtcgggattaacaacaattatgtttggtttatgaggcaccgggcaataatgtcaagaggagagagagagagagaagtagagaagcaaaggcaacggtcggaaatgagagaatg

SEQ ID NO: 115336 - DNA, 997 bp, Heterodera glycines
ttttgctgacatttagggctatcctctgctgaaaaaatcgcgaaataggcactaaaataagcaaataaaatgttttattaacgcttttttggtaacaaaacaacgtaaaaacttaactaaaacacttaatttggattatatcttaattgtaaataaaattaaataatattttaaaaaatttttcgaatacgtacaaatttttataccaaaaatttttaccaagaaaaaaaatattttcgggaatcaatttttgaaaaatttttttcaattcataggagtgtaattttctaaaattttttcaggtcgattcttatgggtgtacaattttctatacgatcgaaaaactattaaacatgctaaaacataaaatatttttttaatttatattttattaattaatcataaatcatcggatgatgccaccggaagtgataaattgcgcgaaaatatatttattgattatgtcgactgccaacactaattagatattgtatttccttttaatttgtttttgttaccctcagcaatcatagagaagtaaaaatttatttatttctttaatcaaataaacactacacacaatatgaatagggaacaaaataatacttttcaaacaaaaatatgtaatcgcatttattaggcaatttgtgagcaaaaattttctaggaaataaatgtacaaagtttgtatagaaaattttggcaattttaaatttacccagaaatttttgggattttttcatgacacaaaaaatcaagggaaattgttctcttggaaaaaatccaggttttacgtgagccccggtcccggtggatgaaatcccagcccgtcttttttggtcctggtaagtccgtcccgcttttcccaaaagtcctggccccaatattttttatgaatttgcctcctttttttgttagcatttttttttgttaccatttattttaaataattaaaatacattatgtttagatattaacattcagagagtaaaaaaatg

SEQ ID NO: 115337 - DNA, 96 bp, Heterodera glycines
ttttttgtccccaaaaatcaatttaagaatttgtgaaatattaaaaaggatgagttttcagttttatttttattttagcttttattctttggcatg

SEQ ID NO: 115338 - DNA, 457 bp, Heterodera glycines
aactcagccaaaaacattcatttcgccaactgacattctcttaactgatcaaaaaagaatgattaaggaatagtaaataagaggaaaacgaatctgttctgatatcaaatacattattctttctattttttatgctaaatttttagaatttgtttttttttctattcagattatattaagaaatgccaactgttcgcgaaattcttgagtgtttgcaaaagccaattaaacggcccacggcccagaaatccaacaaatgaagacagcgtactgaatgctgagataaagcgttaaagtattacgcggaagtccttcaacaactgaagcgtgccattaatcccatccggccaattaaaggcaagaaaaactacataatgactttaataattattagttaagggatgtgcgacttcgagacaggaatgctgaaggcaatgcggcatgtcttcccatcatg

SEQ ID NO: 115339 - DNA, 167 bp, Heterodera glycines
acacaacataaggaggacttgaacctgagacccctttttgttgactaactcacagaccactaagacgaaaaaaccaacttaattgtacttggagcagggttcgaatctgttcttatttataagaaatgttctgatttggagggttcaaatcttacaaaataaaaatg

SEQ ID NO: 115340 - DNA, 118 bp, Heterodera glycines
tgtacgagacccatcaatattattgctatattaatcacacaatttaattatgacaaaaaaatacgatttgttttcccataggttcactgaattacgacaccgtattgaggcaaacatg

SEQ ID NO: 115341 - DNA, 316 bp, Heterodera glycines
catcaattagtaacaaatttaacccaaaaatgcgttaaaagggctctaattggttcaaaaattgcctttccattttcaattttcctcctacaccaaaaaaaagaaatgtttccatttgtccatttttgtgacactttgtcttctcattagctgcttaatccccttctcgtttgactatgatgacgacctgttcgaaattggcactgctcagtccgtagcagtcaccggaattttgacgtgcaatggacgaccaagtggcggcacaaaagtgaaactgtacgacgtggacagtaagccaaactcacagtttaatatg

SEQ ID NO: 115342 - DNA, 364 bp, Heterodera glycines
gggctttataaaaaaaagcaacaacaatgaatttgagttaaatgtgctgaatgcagtaagaatattaagtgcaagcaaggcaacacctccaatgcgataaaccaccttaaatcaaaacacaaaacagcgaatatgaggcgaaatatgaagatttgttgaagcataagcgaggttagaaagggacaatcgaaacacccttggtcttaggaagtggcacgttatattaaatgtgcatatgcattggtttttttaaaatttttaagagggtctttcatcattcgacaaaaaagtaattcattggatcgcatgcacccaatcatctttctccgatatcaacaacccgacaacaatcgcactatttatg

SEQ ID NO: 115343 - DNA, 1003 bp, Heterodera glycines
aaacagaatgccaaggattgaatatttattaaaatttaaaaaagagaatgccaaaaactggcaagaaataattgaggagttttggcacgaaaaggtgcgacaattggcaaatgaaaatgtgaaaaaagggggcaaaacaatgccaaaaatggaaggaaataattgaagaattttggcacaaaaaggtgcaataattggcaaataaaaatgtgaaaaaaagggggcaaaacaatgccaaaaatggaaggaaataattgaagaattttggcacaaaaaggtgcaataattggcaaataaaaatgtgaaaaaaagggggcaaataatgcaaaaaattgaggcaaaataaatgataagggattattgattggcttttccatccgtaaagtgaattaaattaaatgaaaatgaccaaatggacaaaaaatcaattagtaaattgtttattgtctgaaggtgtcagattacataataagcgtgcgggagtgtgggcggcactacaaagtacgcgacctattaaaaaatttgatttgtttatttggcaccttttcaacacccccgcccctccttaattgatttgtttatttgaccccctccccccttctcgccgcctgctctcgcccccctctcgccgctggtgacgtcaatttttccctttatgagagcaaattaatgtttatcatcaattgccaatgtggccgagtggttagtgcgtcagtctggccgcccccctggggttcggatccgcttggtgcgtggaatttttggagaattttaaatgaatttaaattcaacgtctttgaccttttaagacgtttaaaataatttagaattaaataaatttaattaaaataatttgcataaagtcgcgcagtcaaaaaagtcgcgcacccccctgcaataggtttgggtttgcaagaaaaactcgcgcaataggtttgggtttgcaaaaaaaagtcgcgcaataggttttggcttcagtactgaaaagtctggcgctcagatg

SEQ ID NO: 115344 - DNA, 463 bp, Heterodera glycines
acaaatgtctatttttgcggggacgtcaaatgcttttggccaactccgtctcagccaaatttaagattctcagtccaatagtttcaagctttttttggcattatcgatcccttttcttttgtaatttttgaatactaagcattttggtgcttatttgttagcaaaaaatggaaaatatgcccaaaattggaggcagttttttgttgaaaatttgtatttgatggcttttttataacgcctcagcaccctcacagggagttagcccgcttcaccattttgtatattttataacagagatgatttccccttctccactcaaaagtgtacaaatttcttaaaaaagcttcaaggttgcacataaaaatataaaaaataaaataaaaatttaaaaaaaaattataaatccttaaattaaaattaaaatcaaaaagaaatctcacgcactattttttaggtacggatg

SEQ ID NO: 115345 - DNA, 92 bp, Heterodera glycines
tttctttcatccccccccccccctctattgcattttcctttcttttatttatatgacaaacatataattttttaaatcattcctctaagatg

SEQ ID NO: 115346 - DNA, 705 bp, Heterodera glycines
  unsure (1)..(705): unsure at all n locations
tttttaaatatttttccnaattctaactgaaagcgatcaattattgttaattctgggcattgatgcataaaaaacaatttcattttatgagattaagatgaataaaatgaaattcaaaggggctaaatccacttttatattttccgaattgccgtttttatttttaatttttaaatattaatttttgctttaattattcctgtccatccctttccctcataatatttgtttattgcatcattttttttaatagtttttacacatattaatcccttagtatttatttgtttttattaatttaaaccattatttcttctatttatttctttccatttttttgcaaatttgaaattctatacaaaacccatttaaatataaaatctttcattattaatttacaatttttttttctaaattttatataaagttgagaattataaaatatatgggccggttattaatgtaaatttgtttttaaaaaatatatacattagcagtgtattcatcgccagagctgtataaaaattttctgtggttatggatttattgattcagaaataggcgtatttcaatttgccaacaaataacggatgatttgctttattaattggttttattttttcattaatatcattattatgagcatgaataatattataaaaatatattaaaaaaattcaaaactaatttttataatttaagatg

SEQ ID NO: 115347 - DNA, 103 bp, Heterodera glycines
gaaatttttttaaaaaatggaaaattttttattaagggattaacagtttgggggcaattttcgatgggaaatacctttcaaatacgaaattgggggcagcatg

SEQ ID NO: 115348 - DNA, 687 bp, Heterodera glycines
  unsure (1)..(687): unsure at all n locations
atttgaagaaatggacggggcancggtggaatgggggactcgatcnaactcggggagcaatcgcncaaatcggactcaacggacacaaaagccgggactcgcccgaacggacccgacccggggggcctagggggaacggtgactcgaattggggccccctctcgtccctctccctcaaatcgtcgaggtcaaatgggagcgttcgccgaagggagtgcctcctccctacaagaacagtgggcaatggctgataacggatgggaaagcaattcaaattttggcgaaatccgatgggaaccgaaaaaggaggaagaaaacaatttgcagaacgataacgccgacgaggggatagagggagaggggggaaagacgaaaaaaggagacaaaacaaacaaagatgggtccaaaagtgcaaaaagacagatgtctccctcctcgtttgcaaacgggggattcgatcaaagggagggggaaaacgacgataaacagcataattttgggcgtcattttcaattgacccgcccctccccccaaggaaagggggcattcccccttcattcatctccgcacagcattccgtggccgcacaattcgccaccttcaattgggagattctcccatcttttctcatccactttttcttctagcacatccccaactgatttgtcttcccaatcttcaggaatg

SEQ ID NO: 115349 - DNA, 51 bp, Heterodera glycines
tgccgatgcgacacatacctccaattatttcgtgaaaatgtgttgaatatg

SEQ ID NO: 115350 - DNA, 109 bp, Heterodera glycines
cataacttttcaaaaagcatcaaaattagacattcttagtatcatttgatagccctaagaatgctctattagccttcaaaaaatttcgttgagtttcaaaaaagttatg

SEQ ID NO: 115351 - DNA, 308 bp, Heterodera glycines
tgtcgccccaccactgggccaaaatggtcgaaacaaacaaaacggaaatgaaaccaaagacaaaagggaggcgacaaagcattgcaattctcaacaaaaaaaataaggaactttttttaattggaattaaattcttaaaaataatttttgaaattggcaaattttaatgaatttactaaataaataattctgtcaaagagaaatatttcgagtgaatattgtggtgcaaaaggaacttgcttttatatgggctgattttgcaaaaaaaaaatgaaattattttcgcccaaagccccgcggcggtcatg

SEQ ID NO: 115352 - DNA, 543 bp, Heterodera glycines
acatcatatttcattagttataactgaagaaaatacaattggatttatccacaggataaattttctttttttgataggatttaaaaatttatattttccattaaaattataaattcattttttcaatctatacatcataatttttattagttataacagaaagatatgtaaaattttctttttttgataggatttaattaaaaatttatattttctaaaaatgcaattatattttccatttatacaaattatatttcgattaattatataattaaaatatacaattttgtttttccacaggaattaattaaaatttaaataaaattatctttttccacagggaattaattaaatttaaattaaattttatttttgattggatttaattaaaattttacatttcccataggatatccttgtcgtcatggagcacaacaattgagccaacttttgtcaagttatgttcccacattcgttgaatcggtcaaccacactgaaaaaatcgtggtgtgcaacaatgtcattgaggacgtaaaaagtatg

SEQ ID NO: 115353 - DNA, 611 bp, Heterodera glycines
ctgcggatcacgcgcggacttcttccggagcccgtagtctcgccccacctactggccgccgtagtcgagtatgcggcggtggttttttagcgcaataagctaaattcaatcttttatatttgattttttccttttttctgactgaatcggtttataacagttttaacgattttgaggagccataacttttgtaaatttcttttttatccaaaaattccttcgaattcatgattagcagaccgtaagggatcgattggtatctatttggtcgcaattccatgcgtttttggctttggacggttcagtcccaaagccatttggccatttcagtcccgggtctgtaacgacaaagggtaaccttggattatgtgcattaaatagaattgttttgaattttatattaatacatgtaggtatacaaataatgttttttggaaaatatcggtcatatggcccggagcccaaatggccgaaaaaatgagcaagggctcatataatgcggttctaattaaactcaacatgaatattttggctgtttctttttaccgttttcatcggctacttttttttaattgcagtgaatttcttttttaagttttaatttagcaatg

SEQ ID NO: 115354 - DNA, 527 bp, Heterodera glycines
ttttctgaaggaacaaaaagcaaaattataatttcaaagcgggatttagaaattgaaaatgcttaatcagaaaatcctttccctctctaattaaattttgctaattggtcctaatgagagagagagcgtttttgttttcgctttcattgggtttcctctgctgctgttgaaccacccacggttgttgttttggctgttttggtggtgtgcactgtgtgtggcttcgcttaatgaatgccccgcttttatagcaaggcaacgcgccgaaaggcgtgcccaccgggcggcgacgggtcgccccaccctttcgatttgccttttgctgccgccggtcgcccacgccgcgggggacgacgaccaacgcccggcgcatcgtttggtggtctgctgctggtcgcgccacacgtgcgccgccggtgactgtccgtgccactcccaaatcattcattgcctcccccgcccgacggtgtggcatcgccgaaggcgaaacgaagagtgaccatgaaaagagagtcaattaattaatg

SEQ ID NO: 115355 - DNA, 311 bp, Heterodera glycines
ggtaagtgaggacatagaaagagccactgatgaacaaatattatgccttgttgaaatctgtctcaatattttaaaaggaagagttcctttaaaatacaaacatttgaagaaattaaaatcaaatgcacaattaatacgttgcctttcacgcactcgttcttcacaatcagcgaaaaaaatattattacaaaaaggggatgggcttccggctatagcaggactaattgcaaacattgctttaccatttatttcaaattttattgaaaaattataaatataagataggatttaaattgtaacaaaagaaaatg

SEQ ID NO: 115356 - DNA, 779 bp, Heterodera glycines
  unsure (1)..(779): unsure at all n locations
tttgttaagaaaaaataggtttttttgagtccggcggtgctccaaggtttcacaaaaaaaaaacagnaaaatanccgcgccagggatggatgagtgaatggacaagttgagagtggaggcccaaagtgacggaggaggacagattagcacagaaaacggggcaaaagcgtggcggtggtgctgctctctctgttggcccaacatcagcgccaacagtcgttggaagagcggcgcgtcggcacgctcccaacaccttttggggaagaaaatggtcaaaatcaattttaaatgagcagaaatggaaaagtggtgatccaaaaaagaaaaatagatcaagaatgcacccgaaaaattagaccgaattccgaatttaaaacttactgacgaaatttgtcggttttttaatccccagaaatcttatgaaaggtttggtttgaaagtgttgctataatgcaacaatctaaccaaatgtccaaatgtttaaaacccaaaaaataacaatttaaaatggccaaacaataaaaccgcgtaccaacagtgcgagcgcgttcagacacaggacgagagaatgggtgtcaatttgaaattggcgctgttcaagcagttgcagcagaatctgttgaattaaacggttataaaatgcttggtttcgctctgtctgcaccttttccgcgtccggatggttcaacgacagcagcgaggcgacacgaattgcacgggaggagaactcgtggttgcgcaccaacttttgcagggtcgcaattgtgtccgtggaaatg

SEQ ID NO: 115357 - DNA, 261 bp, Heterodera glycines
ttttcactattattcccattgcatattcgccgtcgctgttcaactgcgttaattcgcatggtaaaaaatcagctttaacttcaattttgcttgtgattccaacatcgtacaaaaagttcaatcccccctcccattttcgaatttttggtttttaaattctttccactggattttcaaggtccactgatcacgaatcccctccccctgaaaaaatgttttccgcaaattctgcctcagatttttcatattttttcaaaaatg

SEQ ID NO: 115358 - DNA, 749 bp, Heterodera glycines
tgacactgaaaaagtcggtccctaatttttacattctattattattttaataaataaatttttcataaatttaatcgtaataaccgggacaattttttttcatttttcataattatatttgcattcaataaagtaattggagtttctttctttctcagccttgctatttcttttgaaaaatttcattaacatatgccaaaatacgtggaaagaaattggcattttctttctttctcagcctctctatttctccaggtctcagtccaacatatgccaaaatacgtggaaagaaaattggccaatttttctctttttctctgtctcactatttcttcattaattctcattgaataatgccacaattacatggaaagaattttattcattgggtagtccatcataaaacagaatgactagctaaatgcagataattattcattttcatttcttgaaattccattctctttcaaaattattgtttttgccttctttctatacaacagggatattccatgtcaagaaatttttttgaattttatcaaatttttaaccatttttcgaaagttttattttggggcgtttggttttttgctttttaaattatttttccaaaaaaatatatttcattgctaaatctcactttaattcctcactactttttcatacagaaaatggaacatttttctttctgcgcattaattattgctatttttgttggcgctacttttcgtcacttttgtgttgcaatg

SEQ ID NO: 115359 - DNA, 971 bp, Heterodera glycines
ttttggggtcaaattaaaaaaaatggttcaatggggtccggcggtgtcgataggcgacggaacagctgtggcttcctccataaattgctttacaaacgcagcaaaaagattccattgctaaatatatggaatttttcatgtaaaattaagaaattctgtaacaaaaaatgcaataaaaaattattttttgacgagatgacatttttggcgacatgttcaaaaaaattcaaaaaattttcactaaataaatcagtcgaaaaacgaatttttttttatgtaatttgctttatctaataatttttcaataattgattttggctaattttttgggcttatttcaaaaaattcaatatattaacagagcgcacattttttcatgccaaaaagtccgcgcgcttttattacataaaaaggcaattcaaaatttaatttacaaattaattttaaaagcgtttgtgtccccaaaaaaggaaagtgccgctaattgctctccctaattggctccatttaaattaattaaatttctccttttcctctttttcacagatgttcgccgatagaatgtgttgaacatccccaaacacatatttagcattttccattttcttaatttcttttctcagtggcttctttctcaactgctcaattcttgaggtaaaagcattgatttttttaaaaacggtaaattttaattaaatttaagttttcgtttaggaatttttgcattttctaaccctttaatttttatttttagacatttttcgttgaatttctcagtatactcttattttcggactgtttcccctaattttcaattgccaaaacccaaaaaagggtcataaaccgaaaatttaggccccaaaacggaaaagtgccaaaaaaatttggcaaattttgccgcaaaatataaaatttcattgctttttagggccattattaatttcgctatttttttgcagcattttattatg

SEQ ID NO: 115360 - DNA, 859 bp, Heterodera glycines
ctttcattaatttagtatttttctctattttttattttgtgtgttactggttctctccctctttctttctctctctctctatgcgcgtacgcatgcgcacacgtctctagggctataaaagccgcactattcgcccatttggggcttcttctcacttctatttaatatttatatttaatcgtcccttttccatttattcacacatttatttgtgactaataaagtttaccccacgaatatgccatacttaggggtgcgtttttacccccgcgcctccccggaggcggggattgcggggggtctgagtcacgggggcgagtgtgaggctaaacaagcagtcccgtccccggggaccggggcgggggtggggctcgaatcctactagaaacacctggagctatcgaatggtaaagaattcaaattttagttgggattgagtaaagctatggtagttttttgatgagaatcttcatttgttcatgacggatgagatcgagacggaaatgaagaataaataattttctgggttttaatacgatttttatggggttgaaaaatgtagtaaccctatgaaaatttaattgtaaataatattttaattccgatcagttcgaggatttatctttgataagtgcatgaactttaccgacaaagtgccgaagcaccagcggcacaatgtgttgtacgtgccgcccaccttcattcaaacatatttttgtaaatttttttgcgttttctgtatttagtattagcccaccaatcgttagctcaattttaaaggaaaaaacattttttttaaatctctgctgctgtcgatggggaggaaagagtgctgctgtgcaaatattgggcctaaatg

SEQ ID NO: 115361 - DNA, 319 bp, Heterodera glycines
aattgtttcctatttttcgaaaagtgccagttttttcctcccatttttattttgtttttttctgggaggaatacagccttattttcctaaattttcttggaaattaattcacctatgttaatataaatagtgtattttttcatgattatgattagatcccagcttgatacctcattcattaaccaaaacattctatacatttttcgcaagtaataaaaaatttaaaaaaaaaattacaaaaacttttatatatttaaataataaaaataaattaaaattaagacaaagtcgtgatgaatgggaacgtgatcagcgcatg

SEQ ID NO: 115362 - DNA, 529 bp, Heterodera glycines
tcttaaaatttacacgaaaatgtgcctaataaaaaatgcccaccgttcgagggggtagaaaaataaagccctcggggggtgtgggggagagtttctattttaggagtacggtaacgtaattgactaccaaattttgaaaatttttctgcttattcctcccactaccgtatgtccccgctttttcttccactaccatatgttcccgcttctcctaataccgtatgtccccgctttttctcccattaccgtatgccccgctttttctcccactaccgtatgccccgctttttctcccactaccgtatgtccccgcttcacccgctaccgtatctcccagctttttctaccactaccgtatgcccacgctttttctcccactaccgtatgttcccgctttttctcccactaccgtatgtccacgctttttctcccactaccgtatgtccccgctttttctcccataccgtatgtccccgctttttctcacattaccgtatgccccactttttctcccattaccgtacgcatg

SEQ ID NO: 115363 - DNA, 840 bp, Heterodera glycines
tttattttatgctccaaaaaaagaggggggaaagagtgactgaagatgaaaaggaaagaccttctggggttttgcttgtgtttcaatgtggtgaccaaatgaatgggcggtcatttggagtggacgagagagtgcataagcacacgacgagacggcagagaaaaaaagggcaaagcgacgccacgctcgccgtagggggcaaaataaaaacgaagaaaaacgacaacgttgggcaggtgatgggacggacgaaaaccaactcgtagaaattgggctgctgggggccacagtccaaaatagagacgggaatttcaaatttgcaggtgctgcgggatttgaactcaaattttttttactggatgggattaatcccgcgcgggatcccatcccgtcccgtgcagtctctagtccaaaacacggatactggccacttcaccagggccacctcgatacaagttttacttaaattttaattggccaaaattcatttttaagttgagaaaacagaaatttcctttaactctttatgctgttcaaacaagcttttttaaccaccaaccagatcactcattcagtggcaattcggtagcgaattttatgctctttctgtaggcttactaattattgtacaaattttcgtaatccactagggttattattttcatagatttaaacccgcatgttcctgtcaccatgaataagtttgtgtaaaagttactcgattttccctttgatcacttgtgctcatttagttaactttttaaaccgtaaggcatttgcttttttttgtatttacaaaatttttcgactttaaatctttgattgttgttattagggatg

SEQ ID NO: 115364 - DNA, 320 bp, Heterodera glycines
tgaggtttaaaataaggcggagtataatttaaatgctctactgagaagagtccaggtgtatataagccggccaaatctttgtttcttgtaaattttaccaaatcattctcctcactttctcaccacctcttgccatggctattaatatgagtgacaaaaaatcgttaatcaaccaaattctgggtgaggctgatttgaccattagcacgagcggcataacagtgagcggaccccgtctgtcaaccccccgctttattccttttgatgagagtggccgatgccgctcatgtaaagctacagaggttgaggtagacacaatg

SEQ ID NO: 115365 - DNA, 479 bp, Heterodera glycines
ccattaatctaaaaagcaattagcgacaataaaaaagaaaaaaaaatttttttaaaatttgaccaaaatataggacccaaacttaactagtaccgccacggtagaccaaaatataggacccaaacttaactagtaccgccacgaaatgtccaaaagagtaaaaacccacgaaatgtccaaaatttttcaaaatttataaaaacaaaatgagtctaatttaggatttttagggttttcggggtcgctgaatacgaatataccctttatattaccccttgcctaaccttaggcccatctgaataataaaaaactcaaattcgagacttttcgtgggctggacattttgtgggtaagcgaaaaatttaagagcaggcagatctttgaatccgtgggtcccactaactttgttcgaattcgtttcttaatttgttttttaaagcaaaccaaatttctgcaatttctttttctggtttacaatg

SEQ ID NO: 115366 - DNA, 281 bp, Heterodera glycines
ttgagcgggagttgcaggaacatgccaacccgcgcacttttcttccactccccggcactttcgacggaacaacggatttttacaattatttgaaatccttcaatcttgtggcaactgcacatggctggaacaccgtccgctgcgttcaaattttgcccttgtatttgcgcggttcggccaaggccatttatgatggcttagaccaaaatgtcaagacaaactggaaggatttagtcgacggtctcgcggacaaattgaagaaagtctcttccgggctgatg

SEQ ID NO: 115367 - DNA, 83 bp, Heterodera glycines
agtaaaacaatggcactttggcctggagcgactgactcattcattaattgttccgttaaaaggtgcgcgcctcgggtaaaatg

SEQ ID NO: 115368 - DNA, 271 bp, Heterodera glycines
  unsure (1)..(271): unsure at all n locations
gataaaaaccganaattntaatgaataggcgtgtcataaatgaccttattcttaattaaatttaaattaaattaaattttttgaacgcttgaaatagtgttgtagtttgatttttaagaagaaaaacaattcaatccctattaattcatggccaaaaaaatagaaaatttagtccacacaactcatgctcatcgaaggactgcgtaaatcgggcaccaaacggttttcgtaaaaaaaattctgtgtattgttttgtacttaattaagaatg

SEQ ID NO: 115369 - DNA, 127 bp, Heterodera glycines
gcacaatgaatgagtggatattctgccgagcgattgacggatgtacaatagcctgactttcagtttgccgtccacatggaatgaaattgccgattaaagcgaagggccgaatggaagcgccggaatg

SEQ ID NO: 115370 - DNA, 1003 bp, Heterodera glycines
  unsure (1)..(1003): unsure at all n locations
aaaacggaactaaaagcgtaaggcacatggactaaagcgggcgcggaaaatcaaagtcaggacatagcatccgcgtcaaaaattgggcaattgaaactttaattgtcaacatttagtaaagtttcggattttaattcaaatatggccactaccccaaaatcagaaaatttagaaataagaaccaaacaaacccctgatgtatagaggccaatatttggcaaggtttttaattttctccatcaacaattgcttttttgacccgacttcaaaactgaattccgatgctcgacatttgtcttgtccacggaaaccctgagatattatactctttttgggatattttttcaaaacttttttttgaaccttctaaaaatttgattcaaaaattcagaataagaatcgtatagaagttttgaatttttattaacttaccaaaagccataaattatgaatacactgaagtctacctcagggttgacgcggctcgtgaaagtcgagtttcggtcttgaggtcgggtcagaaaaaatcaattttttgatggggaaaattgaaaattttgccaaaaaattgggggatgtctntaatttnttatataacaaatccactaaaaattgctcgaaaaattctcattgctctgtcactgctcctccctttggcattgtatgccagtttcagtggtggaaaagatattctacgaaaattttatttccctattattgaatttatcgaattttctttgtcacgacgtgaatttttttggagtggagagaggagcttaatgttggatgaatgtaaaaaagacaattttacattttataatattataaaaaaaattattttatctaaaaaaatttataagcaaaaaaagacatttagaaattattatttaactgcgctttcacaaataaaaattatactttaaatagaaaaacaatttttcaactcaatcaaatttagttaggtaaattattttcccgttttatttcttttcttcgagaaatg

SEQ ID NO: 115371 - DNA, 353 bp, Heterodera glycines
  unsure (1)..(353): unsure at all n locations
tgtgtacgaaaggattcgcgaaatggtcgggctgagtcgaaaggcgaaggcggcagagacggaaacgaaaagtgagngggaaaataagaaaaagagggacaaatgaacacgagaaaagggggaaggggacaaatggacatgtaaaaaggggggagggcgacaaatgggaccgaccgattgattgaccgttcgattctttttaaacttttagcggaacctttcaaaaaacgccggcgattncaggaagtcgaaacagcagcaacgaaaagtgatcagatattcaatgaactttttcattaaaagtgaatcttttgcttaaaagggaaagattttctgcaccgattggaagaatg

SEQ ID NO: 115372 - DNA, 892 bp, Heterodera glycines
aaaaatgaattgtttataaaaataaaatggagattgttggttaattgaaaattgaagaaaattgggaaggaaaaggaaaatgagcgaaggaaagaacgaatgccaaagcgaagccaaacggaacggaccaaaggcactcaatcattcccggggatggggaggagggcattctcaagagagggagaaaagcgatgccatcgcaaatgacccgagggatggcggagggaccgatttattatttatttctcccccgccctttggcccttttttttgtttattttcttttgcccgtcacaattaattaaattatcagtcgcgtccatcttgttaaagaacgtccgtcggtcagaagcagattctctgcacctcaaatgtgttgttttccatgcattccttctcttagaaaggtgaaaaattaaatattcttgttgaataaatggcaaatgcaacgaaaggaatttttaggacatttggacggaatggtaattgtaaaaattgtttaattaaaataaaaatatctatcaaaatcaaaactaatataaacaaatctgactgatcagcgcaccagcaaataaatatttaaaaagaattattaataaattaaacaagtcaaaaggaacaaatttattgaaattaaatatttcattacatataaaataaaaaggatgtttgtcaattactttaatatttatgtcatattattgataaaatattagtgtgtaattattattgttatttttgctataaaatttgtttttttttcactgatgcattaaataaatgtccaataattttaaattcttatttaatatttttcaatataaaaatccattttcattcgattaacccattaaattttttctttcattcattttattttttttgagaaatg

SEQ ID NO: 115373 - DNA, 302 bp, Heterodera glycines
ttcgttctctttccgttcaaattaattcgtttgatctgccgacaattaaatccaattaccattcattctttttaatccgttcattttactaatgatttgacggggccaacaattcgattgttcatttcgttctgaatcggtcggcctttttatttcttctcttccatttgtttgttctattactttttttgtacattctccgatcatcaaacaaaaactcaatttgacacaaaaattggatatttcccaaaattttaagccaattaattcatccgtaaattattcaaatcattccgccgatg

SEQ ID NO: 115374 - DNA, 1003 bp, Heterodera glycines
ttggggaattttggcggacaaaacgccgattgagcgccaaacattgagcaccagaacatagctcatccaaatttacaatttttatctcaaaaacggtcgatccaaagggtgctaggtcgtttcttaaaaactgccaagatagctttaaatgttgtctataagaatattaatttagaaaatttttataatgaaattataaaaaagttatggtgccaaaatttcaaaaaattgcaaaaagcataggctgttcaatgctttataatttttaaaaagcaattagattaaattttttagaatttcaagtaatctatttagtctattattctttaaaatttcaaaaatttcattcagtttcaaaaaaggtctggacaaaaaattctaaaattttctagtcataaaatgcaattgagccaaacttaattaatatcattccatagccctaagatttctcaatttaaaaattttggaaaaatttcattgacttttaaaaaagttatagccaaaaaattctcgagtttgtgattatacggtatttactagtgaaaaaaaattaaaaattcaatactaaaatcaagctctattcagctaaccaaaattcgtaatgattcatttaaggattaaaaagttaaaaataaaaaatacaaaaaacttggatttttaagattttgaaatttaacttttttatgtgtagtttggttttcgcttagaaaatgcttataaatatatctaaaaacatagagagctttcgaaacatataaaggttatttgatttggcgaacaaagaaaaaaattatggcgttgtctcagacgcagttgagccctaccgggcggaagtggtcttagctcacggaaaagatagggattaattaaaaaaaaaatttagttaatttcgcattacaaattaatgaaaaattccaaaaaaaaaaaaatttttttctcagcgatgcctaacggcaccgcccgacccagaatttcctaaggcggatcaaacaatcaaatgatg

SEQ ID NO: 115375 - DNA, 752 bp, Heterodera glycines
cgtatttattttagtttcgtatttttcgtattatgcattttttttcaattcgcaacaactttgatatgtatgtacatcaatcgtaataatacgaatctttaaaaaatcgcaattttttagatttatttcacatgaaaaatatcataggaataacgcaacaattgatgagcaagtcaattgaaaatgaaattatttcttttttttattcatttatgtaataatttgtaaaattagaagcaaaaaaataataaaatatacaaattaattgactacaaaaattaaaaaatatccattttttgtaaatttttatttattttttaattggaaaaatcaaaaatttcacggaaaaacctttaaaccgcgggaccctagcaattaaaaaaaaaaaattaaacttgtatttcggcatgcctatcataaatgttgaatttaattttacaactttcactattttacttttttggcactttaaggtttcgctttttgtggtttttcactaaaatttgtatttgacacaacttaaaaatgtgtgtctctaaaaattaaaagtcgattctttttttcccttaattatttcacgtgaaaagtgtaatgcgcatgagataaagcatcagtggatgaggaagtcatttttattggaaaaagaatgtcttttattttatatttgtcatttattaatttattgccaaataataataaaaaaacgtaaaattattttgaaaaaaattttttaggaattaaaattaaaaatg

SEQ ID NO: 115376 - DNA, 429 bp, Heterodera glycines
tttactttttgttccaatttgtgccatgacttaaattttcgctttcagttgaccatggtgctgatttgccttatcaccaatttctcatcgatctcattaatgcctacaaggtgattgtttggttgagactgggaatttggtttttgcatttccattgtttagcaaacgcaattccatcgctttcgttccggtgtttttgtgctgcgcggtgacagcagcgaagaggagcagcagacgcaggatttgagctcgctgatcgaaatcctttgtctcttccactcgaaaacctatgtgccgcctctttctgttacggagtccgaatgtttggcggggagggagaaaatttcgatgcatggtaaacggagaagcatttgagattggtagatgaaaatgcattcgacagggttggagctgttgttgccgttgatg

SEQ ID NO: 115377 - DNA, 193 bp, Heterodera glycines
ttgtagcattttttgtgggctttataatgataccattcactatcccctgtcaaaatgttattattagttacaaaccattttaccaactgcactccctttttggggtggtcatatgtttaagaacactacccatattttttttcatcaacattaaaaaaatctaaaaaaattcaggtaagcataactttggatg

SEQ ID NO: 115378 - DNA, 1003 bp, Heterodera glycines
  unsure (1)..(1003): unsure at all n locations
gggctaagaccattaattctaattattcttaattttgtctgtttagatatctcattatatcgtaaacacttgagcaaagaccaacaaaatgagcacattttccccgcttttccttacatttcccagcagacatttttaggcgatcataaaatgaaagaaaatgtaaaaagactttctgactgttttttcttaccattacaaataaattaagttgcaaaaatatctgtttgaaaacattggcaaaaattcatccgccgacggcacagaaattaatgggccgatatgggacggattgagccaaattcatcggatcgttgaggaatgggtgaattcgaatattctcaattaaattcacaatgtgaaaaagaggatgagtaatgagtagggttagaaattgtatttctgcgcatatgctatgaagaaaggggctcaaaaatagcatttctacgttaaatttttctttgatttggtggagaggtttttagtgcatataaaagcatattttgnggattttcgagaataatatttgccatttttgcatttttagagcatattcaccattttttggaaattttcacaagaaaaatgtaatttatattaaaaatgtaatttatattaaaaatgtaatttatattaaaaatgtaatttatattaaaaatgtaatttatattaaaaatgtaatttatattaaaaatgtaattttgttttagcatataataaaaaaatttaaaatataccaaaatttttgtaattgtctaaaaaaagcgttccatagccatttttgatgttttaaagtcaattctgaattttacacaattttagtcattttttgagggttcaaataaaatgttggcagtttttaatgcagattttagtgcatacctagacatttttcggctttttagggcatattagtgattttagtgcatattttatgcgtatactatgacattttttagtgcatacaacttaaagccaaaataatgagtataattaattgatg

SEQ ID NO: 115379 - DNA, 1003 bp, Heterodera glycines
ctgcgcactagtttcggtatattaagcataaaaaacgttgtttccacttcgtttgaggcttcttcgttgacttttattatgcctttttttgcctatttcggaattttcgtgccttaaatgcctttttggcattttgcccttttggtgccttttttctgaaaaattccattaaaaatgcaataacatcgggaaaatacacccctaaaaaattagttgaaaaattttcaaaaaatacacccctaagaattaaaaaattttctcaaaaattgatcgctaaaatttcattttttttattgataaaaagtttaggtttaaaaattttccttattcgaaaaacattataaaatatttaataatcatttaaatggccaaaattaagttttttgattaagttttacgtgttttgctccctaaaaagccttcataaaaaattttaaatgccttttttcatgcctttttcgggattttccagccttttcatgccttttttttctattttttgttgactattatttgcctttttcgcgatttttggtgacttttttttgcggtctttgctatgtataatattatgtgtcccataatcattttgtgcgccattatttttaataaaaaagtttattgaaagggttgatttaacgaaattgtttttgtaataaatttcttgtgtttgacccataaaacctttatttgtttttgcctggatctttttttatttaccattatgggacgcatttaaagcgcctataattttgtgcatttacatgtattgaagggattgtgcggaattccgactttaccgaactccgagttccccttatttttgggttccgaattcagacttccgaaattttttgtgacttcggaaattaaaaaaaaaattattattaacccaattaaaacaacaatttaaatgttttgctttttttttgtaaatataacaaaaaagctcctattttattttttttaatattaacgcatcgaaatttgtccctttggaatg

SEQ ID NO: 115380 - DNA, 163 bp, Heterodera glycines
aaggagtccatcagacattgttggcgatgacggcattcgcttggagggcatcatcaagtgctacgccgtgccgccccgccactgtcactacgacatcccggtccttccgtaccggctcaacaaccgcacgctgttccccctgtgccggacgtgttcggaaatg

SEQ ID NO: 115381 - DNA, 457 bp, Heterodera glycines
aaatttaaaattaaatgtttaaaaaaatataaatttattttttttattaaactttatttaattaattttttttcatgtaaagaattaaaatataatcattaatctgtttaattgaaataaaaaataatgatgattaatgcaatttgaaaatttatagataatatagaaataaaatattggacttttttcaacgaataaaaattgaaaataaattaaatctctcataatttaattttgattaatgctatactttttgcatgttaagaattaaaaaaaaatttacttttttctcgtaataaaggcataacacaattaaaaagaatttttaattttcagtggttggggcgattcccgcgcgagcaattcattaagccaagcatttacattattatacattttaattggtaatttttttcttatttttttaaaaagttttccttttttaggcattccaatg

SEQ ID NO: 115382 - DNA, 239 bp, Heterodera glycines
agggactcccaaagaggaaacaattcaggcaaaaactggcaattaaatacaaatcggcaattaggggcaattagcggcatctatttgcctaattgggtttgcgagaatcgcccagcaatttttttgtgcgtgctcactttctgaaaccgttcaaggtcaccgccccgctgttctcctcgcgtctctttgaattcggtccaaaattgggcgacaaagaattgagcggaggcattgacatg

SEQ ID NO: 115383 - DNA, 480 bp, Heterodera glycines
tcacaccgggacgagaaatgccacaaattctttattttggggtcaattttttaacataattttttttttttcaaaataccttctggtcatttcttaaatgctgccagaatgagcattttttggcaaaaatatgacatagattttctaattgtaatgggaaagaaattaaagaaaaatgaaatttacgtgattaggcttcataataattgaaaacccgttcttgatgcttattaggccattgaaagttagcagaaaaaatatgtaatgcatcaaaattcgctctctaatcatttgataggtcgatgttatctcaattagcatgcaaaattttaaaaattacacagtttaattgatgttgtttttaatttattttttgaaatttgtttctgagaaaagttaggtacaattttaaaaatatattagtggcgcagaactcaagcaatattttaacatttttagagctataccaactaccaaatg

SEQ ID NO: 115384 - DNA, 89 bp, Heterodera glycines
tcctggtgtgcctaattaatatttaattaatggaccctcccacctgattgctcctatttatagataatataaaacaaatactcaatatg

SEQ ID NO: 115385 - DNA, 386 bp, Heterodera glycines
gacttgaaaaagatatttgcaaatccatttcccctaataaattcaaattaaaaataatttacaattaaatatatttgttgtgcccttttcttcaagatattgtttttaaaaattaagagaatgctcgaatctttctgtgacatctacggaacaaatccgaacaattttccaaaccatgcgaaagttgcaggacttcgagggaaatgaaactcgaatacatgaattgaagaatgatctctttggttactaaatttattgaaattttctttgactattaatttactgattaaccattctcaacgtgtttcaaaatgttttaattcgcttaattttctttacttttatgtgaaattaaattactgattatgtttaagaaacaaacaatg

SEQ ID NO: 115386 - DNA, 53 bp, Heterodera glycines
gctacagttatagttctgtactagtaaattcctcaaacgagctcgaaaacatg

SEQ ID NO: 115387 - DNA, 410 bp, Heterodera glycines
aaaaatggtcttagtaaaaatcgtaattacgctcaaaaaagcttctcaaacaaattttagcgcttccaattccttctacaatcgcctttaatacatcccattatgagcgctaaaattatcagagtgccgaaaatcgcatgtgatctaagcctagcaaaaaatggtctaagtaaaaatcgtaattacgctcaaaaagcttctcaaacaattttagcgcttccaattccttctacaatcgcctttatacatcccattatgagcgctaaaattatcagagtgccgaaaatcgcatgtgatctaagccttaaaaaaatgatctaagtaaaaatcgtaattacgctcaaaaagctcctcaaacaattttagcgcttccaattccttctacaatcgcctttatacatcccattatg

SEQ ID NO: 115388 - DNA, 69 bp, Heterodera glycines
ttgggaaggtggtctacgacctatacccacagagcaacagttcgtgaaaaattggacaattcaaaaatg

SEQ ID NO: 115389 - DNA, 101 bp, Heterodera glycines
aaaaaattccgcttaaagattttgtgcaatttaataaccataacttttctacaattttgtaaaaaaatttctaaattaatattcttgtagagaacaccatg

SEQ ID NO: 115390 - DNA, 632 bp, Heterodera glycines
taccatgccgtcgcccagtgggagccgaacccttgggcgcaaaaggcgctgcaaaactttatttattttgctgcgatttagactgttttctaaattatttttaatttaaaaatttaatgcttggcaccggatactatcttaaaaatttgagtttagtttggaaattttgtaggatgaaaactcaaaaaattgaaaatattaatttatcattttaaaatactctttttttggataattctttattctggaaagtctcaaatttttaaataaaaaataaaattaaaaattgttccaactgattatgattatgaggattaattgacttttaatagaaagtaattataatttatgatttttttttggattaaccaacatttaattgtttgcttgtaccgtattttgctctaattatcccccagtctctattaatcccgcagtctccaattatcccccagtatacgaggtgttttgaaaaataatccctctatcataatcccccagtctctaattatccccccttttctgaggagattgaaaaataatcacccatgggctataattagagcatatacggtaattgttatacaaaatgattacagcgcccaatcagacggtgctgcagtgcacgcatg

SEQ ID NO: 115391 - DNA, 169 bp, Heterodera glycines
gcgaggccaccaagccaattttggaaagaatctcgctgaaggaatcaattttgagtccgggaggaatgataaaattgaggcaaatcacaaattatttgtttttttattattttatttttctatttcttttgttcgccaatttgtcctttttttctcgctctgccttatg

SEQ ID NO: 115392 - DNA, 100 bp, Heterodera glycines
tttgcaaaaaataaataagtaatgaaaaagtcagaatttcgaaaaattgtagacgagcaagcgttggcattttttcaggttaagttagtcctttacaatg

SEQ ID NO: 115393 - DNA, 360 bp, Heterodera glycines
aggtccatgcagagtgcctaaactaacatgtaaataaaatttggtgcgtttcagaaccctttctgaaaaaatatttaagaattaattttgcaaaaaataaataaaaacgaaagactcagattttcgaaaatttttttgagccagctagctcggcgctcatttcagtgtaagttagtcctttaccggggagtatccctgcaaagtttggtacgcttctgctcaattagcaaaaaatatgagtgatcgaattttcactaaaaaagttaagcctacattttttggcatatttaaaaagcaactttaaaatttttaaaatgaaataattttcctgcaccgattgtgtgttttggcgtagtgatg

SEQ ID NO: 115394 - DNA, 57 bp, Heterodera glycines
cctgtaaatttacacacttaaaacttttttttttagagaaaatacagttcaaagatg

SEQ ID NO: 115395 - DNA, 912 bp, Heterodera glycines
gtcccctcaatccatagtcttttaggcgggaggggcgattcgatcccggttttgggagagtaggaagtttggtactccatctcgcctctggcgggaatataatctttaggagagatttcatcacctggtaacgcatttattttaattgtttctaagtcagccaaatgtgaattcccataaattttaactggtgctttccccgcattcattagctgtaaaattacgtttttgctttctcccggagcaaccaaagttcgacccactataattccagggtattggtgttgcactccttttaccaagaaattttgttcactcgggaaaacttcgtttccccgagccaggacaatatattcagtccagggttcaaaaatttcggtcttttccattgttattcgtatcggtttggagatttagacaaacacaaaagatattatgttggtccaagcttctcctatccgacccaacaaaaaggaacttcaagttcgactcctcctggcggtggaataattattccaaatcacggccgccacggcatatcccatcattcaaggggccaaaataaaaaggaggaagtaggtgcgtaagtcgtaggcactgaaaagtcgagccgacgaaggtaaccaaaccagaaggcgcaaaaattattattccttgtgactgggcgctcaagttcagagctaaaaacttgaagttcctttttgttgtgactggggggcagagacagacgcagagagaggaattaaaccggaaatcacaaaaaatcagaggaactggacagccgagaggcagagcacaggaaggactgatgcttccgtttccaacgagaggagtcaagcggaaaacaacggccccaccagaatcaacaatacaaatacctccgaaaactcaacgcctgagaccacagaaatg

SEQ ID NO: 115396 - DNA, 299 bp, Heterodera glycines
taattcaaatatttgcttcaataaaaacgataagtcaaaacagtcatttaaattttgcattttatttcaaatccaaaaataagcatatataatgctgaaataagcacaaacttagaaataagcacacttgggagccctgattatttctagtttatttgcataaattctctgtccgcttttttagcaaaagaacttttggcaatcccatggtgtttttgttttattttgaatttttaccaatttaacctttttttatttctaaggagacatcgccaatcgttgtttgcccaaagaaaatg

SEQ ID NO: 115397 - DNA, 293 bp, Heterodera glycines
tgatgaagtgatgagttgtcgcgacgaaatgtgtagacgagcttggcgcgcactggtgttgatgttgcgttgagttgaaggctggctggcactggtgaaaagtgaagaaaaccgtcgccttttatacacttttttttgctgcatgaatttttgcacccgaattttgtatataaggaggtggattttgcacattctcctcactcagcagcagcaacacttcaagcaacgctctcaacgatcacacatcaagcacccacaaagccagcccgacaacagcgacaacaacagcaatg

SEQ ID NO: 115398 - DNA, 217 bp, Heterodera glycines
tattaatttcgatcattcagtagagagaaaaaattcactttacaatttaatggatatagtgatcctgtcaatattttaccattaatgtaaatttataaggaagagaaaaattcatttttgagaaatatttttattattatttatttctttttttcatatcgaataaattataaattttaatttttaagaaaaagaaaaagaaaaattgtcaacaatg

SEQ ID NO: 115399 - DNA, 188 bp, Heterodera glycines
accttaaaaaattcctttaaagggaaataaataaaccgcgacagcttttctaaataattaaatattttaatacaataaaattttgaggcaaaaattagaagtgataaatttttgtattaatttaaacataaaaaatcaaggttggacaacatcgagcagtggatccggataaggtacctgaagaaatg

SEQ ID NO: 115400 - DNA, 275 bp, Heterodera glycines
aatggcaggagtcatcaaaatgtgagccttttatatcaaattctgctgggcactgcagcacccaaaatgtcgccggatgaatctttttggttttgggatgtataaaaggagggaaaatgtcggttggtctctcattcccttcacagcgacaacaacaacaaacaatcagcaacgacgacaattgcgcaacgcttcaacacagcacatccatcgcccgtgcacacgttgactccgatcacttctgctgctgctgctgctctccaatcaacacaatg

SEQ ID NO: 115401 - DNA, 93 bp, Heterodera glycines
ggtgaaaattggaataattaatttaattgcgaattgaatggttccgattttcaggtgctcgttgagtacatcgactgcgaaagcggcgacatg

SEQ ID NO: 115402 - DNA, 159 bp, Heterodera glycines
ttgcattttcgtgtcacttcgtcccccacccctccgtcagattgcgtttggttcccaagacggcgtcatgtcctttgttgacattcgtcaggtcaatcggcagttacccgtcgccttcaaagtctctcaacatccgatcagtcgggtaaaatcagaatg

SEQ ID NO: 115403 - DNA, 324 bp, Heterodera glycines
ggtactgaaaagagggacgggacaaaatctcgctcacaagaataaaattttagaaattttttataagaaaatcaaaaaaaatttcagcgatttattcttgaaattttataataaattactgtttttcgtaaaattttcaaaaaaaaagttgtaaaaaatttttttttttaattttcttataaaaaaattttctgttttttccttgaaaaattttatttttaatttctgcggcgagattttggggtgtactcactgaaaaggcattcagcgcaaaactcaattttcaattcttttgcagccaattactacagtgcacggaacatg

SEQ ID NO: 115404 - DNA, 243 bp, Heterodera glycines
gaataaatttaaaaagatttgatatcggttcaaccgagcaaattacgacagtttgcaaccggggtatctattgtgtgttgtttatgtttattttgaattcataaaaatttaatttggcgtaatgtttgtctgccagtgaatgacccaaaatgctaaaacgatccatcatcattttcattccattttttatgttagctgcgtgttcatcaaattttagcaaaaacattttctttctgtgctatg

SEQ ID NO: 115405 - DNA, 412 bp, Heterodera glycines
tagctgtttttatatttatatttcatgaaaattttatcgaaaaaatattgtatttttcatatttaatttaacagggatctattaaattaattttatttatttaaatatcttaatttagtattttttgcaggacatattccatattattatgataaatatttattattaaaattttattgtctttttctgagtctaagctattcgcaaaaactcagaatccttaaattaaatatgtaaaaattaaagtgttttttatttgtaattttttttcacatacatttgccggttctgagtcactttgatttaaaacaataatctaaattattttgtaaaatttttggaaataatgttataaattcaaatcatatcaatgatgtgttgccatttttcaggtaaaagatcaatcccaatg

SEQ ID NO: 115406 - DNA, 1003 bp, Heterodera glycines
ttagtgattgattgaccgattgctttccattgttctcctcataccatctttctcttctccccccccccccaaaggttgtcgaactgtggcaaaccccgcgcggcacagaacatcaccgttttcgtaagggaatgatgaaaagtatggtgggcagtggtgccggcggaagtggcagaacggccacctctggcggtggcacatttcggcacgcgcaattgccaatcggcgacgatgccaaacattcgacaagtacggcaccggccgggatgagtgccggtgaggggagggcacagatgatagagtgtcctttatttgattgaggtgtctatacggcgtcgaaagaagcgctgtgccgtcaattgtccctttcgtcggccgaagaattgggccgacgaagtgccgcgttggaagcggacaatttgcgacttcaccaaacgctcgtgtcggtgagttgacacatttgaacaaacagtgatcagttttgatcggaagtgatcactcgcgtttctgatggcattgaataccgagtctcaaaagtgacttaaccaccaaatcaattaaataaaatgccctcgggggctttcccctctccgtcaaaatccgtccccaattttggcctcaatggcaccaaataagctcggctcaccaaattattattcgaattccttgccaatcaaattcagaagtccaccgaactttgggatttgttggagcgcgtccgtcttttgacagtgaaactcagaggcaagtgaagcaaaaaataaataaaaaggcaattgaatcgctaatggacttggccttagccatcattctcattaacaaattgcaaagattttaatgcctaatttagcaaattggcacggctaagggaatcaccgccggtgtttaattggtccaattcggcgttttattttggaattatctccgccgattccttcgcttttcctttaattttaattgcccccccccccgcatttcgatttgatttcattttacagaaatg

SEQ ID NO: 115407 - DNA, 485 bp, Heterodera glycines
agatacaataacatactagatagacactgtattttataaatttaataatacctcctaattagcctaattagtttcctccttttaagcactttaaatagtaatcccgggagagaatgcgtgaatctttctaatcacgacgccaaaacactcgagcttatccggttcgagaactgcgttggtttgaaggtcttacaatgtcaaaacggaatatctttcaaattaagccaagaaaaaaattttttcaaaaattttttttactttttttgccaaagtgtgacaggcaatagtcagcatcagcagattgggcaaaacagttgttgatcagtccaaaacagcagcagatgctgatttgattactatttttgaaactttgacaaattgttaattgttatgttaatgggacgatttaaattgcaataataattaggaaaataattaaataaaaaataatcatttattttgaagacgaaaaggctgagccaatg

SEQ ID NO: 115408 - DNA, 125 bp, Heterodera glycines
  unsure (1)..(125): unsure at all n locations
tcgacggaccaccgaattgcattcagcgacttttaaaacgcattggcagggacccgacaaacgcaccacanaaatgagggcgatacgaatctgatcaactcactgttcatggcatggtaaaaatg

SEQ ID NO: 115409 - DNA, 374 bp, Heterodera glycines
tatttgggtcagcattttgcctagataaaaattatatttgaaaatagggggaaaatccaatcaaatcaaatttgtttcatttttgagtcatcgttttgccgtaatttctttttttaatgccctcgccatccaaaacagaaagttaattgatttactcttttctaattactattcctcttcccctattaattttctggcatttttatgaagaatttggtttttattaatgtatttttgaaaacttttttattttttgcagctttaaattttttttacaaaatttgcaagtatatttaaaaaatctaataagattatttaaatttatttatttttcttatttttacatttatttagcattaaataaacaattaatg

SEQ ID NO: 115410 - DNA, 545 bp, Heterodera glycines
tccttcccgcattttccttcactttcccatctctttatctccgttcaatcagtcattttcttatccatttcatttccatccttcgccatccgcgttatatccatcattcacttcattttcacatttcgttttattcaccaatacgtgtggtttaattacccaagtttgagatgggagaataaagtaattctggataatatttggtcgccaatgatcctgggagggcccgcccgtttcactatgccttcttcgccacacaattttaaagttgcaattgtcggcgctgggcccagcggtctcacagccgcaaggtcagcagaagagatttgcaaagattgggtcaatttcagacaagctctgctctacggctacaaagtgcgcatttttgaaaaggaacaaaatttcggcggcgtttggcgcctcgccatctcagaaaatgcgcaaagtgaattaattaattagataattaacaatcaatcaattaaattaataatagccaattaattaatgaattgattagctaactaatataataattccaaatg

SEQ ID NO: 115411 - DNA, 818 bp, Heterodera glycines
atttttttttgcggtgtacccccccaaaaaagttggtgaatgggagttgggtccgacggccccgataggcgtcgccgggaaaatttttgaaaatttgagtgcaatttcattatagatttaataattaaaatcggtgaaaatgataaaaaaaaatcggtaaaataaagtgcgggcatgcgggatcgaacattaatccacagaacaacataacctgctgtcttcaccactaaactacaatatttcaataataaggcttattatttcttataaaaaaagtcattcttaagggtgtacatattttcgtctttttcgtaaaattttgctctgacgaaaacgaaacacgaaacgaaaaacaaaattttgaaaaccaaaaacgaaacgaaaaaactttggcggacgaaaagaaacacgaaaacgaaactcaaaaagtgcagaaaatgtaggacgaaacgaaaacgaaacgaaatttcgtccagcctgatggggtgcatcccaaaacgtcgccggccgaaacgtcgccgacgactttttgaaccatagctttgtgcattgtcaattaaattaattattcttggtgttgttcgatagctttatgtgtttaatattaataggcaaaatttcaaacattttcgttaggtttcaaaaaagttacctcactaccctatccatgccgatccatccccgcgaaatccatgggaccatcctgctctatccatgccgatccatcctgaaatccaggacaccctccctgccccattgttgtttaattgtccgttttattttgttgtagcaaagatgccaaaagccaccaggcaatg

SEQ ID NO: 115412 - DNA, 213 bp, Heterodera glycines
  unsure (1)..(213): unsure at all n locations
ccaatcgatgatcttctccattcacttgtttgccttatctcttgacttcttcnccttcaaatacaacaaactgttgctgattattgttgctgctgttgttcgttgtcactcgtttccctccattaatttcatttttcaatttaatgactcaccttaattaattcttttttcagtgaatccaattactttctttttctttcttctgttggaatg

SEQ ID NO: 115413 - DNA, 139 bp, Heterodera glycines
aaatataggtctcaatagggtgcattcccatcattttcctcgttctctttttgttgtgtcttgctatctctcgtattgataagtggcatttttttcaataagtgactgttaataaatacataggtaaatctcatgaatg

SEQ ID NO: 115414 - DNA, 217 bp, Heterodera glycines
tacttaattttaaattcattaatatcattttaaattcaccaaaataattgattaaattttaaataattatttttttctgatcaaagtaatttcgcaaaatatatttgaatatttcttttttaaaacatcatttttttaattatcaattttttataattaatattttataaatttaaaatttaattttaaattgtttcacccttccaatgttcagatg

SEQ ID NO: 115415 - DNA, 1003 bp, Heterodera glycines
gagtgggtgactctgatttatcttcctaaaaacgattaaattaaaacgcttcactttgaagtaaatttgtttgctgtataattattctatatttataataaacattttcttttgtctttcttttattggttcatttccacatatctttgaaagacgaaattacttttctatttaatcgtgtttagcgattaaaatgccttcaaaagaacagaaagcgagacaacgccggaggtcgcgaactgcggaggatgatgatccctcattggggttaccattacttcaaagtgaagcgttgaccggttcaaattcaaaaaaacagggtcgccctattaaaagacaaagtgatattttggaaagttcggtatcgtgtgaaactccaaaaagttctcgcacaaagggcaagtcacaaggaaatatttcgcccgttcaaaaacgagcaaagacttatgatttatcgatagtttataatgcaattatgtcacctggtcatgattttaaaaatatcgtttttgcgaccgagaaaaatcatagttgccagatctggcgtaaagctagccttaatctttaccaaaatgactctgacaactctggctttaggcaaattgaaaaaaattggaataatttatcagaatggctcaatgattcgtttatttattcatttctctgctatattagcacgctatcgacgaaaaatgttgttgttgttgaccccttgtatactgatacccagcaaatgccaaaaattcttttatctaatatgaaaaatatagtctttattattgaccagcagtctcctccagagatattacttatgccactcaatttcccagggcattggactttacttattcatgacataaattacggcacttttttaatggattcattgcaaataagcgagttaaattttgatcgggtattgcgtgtcaaagatataatttgtaaattgtgtcaaatcaattctgatgatatattaatacaaaattttcctgcttcaaaaatg

SEQ ID NO: 115416 - DNA, 160 bp, Heterodera glycines
agccattacaacaagtggtccgagaattgaacaagaccaattacaaagcgtatgaattcaatcaccaaattactcaattcacagcaattaccatttcagtgttgtaaagttggcaactttggccggtcgggaacagctttgcatcaacgaaaaggtcatg

SEQ ID NO: 115417 - DNA, 571 bp, Heterodera glycines
ctgcatttctccgatttgcctatcgacacatcgccttcttaattctcatctgaaaggagcatgccgctacctttaccctcaattatttcaaattcaataataatggtcaaacctaaaaaccgacttcccggaccttacgccacctgctctgaatatgatactggatgtctttagggatacaatcgatgggcaagagattgacagagactagtcaaacttcatacatctaactatacagccttgtgaacaagatacagatcgacttgctataacagtgccttgtgaattttagtaaaaaccataagaaagggaggaccctttggttataagacttataatcgaattttattttttctcttgaagtcaaaaattttaattttttattttacacaaattcttaataaaacaaaatacgataagataaaaaacagatccataataaataccttaagaagggatcagccgaattttaaataattaaatcctcctaattttaaatgggttttctctattttctaattaattttctactcataaactttttaatttttaggcaccgatgaataaaatg

SEQ ID NO: 115418 - DNA, 553 bp, Heterodera glycines
aatatttatacaataaaacatggtataatatgggaagtgatgcgagagaaattcgcatatctctccgtttctttctgctactctcttttcttttacattgctatttactctcattttttcgcactccctcattctcccacacacacgcacgcgtccaacagactactgctgcacagcaacacgcgtctgttcactgtctgcccctcccatctgccgctgcccgcatagacagacagtcatacagtgcactttttcccaccatccctccctctaacctctacatcctaggaggagaaatcttttaccttctttttctgtgctatttcttttgccttcttcttcttcttaactatttattttcgtctcttttctttatattctcttctttttcaaaacaatttcttttcatctcttttcaaattcatttttaacgcaaaactcaaacaaaacgccacaccaattcaaacagtgacacatacagagaatcaactttattatataagattgtaaaaatttgaatgttttttgttaatcattctgatttttagatatg

SEQ ID NO: 115419 - DNA, 1003 bp, Heterodera glycines
ctttcccgcgcaaaatttacaacgaggcgctagaaattcaaaaagttaatttaattttaacaatttattcattaaagtagaaatattttcaaattttaattgatatacaaaattttgcgctatttaaaaataggtatatttggaattttattaaaatccggcacccttttggaatgataaaaattttttttttataaaataattgtctagtaattaaaatttgttcctgagctttttggctatgttgcacctattttgactaattctggctttctaatcaagacttcaaaaaataaataaaaatagaaaatttgaattttcgatttttgttcgagttagttttcgggttatggattagaaattggtacaagcaaaagccacacattcgtgatcaaggaccctaaaaaccctctgaaaacaagttttcacgagtttttatcacatttgcaaaccacaagaatcccttcccatttatttttaataaaattcgtggaccatttttcaaaaagcgcccaattttttcgaaattaattaattttttttactttttttttgaattaaggcaatgcaattactctactttcgggtttcaaatgatttcgattttttaaccaaaacattggagccggttgccgccacagatgttacgatccaaagctggttgaaactgtttcgtgaggttcacaatctgccaatcatcagtcagccgctcactttggttttgactcgatcagtttgtttaaaaatttaaataaataattttttattttttaacatttccctaatttttatttccttgggtaattaaaatttaaatatttttcatttaattgttcacaggattatatgtgccatttgcgcaaaagcaatggaacagatgaagaagaataccaattgaaacaggcatttaaaaattaaaaaattttatttatttattttaatttaaatttaattaaataaataaaatatttcaaaaaaggtggaattgaacattggtcaaatg

SEQ ID NO: 115420 - DNA, 54 bp, Heterodera glycines
gtcaaaactgatcaaaaccaaaagtgtgaattgaaatatcatagaataaaaatg

SEQ ID NO: 115421 - DNA, 192 bp, Heterodera glycines
tttttgtttctaaatatttttttcagaaagtgctctacttacgcaccaaattttatttacaacttaattttagcactctgatgctttagtatcaaaaaggaagatggagaaaaaatgttttaaaaaatttttccttatattttggttatatcgttttgcttttggtggggtgcttggaacagtggaatcatg

SEQ ID NO: 115422 - DNA, 91 bp, Heterodera glycines
aggacatttcgaattccaaggcgtaaaagttaaagaaaatttttatgttgccgaaaaaggctcgatgaatctgttgagcatccaaacaatg

SEQ ID NO: 115423 - DNA, 490 bp, Heterodera glycines
  unsure (1)..(490): unsure at all n locations
ccaantcaatttcttnccgaccatttttactatcnaaattatcctcttttttnttcnccacttaacaattaccaaataaaaaccattnaccaatnttaaaaatgaaaaatatttttttaaatcacaataatttgaaaaaataaattctccgtttcgctgcacaaattgagctaatctttttaaattataaaattaattcatccctttcttttctttctttctttttttgttcatcagcactttcaatttctttttcatttgatttatttgcactttctttctttggcgtcattttctcgtgccgacaataccctctgattaagcatatgattaagcatatggcatggattttctcaatgcgttgcgccaatttaaatgatcttatgccactaatccacaaatcttttatcataatttaattttaccatttaataaattttagaaatatttcacaatttaatattctaaaaatttattcagaagaaaaatg

SEQ ID NO: 115424 - DNA, 812 bp, Heterodera glycines
tcctcactaatagttaatttggacccacatcaatttcccggatcacattggattgcattatttgtttatggattagagaaaaaagcaatttattttgatagcttaacctttccaatcaatgaaattgttttaaactcttttcttcatgattttccaggaataatttataataaacaaacatttcagtcccctatgtctaaatcatgtgcccatttttgtatttgttttgtgtattttttatcatttggattaagttttaatgaattccttcataaacttattatatcaaacaatccagaattatttgtccgtaattttattaataattttccaataaaataatttatttgcatttttattcagtaaattttggggggatggaaagggattggctagggggaaggtaaacatattgactgccactcggtaccccggcaccgattgtttaccgagagaaaccttccgcgtctgcataaaatggtgaactgtgattggctgaaaaggttaatccgtccctctcatactggcgaaaatgactcttttcctttccgttggatgattggctgaaagaccttttcctttttttcaaatatgacttctttatttgctatgtgagtgggaaggcgatgattggcgcaatgaactgtcatttccctctccaataattgttcaataataatgatgagtaaatataaaattttatctataagagaactatcatatccatcatattctggtttaaaaataagaaaaaatatgcattttattcataataaagaattttttaaataaaatttatttttaagaaaatg

SEQ ID NO: 115425 - DNA, 191 bp, Heterodera glycines
cctaagggtggaagggtactgtagaaggagtcgaccgattcggcaaacaaatacggtaggacaagccacggtagaatgtgtgaaaaacttacataagtgccgaccattccttaagagcaaaaatatatttaattactcatcacccgatgttgaatggtcaccctccccccccccccctcaattaattaatg

SEQ ID NO: 115426 - DNA, 690 bp, Heterodera glycines
ttaaattaaaccagggatgcgatctgttctgatttatcagaaatgttctgatttgaagggtccaaatctgataaaataaaaaagttctgatttgtcagaaatgttctgattttggggtagcgaccaaaatttgttctgatttcttaaacaaactcataattttaaaattttatggcctaatgtcactattttacaaaaaaatataaaatttatggcaaaatttggtcattttttggacaaaaatctgttaacaaatcgtactaaaatcacaaatttttcccggcgaaaaaaagcgtttttaaaagcgaaaaaagcgggaccgggaattttaggcttaaccgggaccgggaccttttctggttgaaaaaccgggactttttggctgggaaaaccgggaaaaaaccgggaccttggtactcagttgtccgtgtccaggtcccggtcccgctgcactctagtttttagacgaaaaaaagcgaaatttgaagtttcgactttttgttcgaattcgggttcgaggttcgaaattgagcgaaatggatgccagaatcgtgatcagcgactcggaaacccctagaaacttgttttgaatgactttttaaagggcaaccatcttaactattaccgcagtgaacctatcaaattatttacataaattttaattattttctaacagaatatacaaaaatg

SEQ ID NO: 115427 - DNA, 403 bp, Heterodera glycines
ttttcatttaaaattgctttattttcattggtatttaggtcccacggcatggatggctcgaaaacgcactttacgtgtgcctttattttgaaccgggccatgatacgctgaacaaccaattcacgacgatgcgtcaaataatcgatcatttttttgccaatcgatgggttctctgagggggcgcaatttattcggacaaaataaaatcgcacatttacagatccttcatttgcatgtcgattttcaaggtttccaacaaagaaaaagaccatttcctatttgtttgtttaatttattttaattttcagtcaatttgttccaaaaatgggggcgctttaaggctgccaatgcggcgatcgccagcacttgggacgcttctcgtgcgaatgccttcgccgaaatg

SEQ ID NO: 115428 - DNA, 185 bp, Heterodera glycines
  unsure (1)..(185): unsure at all n locations
ataagttcaatttgtaattatatttctttttcatttctgacttttgtgccgcgctcgctaactgaaaatttgtttaaatgaaattaaatatatntagaaacaaaccccatntaaaaggggtaaaaagaagtaaatgcatcattttagaagagattttttatattattaaattcttattaactatg

SEQ ID NO: 115429 - DNA, 284 bp, Heterodera glycines
aattatttcttaagactttgggctgctgggtgaaattcttaaaattaattttaaaactaaaagttcaccattccgcaatttaagcgggaattttattgtgctatttcttgaagtttaaatgattttttgcttatatagacaaaaaaaagcgcaaattccaagggatttttgaggccggaattcatgattataaaaatgttttagtctcttgttcattaaacaataaaattcattttaaatttttcccctccccctcttcttaggtcagcatgttgccggaaatg

SEQ ID NO: 115430 - DNA, 117 bp, Heterodera glycines
aattattattagtagggattctttttttatgtaagaaaaatcgcgaaatatgtaaataaaataagtataaaaaatgctaaaatatgtatgaaatatgtacaaaaactcccaaatatg

SEQ ID NO: 115431 - DNA, 161 bp, Heterodera glycines
attttttctatttgaataaatcaacgatccatacagtttgtctgtgtgttttaaacatttttataataatttaaatggttttataaaaaccaatttttatctatttttttaatcggtgttgaaattccacaattttgagaaaaatttaaaagttaattatg

SEQ ID NO: 115432 - DNA, 182 bp, Heterodera glycines
ttggaaaccctctttacacaatcgatgaagagacatatttgcaattcttcaaagaaaatttgttattaattcttgactcagcccgtaaaaatgccgaaatttcacgggcggaaaccaaaaacagatatgatttacgtccaaatgtgtccatgaacaaatttgcagtcggggatcgctgcatg

SEQ ID NO: 115433 - DNA, 147 bp, Heterodera glycines
atcagaaacagtgggggatacggtagcaaattacatgaggaaactgtagggaaaagcatttggggagtggggatacggtagcaaattacaagaggaaactgtagggaaaagcattttaatttttcggaagaaatttatgacacaatg

SEQ ID NO: 115434 - DNA, 1003 bp, Heterodera glycines
tcattaattactcaaaaatcatcaaatttaaaaattttgaagcaaaaaattatgtatggtgtaaaaaaattctaattcttcagatcattcgatagccctaagtgttctctattagcttgtaaaatttcaaaaaaacttttgttgactttcaaaaaagtcatggccagaagaattcatataaacaagattttgtccagcattattgtcataactttttggaaacttaatcatgatatcattcgattacctttatgttttctattagcctaattagcctacaaaatttcaaaaaaatttcatactaacttttggttgctttttcagcaaatttatatgctattgttgtttattttgatggtttttttaagtaacgactaaccccacctaaattatatgaaaatgtttttttcttcaatttttaccgtaattaaccattcgtaaaattcttcctccaactcatatgatggtgaataaataattctggatgcaaattcacgtccattccgtatcatattttgtaggtctttgagatgccgtttttcaatttgcaatattatgacaacatccgtgcttaatgcaattaaaaattaaagtaaattatttttaatatatttaatttttcttttacaaattgtttgcaatgaaaatttgagttttaaccggaaattcccgggaaatgagcatcactttgggggtggactaatttgtaagctgatatgatattgagaattcatagcttatttttgtaggcaggcaattcgcctaggttcaataataataaataataattaagaaagaaaaaagtaaatctatgttgaaaattacattgtatataatattttgtactaccaatgaatatcaattttgtataaaaattattagccaaattcttatggcgccgaaaagaaagataaattttttttatatatttcggagcgccttagcgttgcggcattataataacggcacatcaaatgaataatttcagaggatcaaaaaaatg

SEQ ID NO: 115435 - DNA, 823 bp, Heterodera glycines
atgattttttaatttgaaaacccagtcctttttattgccacgagtcggcagacaattaagtaattaatgcaaaaattaaattatggcaaatgtttaaaaaatttcgaacgaaattttttaaaattttgcagaataaatagaaaaaatttaatgctttcaaattatatcaagaattaaaatttgattacttttgagcaaaattatgaatagcttcttggccaaaaatttcccatttgatgcttttttgagttaaagaccaaacccctagcgaaagactaaaggtaaagaaatgagagtaaatgaaaatagcacaggcaaatgctctgtttctcttccctttatataaactcatataaaaatgtaaaacgaaaaaatgaaaaaggtgaaagtaaagtaactgcttcacttgacttgcacactacgtgaaggaatttttggaccggggccatcaggggatggccctaaaaatttgtgtttcgtcgttaaacacaatttttccataccgaaaaatggtgcaaaaaatctatcgattttttttacagaaatttcgattttttaaaaaggttttgcacatccaattccaaaaacaagagaggaaccaataaatagagagtgtgcagagaaaaaaatgtcccccttttttttgtggagaatacatgatacttaaattataataaagcaggtgataacttcagagaaacaaatattttttgttcaatttatgaaaagaattaatttattgaaacaaatatttggcgtatttgaaacaatgaataaaaagtttggcttatttgttttttttatttttaaggctattcaaatg

SEQ ID NO: 115436 - DNA, 153 bp, Heterodera glycines
tcatccgtcttcgaccacctgagcagaacaacgctgcgacactggcggcagcgattgagcgactagtcgctgatccgtgtcatcaaccctgacgacaggctttgcctggcgcgtgccgtgcttctgggtctgagagaccgagagatgagaatg

SEQ ID NO: 115437 - DNA, 67 bp, Heterodera glycines
aaaaatagaaattcaaaaatcatttaagtatttaaaaaaattcttatatgttttcgttttacatatg

SEQ ID NO: 115438 - DNA, 89 bp, Heterodera glycines
caacggtgatcagaagaggtacaccagtgatcagaacaggtacatcagattagaagaggtaaactttgattagaagaggtggaacaatg

SEQ ID NO: 115439 - DNA, 130 bp, Heterodera glycines
  unsure (1)..(130): unsure at all n locations
taataatttntaatgtaaaattatttctctaatnntagataaaattaattccaacaaaatatgatgctcaaatgaaaatcgccttaattgcattgttgaaagctttttctcccgcttaattaaaacaatg

SEQ ID NO: 115440 - DNA, 746 bp, Heterodera glycines
caggattggtggctttaatttgtttccatgtgtttaagcgttttttgagcaaaatgattaaattgaattttggactttttgttcgaatttgggtccaggttgagggactggtcgaaatgaacgcaagattcgtgatcatctgccccgaaaacccctaaaaacatgttttcagtaattttcaaatcacaaaatatttttttcaaaaaagatgtgataccagcggcagtattaccccaaatccaacattgttgttttcattagagagcccttcacttgctctgttcactgcaaaatttcaagttcaaaagagccaaaaaggttggaaaatctgtctggttttttactggccatatcttttttaaaccttaacgaaatttttcaaaattttgcatgcaggttaatagattacaattagggctttcgagggagggggggggggggggggtgcgccggccgatgacgcatcccttgtatgtatgttatcacatttgccaattattttcaaatatttaattagtttttttaatgctacagagatttaaatggtttagaaaaaaccaatgaatgggagtgaggcgacgctgtcgacagacgccgctggggaaattttaaaaaactgggctcaattttcgaacagattttctccattaattgatcaaatcaccaacaagtgtaagccgttttagaaaagtgctgtgcggaaccaacggcagatttgttattaacataagttttttcaaaagatg

SEQ ID NO: 115441 - DNA, 79 bp, Heterodera glycines
tagcaccttatcccttctgctactgtatttgactttttgcttttctatgctctcttttagatagttccaaggaagaatg

SEQ ID NO: 115442 - DNA, 742 bp, Heterodera glycines
  unsure (1)..(742): unsure at all n locations
aaataatttttaaaaaaaaatttatgtttaactataaaattntcattngatcaattaaaaataactacgtgccatttccggcgcctgacaccaatgctctaatgacaggccaaatttgccaaaattttattattaatattaatttatttttattagaaaataaaaaacctaattaaaaagatttataagaaagacatttaaaaaaatgtttcctcaattttctatacccttatcactgtgagcattgattgataaatgtttaaagtttgtacgacacatttgcgcctcggacatttgcgcccaaggcggaaatatacggaaattgaacatttttgttgcccgacttttgcgccaaactgtcccaaaaaagaattcaaaagtttttcgctataaatctctcaagaactttttcttgcgcttatgggtccgaatttcacttagggcttaacatattcctgatattcttatgacaaggaggaaatgtatcaaacaaaaatccaatttttgggcgttctgtcgcgatttgcgaaataatttgtatttcctccctccgcctagagaatggcaaatcaacctttttattagtttttgcggggtatcaatttaaatgttgatatttaattaaatcaactaacattatgccatcaacgcaaatatcaacgtaatttttaaaatttgcgaaaattttttaaaatttatatgagcggtttataattttagtgcgagagataacgcaaaaatg

SEQ ID NO: 115443 - DNA, 55 bp, Heterodera glycines
atattgcattttgtttagaacccacaaatttcttcatctcggcgccgaaacaatg

SEQ ID NO: 115444 - DNA, 1003 bp, Heterodera glycines
ataacttttttctttgttgaccaaacttaataataaacatggtgttattcgaacatgcctttaaatgtttagaaaatattcttagctaatttgtaagtgattaaatagcttacaaaaaagttgtggtttgaaaaccgcaaaaaaagacagaattttcgaagtttttaatctctatcttttttacattcgacattctcaacagataccttgattattggattcgggcaacaatttagaagatatattgactcaaagttggctcagagggagttggcccgttccgtttggccagctggctttttgggcaaatttttttattgactttttttttggaccatgaatttgtaagactttgatcgtttgaaaaactgaataccgtatatgctctaattatagcccagtctctattaatcccgtagtctccaattatcccccagtctacgaggtgttttgaaaaataatccctctatcataatccccccagtctctaattatccccccttttctgaggaggttgaaaaataatcccccatgggctataattagagcatatacggtaaaaccaaaaaaaaagtagcagttatataattcttttattactagacatgcattaattataatttttttttaaaaatttattcattaaataaaacaaattatttatttttttaggtttaaattttattggttcttttcgttcttttctaaaaaaataattttttgttatattgtattacgtttacagaggggtttttgattagtttttggttatttttatggttttgaaaaccattttttatcccttccaggattttccaattttaactatgggtcattatgaatttttttaaaattattatttattagccttggctctcccaccgatccgcaagaactgtcgcccgtccctcgcactcagtgcgccaactgcatgcgaatgttgtggcgcaacccgtcgaccgctgtcgcggaatggcgcgggcgtcgacggccgcccgtcatg

SEQ ID NO: 115445 - DNA, 325 bp, Heterodera glycines
cagattcgtgatcagcaatagaaaagcccagaatgcatgtttttattagatgtaaatttatttaaaaaatcaaatatgtgatgaaaaatcatagacaaaatcaatgatttttcgaattctgagcacagatccgtaatcagcgtattttttcacactagaaaagtcgaaaagaaaatttttaaatttatttttcgccgggacaccgatttttccagtattaccctaaattaaattgcttattgctttttcatgatgcatttggccattgcacgagagcgccaggatcgcgtgatgtgcgggttgggtcttgggaatattggaaatg

SEQ ID NO: 115446 - DNA, 80 bp, Heterodera glycines
ttaagattgaagtgaacattggccaatctggtggcttcgtgaattcagcaaatatcacaaaattgcacagacgaacgatg

SEQ ID NO: 115447 - DNA, 748 bp, Heterodera glycines
aggggtatatttttttaattttttttttattcctttttcataatatttgaaaaaatagtttttttttaaaattcccaagtcaaaagagttattaaaaagtttcataagcgaaaatactgtagttgaaaatagtgctaaaaaagtcgctatatatcgaaaagtgttcgaagaaaatttgttttttgcgcttatcagttgggactggatttgtatggatttccatttttttttttgcctacaaaccacgtaaatagtgtttttagctttgtttgatgcttctaggatccttttttacttccatatttttccatatttcagatttttgtccatatttccatatttgacaatgtgttggactcataaagtttaatagagttaaaatatttgttttaattaacccttattttcctaaataccaatattttaagtgaagaaatattgtaaattttcaactttcaacttcaaacgtcaaaaaccattgccagaaaatgaggaaggagaacaacaaaagcagtgccgcctcagcagattctgatgccaatgccaaaagtggtggcgatgcttctctcaccgcccccactgaagaggagggcgaagaaatcagtttaattacttataatacgtttggtttcactaaaaattctttctttaaattaaattgtcaaaaatatttggaaaaataaatgtaacgctaatccctttcttcgagcaaatttgcacctaattaatttatttacatatagatatg

SEQ ID NO: 115448 - DNA, 63 bp, Heterodera glycines
ggtcaatttaaaaattccattttaattgcattttttaaatttcaaaatttgtcagttcccatg

SEQ ID NO: 115449 - DNA, 211 bp, Heterodera glycines
tctttcactctctctctcgctctctctctctctctacactcctcccattcaaaacaaaatgccaaaaacaaaaatgttggcgccaattgtttttttcaattaactgttaacttcactatattcgtttgtccccctcctcagtgatcgtcacgatcacccgttctccccgaccaatcagcagttgaccaagggcaaaagtgccatcggaatg

SEQ ID NO: 115450 - DNA, 619 bp, Heterodera glycines
atgaagcattatcgaagcttttacccagaaaaatgtacctttggaaaaaaattccaactttttgttcgaattcgggtccggggttcgcaactgggcaaatccgagttcaatctcatgatcagcgccctcgaaaacccccaattacttattttgagatcaaatttaaaataataattttatatttgggacccccattctttacgattgccgtttttgagatataactcctccgtaaatatttgtctgaattggatggatttgatggcatcattcggggaacgactccaaaaactttaattttctaaaagtgcaatccaaattggtcccccatgaaaagtacttttgctccctcggctataggctttgcctgaaatcacttgcccttttcagatcactttggcccaacctcacattgttcaaaggttgtccgcctttttcggcaccaactctttcatggtccgagtgcagaattgcgagcggaccaatgccgattttgcgatgcccgtttttgccgtgggttttgaaaacccatacaaaaaataagcattgtaaatgtttccatttttgtcagtttattatcaccaaattcaaaacggcgctcaccgaacggcggccaatg

SEQ ID NO: 115451 - DNA, 99 bp, Heterodera glycines
tttctctaaaattaataatttattattaaataatttaaaaaaagaaaaaaaccgccctctttttttaaagaatgaatttaactatattcaggaaagatg

SEQ ID NO: 115452 - DNA, 110 bp, Heterodera glycines; identical to SEQ ID NO: 99093

SEQ ID NO: 115453 - DNA, 400 bp, Heterodera glycines
atttaaatgctgttgaaatggatttataaaaaaggcgtttattgcggtcgttgatggtcgtggccacttactccccccccggctctattgcagttcacatgaccataaaattgacaactttgatacataataaatttttctatagaatcatgcatattaatattggccatttcgaatccctgaccccccgaattcgaacaaaaattgaaaactcaaaattctcacttgtcactcgaaaagcccattttttcgtgtcacatttcgaatcatgtttagggccggggaatgggcgggtgggtggggggggggggcggggctatcatcaaaatttaaattcgtccacttcttctgcccaaccgagagccgcatcaatttttgttgttaatcggggtcaaaaatg

SEQ ID NO: 115454 - DNA, 763 bp, Heterodera glycines
ataaaattgctgcttcattttattttgtttcttttaggtataaaaaaaggtattaattaaaaataggaaattttttggaaaatggagcctatgagactgaaaggagttaaagcctctgtttttggtctgtgaaatttctggcattcatttgaggtcttggccttgaatttcgtacaaattatgaaattaagtaaaattgcattcaaaacaaaaatccttttcaaggtggtaattcgaaaattatttggacaatataaagcaaaaaatttaaaaaaacatcgaaaattcttttttctttaatttttttttacttaataagaaaaaggtatgacacaataaattcgtttagagagaatttaactcataaaaatgtaagaaaaatttttgagaattattaggctaaagcgaaaacaattcatcaaatgcacatttatggaaaaaaattttctgcccggagaaattcatttacaaaattaaaaacgctttttgctgtaaaaatagtgaattcagtcagtcatcagtgtcattggcagcagtcatcagttgtcacacataaacataaataaccaaaagtgatgatgatgatgatgggtgaaaaatgaatgttcatatgtacatacaaaaaaccaaaattgtatagtttggtcagggatgggatccgtccttgaatggcaaggacgtccttgaaattgggccctctttcttgaaaataaaaaatgtaaattttaaatgtccttgaatttcatgaattttccccactatg

SEQ ID NO: 115455 - DNA, 546 bp, Heterodera glycines
tggtgctaggtcgtttcgtaaaaagtgccactatgggcgtttcgtaaaagtgccaggtcgtttcgtaaaagtgccaggtcgtttcgtaaaagtgccaagtcgtttcgtaaaagtgccaccttgggacttttcgtaaaagtgccactgtggtcgtttcgtaaaagtgccattataaaaatatggttgagtatagagttatgaattcaaaaaaaatttaaaggtgccaattcaaaagtgccatcacaaaccaaaactttacagtggctatttttgggctccaagtacatataagtttattatttatttagtaatcagaacgccaaaactttgcaaaacttaaaatttttttgggattttcccttgtaaaaaatagaaatagccgatctcgaattaaaaagcattttggtaaataaacaaagcattatcctataaatggagtaaaaatatgagcctgtgcaaaatttgaaaaaaatctgaccctttggtctattattgaaaaagttataagctaaaaaaaattcataaaatcaagggtaaaataaaatg

SEQ ID NO: 115456 - DNA, 1003 bp, Heterodera glycines
tgagcacaaaatttaaaaaaaatgaaaattagggacaatcattcttcaggattgccgcctgggtaaaaagaggacatacattaagttaaataaatggtttcattttggatttatattataggtccgtctcatttttcttctttcttcactattaataatcatacacaataggcgatagataatgaatgcattcattaaatttaaaaaatataactacctaattaaatttttctctttaaatttcatcaatatttttttaattaatttattattttttatattcattttattatatttaatttgatattttaaattttggcgatatgatatagtcgtaaatggtcattgtcgaaacggcattgtcgaaaaggtattgtcgaaacggtcattgtcgaaatgtccagccaccttagccacaaaatgtcggtccgcaaatgtcggctaaccatttatttccattttcccaatgactttattttattttacataaataggtatgtgtagcatccaatcatcaacacataaacaaagattaaagattttgacattgccgatgagtgagtgatccatccgcccccccccccccccgccattctttttgcatttatttccattttcccatttcgttgttctcctccgtcccccgagcaattaattacgaatgatcagaaatgatttttgctttagaataatttaattagcataaatatattatgaaaacaaaatcaaatcatcatttaaataattttttattcacaaattatttttaattgcaaaataccgtatttcctgaattacaactccccttttgaggggggttgaaaaatagaacccccgggggtactaattcaggaaatacggtaaattaaatacgttatttcaaatttaaaccaaaatacaaaaatttcactgatccgtttgcctaatgaagcttacttaggccttgtgcccccccccccccccatttaggttttgttttcgtatttgataatttttggcaatg

SEQ ID NO: 115457 - DNA, 206 bp, Heterodera glycines
cggggacctctagagtttacactgaatttgcatatggcattgaaagccgtggacccatgcaaatgtggcactgatggaaggccaaaaaatgccaggattaatcagatttaaggacgaggcactttattttgagcaaatgaacaaatggaacagctggctgactggctctgctgaggactctgttgaggaagaattgtcgaacaatg

SEQ ID NO: 115458 - DNA, 165 bp, Heterodera glycines
cctgtaaaatacaaaaaaatttcgttgagtttcaaagaagttgtggtcaaaaaggtttaccaaatcaattttatgaaatttacaagccgcaacttttttgaaacacaaccaaattttttgaaattttaaaggcaaatagaggacactcagggctatcaaaagatg

SEQ ID NO: 115459 - DNA, 478 bp, Heterodera glycines
tgagaatgaaaaagtgattaaaaacgcggagaaacccttcaagtgcttgacaatggtaaccaagggaataaattaaaatctgaaaccccaaaagtcaaaactaaaccagtagaaattaataaaaaccaaaaaaaatatgtaaataaaacaaaaacaaaacaagaaacacctaccccaactcagcaaaatatgataccaaaaacccaaaccacgcaaatccctctccacaaaaagattttaacaacaacaagcccgagagttgtatttacaataaataagggtaccgtcgaaaagacaacgcacaatcagagtacgacgttggaattaaatcaagtttcaccaaaattggccacaaacaatgaaatgaagggacagaaaaacgccaaagggaaagtcgaatcaatcaaaaaaagagcctaaaaacacagaaaatgacaccttgacagaaaacaaacagaacaaacatttggaaaaaatg

SEQ ID NO: 115460 - DNA, 988 bp, Heterodera glycines
attacagacatataagtatgaatcagacaaattatttaggtcaaagagattattatttttgttggatgatttatgtcaataatttcgtttgcaattttgatgatttttaaagaaatgttgaaaattgtcaatttatgtgtttatcggaatataaaaaacaaagaaataaaataataatttgtcaacttcaaaacaaaaataaagattataaataaattatttctaattttcatccttcaaatttcactcataacaccttttgaactcactgaatcaccttgatcatatcactccttcatgtgatcgggagtgatccgaatttctgcaccccaaggggaattgggtcctcaattctccaacatagtaaaactgcacccaattaatagaacatcatgcacagacattctacaatcgttttgatttgaaaaaatcagagaaataagctttataataaaaaagtcaaataaataaaataaaattttagctatgaaaaaacgccgttttggcgcatttaacaaatgcttaaactgaatacatatttagccaattcccagaagttctgcgtagcctctcattctcttattgaattttggcatttgacaacattatttttgtcactattttaaaatttaataaacaaatgcccactttctgtggatccgactttaattgttgaattgagaaagagatcagtctgtacctcaatttgaagtgccacgtaaacatttcgccatttatttgttcacctacgattatttaggacggaaatccattatcaaaatgaaaattcaaaaaaacagcacgatttttaaattatgaaaaacgtcaaattggagagtttgatgtttgaacagaagacaggggcaaaaatgaagcaaaaagtgtccgatcatttagaaaacggagtataaaaggcgagggaaaagagaaaaccgtacaaaggcataattaattaattaatttaattggcttttttctctcttaaatg

SEQ ID NO: 115461 - DNA, 1003 bp, Heterodera glycines
acgcgacttttttttgaaacccaaacctattgcgggttgcgcgactttttttgactgcgcgactttatgcaaattattttattaatttaaattaattttaaattaaattttaaacatcttaaaggtcaaaacatcttaagaacatgaatttaaattcatttaaaattcatcaaaaattccccgcaccaagcggatccgaaccccagggggggcggccagactgacgcactaaccactcggccacattggcaatggatgataaacattaatttgctctcataaagggaaaatttgacgtcaccagcgggggcagggggggggcgagagcgagcagcgagagaggggaggggggtcaaataaacaaatcaattattgaattcacaattttctcttttaaaagcaaaaagaaatgggggaccgtataataaaatataatttagaaattaaaataatttaaaggttaattaattaattattttcctaaaataaattttttttattacttctaaaataatataaatatttttcagtgaattaacaaatacatttaagtttaattattgatttgtctgttaattttttatctcctcaaaaataattacagcaccctttcaggtgttgggcgtttgtttatttgaccaataatttttaatttcacatctttacgttgcccctccctcacacctgctcatttgtgtaatttgacaccgtttcttttatcttttcgttaaaaattaaaaagattgtctggaatttgtcttgcgccacaccgctgtgccattcatttatgtaatttgacaccagtctgataataatttcgccaaaatttatttattatttgtccatttattacgaattattttgcatctatcactccaaattttgttaaaaaaaattttttattgtcccaattttgaccattttgtgttttttcaacaaaataaatatttgttcaaatttaaagaattaatttttaaaattttagacacaaaaacaaatcatg

SEQ ID NO: 115462 - DNA, 669 bp, Heterodera glycines
agaaattataagatgatcgagagggggagggagtacataaacatttttcgggatgaagagggggaggggattcgcgaaatgaacacattacaaaaaaaacaaaaaaaaaaacaaaaaacgaaaatgtcacaaaaatattgtttatacgatgagtgaattttttggtaggcatttttatcattattattaggcaatacacaaaacattttctgcttcgttaattaattaatgatttaatattttaaattaaataaatgctgttaataattatttttattattattttataattaaaaaaattcctttgttgggaatttgtcattttgatgtttttaaatttcaatgctcatggcgccaatcacaaaatgttttttgcttaattaattaattaatgctttaatattttaaatgtattaattaatgaaaataaatgttttaattaaaataaaattgttttaattaaataaatgtttaaaaaaattcctttgttggagttcttatttaaatgtttaaattttaatgttgatgaataaattaaaaaaaaattaatagaattaatgtcaattatttttttaaatttatttaaaattttaaattatccccccccccccccccgctcatccaattgtttatcgtttttaaaattttttctccatgttttaaagaatg

SEQ ID NO: 115463 - DNA, 859 bp, Heterodera glycines
taaaacgctcgtcagactgcttcctccgccctccgtcttgccccactacttgctccgccttcgcatgctcgccaaggcgggcgccgcgcgcactcaaaaagggatttttatgcgttttaaggctttgggcggttcagtcccacagccccattttgcacttcagccccgggtcggtaactctgttcagaattgtgaccgcgccttaaaaatggtaccattcgacttctctcgcagagaggaatcgattgatatatacataattcgtatgcaaaatcaaagttggcagtattctgaacttttaccagtttttttcttactattatattataaaaaaaactattgggttggttatggctttggaccgataaagtgcattcgaatcttttatgtttctttgtgtttatcaccatttcttcgttgcctttaggtttcaattgggttcgaccacagacgccgcttctccgaccgttcgtcaaccaccccaacttctttcaaggttctaatatcgcattatcatttaaatgaaattttaccaaatccgaaattattcagtcaaataacagagaattaagttatcagaagctaaatatgagaaaaaccctgagaatacgacgtttaaatgaaaaatttaaaaaaaacaaatgtcgcttaattgacagtggcttttttaacagttttaatcattgaaaatttttaattttaaactaaaacttggttataagcattaggaatctgtgaattcttgataatttataattgtttgcttttatagggattggagcgcaagcccaacaattcatggggggacacaatggaggtcagggttttccggataagctcattttgtttacttaacatg

SEQ ID NO: 115464 - DNA, 93 bp, Heterodera glycines
ttttctttttttaaggttttacaaaatttacatttttttttcgcctcctactaacaatgggttccagcagcagcagtagttcaacaagtaatg

SEQ ID NO: 115465 - DNA, 61 bp, Heterodera glycines
ggtagaccagcagaaaagagtcccacaaacaaaaactaatttgacaatttgaattcagatg

SEQ ID NO: 115466 - DNA, 322 bp, Heterodera glycines
ttttctgtcataaaaatagctcatgacaggatggagttacgcggccctaaaaaactagaattaaaaattcgtgcacttaaaaaatttggaattcggaagtcagaattccggtagtcaagcaaagtgatttacgagcccaaaaatttatggaaggttgggcgtgaaattttttttatttccaaaaactttaaatgcaaaaaattgagaaatttaaatttacctaaattttcaagtttttctaaatcttttatttggtaagatctgtaaacaactttattaaaaaaaattttgccgcacttattctacaaaaaaaaaacaaatg

SEQ ID NO: 115467 - DNA, 405 bp, Heterodera glycines
tcatattcgtgatctctgtctccgataacccccgggtggaaagaagaaccgtagaaaaacagcctttttattctttttttatgggaccagtaaaagtcagtattacccaattcattagtcatttcctaattactttgaccattcatcagccctttttgcgcgttggccccttctgtcgcccctctgtttcgtgccgttctccgtcctttctctcctcgccctctcccttttggttggtctccaattcgcctttatgtttctcgttctccatttgttcgtcgtccttttctgtccgttgcttttcattcgaatgcaaagcctaaaaaggtggtgactgaccatctctgaagtgattggaaaatcattgtacacaaattttattttcagcacaatccatggcccatg

SEQ ID NO: 115468 - DNA, 1003 bp, Heterodera glycines
acacaattttggctgcattaattaagctagtaataatctcccaattttttatatctgttcaaacaaattttactaaaaattccaattttatagtttagtttttatggttaaaaaatgaattcaaaatggataataatcacgtgcaaatgaagccaattaaaatttattggaagaaaatgtttgcaaatcctacggtaaacgtcaataatgcaccgattattaatatgtatgccatttgtacaagagaaataattaaactcattgctaattcattaatttagtataaaatttctagtatgtaaaaatataattaaataaaaatattaggaactcgaaagtccgattcgaaaagcctttcttagatttcacttattatttaattaaaatattcaaaactcgaaagaatggaatttataggggggggggaagtcctataatagtggcttaaataggggcgaaaatgatgaaaaggggagttaaattttaaaaaagcatgctttattcaaagaaaactaaatgggaaaattgtgtaccgacacttgcgccgtcccacaaaatccatttgcgccattcatttcaaaataagattttaaaataatataaaaaattttatttaaatcaaactcatatgttttaatttgaaaattaaatccattcttcgtaacctttcatgccaagataattttgtaaatgcatgaatgtggcttattattattataatcttcattatctttgttttccttggcatcggatttgccgttgctgctgatttacgcatttacaaaaacaaaaattagatgtctatctttgattccttttttctttttccgttcctttgattagcttttttttgtttgttatttcacaataaacggcgctaatgcccgcggcgcaaaagttgcaacacggaacaaatagcttaattcacttcttgcatttgaatcattaaatttatgctatccttagtgttttgtattatatttcagagacaaaatgtaaaatg

SEQ ID NO: 115469 - DNA, 1003 bp, Heterodera glycines
ttgctaaaaactgccaaaatagttgctaaaaaaagttgccaacaattggaaaaacatgtcaataaatatgtgaattttccaaaattttttcatctttgtccttttcggttgcacaattgtaaatcaaatacatttgaagattttcaagcgtaaaaagttttcgatcgtccgccaaatcatggccaggatttttgctttttgaaaaatcaattcttaggggtgcattttttgaaaaaatttatgtggattcttaggggtatatattttttaaattttttttattattgcattttcataataatttgaaaaaatagtttttttttaaattcacaagtcaaaagagttattaaaaagtttcataagcgaaaattctgtagttgaaaatagttgctaaaaaggcgctatatatcgaaaagtgttcgaagaaaatttgttttttgcgcttatcagttgggactggatttgtatggatttccatttttttttttgcctacaaaccacgtaaatagtgtttttagctttgtttgatgcttctaggatcctgttttacttccatatttttccatatttcagatttttgtccatatttccatatttgacaatgtgttggactcataaagtttaatagagttaaaacatttgttttaattaacccttattttcctaaataccaatattttaagtgaagaaatattgtaaattttcaactttcaacttcaaacgtcaaaaatcattgccagaaaatgaggaaggagaacaacaaaagcagtgccgcctcagcagattctgatgccaatgccaaaagtggtggcgatgcttctctcaccgcccccactgaagaggaggcggaagaaatcagtttaattacttataatacgtttggcttcactaaaaattctttctttaaattaaattgtcaaaaatatttggaaaaataaatgtaacgctaatccctttcttcgagcaaatttgcacctaattaatttatttacatatagatatg

SEQ ID NO: 115470 - DNA, 105 bp, Heterodera glycines
actgaaaattagccaatttataggtaaaattttgaaaaattttatgggaatttaatccaattcttaggggtgtaaaagtcgctttacgcgccaaaaagcgaaatg

SEQ ID NO: 115471 - DNA, 607 bp, Heterodera glycines
ttcctaatgaatataggtgaacgaaaaattcaggaaattatattttagtttttcaatatttaaaactttttgaaaaaactattaatttttgagaaaaatcagttaagattttcgataataaaaatgaaaaatgcttttttattgctttatttcattatttttattgtatgtttttaatcagttttagactgaacataattttgcaccgattttggcattttttaggacatttgcaaaattttcgtaaatcccttaacaaaaacacaatgaaaatgaaaacatactgataaatatagacttaaataaatttagaaaatttgattacctctacgaaaatgagaaaattttctcaaaaattaatgcataaaatttattcatgaccaattttgattttaaatattggaaatttataattatatattttattttcaaattaaatacaaaattttttgttcatttttgtgatttttcatgcaaaaaaatctccttctctgttcattataatggattgaaaagttaccgtattgataacaaattaagatttttatttaaatattttttaatttaccatccacagtaatgttcagccatttcacattcatttatg

SEQ ID NO: 115472 - DNA, 396 bp, Heterodera glycines
tctgcaaaaaaaataaaacaaaatgccaaaataattatttaaaaacatattttctatctcggaaccattttcacattccatgaattttgttagccttgaaaaagaaattttttttcaatcattctcaaaattggtttaaaaaccaatttaaaaaatagaatagtacgattatttgtgtcgaaaatattgaaatttgatttgtttaaaaaaaaaaaaaaaaataaaatttaaccaaaaaaaaattcctaaattgataataattttataaaaattatttttttgtgaaattttcaccaaaaatcctaaatgaataaagctaaatttttgctattttaaaaaataacaaatatttattttttgccctcctcctccacctggagcgtggtcaacggcatg

SEQ ID NO: 115473 - DNA, 110 bp, Heterodera glycines; identical to SEQ ID NO: 99093

SEQ ID NO: 115474 - DNA, 297 bp, Heterodera glycines
gctgaaaatataatatttaatacgtttttgattaaatagaatgtaaaaacaactgttttgaagcagtttcgcaaaatgttctggttttcgaccccaaaatctgatttttgaaactcgaaaaccaagaaacttgttttatgacaataaaattttcactgaagcattttacactgacgcattttccggcgccgttaaatttccgcttgcagttgaccaaccgcccgaaatcgtggagacgaggatgagtcgtttcgcggttgacttttccttttacgttgccattgcgatgggccaatg

SEQ ID NO: 115475 - DNA, 325 bp, Heterodera glycines
agaaagagtaagtccgtggaaatgaatggttaagtatgagtgtgaggcccggggacggtccctaaggggtattggaggagagtagaccgttaagccgtgttcaaaaacttttggcagtgggctatagcccaatacgtattttgaggtctcctgcgttgtctttcttttctcaaaatcttatttttgtccactattgtacctaactgtcttcttccgctttattttctattgtaaaataatacatttaacttttcttaatatgaaataatgactagtgagctacggcccaaaagtattaaaaatgacgtcaaatatttcagcaatg

SEQ ID NO: 115476 - DNA, 313 bp, Heterodera glycines
aaatatttaatttgtttattttagtcggcgttcgatcaaaattttttcagatcagagcagaatttttttagataaacttttgtggtcaaaatcagaaaaaaacactacaaaaaaggagcgtaaggtgatttcaaaggacataaggagacaatttttgaatttaaaggacttttcaaaagggagccggaaaatgcgacaccgagagaaagtttttcatttcaagaaaatgcgacaccaagaaaatactacatcaaacttagatttttaaaaatataaatttgtgtttttttttgaatttaaagtcttgaaaatg

SEQ ID NO: 115477 - DNA, 111 bp, Heterodera glycines
ggtaccaaagcatccttctcattaaaattcacttttcttccctaggctcccgatgtctcgtggaacaagccgttcaaggagcgaattcggcatttctacaacacttggatg

SEQ ID NO: 115478 - DNA, 235 bp, Heterodera glycines
ggtgaattaaattaaataatcttttgaatttccgcttctcaaaaggtcatttacggcattttcaaccgcgactttcggagggcgttcagccgaataatggcgaatttgctgaactgtctgagagaggaaagtttcagtccgaaagggtcggccaagagaaaaagtacgaacaacaacaacatcattaacaataacaacaactacagcagcagtgaaataaacaacgcagaaaatg

SEQ ID NO: 115479 - DNA, 153 bp, Heterodera glycines
agaataaactgaaaaatttttaaattaccatcattttttcgcatgcttttttataataaatattaaatgttcatgttgtttttagtgaaaggttttgaccccaaatatttaatcaattttaatttattatttttggtagaattccagaaaatg

SEQ ID NO: 115480 - DNA, 78 bp, Heterodera glycines
  unsure (1)..(78): unsure at all n locations
ataaatttntttttacagtagtaatagaattaggataaaaaagcgttcagtgattttctagcaattaccagaaggatg

SEQ ID NO: 115481 - DNA, 159 bp, Heterodera glycines
actgaaaaaattgcaaatttttattaacactaattaactaatcagcgtttaatgattatgtaagccctatctgcttaaaaattgaaaatttttaaaattcaaaaaaaagttagggcttgtggttatggtaatcagaaattgtcatgggtcttaaaaatg

SEQ ID NO: 115482 - DNA, 383 bp, Heterodera glycines
  unsure (1)..(383): unsure at all n locations
ttgaaatactttttttaatttgtattttttgtcttcattttggggtgcgatagnncgnaannnaggngaaacaaacatcatagataaagagaggaaccccgaaaagcgcccgaaacaagcgccacaaaaagggcccaaacgccacaaaagaaccaagacggggcagaggaaagcaccaaacgaatgaaacaaacaaacaggggaccccaagaaacagcgaacatcgcgagggaggccgagaacatttggtgcaagactatctgcgtgactctgatggtgtgtcactgcgtctgagcatcaaccaacggttgcccgttgttggcgacctgtacacaaaactggtcgagtacgaccgcactcagttggcgctgatgttcgccatg

SEQ ID NO: 115483 - DNA, 295 bp, Heterodera glycines
atcatcagcaaaattgatcaatcatcacatcaaagcattttttaattcaccgcaaaggaataataaaaattaatcagcttttaagacaaaaaaaaaagcgaaaaaaagaaattagcagaaagacagaaaaagagaaattgtaaagattttgaaactttttaaagatacttaactaattggcattatgtcctgatgattctttttttcttttgcttttgcattttttcagatcagaatttgtttttcctcctccttattttaatttgttttaagaatcaaacatttgctacaaatg

SEQ ID NO: 115484 - DNA, 131 bp, Heterodera glycines
attgattattttattataccacggcgcacgttgcgcgcgctgttggtgctgcgcatatatacagcgagctcacgcgggaaaggctcacttttttcgcaaaaataaattaaatatattaataaataataatg

SEQ ID NO: 115485 - DNA, 98 bp, Heterodera glycines
actaattaattacctattatacttactcatgttaaatatatttaataatatttttgatttaattttttgctttttagcaaatttggaaagagcaaatg

SEQ ID NO: 115486 - DNA, 179 bp, Heterodera glycines
ttttattttttaaaaaaattttttattttttaatagattatcccagaaaaaaggctattttttttttttgagaatttttttatccaccaaacgcttttgaacatgaaacgaagtgcggtgcgccatggccttttatttttcaaataatttttatttttaatagatattccagaaaaatg

SEQ ID NO: 115487 - DNA, 431 bp, Heterodera glycines
gcatatttatttttaaaaataaaaataatttttgcaaaaggttgccctcccgtggtgtatttgctgctgaacaaacgaattcggaatgattgtgccaacttttgccgtgccattttacgttttttgcgcaatgacaataattcggtgtcaaacggaccaattgccatggcatggatggcaccaaattatgtcagaaacaatgccaacaacagaaacaataacaacaataatgtgcaacagcaatgctgactttttaccgattaaaaaatcaccaatttttgtgttactgtatatttttagtgtatattttttttgatgccatctttttacgtccttttattccttggaaataaattttgagtcacttttttggtggaaaattagaattatgtttgcttggaactcgttgttcccggtttttgggcaaaatg

SEQ ID NO: 115488 - DNA, 435 bp, Heterodera glycines
ttttcctaacttttctccttttcacttcgcttgccattcaatttccaaaaacgtacatttgcgccgcacagcgaaaccggatatttgtgccgttaacaaaaatggatatttgctccacctagaaaaaatggacatttaagccacctagcaaaaatggacatttgcgcaccgctgcgaaaatggacatttaagccacctagcaaaaatggatatttgcgccacctagaaaaatacactgttaagaatgggggtcaggaaaaagttgaccaaaattgagggaaagataaatagattaaaatttttaatggtaatttacaaatttgtacgttttttattaatttatgaaaatttaaaatttaattgtggattttttaattatcattaatatttggaaatactttgaaaaatttgctgacgaagtttaattgtaaaatg

SEQ ID NO: 115489 - DNA, 82 bp, Heterodera glycines
attcatttacagtgatatttttctataataaatccgtttttatgtaattaattttttttgacttgttttcttagttactatg

SEQ ID NO: 115490 - DNA, 1003 bp, Heterodera glycines
cttcgtgatcgtttcgtccatctttaaccgtttcagttgccctaaactcgcgcaaaaaagcccagaaggctgtttctatgcctcaaaacataaaaaattacaaaaaaaacttcattttgatcacgttaaaaatttcgacattttgaccgacttgtcgacactttgtcccactactcccaaacattgttagacctgtcaaaacattgtttaacccatttaaaaacaaatatcaagctctacgcactcaattacccccaaaatcccccactcactgcgaaaagccgacttttttgaccaaatttttagacaaatgaccaactcaactttgggctagggactcaaattttttaaaagaaccgcctcgaaatgctctaaccaaaaaccacctcgcccattacccacggcaacttaaaagccgctacgggcgcaaaaaaaagatgcaactctaaaaaaattcggaaaaattccctttttgaccagtttttcggacaaatgacctacttaactttgagctaggggtccaaaatttttttttaaatgtgactaggtgagctctacaataatatacaatagcgcctgagctaacatttcgctaaagcacacccgcccgagtctaactttttgagaccccttcctggccaggggctaaaggggggtcaccccttcaacttagtgctggcgcacaattttttttttttaaagaccaaaacgattccatattttcttaacttttcattaaaaattccaattttttatgcataccggaagcaagaaaattacatatttttgccattttggggtcattttcagaagttctttaacaaaaaattcaatagaaaaaatttttttttgacgcgatgacattttttggcgacatgttcaacatattcaaaaaattttccactaaataaatcaaccgaaaaataatctcccagtctccattagtctgccagtctccaattatatacccccttctgagaaggttgaaaaataatataccatg

SEQ ID NO: 115491 - DNA, 92 bp, Heterodera glycines
tctaaatgatttaattgattaattcattttttaattgatcatttctttaaacttacactaatgatttgttgtgccccattttggtcccaatg

SEQ ID NO: 115492 - DNA, 95 bp, Heterodera glycines
agttactccgtatgattgtttttatcttttctaatttgaacctgggctaattttaaaccagtattgcttgaccaaatccaggttgccgaaaaatg

SEQ ID NO: 115493 - DNA, 246 bp, Heterodera glycines
aaacaaaaagttctgttcttttcaaggccactgaaaaatgcctccaaataattgccttctcccaccccagttcttagtcccccaccctattaattacccctttaattaattgttctctttccgctttctttttaattgccccccttttctgttaattaaggtgcgcccgagtcggaagtgcacaaatatttcggcactttgctcaaatcgatcgcaagtggacagaacagcaacactttggagatg

SEQ ID NO: 115494 - DNA, 311 bp, Heterodera glycines
caggaaaatttatgatgaagctgatgacaaaaaaacaatcatttggccattacaatttgccaaaaatggcgctaatttaaaatggaaacaaatgcgtaaaatgtgtgctaattgcacatttgtttcccagctttagcgccatggtgaaatttatacaaaaaaaaaacaggttggccaattggtcattgaacaaatttttgttgtttgattttaggcggggaaaaaattttatttatggaaatttgtaatctcaaaaaattatggcttttaaaattttctaaaatgcagagggtgagtcagggccaaaaatg

SEQ ID NO: 115495 - DNA, 249 bp, Heterodera glycines
gggtcaggggttcggaatcggttgaaatggatgtcggatttgtgatcagtgtttccgaaaacctctagaaacatgtttttatgattttttgaaagttgaaaaaaattcataaaaaagggggggtaccatctaaactattaccgatatcaatacaaaatatgaaaaaattaaaatgctatttaaagattttcgtaaaattttcttgtttagttttgcctttcatcaaattgatgttaaaaatttcagatg

SEQ ID NO: 115496 - DNA, 666 bp, Heterodera glycines
atcacggcttcaagaaggagggacgaatgtggtgttgagagaccaatcaataagtggagtgaactttgttcactcctttcccttaggcactgttcctccccacatataagcgatgctttccttccctccctcgttcattctgtcatttatttctcccattgcaattctcttcgccttgaccattttattattatatttgtgtttcaaataaatatttgttttattcatatctgttgttctcggacacaacacatttcatttaaaaatcagttaaatattgatatatttttcagaaaaaaaacccattgtaacttctcctttgttaaataaatatatttgatcaaaaatcagttaaatattgacatatttaatatatcttttttcaaaaaatatcatttacccctttgctttatccaaacatatgaattaatatgatcaatagaataaaaatatttcattcaataagtaaccgcccaagaaatcactcacactccaaaaataatagagaaggcttatatatatattggaatttgcttctaggctttattcatttagacatacatacatttagcagtttgcaaatagtattttttgaattctaaataaatctaataaaaaatagaaattcatttacattttttagcaattttaaaaatttcattaatg

SEQ ID NO: 115497 - DNA, 142 bp, Heterodera glycines
agcattcttacatcagtttcttattaattaggttcgtacctttgatgactactttcggtttcttcgaggcgttcggattccaactcctgcaagaagcccaacacctataaaaatttttgatgaatcatgcccggaaataatg

SEQ ID NO: 115498 - DNA, 260 bp, Heterodera glycines
ttttgatttatatacgattcttcctgatgcttgccatcaggagtagaaattaaattatatgctgatgatgttaaatttcaaatttgtcattctttcaatttgtcattctttcaaatttgtcattctttcaaatttgtcattctttcaaatttgtcattctttcaaatttgtcattctttcaaatttgtcattctttcaaatttgtcattctttcaaatttgtcattctttcaaatttgtcattctttcaaatttgtcatg

SEQ ID NO: 115499 - DNA, 1003 bp, Heterodera glycines
cttcctttagaatctcttcattctgtacactctctcgcttcctttttcatctctctctattgttttcctcttcttctctacctccttattcccaagcactcctacacactcatcacacacataaacaaactcgcacgcattcaatcctgcgtgacaaccgcacgcgttacccactctacccctcccatccgcgccgacagagaaacatacactgcactctctcttctacccatcctttctctattaatctccaattatattttttaattttctgtttctttttcctattacaacaaaacagcatttaaccgccaattcaaaaataggggcggggcttcggctgacttagtatatagttaagggattttttgtgtgggatccgcgggatcccttgcattttttgaatattaagacagaatgccaaatatttttaaataaatttaattaaatttaaacaaccgcaaaaatccaggttgccaaaaaaatggccaaaatggcctggacctgaacctggatccatgacaaaggtcgaactctagtgataacttaactgaaaaacggacatactgacaacttcgtctgaaattttaaaacaaatcctttcccttaaaactttttgtagattatttaatggcagaagaagcaattattaggaaattggtcgccgatggggatggcactggggatgaccggcgaattgtccaattattccaattgataattatgttgagcaaatcaaacgctgatacgaaaaggttggctatattcaattcaaaatttatgctctttattcctctaatttagtattactaacaaaattctaatcaacttggaccaaattgaactttctttccaaaaacaagcacagatttccgccataaccgaaattgaaattgcaaattatgaacaactttgcaccgaaattggttgttaattatgtcattttttataagttagttcgcaaatatcagatgaaatgatcacccaaaataacaacaaaatg

SEQ ID NO: 115500 - DNA, 260 bp, Heterodera glycines
ggtaattaagaggttacgcttaatatttgtttaaaatgaaaatttaaacatgggcggcactaatattatcgttctatgaaaattcaattgaaaattgcattgagtttccagaacaattcaagctttattaaagtttagctgcttgtaatctcaggagttacgcgaattttaatagatttcgggggacacttcgaattagtaattttgttgctatagcttatgtttattgtttagtaaagtgctgtaagagacctcaaatg

SEQ ID NO: 115501 - DNA, 540 bp, Heterodera glycines
ggcaaaatctgtttaaaaactatctaaaatttcaaaaaaaaatttcggctgcgcctatcggcactgccggaccctaaatccttgattttcttaaaaaaatcgtccagaatcgtaaaattagacaaaacaattctttaggcaaaatctgttaacaaattgcactcaaattttcaaaattttccccgacgctgcctatcggcaacgccggacccactccctcgcccatttcccaaaagtttttttaggggaaaagtgccgcaaaaaattcataaaaatctgattttttgagcccgattccacttaaatatattatttgcttatttcctccccaaaattgttaaaatcgataatgggaggcgaaaaataattgatacatttttgataggataaattgtaaatcgcgaatgttttggttttcgaccccaaatttcactcactgactgttacatgttttttaccgtttgcgtgtttttcaatttttattcgcttaacaattgcctaacgattgcatcttctttcttcttttaagccaaaaagatg

SEQ ID NO: 115502 - DNA, 440 bp, Heterodera glycines
atatggtctacaaagctcaaaaatgtccaagatatggagcaaaatatggtataaaatctaccaatatatatctttgtagctataaaaaattttgtaaatgagtatttagtcaatatttgcttaaacagtcttaaaaatacaataaaatctgctaaaaatggatttagccttaataatggcagtttatttaatctagcaaaaatatcgaaatatggatttatttccgaaaacccccaaaatatggatttatatggacaaaaaactttcaccagatcaaaaaattttaatgtagaaatgctatttttgagctcctttcttcatagtatatgtgcagaaaatatgtaaatccatataattataaaccctatttattacctaaaccaaaggcaccaacaaaataaataaagcgtggaaaagaacaaaaaaccgctcccaaaatg

SEQ ID NO: 115503 - DNA, 719 bp, Heterodera glycines
aggaacagttcaaattcgtgtttagctgtgttgcggaagagatctcttcacgcattaagggccttcaacagcagcaacattaaaagacatggccaaaaggagggaagaaataaaagggggagggaaccaaataaatgaccaccccgtcccctttccccgtttattgtctcaatttcacacaatggttctcttaatccgttgaagaagcgccattaacaaagccgtttgaataaaaagacatcgctaaagcccccatatagcgccataacacccacaaaatccaatctcaacatcaaattccccgtgatgatttatttaatgaattccgatggttggttgattaattgatcattcttaatgtgtttgaaatgaataaaggtgtcatgttgcaactgtgttcattttcttctaacaatgcttttcctctccaatatcggtttttgaatcggttattgcaacaaagggaaaattttcatattttgaatgaaaattttgtaatgaaaaatgttaaatttaaaattttttcgcaatttggcataatgttcttagaattttcaaaaaatgcggatctcacggaatcacgcacaaacacaaattttcgcatcccgtgcgtgaatgtatgtaatcagatttttttgcggcatgggaccccgcgggattaatcccgcaaaatccgcaatttcaaaaacaaactaaaaatttttcccatttttgaaatg

SEQ ID NO: 115504 - DNA, 74 bp, Heterodera glycines
aaagcaaattgatggcttatttcgatttttttaaagaaaatcctcaggcacctaattatttgtatcctgaaatg

SEQ ID NO: 115505 - DNA, 254 bp, Heterodera glycines
tcaaaaatcggcatatcgtacatggcgtatatctttgcacagatcacaacatgacgggttaaacactcattttctttagctaatagatatcgaacaaaaactcgaaattcatttttttaattcggttttcaaatttatgtaaggattcggaattggttgctcaggttaaatacaacaatttcagattgcgccataatttattgtatgtatcagtttctttaaaatttgagaattaataattttgtgttcaaatg

SEQ ID NO: 115506 - DNA, 309 bp, Heterodera glycines
tttaaaatttttgattggtcttcttaagtctgttctacttacgggtttctcttcgcatttccgatgcttctcttttcgatgctttcttagaaagaattggtactcaactgaaagctcttttattggaaacagtcgatggaaaggtgccgtttaacttttgtctgtgtcgtttcacaatttttaggtttcagattctcaaaattattgccaaacattgtccaaatttagaacatatttcctttgacttcttcccgtgctctaattcatttcgagttggtgatttactacgatttatgggttgaaactatg

SEQ ID NO: 115507 - DNA, 330 bp, Heterodera glycines
ataactcagtctgttgataagccattttgttatcattcgtaatggactccccgagaataaatgagcgtgaactcaaatttcccattccctccgggattgttgtcagcgggccctcctcttcgggtaagacgcagttggtccttcgcctgttggggcatgcccgcgagatgtttgatcccccgtcgaaagtgataggtaagtccccaatgccatgagtaatgagcagtccccttgggtttagtttgggcttacggtgagtactcctcgcagatccccgagctcgagaggcagggcgtagtcccgcacgctggtcctccctccgaagaaatg

SEQ ID NO: 115508 - DNA, 241 bp, Heterodera glycines; identical to SEQ ID NO: 108708

SEQ ID NO: 115509 - DNA, 67 bp, Heterodera glycines
tttggtaggtcattcagttcgctggccttttcgtcgtcacttttgccctccctcccttcagcagatg

SEQ ID NO: 115510 - DNA, 69 bp, Heterodera glycines
atttagggctaattgtcgcctgtgactcgattttcgccaatttatctgatcgattatcttttgatcatg

SEQ ID NO: 115511 - DNA, 66 bp, Heterodera glycines
aaaggcgccgatttagtgtatttctctcacatttgttacattcgctgttcaccagtaataaaaatg

SEQ ID NO: 115512 - DNA, 259 bp, Heterodera glycines
aatgaatgtgcattttggacacattcaatgggttgccactgactgaatccaataactttgcagattgtcagtcatttacgaattttattaatctctccaatggcgttcattctcctttttctccgacatttataaacacgtggataaattaatgaatgcgcactttttgacgaacaaaagctttgctaatttgaccgaaatcatttttgcttttgattgcccatttcccatttggtttcattaaaattaaatttaaatg

SEQ ID NO: 115513 - DNA, 192 bp, Heterodera glycines
gagtaaacagcactccccccgatccgggtacagaccccgaaaggctgccctcaagaccgagctcacgcaagctactccgagcatctcagcgccactccgcctgcaaatgccccattcgccactgaacagaaggacagcaaacccccagtctggaggctagcaggccaacgtacagcaacaaacgggtgaatg

SEQ ID NO: 115514 - DNA, 95 bp, Heterodera glycines
  unsure (1)..(95): unsure at all n locations
gaaaaatgaaattaatgtgagacaaaagcgattttgtaattannnattcaggaattcnatgaaaagttgccaaattgggaacgggaattgaaatg

SEQ ID NO: 115515 - DNA, 298 bp, Heterodera glycines
aagaggtgcacttttaggctgcttgaaatcattgcgttttaatttcgacattcccttctcctgctaattcccccctcctccctttttccgttttagtgccgtccctctccccctccttcggcacattccgtcgttcctttgccctccccgtcgacgacccccgtaaagccaattttggcacgaaaattggacccgtgctgctcgccgtcctcgttgtccgtctccgccaccgttgctcctaattcggtggctgactttcgtcggcggataaacactgtcacaaacatttgcgaagatg

SEQ ID NO: 115516 - DNA, 75 bp, Heterodera glycines
atcttttgtaataaaaaatagccctataatctaacaacaacaaaaaaagtttagtatcccgaacatttctatatg

SEQ ID NO: 115517 - DNA, 479 bp, Heterodera glycines
tttgttcttttgtatttaaaaagttattttgtttttggtatctttccataaagtataaataaagttttattttatttattattcattctctaataaaaatgtctgaagaaaaaataaaaaaacaaagaggacggcctcctaaagaaaaaattacaataaaaaatgaaaataattatgatgtagaaaaaacaaaaaaaacagaaacaataaaaccaagggttgaaatcagagggacaaaaatcatattatgtataaaccaagctgaaaataagacaattaaaaaaataaaactaccacctatctatataaaattctaaaattaaaaaataaatgaaaagtattttgaaaaggatacctcccgaaaggaagagatttttaaattatataaaataataaaaaatcccgaattactaaaagtacctaggcacaataaataaaaatataaaagaaatccgacaaaaaataaataaaataaaatg

SEQ ID NO: 115518 - DNA, 663 bp, Heterodera glycines
ttctccatgattctgcttgaaattaatttccgtcccatcatttgaattgctgaacagtgtttgaattgtaacattagtggactatgaatagagaatagggatgaataaatttattggaaaaaatgaacgaaatttaacaatgttaaaaaccccaaaaaggaaaagaatcaatcgattttaatcaaatttaaattttcagtcaaataaaccacccgcaaaacaacggttgtcattcgctcgttgttggcccttaagcaagccaagataaaaaaatgattgcaaaaattaagcagaaccattggagaaaaaattaagttgaatggaaatatattatgtatagatttttgaaattattaatattaatttaaaaaaatattgctttaaaattaaatatttttactttaaaatatttaaatttaaatatttttattcacactaattgtaagaatattttcggttcgcccacactgagaccattttcggttcgtctcagcacgctctccttacactgcaatattgaggacttttttgacagattttatcaaaaaatgctttaaatttttaaacgtaaatattttttttccacgcagctaaggcaatgggttgagctgtcgttggatgagcaggtgccgccctcactggttgttgttgacccgtgccatg

SEQ ID NO: 115519 - DNA, 373 bp, Heterodera glycines
ttttggtgcgatgttgttgagaatggcgctgttgttgaacgtgagcaactgtcggttttctgtaaaatgaaaaataaaataaaatcagaaaaattgcaaaaaacaaaacaaaaaaacatgcctcagaaattacgcgtgcacacaattggtggcgatggaaaaatgaatgtgaataatgaagcagggaatgagaattcgtagaaattcctttcctctttatatacacattagtttttgctggcgataatgagacaaaaattgcatataaataagcgaaatattcgctaaattttcattcccccattatttcttcaacaacaattaatctacttgccgcacaattcttcaagcacaagtgagcagcaaccaaatg

SEQ ID NO: 115520 - DNA, 566 bp, Heterodera glycines
agacaaaaacttttttctaccatatattttcttttttcgaattgcgtctaaatatttccgaatgtttaatttttttagcgttctgaagcaaccaaatgcggataaagcgttgtctcgtttggccactattcaattggacattgccctccaggagaagtcgttggaccaatattttggccttttgcgtcaaaatcggtttgatgagaacacatcggtggccgaattggaacgcattgtcaaatactttcaggtgtcccattggatatgcacagatgaaaacagattcctttgtctttagcgtcttttctccgccaatttgagcactgagtcgtacaatgcgcgagatgacctgcggaacatattggtccaagtgaaggagggactcggctgggcccaattcaacactcaacgacttcgaaactttctcgttacaccacaggcaaatgcactgataaattttttcccaattttgcttttgtaaattctgacattggcagacttccgattcgacgagttcgggtacttcgtcggaattggttgcctcgacaattcattcgtctctgatg

SEQ ID NO: 115521 - DNA, 104 bp, Heterodera glycines; identical to SEQ ID NO: 98209

SEQ ID NO: 115522 - DNA, 150 bp, Heterodera glycines
cgttggacactttttcaacaaaatattatttttattttggaaaaattttataattttttgtcaatcctattttactaacaattgcttcgactcaattttatagtgaccatttgaattattagtttaaaaattgcagcatttgtctgtatg

SEQ ID NO: 115523 - DNA, 65 bp, Heterodera glycines
aattatttattttaatattttatcttttacagatttattttagcttaatttttcttcctaaaatg

SEQ ID NO: 115524 - DNA, 117 bp, Heterodera glycines
gcaaacagtgcgtttgtcaacacattatgcggccttaattttattgtttagactgttaagcgtgaattgaacaacatatttaataagcctaaccctgagcaccacatttttggcatg

SEQ ID NO: 115525 - DNA, 1003 bp, Heterodera glycines
ggttctctctttctctctctctcctctttctttttattcttcgttctctctccctctccccactctctctattcctcgtttctctctctccctccccattctctctatcccccttctctctctattctcccaattttctctctctccctccccactctctctattcccagttctctctctctgtccctcctctttctctccatccttcgttctctctccctccgtccactctctccatccccgtttctctctctccctccccattctctctatcccccttgtctctctattctctcaattttctctctctccgtccccactctctctattcccagttctctctctctgtccctcctctttctctccatccttcgttctctctccctccgtccactctctccatccccgtttctctctctccctccccattctctctatcccccttgtctctctattctctcaattttctctctctccgtccccactctctctattcccagttctctctctctgtccctcctctttctctccatccttcgttctctctccctccgtccactctctccatccccgtttctctctctccctccccattctctctatcccccttctctctctattctctcaattttctctctctccctccccactctctctattcccagttctctctctctccctccccactctctctattctcccagttttctctctctctctctctctctgttctctcacattcactctcttttccactctcttctcagctgctcgctctggcttctgctctttgtcatccgcagctgaattggcctgtcaggcgttgaactgcgctttcggttccgagggattgtgcaaattcaaaaccctttttctcgctgccggcgatgttccgtttgtggtgcctccgtccggcgaaggtttttcgggccttagatttggtgggcaattaattagttgctaattatgtcaaggaattgttgcgcgtttctcccgcggaatg

SEQ ID NO: 115526 - DNA, 167 bp, Heterodera glycines
ttgctgccccagcgcttctttcggaagaagagatgaagggttttccgtctgttgcggttgaaaatttctccacttccgaaaaaggaaccatcaaaaaattaactgatgatttcacaatcgagtttaaccactcctccgttgccattacatcgcaactcgaaagcatg

SEQ ID NO: 115527 - DNA, 123 bp, Heterodera glycines
ttcactcatttatgtaaaaaatattattaagtaatttattatattaaaaaaatagaaatttagcattaagaatcttcaaggaattgtaattaaaaagttgttaatattttactcataattatg

SEQ ID NO: 115528 - DNA, 71 bp, Heterodera glycines
tttttatgacattataaagaatccataaatcctttcttcccctccccacgccatttcagctcgggccgatg

SEQ ID NO: 115529 - DNA, 1003 bp, Heterodera glycines
cctgatgagcagcacaccgccacccatgaagcacaagacaacagggcatctgaaatgtctagaatcttagcaaaataatatgagaaacctcatggtctaaaatacaaattgaaattgctgccaggataaacggagctcattaactagaactaccgccctggttaacagcaaacgtggaataattgtcaaaatgtaaccaatcttggcctgaagagcagcgcaccgccacccatggagcacaagacgacagggcatctgaaatgtctcgtgagattagtaatgtatgaataatcacctcaagacctaaaaacaaaataattttgttgccaggataaacagagttcattaactagaactaccgccctggttaacaacaaaacaaaaaaaaacaattaaaaacaatatagaagcatgaaaaaatgaaggaaagtgtgtgacgcatccttttatatgcggcccgtcctcaaatataggtcaagtgttactatttatagaatatatatacaagccatatttgaatttcccgccaattttttgaatttgaatttcccgccatttttttaaatttgaatttagtgccaaaatgttttcgtttcaataaatttaagtgtattatatcatctttgcagcatatagtggacaattatcctttttctggcaagtggtctcgtggcagagtggtagtgtgttgggtttggtggcagagcaaaagttcgaatccgcttgcctgcgacttatttattgcgattttccctgggctaccgtacctctcgcagtggtgacgtcatcatctttacagcatatagtggacaattatccttttttggcaagtggtctcatggcagagtggtagtgtgttggtttggtggcagaccaaaagttcgtgtccggttgcctgcggcagaatttttcgaataaaaatttgaaaaaaaaataaaaattattatttaaaaataaaaaaataataataaataattttcagaaaaaattttacaaaaaaatg

SEQ ID NO: 115530 - DNA, 65 bp, Heterodera glycines
taaaagaaattaattatttatttattttttattactacgtttcagagtataaaaatatactaatg

SEQ ID NO: 115531 - DNA, 59 bp, Heterodera glycines
tttaaaatttggatttgacacagtttaatttctgtaatctttttttggtgttaatgatg

SEQ ID NO: 115532 - DNA, 176 bp, Heterodera glycines
aaaaataaaaatgaaattgagcaaacattgggcaatctcatcgaatttataaagaaaaatgaaacattttgtgaggtgaaatatttggaaatggcaaaaaaagaattggaagccgtgaaaaaggaaaagacggggcggtgataagaatcaagcagattttgaaaaatcgcataatg

SEQ ID NO: 115533 - DNA, 304 bp, Heterodera glycines
tgttgtcgtcttcctaattaaaaatgattagacaaattaattaccctgattaataagcttactgatgcaattgcattgaaaagtgaaataaaaattgatgtataataataatatgaaaaaagataatagaaaaagaataaaacattatgtttttctttaataatggtcaaaattcaattatttacataaaaagtaaattaaaaatatttatatgaagaaattaagcaatattttgcttataaagataaatatgaatatataaataattaattaattttttaagaaaaaattatattgtcaaatg

SEQ ID NO: 115534 - DNA, 116 bp, Heterodera glycines
gttaataaaagcttaactgtcaaaacattaaaagtaattttaaaaaattaacaaattatttgaatgtaattttttttttgcatatccgctcgtacgaaaacggcggtacgaaaatg

SEQ ID NO: 115535 - DNA, 345 bp, Heterodera glycines
ttcattatacctatattctccttaacgaaacacctcaacaacttttggaaaccaaacattcgttcattcattcatcggtcagtttttgcatgcttttctcctttatttcgctcaaatgttttgtttatgcgttctttttgagacaactcaaagccttaaactgaaaatgctgacaaaaaggaggttctaataatttcagcaaaatgcctttttttgttgttatttttggatgcataaataaaaattgtttgctgtctggacgcataaacttcagtagagcaagcacttaatttcatcatttctttaataaaagctaaatccctttaaacatttcagttcataatg

SEQ ID NO: 115536 - DNA, 1003 bp, Heterodera glycines
ttattttaattaccctaaattttgaaatttttcttagtgaaaataagtgaaaacagtcaattcaaggattgggagggtatcattaaaaactgaacaatgttggaactgggctcccagtatgcctaaattttcgattttagaggccctgtaaaactccttggggttttgctagggtgaaaaataataaaaattaaaaaagcataaactaatattcaataacaaataagtttttaaaaaatgaaattgagaagcaaatgtttgggtcaaaataatctcaaaatgttgtataatctgcttaataaaatccaaaatgattagatttcactattaatgggccatttatttatttgtgaaatgattttaaaaaaataaattggttttctaattaaaataaactataaaacattacaaaactcaactgatcaccaaaaaataatatttattcatttaaaaataagtatattttcaatgccttacaaagatttgcattcgaatcagaacaaatttaaaattcatgacatttttatattttcaataaatcaaattttcacataataaaatcaatggaaaaaattttgtttacttttctttatttaaaaaaaacatgccaagccaaatacaatacaatgatttataaaatataagaattgaccagtttttaaaacataaataattttataagaaaatttatccatttttttcaaaaaatatttttttgctttcctccaaggcgcgtctggccaccaaacacttttcgaagaaacattccaaagccttcttttgatcttcatccgttgggtactgtccggtcgccacaaaatctccctttttggccacaaataagcgaatttcttcttttggctcgccttcaattattacgcaattagggacaattgcaaaaataggcggtgaaggagggataatgaaatctgatatcccgggaattttggctccggaaatcaataaaatggagaaacgcaaaaattgcccctttgcagtgatg

SEQ ID NO: 115537 - DNA, 128 bp, Heterodera glycines
agactatacaaccggtggcagtaaaagcggacgggaaagtaggcgcaaatcgtaggctttttaaaaatacgcatcattagcccaacggaaaggccccaccaaaattggcacaaccgatcacttcgatg

SEQ ID NO: 115538 - DNA, 279 bp, Heterodera glycines
aatttaaaaatgtattttttacttcgaaatttaagcgaattgaacaatacgtttaataaatatgcgataaaaacataaacaatattgccacttcatgacttaaaattcattttatttcaagtgttctaagtatatttgttacagctccagcaattcttcaagaatttaaaaatttaagactttattaataggttttgttcaaaaatggcccagttttgttggaggctttgcacaaatttttgaatttaagtgaattttaatagaatttttactcaaatg

SEQ ID NO: 115539 - DNA, 488 bp, Heterodera glycines
attctgatcggattggttcctcttgcttggacttggaagattctgatcactatagattgattctgactgatcactttcatgtaattggctttctaaatttaccgatcacatcacagcagattgatcagcgcatttataattgatccatgggccgaaatttttgaaattttatggtcagaggttcggagattagccccgcccctggatattgattgattagttactagaaatgtcctgatcaacgcatgtaactgatacatggtccgagaattttgaaatcttgtggtcggagttcgggattatcccccccctggatattaactgattagctaatataattgtagaacataatccgaagttttgattccatctgctgctgatcttgttctatataatagcattttgtgctctgacactatcctctcccttcgatcatacaaatgtgcgcttgattcattgatcccttttttctctgatcagatggcatg

SEQ ID NO: 115540 - DNA, 766 bp, Heterodera glycines
tctgtaaaaaaaactttattttatttttaaggattagtcagatataagaaaattaattgaaaaaatttaaaaataaaaaacgaaatttataagtgaaccgaagcatagaaaatcgatcaaaagataagtaaaccaacgaaggcggtcaaaactgcaaaaaaaagctttaaaaaattctcaaaaaccaaatgaaggcattatgagaaatataaaaaaaaagtgaaaatcaaaaatttcaaattaaaaaatttcaccgaaattaatttgtacttatgagcttaatgacaattaattaacagaattttgaattttaaaacttttcggctttaatgcaaaaatcgccaaaatttattgtattttcaagaataattaacttaaaaattgaaaaaggaattaattaattatctttaggaattttttgattaattttaattttttggttgcaaataattatgtctttttcaacttttttttttgtccattaaagcaaaaaaaggaattttaaatactttctttggcataaaaagagaaatacattttacggcatacatacttatgtctagggatgcaatttatagttgctaaaaactgccatccccaaaataggtgctaaaaatggcaaaataggtgccaaaaatttcaaattagtggtgttaaatcgtaaaattttatccaaaaatggaaacattgccaaaaaaatttcaaaattattttataattttcatttaaccgttcaaatttggcgttttgctttaaggacgaaatg

SEQ ID NO: 115541 - DNA, 77 bp, Heterodera glycines
tcattctgtcgcccgcggcaccgatgccgtgatttctgtcgccctatgtgcttagtccgtacattttgtcaccaatg

SEQ ID NO: 115542 - DNA, 258 bp, Heterodera glycines
aaatgtttaaaagtccaagtcatactcaaaaaaaaactactcatttaagaatttgtaaatggaactaaaaattacgcaaagcgagtacaattccatttgatataaattattattttaacaggaattaaggtcattaatgggtaattaattaggtattaatgggtgctttcctttcagtgcaattccaagacaaagttcaaaaatgggcgcgaggaggcgctgtccaaagtgacgcgcgagcagcagcgacgcgcaatg

SEQ ID NO: 115543 - DNA, 699 bp, Heterodera glycines
atggatgagttggtgaattggcggatggaggcaaagaattggccaaaatggcgtaaaaagatgatgttggcatcgttactataatgctaatttttattgtttgctctagtatttttatggttggaattaaagaagagaaacagtgtgtttttacattttatatcggttgtttgaatggaaattctgggcgaatgcattttcatattccttaagttggttcccatttttagattttattctcagagtccttttaaaacaacaataacagatcctgtaaatgtcttctttttttgtcacctttgacacagcgtttcaatttttgctttcaagttccaaaaaaagatttgcatgtgtgcggaattctttttgtaagatagtagtaaagggacaaagagcggccgttgcgcaatattaattttttttttttgtccaaaacattaaaaaagtgtacgccaaaataagaaatgtatttttctcctctgcactctcttacaattagtgctttttagaaaccaaaaatttagggttgttgaaataaacaaattagcacacaataaataaggtttgtcagttgattgaattcataaaatgcaacagaaacactcgtgttgttagtttctttccacactcaatctttaagcttctggaactgctttatacgtatttatattcgacattgcgatttgcagactccaaatg

SEQ ID NO: 115544 - DNA, 131 bp, Heterodera glycines
ttatatttttagagaaaactggcaactcaaatatttctatcaaaataaaaaatttatttttaaactaaaaatactcaccattaattatcataaaaaattaaattaattttcaggacatttatcgcatgatg

SEQ ID NO: 115545 - DNA, 762 bp, Heterodera glycines
ttgagtgaagttgttgtcagaatgcaatggcatcgccaaggaggtcagaggagagtgctcaatgttcgtgccctcccccccccccccccaatcatccgaggagcaggggacacaaacatttggggaaaattcgggcttctttaaggtttgagaaatcggaaatttatcccagttttgggcgtagtgcctgatttttgcccattttttgaattttacgcccggtcttttgcttttttttaaatttttacctgaatttgaattcgtatgcccagttttgggttttaccgatagaaaccctggaagaagccttgcaatatatgcacttcttcaggtattgcaaaattgtccaaagacaccaatgaaatttcggcttatgaaatatgcaaatttaaaagcaataattttagaaaaatttttgtgtcattggaattgtatatttatgtggcgatataatcagagttgttttgtgaccagcagaaaacagttagcaaagaattgcatgaaacaaataattggctccaatttacaaaaaagtaacagataattaagacagattaaataaaatatgacgagcttcatgcttgagcgatcactataatttgtaagggaagaatttgggtggactaaaaatttgtagaaatcaatagcagaagattttttgtgattttcagaatgtttttgaactgcgcagaaaatacgtttacataatttaccaatttacaaccaaaaatgttttaataaattcatctttttagcctgatg

SEQ ID NO: 115546 - DNA, 326 bp, Heterodera glycines
ttctggaaaaattcgaattttcagaaaaaaattaagaactgggatcaaaattagcagcaaaataattttagggatattttagggtcatatacgaatctgaaatcaggtttcgttttgtcatcgttaagtcccagaaaccgggcgtgtctggaacaagccctccttatggggcctttaattggaggggtctattgttcaacccctccaaaaaggtagcctttaattggggggagcagagcttcaaatagcggattcacggtattttttcttcgaattccacctaactattaattattttatttaaataatatattttttagtttatg

SEQ ID NO: 115547 - DNA, 110 bp, Heterodera glycines; identical to SEQ ID NO: 98226

SEQ ID NO: 115548 - DNA, 139 bp, Heterodera glycines
agcatttattacactgacaactgattgttggagcggaagcacttgcaaccttctgtggtacattattactttgtttattaatcatcatgggttttactgcagcctaaccgcgcactcaatttctaaatggaagtctatg

SEQ ID NO: 115549 - DNA, 290 bp, Heterodera glycines
tcatccagaacctggatgtggcgcgagggacggacgtcacaacattgtcggtctgttttcgctcacattctgctctcgtccgctgcacggaggccggtttttacaaaccgcacggcgagcagttgacacctggacgcgacgactccgagcgggcgctcatgaccgaccaaacggcattcaaattgccgaaaaagggagtccccctcattttagtccatcagaacacgcctgcgcaacgcgatgaagtgtccacctcttcggccaatccgggccaaaccgacacagcgatg

SEQ ID NO: 115550 - DNA, 511 bp, Heterodera glycines
ttcattgggtcatttttgtgcttcatccccaaagtggtgtctacgttgtgcagggcccactcttcaccgcactttatctcagcgctgcgctggcgcaggtgttttttgcgccgacaaaaaaaacaataataacgccaaattttcggaaatttcaatttttgggggtaggtttttaacaatatttgtatccctttttgatccacccacatacacatcttcctactcccatgcattgtcaagaaacatgggactttaaagtagagagggggggtagggggattttaaaacaaattttcctttaaaatttaccaaattttatgtcggcgcctctctactgtcgggggcacaccatttggccctcaattttccaacattttttttttttttgaaaaatagctcggcaaacattttaaaattttcgcttggcctataacaaaaaaaaaaggatcagctctggaaagaaataagggtaaaaaaataatacttttatattgcaataaatatataaatg

SEQ ID NO: 115551 - DNA, 323 bp, Heterodera glycines
caaaggaagaagcaaatgcagaaaagcaaaggcaacccctactagggggaggaggagcacttgtatactctgtccggtacttactttttacatttccacgggggtccaatttatattgcaaaaaattcataaaatgaaaactttcaccgaagtattattttttttggttgatttggggcaaaaattgtccaaaaatacatcattaatattaattatttaaatggagtaaaattgtaatttttcgttttccaacagcagcagcagcactacagccaacaacaatagcatcagcaaaaaacccccgaacaaaaagaagcaaaatg

SEQ ID NO: 115552 - DNA, 1003 bp, Heterodera glycines
ttttaaatttgagaaaacagaacgccaagaatttaaataatttttaaatttaaaaaacagaacgccaagattttaaatttaaaaaacagaacgccaaaattttaaataatttttaaatttgaaaaaacagaacgccataatttaattttgaaaaaaaagaatgccaagaatttaaatattttttaaatgagaaaatggggaaaacaaatgcaagaaattggcaagaaataaatagggaaatttggcacaaaaatgtgcaaaaatttggtaagaaataaataggaaaatttggcacaaaaatgtgtaaaaattggcaaaagatagtgttaaaaattgtggcaaaataatgccaaaaattggcaagaaataaataggaaaatttggcacaaaaatgtgcaaaaatttggtaagaaataaatagggaaatttggcacaaaaatgtgtaaaaattggcaaaatccaggtttaaaaatttgggcaaaacaataccaaaaattggcaagaaataaattgggaaataagggggcaaaacaatgccaaaaaattgcggcaaaatggcacaaaaaacgttaccataataatgccaatctggcacataaataataaatggcaaaaagtaatgggtaaatgggtaaacaaatgccaaagaaggaaaaaattaaggcataaataaatgataagggattattgattggcttttccttccgtaaagtgaattaaattaaatgaaaatgaccaaatggacaaaaaatgagttagaccataaatttcgacttttatataccttcccccatcccatgcccattaccccgtctttattcactacaggtattttctccatattataaaatggtccctcatgtttgtcgtttgagtgatggaccaagccaactaaaagtaggacattgctcgagaacggaaaacattatgtatgatatcactccagcgtcattcttatttgtttttcctctcttttctacctttttttcttaatttagcaatg

SEQ ID NO: 115553 - DNA, 210 bp, Heterodera glycines
aaatgcattttcatattttttgcagccctgttaattactttttactgtcattttaatttgtcagattgaagaacgcgcaattgccgaatttgttatgggtcagtcaaattttgaagaattttggaatgaattgaaaaacgatgatgtaatgcaaaggaacaattggcgtaaattaagtttcgacgaaatcaagaaaattatgcgcaaatg

SEQ ID NO: 115554 - DNA, 545 bp, Heterodera glycines
  unsure (1)..(545): unsure at all n locations
taattgtctttcgatgttttattccgattcttcttctgtctctcctttcattttcacatgtgtagaatctttcaaattgtctaaatgcttctttcncagattccaagccgattttgataattaattttacaaaataactcgtatttttgctattccatgggaaccagtcaaagaaagaacatttgggggagcggagggcgaaatgacgagtgagtaattaatggagttattgggcagggcgcggaaaggataaattgggaggggtgagagcatccgtagaaggcggagattccctgtgattagtcgaccgattcccgtgtttttgcgaaagaaaataacttgctgcgccttgtgattgaacttgacatttcttcgttttccacaatgtgtggcattttgagtgggggattaattaacggaaaggacacggcttttccctttttctaagccgctccataaaaaacacccaaatacaaaaattgttcccaattccgcctgtctccgattagttttctttttctgtcaccgccctttttcagcggatg

SEQ ID NO: 115555 - DNA, 196 bp, Heterodera glycines
aatcgagggcaaaatgcgaaagggagcaaaagttgcgcgggcagaaatacgggagttacagcggcgactacaactcggcagaagagctcgagcaatggcccaggcatggcagcatcccgaacggggccatggggccaggacgggagtagcggcggcttcacttctccctcttctgatcgtcttcggcaccacaatg

SEQ ID NO: 115556 - DNA, 188 bp, Heterodera glycines
gtgcgggactgagtgaaagtgccatctgcaaaaaaagtgccatcagtaggtccgtgagttgtgccattaccaaaaagtgtgttgccaaaagtgtaaagcatttacaggtcagagtgcgagagacgtgcgtgactgagtgaaaattttgccattgccgaaaagagtgagagcatttctccgtcaaaatg

SEQ ID NO: 115557 - DNA, 1003 bp, Heterodera glycines
atttaaaaagtcgcttaatttccaaactattttataaaaaaagctcctgcacacaccgaattaattctaggctcccagttcaaaagagatttgcatgtgtgacgaatttgtttttgtaagatagcaaagggataaagggcggcggttagagtccgttgtgaaacatgtatttttatttattttttgaccaaacagttaaaaaatcacggttttcaaaaattatttttgaaagtttttgccaatcaaattggacaacttggtatcagtcgaaaagaagcttttttaagcaaatattaagcttttttacatataaaagtaaattcagttattctctaataatagagataaagaaatagtaccccaaaatgagagatgtatttttctctgcactctctatttattggttcatttctcgttttttgtgcatacactaaaacttaacaggctgcaagacgccaaatttttcagtttatgccaattttagcctattttgaaagtgtttaagaccgcgggttctttatcgggcccaaaagtatcagaatccatgggaaaatatcccccggctaaagttagttttgaaatgtccaaattatgaccaatttattactaagaatttattaataaaaataaatttaaattctgacataattaaaaagaaaatggttatttaaatgccgtttttttgccattttttaattataaatatacttattacttttgttaatttatttttgtccctttttctaccaaattatcgacttaattagaattttccagctggcctattgtgtgtatatgtttttctataaatattaaagcgtaattgacctgaatcactttgttgtgatgccagaaggaacggagtgtgggagaaagtgggataaaggacctgagagaacctctaaaagaggcgcccgtagctcagttggttagagcacggcacggattgctggggtcgtgggttcgagtcccaccgggcgagttaccttttatgttctacatg

SEQ ID NO: 115558 - DNA, 792 bp, Heterodera glycines
agttttgggattgacaggcataaatgtcaccagggaaattcttgcgcaaaaaagaatttcgacattctctttagcactatttttatatttggtaataaattgaaatttgctaacaatcaatatgagtgatttttgaatggtaaaaaaataatatgaattttcataaatcccttgccccctcctttggaagtgaatttaagtttttaagaaaataacgcaaccatctttaggcaaacgaattgcacaaagtgagcgcactattgttaggtcaaaatggactgatgttcaccaatgcaaaagcaaaaaaagtgcaaaggtcggcggtgaataattccaattttttcgtacatttatttcttttcgtttttggcggggctcagccgtggagtttggcaaatttgcacaagaagaacaggtaggagagtgataccaacccataaacagtgacgtttacgagccatggcaaaacgcccaatttcacccaaccccggacacactgacaaaaagaaattcgaattttttttggggttgaacgcctcataatttgggagtcaattttatgcagccaatatgacttttctatttgcagtttttttgggttttttaactgacaatgagatatggacatttgaaatgagacaaatgccagaaaaaaggaatgatttttgaatgataaaaaaaaataatagtaattttcataaatttcctttcccccccttccccttccaatgtaaatttaatttttttttaaaataacacgtcccattttaggcgaacgcattgcgcaaaatg

SEQ ID NO: 115559 - DNA, 351 bp, Heterodera glycines
acttgtgtttatgcccaattttttgctttcactggaagtattaattcatttataaatctgttttggataagcgttgatcgatttgtggcattggcatttcccgttttgtaattatatcaattattattaagaaaattaaatattcaggaaattaatcaaactttctttaagttttcgtaacatatcaagattttccggaaaatatgtgctaattgccaatgtcttttccttgtcaattgcattttatattatttatttgtcgtttttatttgctctacaaaatcccgaaatgtaattattaataattgattaattgactaattaataataattttaccaattgaaaggatg

SEQ ID NO: 115560 - DNA, 285 bp, Heterodera glycines
ttttttgggtcaccgtttgcccaacaccaaaaggcaacaatttaaataaataaaagatgaaaacggcagaaaattatgagttattcaaatatttattattcctatcttttgccgtcgcattttctccatttttgggtcatcgttttgcccataaatttatttactttttggcctataaatatgtgcacaattacagcggctatagcagaatttagccttcatttgctcatatttttctaaatttattaaataaattaaaataaatttttagttaaaattaaaatg

SEQ ID NO: 115561 - DNA, 179 bp, Heterodera glycines
ggtacagcgaatttcaactgtctacgcaattctaaaatgcaatttcaggcaacaaattttgcgttttggtggctgtagggcaaaaggttacgcctctaatctatcgactcgaccacggaaaaccaacgccacaactcattggcaagatcgaaccggccaacggactgaacacggcgatg

SEQ ID NO: 115562 - DNA, 67 bp, Heterodera glycines
atgcttcattgacacgatcagatgtgagcagaaggcgattgatcaggaaatttcgcggtgtgtcatg

SEQ ID NO: 115563 - DNA, 237 bp, Heterodera glycines
aaatggaaatttttggacaaattttttttttaatttgctcaaaaaggatcacaaatttttgtttttgatatcattcaaattagtttgttaaaaaatcgaaaaatttcgttattccaaaaagttagatggccaaaaaaacgttcgatttttttttttttttttgagttttcctggtcatatatatttttttgaaatttaataaaaatcaaaaaatttaaatcgaattttgtcgaaatg

SEQ ID NO: 115564 - DNA, 856 bp, Heterodera glycines
ttttatcgtcaatatccgggaccgattaagtcctcaacgcagcggccgtttttgtttccgggaccgaggccgatttggcgaacaaaaaagccgaaacagtcgcttccgggattagaatcgggtccgagatcagcagctcttggtaacttacatttgtgcacaaaaatgctgaatattgaaaataaaaataatttttcaaatcatcggtccaatttactgttattaataagaaaaattggcataaataattttttaaaatttttttttgatacataattgaaaaagctgtttttgtcacatggcctatagcacaaaaaacaatttggtgtttaaaaacgtaaaatcttcaaactgtcgcattgagatcaaaattaatttatacatcatgcttttttcattgatgacatttcctacttttaatcaaaaaaatatttgtaaaaatttatttattttgcttttttctcaggaaatgaacacgaacaacagcgatctgctgttctctctcaaaatgatgaatattattaagaatttattaataactttttttaattaattttttcaaaaaattaaaatttttaaatttatttaaaaggaataaataatttccatatttttaaaattatatttgatcagattacaagaagaagagagttgaacaaaaagatctagaattttttgctgcctctcgagcaccaaattatgctaatgaatttttaatttaaatttaattttgtaaaaattagttgttgacactgaacaaaatgatcaatcttttttcaatcctaatggcggcgaattagtttaattattaattatattttatttcttaataaaatatttatgttttaaagaaatg

SEQ ID NO: 115565 - DNA, 141 bp, Heterodera glycines
aattgccctccccccagaaaatttgtctgaagtggtcaattcactgcagtttgacacctgttgggcgaaaactcgggtttcctttgcctttgactattttgtattggaaaggcaacgaatttgggttcgaaaccaaaaatg

SEQ ID NO: 115566 - DNA, 327 bp, Heterodera glycines
tctgaacaatcataaataaatcagcaggcaatgtgaggtggatttaacatataataaagaaattaatagaaaaaatttttaaattcattattttttaaattaaattaaattgagttaatttaatataaattatttatataatttaattaattaatttcattataattatatttataattttaaatccttaaattttaaattaatttagttttaatttaactttagtttaggtagttcaatttttttaaatttttaaatttatttttttttataatttaaattaattaatttcgctttttgtacccaatggccactgttcgtacgatg

SEQ ID NO: 115567 - DNA, 68 bp, Heterodera glycines; identical to SEQ ID NO: 109495

SEQ ID NO: 115568 - DNA, 345 bp, Heterodera glycines
ttatgaactgaaatgtttaaagggatttagcttttattaaagaaatgatgaaattaagtgcttgctctactgaagtttatgcgtccagacagcaaacaatttttatttatgcatccaaaaataacaacaaaaaaaggcattttgctgaaattattagaacctcctttttgtcagcattttcagtttaaggctttgagttgtctcaaaaagaacgcataaacaaaacatttgagcgaaataaaggagaaaagcatgcaaaaactgaccgatgaatgaatgaacgaatgtttggtttccaaaagttgttgaggtgtttcgttaaggagaatataggtataatgaatg

SEQ ID NO: 115569 - DNA, 370 bp, Heterodera glycines
cccttaattaagtgtttttgttattgatgagaaaggtgtggggttttcagtggcaaaagccccaaaatatttaattaaataatgacaacattggcaaaaaaagcgaaaaatggcaaaaaaatggtataaaattttaaaataagaattttttttttctgtaaaatgaaattaaaattgctttaacaatttattcaccgattttaattttcaaaagaatgaacttttttttaattttgcaaaaaaaaaacctaaaaattttttttcaaggacataaaattcaaggaaacgcacaacttaacgaagaaatttttaaatcatcgaaataagtattaaaaaatattttttaataatttattatttaggggaaatg

SEQ ID NO: 115570 - DNA, 248 bp, Heterodera glycines
taacttaaaataattgattaaatttttgagattgtcaatgaagacggaagcacaaccacacggacaaaaagctcaaaagcttttaggtaaaaataaataaataaatatattaaattagataattaaattttcaaagatttttttataatttgccaagtttaaaattatttaaaatttaaattttaatccaaattaagctcacgttacacccgtcatgaaacatttgtgaatggggttcgccaagaatg

SEQ ID NO: 115571 - DNA, 544 bp, Heterodera glycines
tccctaaatttgaaactttttgacacctattttctcatttttagcaattattttgggggttttttagaacctaaaaattaactattttggcaattttagcacctaaaaatataagcccaattgatggttttgaaactcaggctgagtttatagtcaaaaattaatttgaaagtcaggatggttatttttgggttttattgtatttttaaaagatggaaaccaaatatatgtcaattaaataaaaattaaaaaatcataatccgcataacattctgtcaattattagccaatataatttgtaaaattttttttttattaccctaaagtgcactttataaaaatggatttatataaaaatcaatcaaatgcacttttcaaatattcaatcattcgttcaaaatcacattgtatctatatttttttatttaaaaaaatcgcacattattaaaaacgtaaatcataaatttttgtattattttttaaataaaataattaaattttccaacatttttaataaatttaaaattaagaaagaaaaaaaatg

SEQ ID NO: 115572 - DNA, 63 bp, Heterodera glycines
cgcaaatgaatggcgaattttcagcgaattcctttgagcgtcgatgagaaagtgtccaaaatg

SEQ ID NO: 115573 - DNA, 805 bp, Heterodera glycines
  unsure (1)..(805): unsure at all n locations
ggaataataaaaaagagtaatttgatggtttncatttaagtgtatgaaagctgctaaaaatagggcccagtaaaaagataaaaacagataaatgaatgaatgtaattcccaccgatgtatgatgggttgggtgatttgtggtgtcattgtttatttattgttttgttgtttttggcccaattatgtaacgatggtgacaacaaaacaaattattgcaaattgtgggaagaaaattcagaggccaatgagctttcagcagatgaggttcaatagcaggagacaacggaatatgaaaaaaatggaaaaaagtacgagcgaaacttttaaaaacggaaaaagggatctacctaggggtcctatagccaccatgccattagtgctgatcgagacagaaaattccccgatactcgagaccgagacgaagaccccgaggaagaaaccgagacctttctagagtcgagactcgagaccgcgagtctcgagcagcactacatgccacaattctgatgcctaccttattttcaattcggaccaagtcattgcatgaaaaattgaaacaaaaaatagagatttttgatgccaaagtccagtgcggcacgaaatttaattgtgatagaatttcaaatttgtcatgtcacaaaaaattatgtcaccaaaacgtcgaggaaaaccctaaagaagagctgctgctgctactcatatcaaatgtgaatgcatttgttttgtcactgctttttggtccattaaaagtgtcgttcttcagtggtctttgaacccttagagaagaaagaaaacaaaaaatatg

SEQ ID NO: 115574 - DNA, 152 bp, Heterodera glycines
  unsure (1)..(152): unsure at all n locations
ttttgtattaaattnaaataaatttccattttcgaaattctcgccaatttttagaaaaataaattctgtccaataagattttaaatttaaaatttataaataataaaaatgttatatagaaatacaaaaaacaaaagacaaaatttagtatg

SEQ ID NO: 115575 - DNA, 373 bp, Heterodera glycines
  unsure (1)..(373): unsure at all n locations
tgcnaaattataaatatttcgtctatcgatgttaatgaatntcatcatctttatgttttgccaccnataattttttgaatgatatccgacaanaaagagaatggcacctagtaatttaatgttatttattttttaattatatttttntaataaaaaatttaacattatagaggcataataaaataaataattggcaaaaaagatgatgatgtaattaaaggaagtcgaaatgaagcaaataagttatgttggcatcttttcaggtcatcaaattaaaggtgtataaaaggaattaaataaacacatacaaacatagattcggattttacaataatattaattcttaataattaattaaaaatctaaaaaaatg

SEQ ID NO: 115576 - DNA, 882 bp, Heterodera glycines
caaaatagtgatttctagtgacgaaaagtgacgtccaaatgaaaaaattttaacgcagaaatgcgttttttgagctcctttcttcaaaacaattgagcaaaaaaaagttttttcaataaaagttgctgccctaataatgatgatacattgtacaacattttccccccaagttgtctttctcccccatcacccatccctaccccattatcatttttaatttcatcttctctctcttttcggttgttttgctctgccgggggtatgcacaacaactgacagctttgctggagtctgtttcaattaggatcatacgtggcccacgaaaaaaaagactatccatcaacaaaaaatttttattttattaaaattaaaaacggaaaaaatttagaattgggccctccaaaaacgagttccaatcaatctataatgacctataatcaacataagaaacactcccgaggtgtggaaaaaaacgggtttttgaatcggtttaaatcacgaaaaatggaccacaaatcagccaaagaaaagattatataaaaattttcgaacaaatttgctcattggaaaacccttgacgagctaatcattacgatttacatacataataattaataacaagaagctttgccgtccctcctcacatttaaaaaaaatttttgttttcaaattctttaaaataagttccctggcttttcggagtcgctaatcatgaatgcggcatccaagtttgttttcatgatgatttaacaccaacttatgtttgttggtcgaaatttttcttatttcgaaattttttcggccctttttgattggattttttttacacattttcttgctaatttgaagggttgttttaaattattttgtttttgataaatg

SEQ ID NO: 115577 - DNA, 610 bp, Heterodera glycines
cggtttggtacatcacatattagagatgcaattcagcgtgtaggttattatggcgcaaatcggcatgggcggattcactgcatcagcaattgatcagggcataaggaggttcaagagcactggcggtccccctgcattttatgtccacatacattttcgcgcgcgtccgtgcctttctcaatttcattttcgtcattcttctgcctgatgagggggccgcataaaaactgattgtggcactaccatttttaccattcatcatttacccggcgaaatcaaataactttccattccatttgcatcataaaaaataaataatatacatatttacccccccccccccccccaattcctccaagcaacagcacttgtccatcagggaggggaacggattctggaatttttttaggagaatttcaggggactttattagaagaaatagatatttctatataagagtgttttatgttcattcatttaacgaaaagagttataatttttagtcaatttttgtatgcctcttttatacaattctaatttcaacagattttcaaccaaaaagcaatagaaattgtcgtcaattgtttaatttttgatgactaattccatg

SEQ ID NO: 115578 - DNA, 188 bp, Heterodera glycines
attaatttcaattatttcaacaataaataaatgaaatcaatttctaaaacataaattgaattcggttgggttttccttttggtcatttcaaaaataaaaccataaattcttttttttataataataatttggtttatattttttatgtgttcgacaaaagtggtcgattggtggagcattggaagatg

SEQ ID NO: 115579 - DNA, 106 bp, Heterodera glycines
ggtcagcggaggaagaagcgaacggaaaggcggcggaagcgttgtccatgccaaacattcgtcggatggagcaatgaatgaatgaacgaaatgattggaatgcatg

SEQ ID NO: 115580 - DNA, 53 bp, Heterodera glycines
gttatgcttttattcatgccggtgtcattctcattaatccaattttcagaatg

SEQ ID NO: 115581 - DNA, 537 bp, Heterodera glycines
actttaattaagacgatcaaaaaataattaaagtgaataataggcatagtttcatattaattctttgattggttcttaaatttattatattatttgggtgatgtaattccgtcacaaaaaatgtcaattcaaatttacgcaaaaagaaacataatgccaaagaaattttttattgtaaataaatgaaagaaagattatgggcgcccccacaaaatgtccaagccacgaaatgtccaagccacgaattgtccaagccacgaaatgtccaagccacgaaatgtccaagccacgtattgtccaagccacgaaatgtccaaaagagtaaaaacccacgaagtgtccaaaactcgaaaaatctattaaaagccggaaaatgggtctaaattaaggtgttaggggtcgctgaatacgaatacgacatttatataacccatttcctaaccttcgacccacccgaataagaaaaatctcaaattcggttaaaatatatgctgttttttgtcttcagattttgttattcattgatcgaacaaaatg

SEQ ID NO: 115582 - DNA, 73 bp, Heterodera glycines
catttgtttgataaattattttttcagctttttctttggaaattttgtctacctaattacccgcaaaaaaatg

SEQ ID NO: 115583 - DNA, 495 bp, Heterodera glycines
ttttttaattatttcattttttttttatttgcctgctctcgaacacttgtttcatttcgcctttacaattgtaggcaattgttccataataaaaattttctctatattcaactttcacatttatggtacgacaatttttgattgctcccgtaatgcaaccgtccaaaagtacaagaattccttaatggttttatcaatattttaatttagggttgcgtccccgaccccgccccgaccccgaaccccgacttttttgcccatttttcggggttaaccccgaccccgaccccgacgctcccaaccccgacgcaccccgaccccgacccttaaccccgactcggggtcggggttaaatatacacccctaagaatggcatttttgtgggagaaaaagcaaaaaatatatacaaattttgaattttttaaccattttgccaaatttttataaaataaagtaatttgcttttaccaattcatatgcagtagtggcgtaatg

SEQ ID NO: 115584 - DNA, 145 bp, Heterodera glycines
tttgaggatgattttgcaagaatgatttgattgtgcgagaaaatctctgcttaaatagctttcaaaagtgggcgtggcctaattttctgggagtataaaagccccggcaatttgtcagctatgtctcatttgttctgctacaatg

SEQ ID NO: 115585 - DNA, 119 bp, Heterodera glycines
ttgttttttgaattggttaataaaattcaaataaaaaaatgactgaaaaataattatccatcttcaaagttaacgatcgaattaaaaatttaaatttagcacgtcaaaaaggatgaatg

SEQ ID NO: 115586 - DNA, 86 bp, Heterodera glycines
tttttttgccatttccatttcagactctcgtcgacacgaagcaggaggcgttggaccgcgagctgaagcaaatcactgcccaaatg

SEQ ID NO: 115587 - DNA, 748 bp, Heterodera glycines
tattgacggatttctactgacggattgtccgtgggagcccatgagagtgggagggggggggggaagaaaaaaaactcactgaatttgggtttaagagtcaatttaaaatttttaatattttaatgattatttcatgtttaaagagtttttggatgcttaattaggtacctaattgctttaccgttttttgttcttaaatttcgggccttatatttaatttaaatattttttctggcgttttgtttgttgagttttcaaattgttttacgttgcgtttgcttgtttttatatttgtcgggtcgcgtcgtggagatttcggcagtgactgaattcggcaactttcgacagtaaaacagttagataaacctattatttgctcaaaaaccaggaatgaacaccgacccaaaaacgaaaataataccgatcaagaaaacaaaaaaacaacaatttttgggccttattctctcgatcagcatcaaatttggccaaatcaagttattataataaaagttttgttttttgtaattaaaccaacattgaattgttttcaaatttacagtcgaaatctaaaatttcagaaacctttaaattagggtacctaatttcgatggcattggttttttttttaaatttaattcctcgccttttaggtgtttccacctcttcagacatttgtgtcttgtaaattttgtttgttttttatttgttatttccttttttgttcttcgtctttcccctcgtcacaatg

SEQ ID NO: 115588 - DNA, 82 bp, Heterodera glycines
agtgcctttcgagcccaatgtttttttcgggattgggcggggggagtctttggcctgtttgctctctctcgaaccccaaatg

SEQ ID NO: 115589 - DNA, 790 bp, Heterodera glycines
gaccggaaaaattaaagtcgaatttttaatccattcaaactaaaagtgatttggtcgctatttatttatttgtattgatttcatattatattttattttttggcggcgatctcgtttttaattgttttgcgctttcttgaggacattttttaaattaatgttttgtcctcaatgtaagcggatttttcccttttgtggactttttctttattgacaataaacaaactttgcgggagtaatccctgcggggtcacatcccgcaaaaagtttgagttccaaacccgcaacatgattcgaaaatttgaaatttaaggcaggggtgcgatctgttctgagttgtcagaaatgttctgattttggggtagcgaccaaaatttgttttgatttcttaaaatccttcagaattttgtaattttatggcgtaatgtcaggctacatgacatttcgcctactcgacatttcgcctactaagccaaaaacattcatttcgcctactaacccaaaaccggacatttcgcctactgtcatttcgcctactattcatttcgcctactgacatttcgcctactattcatttcgcctaccaaaccaaaaacattcatttcgcctactaagccagaaacattcatttcgcctaatggaaatacataatgccaaagagaaaataaaaaaagagaatatacaatatctacctataatgtttttgcatcaaataaatcattcatttcatttttatgtcatttcaaattttcttcaaaaacaaagaaatttcagattctaataagaaatg

SEQ ID NO: 115590 - DNA, 120 bp, Heterodera glycines
ggcaaacaaaataaaaacacaaaataaacaagtgaaaacgatttaagaaaaagtcaagattggagagttctggggcaggcagtggagtggaaatcatcagaaacgagccctatcagaatg

SEQ ID NO: 115591 - DNA, 839 bp, Heterodera glycines
tttttatgtgcatattttgtcatttttggtgcatattttgcgattttatgtgcatataattctatgctctagtaattactatttcattttaatgaaattgaacattaaattattaaattctgcttctcgacaatcttcttaaaatcagtccatatttattcattccgatgacggatttagcaaatatcttagcgcgccagttttgtacacattgtataaattacatttaagccattcaatattttccaataaatccacgtgaaaaaattaaataaataaaaaattaaacaatgggaaaagatagtcgttataattacaaaatcaatgccaccagatataaaattttattgccatttatgtacatttttatatttcaatgaaaaaaaaagatttgcgattttgttatagctaataataaaaataataatataataataaaaataatcattttttatataatttacatttaataacaaaggagtagttcattaaaactttttatattaaaaaataataatatttcaaattttactataaaatattattgaaaattcacttaaataaatctttaaaattaaatcgaaaaaaaagaacgaagtctagttttcaaatagatttcctaattcaaatacagaaaattcttaaaaataaaatcggtgtccatattttcaaagactgataaagaagtgatgcgattgcgcgacgttttgctcacttttgtcgcttcatttctttttggccattcatttggcggcctttgcggctccaaaccgtccaaatttgagcgttcggcgagtgcgccccatcgacgggcgtcggcaccgccgccgacgcaaatg

SEQ ID NO: 115592 - DNA, 594 bp, Heterodera glycines
attatttctctttttttgagttcatttcgttgtttttcttccttttcttcccattttcccccgaatatttctttaaatgatttttcttctaattttttcttttctgttccgatttggttaattcgagtgatcaaaaatataattaaactaaaaatttttcatttggcaataattttgttaattaatttattttatgacaaaaattactaaaattattgcaatattatttaacaaatgaagaatatttagaaaaaactttaaattatttaataatttcatttacaattgaaatatgtaaatttttacgtgtttatacctaaaaagcgttaatttaaatttttttttttttgcctatatttgtgcctatttgcggatttttgtgcctatttgatgcctattttgcgattttgttctgcctatttgatgcctatttcgctattttttgtgcctaaaaaagaatccctaattatttttatatataataaactaaaaaataatttttcaaaattaagtggcaaaaaaatttcgtcccttaaatattttttgctgctttttctgatacttttgttcccgtttgcatattgcgttaatatg

SEQ ID NO: 115593 - DNA, 421 bp, Heterodera glycines
ttgtttccgtcgcctcttcgaccgttgccactcgtctaaattctttttcgataaagaaaaaaaaaaaaaaaaattgccatcagaagggcgggaaccacttactctgatgactgatcacagtaaaatagtcacagagtaagtgaataaatatcaagtgagatcacaggttaaagataaacaataacgaaaaatttatatgaaaataaaatcgaggtcaaagtcaataaaatgcctcaaaagttaataattctttatacattggtgctttcagaatcaagagtcaattctaataattttttaaaggcgtttaaggagctagacattaacgttttatcaagggcattccaggccttgactgatctgttaacaaaagatttggaagattttttagattgtaatttaacatttaaccggaaaaatg

SEQ ID NO: 115594 - DNA, 177 bp, Heterodera glycines
aaggacacttacggtgcacctgaagagcacatcagagcgctacactttgagctggctaatctcaagacgtgccgaagtctccgagacacaaaagactttctgcttcagctcgaacgactgacaagagagctgaacaatgccggagaggacatcgagggaccgcaggtgttcctcatg

SEQ ID NO: 115595 - DNA, 898 bp, Heterodera glycines
atcatttttatgcataaaatacaaaatacactcccccagttcagcctttataagcgcatttgtttatgctgactatcattcactcaatttccagattgaaaataacaattggaggcgacgtgaagaagccttaattaataaattattttaattaaaatttacatatacggtatttcctaaaataccccctgggcttctgctgttttttagttcctctccaaaggggctccttttcaggggcttctaatttggggggggggtgacaataattatggcgttttaaattctttggctaataaaaaaagcaaacttcactcattttggccatttccattgaatacttttcatttaattcatttgatggttaaacaaaaaagttcattaaattctttacagttaacattaattttttttcaatttttaaattaaataaatttgctaggtaaattttatgtaaaacccaatctaacattgatgagttaagtccgtcgctttttaaattaatgattctgtttttatacacaaaaacctaattgaccaaaaaaatactcaggctaaattcgaaaaaatagtgagatatcccgctggaatcccagcactaaaagactcccggatcgggaccatggcaaaatcgggattggaatccgagcaaaaccggggtattcatcacggaatcctattacggccttctgccaatcccaaatcccgatttttttcaaaattccgggctctatgaccaacaaacattttttttaaatttctaatttaaggttacagaatgaaatatacctttggtcccattacccagtgctaataggggaattaattccaggagaccttcttacgcgtccgtaattagaccccttagggcttggaagggaatggatgatgatagatg

SEQ ID NO: 115596 - DNA, 302 bp, Heterodera glycines
cgctaaaattatcagagtgccgaaaatcgcatgtgatctttacctagaaaaaatggtctaagtaaaaatcgtaattacgctcaaaaagcttctcaaacaattttagcgcttccaattccttctacaatcgcctttatacatcccattatgagcgctaaaattatcagagtgccgaaaatcgcatgtgatctaagcctagaaaaaatggtctaagtaaaaatcgtaattacgctcaaaaagcttctcaaacaattttagcgcatccaattccttctacaatcgccgttatacatcccattatg

SEQ ID NO: 115597 - DNA, 1002 bp, Heterodera glycines
  unsure (1)..(1002): unsure at all n locations
attccttgtttcttaacccgatcacagaatncgtccctacaatggtaacaataaagtatttttacaggaggcggtgcctttagcaagctgtagtgttttaaaagtttnaatagncattgagtttttccacttcccgtagcgccggataaaattaatgtaaacggtgcgttgaacattttttttataaaatttctttgtgtttttttttgcttacaaatatccctttatataggcaaaacggagaatgtcgcctgcatccccctctcccgtccatttttgactcttgcgacactttttttactacataattgacaaatatcctttttcggatgactatgtcctcggtcaattggttgtgcggtggatttgacctcttgggttcgaatccccctcctgttggtgaattatttaatcgattttaaattatattatatataattgctaattatcctttttcggataactgtatcgctggcccagtggtagtggtttggattagacctcttggattcgagtccctctgcctctggatcaattaatttaattaattctctcatggatttggaccccggcacctgggacaaaatcatgatgaacaaaaatgggtgtttttttaagcaggggcaggggtctggaccccggcccctgggaccttatactactagcatatcatcttcggtttttcatgcttagaatttcacaaaatgctcaaattgatcatggacaatcaaaaatataacatttgaacattttaagcctgttttgaataatttttgtaaaaatgaggcttttttacctacaaaatgaggcttttgaaaattttgatctgggaaccatgatttaaacctattaaaaataaaataaaacaatagccattttcccttcctagcaaaaagctatcctctcaatttccatttccataattacttacaattagactggttttaagcttttttaacaagatttctcattttaaatttcggagtttggttttcaaaaatg

SEQ ID NO: 115598 - DNA, 525 bp, Heterodera glycines
cagcagttttttaaatttttccgtttttttctgtatttaaatgtgtcagatcaccatgaaggattaatctgatcatgttaatgcaaatgtaatctgcataaaaagtgaaattagagcatttttcagagctttttggcccataaatgaattgaattttcgtacataggcttaggctaggcctgagttttaggctaggtgttttttaaaatattccataaactattttcttacttttgcttcatttgaaaattagcaaaaattaattttacgatataattaagtttttgcatttaaaatacttatacctatattgatatttccaaatattttactttaatctaataattagattaaaatcaagtgcatgaatcaagtgcttgatttttgcacttttcgtcgatcgacatagcaccaaaaaaagttagaaatcgagacgaagagaaaatacagtcaatacggggcttatcccttcccaagccattgagtctaggaccaataaactaaatgtggcaaagtgccaaaatg

SEQ ID NO: 115599 - DNA, 775 bp, Heterodera glycines
attgaacggtcgaaatgaccgacggtgagagaaaattaagtctaaaaaaaagaaaaagcattttgcattttcagccggacattcaactgttatggcgaccacgcgagcggcaacttgtgagttaattaattggtcatttaaaagtaattaaagaaaaattggaaaatgaaaaaatcaacgattaaaacgacccattctgttctggtttgtacacatccgctgacaaaatgttgatcaaaaacaacaacaaacaaactctcgacaaaaaatgacatgacctttttaattttaaaatattttattacacaaaaaaacatttcaaataaagttaattttctttcaaaaaaatcatcactttttttctcattttatcagttaaaatgattgtcattttatcgggacccaattatgcttttaccaattttccgcttctttgaaatttaatcctttcttcttttcttccatattaattagaaatgaaatgccgcctcacgcaaaggcaaaattggagaaaaaatatattaacgagaaggataagcacccatccgttttcgttggcatttcctccatttgtcccacaattgattccccccccctccgttggcatttttctctccctttgcctttgacattggcacaaattaataaatgatacaaattcatctgaaaatttggcacaaaaataaattctgagcggtttcattctcgcgaaatggcatatttgctcaaatattacacatgtaaaaagcgaataattcaaaataaagtgccaatg

SEQ ID NO: 115600 - DNA, 729 bp, Heterodera glycines
taattttacatttaatccatgccaaacgtagcgcaattgccccataaaatgcgaatgaaacgatcaaatacgtccaagagtaggggtaaacatctaaattaaaaaatgttttaattgttttattaattaattttacataggtaaaatggaactgaaatgatggccaacagatgcattacaatacactggatgaaaattgtcctaaaattgaaaaatatatctgttttttaaagttatctaattagcatgattcttggtaatttcggtagtttaagctataagcgaaaatgtcaaatttgctgattccgctgagggattgtaattcaaaatatttttgtgaacacgatatcccacggcattaatcccaaaaatgccgcaattgccaaaaaatgctggattgcggattggaccccgtaaatttccggcgccgaccttttattagcattatttttaggggtatattttatgaaatttttgaatcgattcttaggtgtgtatttttggtatttaatgcatatttgctatgaaatttcaggaaaaggggctctaattattagcattaattcttttcgtaagtttgatattttaggcatttgaccaattaccgtacaaatgtacagtaagtatccttgtagtgtttttgttttctctcacttttttgtgactttttgtgcataatgaaacgggaacagtacggcatgggcacggtttgcagccactgcaacaatg

SEQ ID NO: 115601 - DNA, 52 bp, Heterodera glycines
tcaagcgcaactccttgtttgttttacacagctaacactacttcgatcaatg

SEQ ID NO: 115602 - DNA, 153 bp, Heterodera glycines
tttgcggattttttcaaaaatacagctttgacgatgtacgcttcgaacacagccttaggatcgtttccatactacagaattttttaaattttatttattgttttctcttgattattttttaccgtttccacaatatacggtaagcacagaatg

SEQ ID NO: 115603 - DNA, 160 bp, Heterodera glycines
atttgacaaattgaacgaatttaaaattttgaaaagaaatgctgaattatatcaaacgtattattacggagaatacggattatgtttttttggggaagaattcctatataaatcagttgttgaaaaaagggattttgttgagaaggaatttttaccaatg

SEQ ID NO: 115604 - DNA, 114 bp, Heterodera glycines
ggtgcatgtgaccgtgacgtggagcatcacgtttccaacagcgtccagtcactggtcaggattaacaaccccaacgaccggcactgcctcgcgcgtgccgttgtcttggggatg

SEQ ID NO: 115605 - DNA, 420 bp, Heterodera glycines
ccaaacatgcacgcgttttgcgctcgagctatttatcatcgggctgtcaaatccaaagcgaaacacaaaagatgctgttttgacgaaataaaggggcataggtttttttgaagaagtgtcaaagaacatgcagcaataagcctgcaaaatctaataagtggaaaatacatgagtatagaatttattttcaaaaagtgtcaacagacttttggaaaaatatatttgcaatttatcaacaattttgagaagtgagttagaaatgataaacttcacgattcaaaccaattttcggtgctctaattaaccgcgataaaaacatccgaatcaattaaatagcttctgagataataaggtttatcataaaatttcatttaaaaataaacactcaattattggtatgaacgatactttccaaacatg

SEQ ID NO: 115606 - DNA, 1003 bp, Heterodera glycines
aataaaattaaatttgtttgatttgatttggtttcaattaatttatttgttggattaaattatcaaaatcaaatcacaaaatagagcaattccaaccaactgcaaattgacaagcaaaaatatccaaaatataaagaaaatcaaatctcggcatgaatttcattaattaattaaatattaattaattaagtatttttcagttcataaatttttgtacaaataaaatgtaataattttacatgtcaattcattacattcacttttgagaaaatataaccaaatggttgtcctttcactaattggccaattacctaacttaattaattaattagtgttaattaccaatttcgccccattttcacttccattgactctgcgcaacgcccaaaaaaaaagaaaaaaaaagaaaacatttgcccgtcggcggagtttcgtcgcccattttctccgttttcatttacgcccattcggcccgtctctccgtttttctgttttcactttttttgctgcgcattttacaatttttgagttccaccgctgcgccctttcccaacccaaaaaatgaaaatgaaaatgcaattaattaatttaaatttttattttctttttttaaattttcttttttcgcccatttgtttgcccctccggcgaatttccaacggccgaatgttttttttgtgtcaccgccgcgtaacggcccaattttggggcgccgaatcgttccactcccgcaacaaaatgacgacaaccaaaacgacgacgacaacgatgacatgaagacgcaaaagatgacattgccccgggcgatgggccccgggggaagaagcgtatttaagcggagagaagtgggggaagggcatcagttgcagttcaaccaacagcagcagaagcaaaagtgaggcaatagttattcaaaacaatttaaaatatatttaaaataattaaattattcaaattaaattaaaatccaatttcaatttaatttaattttcaattttagatg

SEQ ID NO: 115607 - DNA, 731 bp, Heterodera glycines
tcttttagtaatcaaaagtatttggaattaattattctgagcagtaatggttggttggatgattcacattcaatcagttgtcatcacaaaaaatggctaacattaggcaaaaaatccaaaaaaaaagtaatgtgttgaattatacaattagaagaaaaaataatttatcgattttattaataattattttttaattaaatgatggagctgaaagaaaaaataatttatcgattttattaataattattttttaattaaatgatggagctgattgtgagttattttttgaggttttttgaaaaaattttttatgtaagcttcgtcggcggcataacaaaactcaaaaaatttaaattttcattatgtgaagcaaaggaaaattatataaaataaattaaattgaatgaccacaaattaataatttcattttgctattttatgaaagcgagaaatcaaatgcatttgtctcctctgaataatcaaaacgaattatgcatttgcgaaaagcaaaaataatttccataaattccattagagcaatgcgttagagaggagttttaagcaaataaatattctgattttcaatcacaaattctcttcacttggaaaatttttataaaaagaattattttgtataattaacataatttataataaaaaattatacgcattttaaataattaaaattcacagttacagtaaccaaccaaccaaccaccgtgtgcgcaatg

SEQ ID NO: 115608 - DNA, 108 bp, Heterodera glycines
cttatgaattattttgcaaaaataaatattaatgaaaagtcagatttcgaaaaattttaaaacaacaagcgttggcattttttcaggttaagttagtcctttacaatg

SEQ ID NO: 115609 - DNA, 230 bp, Heterodera glycines
tgagtcaaagactcgagactctcgacaagcgctaatgtgatttttaattaagaaaagcaaccacgtcattgtgacaatatgttctgcaatatgtcttgaccttttccccgcattgatcagcttcgctttctacattgtaagccaattatttacaatatatccaaataccaaaattggaatttaaaatattttaaaatattatattaaattatgaagatgcaaaaattatg

SEQ ID NO: 115610 - DNA, 84 bp, Heterodera glycines
tggggaccccgactttggtaaatgaattttaattttaattaaattgtaaatttttatttttattaggtcactgtgcgacgaatg

SEQ ID NO: 115611 - DNA, 665 bp, Heterodera glycines
ataataaagttgagtgtttgtatgtatccgccttgctttgaattggcgtggcgttttgttattattttgcgttaaaaaatgatttgaaaatgaaaatgtttttgttttgttttgcgttaaaaaatgatttgaaaaatggaaatgtttggttttgatttttcaatttgttctgattaattaatgcatttgcatagtattttatgtctatgcttatagttagtctattattgtgctttagtctttgtctattttttatgatttagccaaaaatgaattgtttacttaatttgaattttctacaggtttgatatattgactttctctctgccgcttcggcatttttttttttcatcaacggccggtcggccatccatgtcttacccaatacttttgatgtgtgattttagttgaagtttgttttgtttggtttttatgcaaaattatgtttataaaatttagatatgacatgaagaactaaagttttatgatcgctcatggttttgtattcgttgtgaattcattcacaagtttgaaatctgccgtggccatcattcaacagcttgtccagattgagtttaagtgcctcatcaaagtttattgggattaatttgtttcgaattatattttgctttgttatgttaattattatgtaaaatttagaaatg

SEQ ID NO: 115612 - DNA, 580 bp, Heterodera glycines
aataaataaatacaaattaaataaaaaataaataattaattaatggaaaaacaaataaaatatttgttaatatgaaatacaaggttcccggtgatttcgtcagtggaaattaattcataaaaaatcgtacacttagccaaattttacaaaaaattcatggagtcgtaagaataggcttgtaaatattctaacgagtcacgatttgcaaaatcctctgcaagtattctcaaattgttgccctgcagaacccattatgatttgtgcttttcatgtgccccttcttcggtcagcggggctgcgcgaaaattagttacttgtacacactcgaaaaggtgaacgccacttccaacgtgatcggctgacgcctacgattcgatttgcagacagaaaacgaactaagagcatcaacatactcaaagtgcagacattcaaaattattagtaaaaaacaggggtggaacgctgacagaaagatcccgcggttgcggatcacgcattcaaattgccgggttgcggatcgcggtcacgctccacccctggtaagaaatttaaaagctaaattccgacattaaagcagaatg

SEQ ID NO: 115613 - DNA, 87 bp, Heterodera glycines
tttgatgtcgtcaaacaccgtataacagccagttccgctagcacctgccatactgtagccaaaggatggcttcgtcgcggcgctatg

SEQ ID NO: 115614 - DNA, 252 bp, Heterodera glycines
  unsure (1)..(252): unsure at all n locations
atatatttaaaatttaataaaagtgtttattattttattcaataagctcnnnnnngnnttnnnnnnnnnngnnncntctttaaggnnnntnnnttgntnnntnnttatttatttatgtgatatataatgagtatgtaattgaaattgtttattatataatataattttatatgatttantgagtttataanatttaaattttattattttgattataaatgatagttttttaggttngtagagaanggaatg

SEQ ID NO: 115615 - DNA, 277 bp, Heterodera glycines
tttgcggcaaactagtttactggtcccgttttttttatttgaaaagcctggaaaaatttttctagggctattttatggtgctgagcacgaatccggcattatttttgacaaattctgaacccctaacccggattcgaacatattttcaaacaaaaaatttttttttattgtgcatataatatgcctaaataaatgtgatttgctgcatataagcgatcatttgatcacgcattcacggggtaataatgggaaatttgatcaacaatgttgtcgaatg

SEQ ID NO: 115616 - DNA, 426 bp, Heterodera glycines
ttaaacccgaattaatccgaagcgacacgaaccgaccaaaagacgctgaaaagcaccagcaaatacagaaaagtgggaagaaaacggcggacggtaggacaaaacaattcaaatgatttaggaagagtttctcaaagaagtaaaggtaattaggtaatcaagttacggaatttagataattctgggaaaaaggctgctgaaaatctgaaacaaaacaatgtccaacaggcgaaaaacggggagagcaaacgcagtaaattgcaagaaatgatcggccaagccaaaaaaactgttgaaaatgcgctcggtccttcgcacggatcgttgggtgagaaaatacaaaaaaacatttttgaatgttttcacagagagtcaccaaaattcgattgaccttcgtcaagaagtggcggaaatcaattcgaaatg

SEQ ID NO: 115617 - DNA, 573 bp, Heterodera glycines
atcattagtggtggtgaagacggtgttcatgttgattttctttgtccagtgagtgttcgggttgctggaatagcatcattaaaaacaatttccaaaattatataaaattttttaaatgccagccaacccattttgtttgaaaatttaagaaaattttcggtggaaaacgaaaggctcccaacccgctcacccatatttggcaaaatttgtgaagaagccgccgatgatgcgcatcatttgcttgtcatcccaattcggtcgaaatttggcgtacaaacccttgcccagcaaatagcgcgcgtcatgacaatgggtggcagctgaggggggggggggaaatgctaaatttaacacaaaatttttggatttttaccgaaaatcgattttaagaatttttttttatttaaacaatgtcgagtgaatcacttgtccggtctctaatactaattcatacccgaaatatgaaaaattcataattcaaaatttaaaaaaaaatcataacaaaattttaacaatttccaaggtttcgtatggacgtacattctttccgaaattccccccccccccaaaatg

SEQ ID NO: 115618 - DNA, 74 bp, Heterodera glycines
tcgacgttccgacgctccgttgcgcagtccaccgccttgtcaaccaaattcgccgccgtttcccagtggaaatg

SEQ ID NO: 115619 - DNA, 493 bp, Heterodera glycines
aaaattcaagttaaaaaccaaccatccattcccgcaagtgattgtcgcacccacttttccttgcgggaatgttcccacaccgttcatgcgcccctcggcattttgcacgacggcaccaggatgcttgatggtgtaaatcaatgcaccgaatccgtcactggtcagaaaggcacgccagtcaggctcaacctgcacgaaaaatggattacctataacataatcaccagttaatttttgtcaaattaaggattaaagggatgatttcatcaaaattaaattttgttttgccaaatgattttgtaaaagaactttttttttaattcatttttttttgctcttttataaaggtgcattttttgtattttatttaaagcgcttatgtattcattagggttgtaaattatatggactaaaaaacgcgaaatatggacattaaatatggactaaaaaagcccgaaatatggactaaaaaggccaaaaatggccaaatatg

SEQ ID NO: 115620 - DNA, 463 bp, Heterodera glycines
ttttagattattataaattggtttttaggttgtccaatttgagtccgatcagcctttctccgatcactctcctcctgctggtcatccgcctgatcagaatttctctgatcactcttctcctgctgaccaccagaatacatatgatcagagtttatccgatcattctcttcccgctgatcatcgtcactcctctggccaacctatttctgatcgctcgctttccgctgatcaccgctattcctgcgaccgttccgtgcctttgccgacggtctcttccccgtccgccacagtcttttccgcctgttcctcatccgcttcatccgcttcacttccgtttgcgcctcttccgtcctcccagcccgtggcttctcctccgccgctgacgatggcttcagttccgtcgccctcctcagcggttcagcaccaccagcctcccgcttcttttgttgcttcttccggcatg

SEQ ID NO: 115621 - DNA, 130 bp, Heterodera glycines
ttggttcactcacatttcactatttttgaataattacggtgacaattaggggacggaaatcctttgaggatgacagttatgacgcgaccaaagaagaattggactacagcgactgggaagagggcaaatg

SEQ ID NO: 115622 - DNA, 362 bp, Heterodera glycines
ttacggggccacggtgggacaaatagcgaaaacagacaagtaaaaattttagcacgactgaaagaatttgaacaaaagttgtttgttgcgattgttggagatcgaggatgtggatcagtcaaaattgccctccaaattggaaatttgctctccaacgtcaattcgcccaaaaatttgactttacttgcgttttgggagggacccgagacccgctcggaaatggaagcgcgcctaggtccggtcttggaacagcttgagcaaatcgcggatttgtcatttgatcgaaatttgacgattgaatggtcttataattttttaattcttttgcacaatctttcttaaggtttctgaccggcgacatg

SEQ ID NO: 115623 - DNA, 315 bp, Heterodera glycines
ttcttcaaaaaagagcaaatttgccttttagatgaagatgactagaatgtttttgcaaaaatttaaaaataaaattgtaatataatagcaatttaatttttaattggacctgtttaacattaactcgacctatatacctacagtacattcctatcagggatggcacggaatccgattaccgaaaaaatttgaggcctcgaaatgccatcccggctacatataattagaagcagaagtattttttctagtggtttttcaataatttagtattctacaacaatatatttttgtaaatttgtgcagcactttgttatg

SEQ ID NO: 115624 - DNA, 60 bp, Heterodera glycines
catatatttatcggaattttcgtcaaaatttgtaaatgtaataaggtgagtctaaaaatg

SEQ ID NO: 115625 - DNA, 260 bp, Heterodera glycines
gggttgcatttgtgagattttgtcggatgattctgtccgtaatcagtattttttcatcacaactttgctcaattttgcgtgcattgtttgttatgtggccattggagggataataaaatacaaaaaagggggcaagtgccgttaattaattgccaaattttaaatttttgttaaaatttgccaagcttaatttgagtttctcataattcgaaattgatcattcttcgaaaggcaattttccagcaccttctcaaattatg

SEQ ID NO: 115626 - DNA, 252 bp, Heterodera glycines
cgtgtcgttgtcgatggagtcggtgagcagcagaaattagatgtaatagtgcagagaatagaattaagaatgtgaagagaatgaaatttctctcaatttcacgcctttttatattcaaatttcccactgaaaaaaagtgcaacagaaaatgcatataaaatgggcgaatttttgtccatttgcacatttgctgctgacacgacacccaatcaacgaacgaacgacttcagtgcgcccaacaacaacacaatg

SEQ ID NO: 115627 - DNA, 1003 bp, Heterodera glycines
tataaataccgtacagagtattaatttatttaaggccaattttttgttttttcgtaaacaaaaatataaatcaaatatttgaaataaaacttttaaaattaatgtttagcaaaaattttattatcattataaacaaatctgattattttgctaaaaaatttaattgcgttattaaattaaaaaaaccaacaattattagttttcattattatatgttttttatttaacttgaataacccatatgcgattttaattaaaatttcattgatcttatttactgctaataaattaacgacataactttatttagtgaaggatttcagggagcgcctgctttaacaaatgaatatttttctaaaaatatttgatgatgaaaatgtataaagcagtagaactttcaattcctatatgtgtattttgtgaaaaatttattattaattgaatgcttttttaaaatttaattttttttttgattaattgcgacaaatgaaaacccagcccaaaattgttaatttgattcattttttcctctttcattttaattaccaatttcatgggttcggatccgctgggcattattctctccattattttttatttttttatgaatttttaaaaatttggtcatttttatctatttttcgaaactttgatcacttttttctgatcatttttgaatattttttttcaaaattggattagtatataaaattggaaaaaccgaaaattttttaaggaaacactatgagatagaaagcacctctgatcacttctcgaaaaattatgagggatgaaattttcactaaaattaaatttgttcatatgtagattattttttcaatttattttctttagcaatcaatttttagtacactaattgtcaatttttttattttatatattcgactaacatataaagccaaaaaaatagagaaaaaaatacatggccatagaactagatatagtgagaaaaagatattgaagattcttttttttaaaaatg

SEQ ID NO: 115628 - DNA, 60 bp, Heterodera glycines
tccacccgttttttcttcttccttcatttcccccattttcaggttctttctgttggtatg

SEQ ID NO: 115629 - DNA, 1003 bp, Heterodera glycines
gaagccgaagtttcgcctagccctgcctataatgggcaatttgcccatttactcactttgaaaatgcatgcacctgtcaatttgttaatgcatttgtccgaatttctcaatattaattcataaaattgtttgccgaagaatttaatgttgaagagtaacaaaattctcgataaccttttcaagaaaaagaaagtcataaaatttttatataatattaaacacctaaataacggcaagaacaaatttatggttaaatttcctttttaattaaattttgaagcaaaaattaattagtattgaatatggttcttttcaatattttagttgttttttttgctcattttcaagggcatcttgaattcaagggtattttcaaattttcatgtgaggggcccagtttcaaggacgtccttgccattcaaggcatataggagcattgttcaaaaagtattatccttattttaagcctaagctggtttgatgatttttcttaaaaactccccccacgtcctcgccagttttattaattaccctcaacgcgtttttgtcttccttccttccaagatttgttgcttttgttcctcatttgcttaatgctttttcttatctgattgtgctttcccttacgttgaattcaacaaaatctctgcactttttcattaacttttgcttaaatgcaacaatttgtttcctttttatgtgcaagaaatatcgcattttgtgtgttattaatttcctcgttaatatggtaccatccttttttttaaaaattttcatttaaaaatcatgaagaattttccgggcttttcgaggtcactattcacgaatccggtatccatttcggcaaattccaaagcccgaagccaaacttgaacaaaaagtcgaaagtccaaattttcgagtttcgcatttttggttcaaaaccggcctaaacaaacggaaacaaactgaaagccaccaaccctgcaataaaagataacttaaactattagatataaaaatg

SEQ ID NO: 115630 - DNA, 258 bp, Heterodera glycines
attgcatgagaaaaatatttttatttatatatttatttatcactatgtcgttgttgtgatctgactttattttcatgtgtgatctccatatattctccatttttgtattcaccgatcttcagagtaagtggctaatgcccttctgtagatattttattgactgaataaaattatgcgtaattttcttaagcacaataaaatcacaatcaatttttttttaaaaacgccttactttaacttatttaaatctgagaaatg

SEQ ID NO: 115631 - DNA, 540 bp, Heterodera glycines
tgaataaagatttttgcggaaagaattttttcgttttagaaagtggcaatgaaattgtaaaatggcagggcaaatgcttataaattctattatcaaaaagatgatgttgactttcatttcgttaaataatgattttttatgcaaaaaaaatttcattcatctcagaaaaatatacattttggtgccaataaattatgcataaacatgttcatttgacagagagttaagccattgatttttattttagccacttaatttattacctaagtgaataacggtgaaaattgatttatataattttattcatctactgtcatctactgacaatatttttaaaatgcaataaacactaaaactgcaacccaaagaatcggtcttgtttgaaattttaaggaaattttcagggaggttttcaaacttaattttttcaaagacccagcaaaaatatgtcgttttttggtgattttgtgctggtaatgcaaaaacgcctgttctgggcgcaccattgccggaaatgctcaaaaccatgccattcaaatg

SEQ ID NO: 115632 - DNA, 418 bp, Heterodera glycines
aattaccaaaaaagttataacatgaaattccaaaaaagtcgaaatttttgagtttttttcttaataacttttttagaagctaaaatttttgtttgttttttgtaaggctaatagagcttgtgaagggctttcgaatgataccaagattgttagatttggtcaacaagaaaaaaagttataataaaaaaactgaggctggcgccaaaacgtcggcgccaaaacgacccagtcccaaaaatttttaaaacttacccttttcatgtctttgagctggttgataattttgcatgaatttcaatgcctttttactgagctaactctctaaattgtccctcaattttatcgtaaatttccatttttagataaatttttccattttaaatttggccacgagagcagaataaaaaaggagagaatg

SEQ ID NO: 115633 - DNA, 497 bp, Heterodera glycines
aagggtccctccccccttttgtttcaaaagtccttcttttaatatagcgcctccatacatatttgaggggttcttttgcatattttaggcgcatatttggaatttttagtgcatacaacgtataactagggagtctaaaaaaatgaatataaaatcttgaaatatgcgcataaaagtgaaaaatatgcatataaatttttccaaattgaagcttcaatttagttaaattaagctaaaaattccgaaaatagctaatattgctcaccgatgtctttttttccaatttctccaactttcccaataaattttatcggaaaattttttgttgccgaataagcatgcctcaaaaaataaaaaatatatttttttaaatttaaaacttgtttggtagagacgtactgacgagacccaaggcccgctcttccattctacatatttccaaacaaattcttttgtaaaaatttttcaataaatatttttatctttccccgaaaatg

SEQ ID NO: 115634 - DNA, 718 bp, Heterodera glycines
aaaccatagtacgctccaatttataatttttaattaaaatctgtttttgttatatccgtttgggttttgcgattttcccattaattgtttgttttccactttttcctttacaattccaattcctttaatatattcaattaattattaataatttgtttagaacgcaatccttaacagaattcgccatttaatattaattaattttcgttcctttcattcctgaggaaatgcacttttccttttcaaacaattttccgttattcatttcaaaaggttttcaagaagtcaggaaaatggagaatgggccgggcttttataccctcacaaatcaatgggggcggggccaggcacgtgaaaaatgtgcacaaacaaatagaaaaaaatccataaaaatatgaggaagagagaagatgactcataattaacgagcgagcgaatgcaaaattgatcgatgaaaaggattaaaaaataaatgaaaatttccaagaaatttgtgtcgcttttggcgacagcaaatattaatttatatttgcgtagcctcaaatgagcattctgccttcaatttcgaagggaagtgaatttttttataataaattgatagagagcaaaaagcacgatagtataatattcaaaaaatttatctatgcatttgttgaatgttcctaaacccgatcaaattttttaaacctttatatgaaaacatttattgcaggaaatg

SEQ ID NO: 115635 - DNA, 355 bp, Heterodera glycines
ataaataaatgaaaatattcatagttgcactttttgactcgaaccaccaccctttgtccctttactatcttactaaaaccacgtgagccacacacgcaaatcttttttggtacagcagctcatttctgggatggtgtgtcaatgtgaatgaatttcccttctcgtgactttcctgacaaaatctccaatcgaatgaatgactcatcatattttgttttctttgattccctttttaattatccctttttggcatttcgttaattttttgtttttcccttttttcagtgatcttttgcttctgatcaccgactgatcgatcaatcgatcacttcgttattttctcggcaataaaatg

SEQ ID NO: 115636 - DNA, 151 bp, Heterodera glycines
taaacatttaaagtttcgaccccaaaaaaaggattccgagttagatttttgaggtttaaagaacatttgtacgaaatcaactggctcagattcattgtctaatcatttacgcataatttaggtctgatttcggcacttagttccgcgaatg

SEQ ID NO: 115637 - DNA, 138 bp, Heterodera glycines
aaaagaaaataaacaccaaaaatttagattctctagcttttgctcatcggaaggggcgctgtccgttggtggaggggaaatttttggggtaaaacataaattttgaaacgcatttaaattgtggttttaagggaaatg

SEQ ID NO: 115638 - DNA, 63 bp, Heterodera glycines
acacaattaattgattaagagctcaatttgttaatgggttgacaggtaaatttgactaaaatg

SEQ ID NO: 115639 - DNA, 401 bp, Heterodera glycines
ggtattaattttaaaaatttaaaaaatgacattttccttttaatccgtccgctctcattttgttggtttagaaatgcggaatatgtgccgttcgtgtcgctatgacttgtgcattcggctcggcatgaacagagagggtcagtttttaattggatgggtttctattacgataatcgatgcattccgaacccccggcccaaatcgaacgaatattcgggttttctttgattcaaaatgaatgttgcattttcgtttttagttttctattagcctgcaaaatatcaaaaatataatttctatttttacaaaaaatgccaacattgggagggagggacagggggcggagacccgactattacgaaataaaaaaatttaaattttttttttcagacgtccaaatg

SEQ ID NO: 115640 - DNA, 65 bp, Heterodera glycines
cattcaaggttggttattaaattaatttcttcgcttttcttttttcagcagaagcaactcaaatg

SEQ ID NO: 115641 - DNA, 1003 bp, Heterodera glycines
aagtgcgaaattcaaaaattttgagtttttcgccttttttgttcaaatcattattcggggctcgaaaatggtcgaaattaacaacaaaatcatgttcagaacttcgaaaaccattagaaacttattttttcagtgacttttaaaagctaaattttattcaaaaatggggtcattccatcggcagtattaccgaaaagagcaaaagtagttagttaccagggcgggtagcgggtagcgggtggtgattgatgggttgcggtttctttgaaggtgccgccgtgattaatgagtgcgggaatgagtctatgcctatggggggggggggtaattaattagcgtgggtgcctgagggggtagtttttgcgggaaaatttcccgcatttgtgggggagaaaacttttttttgtgaatttttttaaacgtttattaattatgtggtaattaagggtgtgcctgtgggggtagttttttgcgggaaaatttcgcgcatttgtgagaggtgtcatttggggggggacgaaattaatatgcattgtgaaggggagggcgccgcagcatgtgtgagagaaaagtcagagagaatataaatcaaagagaatgtgagatagttagagaaaattatgagagagaaggggggggagtaaaaatgtgtccttttcgtgtcatacgccggggggggggggtgaaaaagtaaaaaggtatggagcaaaactttttggccaattacatagatcagataaatattttgtttatgtttttgatcaagaggatgtgtgtttattgggaatggaaaatgaatgaaaaagaaattatgcatgaagttggaggggggggggatggtgaagttttgttcaaatgtggataacttacatggcatataaacgaaaatctttggatagaataaagaaatctcggataataaaatccggaattgattaattaatgttaaaaatttgtttagaattctttagtgatataatattcaattttagtgttaaacatg

SEQ ID NO: 115642 - DNA, 1003 bp, Heterodera glycines
aatgcggaatgtcaccctgctcaggaaacacagacatagacgggtgttctgtgattgcgtatcgtatcaaactctcctcccaatcgcgtttgttttgcgcatccaaccgacggaaaatttcataatttgtatcaataccatcacggatctaattaaaaaacaaaaaaaaaatgaggaattttttttttttacctccgaccgaacgtaagtatgaggttctgggaaaggcggtaaaaaatttggataatatgacggaagcggaaaagggtcagaaatgcggagaacgggcgacgcttttgtcggcgattggggcagcactgaaaagacagtgttcgaattatacaactttcaccgtacacagtaaaggggggggggggggacgtaaaaggacaattgggcacctccgactgtgcaccatagggcctaaacctgggccaaaaagcgaagagggaccagtatgttttagaatttctaataattttatttaaaaagttctaaatttcaattttttctctccctggaccactccccccccccaaagcaaattatcccgactcattagttaataatgaatgaattcattgaatgccaatgtgttgcactcacatgaaaatgtgtgcggtttgctttggtgaatcgtgtccaaaaatgtgtcaaagtcggccaattccgggcgcccctcattcaccaaggccatcaaaacatcgccggcattgaccagcgaacgacccgtatgttcacacaatttcctcgaggattggcaagttttggagaaaactgaaaacattttttgatcatatttaatgagggataacaatgctaaaaagtggtggtacattggtgaaataaaaaggataaagcctccaaagagcccttctgagcagagtcaaaaccaatggaatggcaaatggaagcggcacattggcgaagaacccgtctaaatatttaaaacaaatttttcaaaaatatatgaaacaaatccaggaaaggccttgaaaagatg

SEQ ID NO: 115643 - DNA, 921 bp, Heterodera glycines
tattaaagcatccaaaatcaaaaaaaaatccctccatttaaaaaaacttttcttatcttatttaaccttttaaacaaaaaaaacaaaataatttaaaattgtgcctctttcaatcggcggcgttttttcaaaatccggcaaaaaaataaaataaaaatttatacgcaaaagccgccaaaataaaaaccacaaaattaaagtggtcaattaaaacgatccaagtcaataaaaattaagaaattttgaaatgaatggcaccgaattttaattaagcaaaaaatttagcaaaaaacgctaattcattttcattatgcttaatctgaacaaaggacttttattatttcatgtaaaactttatttaaaatccattttaagaattgtttttgggaacaaagaaaggagcaattagcgcaatttttgccccctttctttgtgaatggcatttggcacgtgccatcaccaccgggcccccgccgtttgtttattggcattattttcttttgtttatttatttgtccattggtcggtcggttggctttgtgtgatgatgcactttttgcgcgttgccgccaccacaatgtaacactaattgaataaataattataattgtgtggcaatttgtcggggcgggcggtgattgataaataaataaatgccgcggggccatatttatttatttggtatttatccccaacaaaaagtgcacaaattccccccccccccccccagcatttgtttatatttatgtatttgtgtgtgagtgattcaatgtgttttttttgcttccttttatttgccttagtcgagagtctcgacagaccgagaaagagccgaaaaggtcgcgaatctcgagactgattcagagccataacttaggttattaatacaccctccctgtgatcatttttagactgacaatg

SEQ ID NO: 115644 - DNA, 116 bp, Heterodera glycines
ggtttccgatggtggcacgtgagtacgaggcgtgccgggaaagtgttggtgcgacccgttttctaattttgactatctaaaatgcttcgaacccattgttaggcatcatcgacatg

SEQ ID NO: 115645 - DNA, 330 bp, Heterodera glycines
tcttgaattttttttttttgctttttttcaattcatacacattgtagaattatttcagtatttaaaattttattttttaatttattcatttaactttttaaaatttgtgtaatttcctttccaaacagggatggacgaaatttcgtttcgttttcgtttcgtcctacattttcggcactttttgagtttcgttttcgtgtttcgttttcgtctaccaaagttttttcgtttcgttttcggttttcaaaattttgtttttcgtttcgtgtttcgttttcgtcagagcaaaattggacgaaaaagacgaaaatacttacacccttaagaatg

SEQ ID NO: 115646 - DNA, 352 bp, Heterodera glycines
tgtgcgctcttttccgatccccctcaaatggaatcacaaaatatgggcaccatcattttttgggagttttttaactgaaaatatagaagcatttttaagattttttggaaaaaccctatgtttaacataagctaagaaaatcgataggtttggtacggttcccaactttttgtaaagattaacttacaattgggtccaaacggcggcgcccgggcatttgtcccccttttcttttttaataaaataacataatgccaaaaatctttttttttttgccagacttttctagtgcataattttccgtgtaaataccttcttttatctagcagttcaagctgaacggcgcccaatg

SEQ ID NO: 115647 - DNA, 253 bp, Heterodera glycines
aacattttattgttagttgttagcataaggactaacagactgcaaatttcaaaatattttgatcacgaaaacatttataaaaaaaattcgtcgtttcttttcttttttgtaaaacttgaaaacgtaaaattatttaaattttttaatttaaaagacgccaattgttttaaaaagattagatagagttgcggaatatgtaaatttccttaggtttttgtattctatggcggaacagcaagaaaaccaacaaatg

SEQ ID NO: 115648 - DNA, 1003 bp, Heterodera glycines
aacacaaactcggaaaaatgttccaaatttatgtaatataaaacactggattttaaatttaaaaattaaaagcccccttaaagaaaagtgttctccaatgtccccgctatccacacattttcattacattatatctctctatctattcattatatttaatcccattcaccaaatgaatcgatgaaattgatttttttttcgtttttttggggcggggggaggaggaggagtttatctcttctcttctcttctctctcttctgtccatcatcattctcatccacgatttttagcctacaaaatattattttcatcattttgttgttcactaaaatgtagtttctttcttcgcccgttatctaattattaggtaattgaggagcaacagagaagtgttcgttgatcaactctcactctattccttgcttttttgtttattatgtaatttgggagggtttgctctcttctaattgccaaaggaatttctaaatttgatcataatttgctaatagattttgcccaaaaattatcgtttttcaaaattttacaaaattcaagcgtgaaaagtttctagactaaaaaatttcaattttatacgctatttataaataaaactttctattttttaatgataataaaaattaaccatcctttataaaggacaatcttagaaataaggacaatttataattacgatttttactaataattaattatgttagcgaaatttacccctcctttaaaaagaaaggacaatcttagaaataaggacaactatttatttataaacattgctttttcaaaataataaaaaattaacttatttttttatcaagacaacattatttttaaaaaaaatatccatccaacttaaaatggcttctccttcacaaggttttaatacgggggagggaggctgagggtgtaaaaaaaaattaatttaattaatattttaataaaaaaatattttacaaaaaatttcctccgccttaggccgaggtatg

SEQ ID NO: 115649 - DNA, 418 bp, Heterodera glycines
tggaaaagctgttttagggatgcgtttttaggcacaaccttacacgaaataggcacttaaaaaggaagaaaaaaatcgcacctgcattaaataggcaattaaaaaaatttttatgaacgcattttaagtggaaaacacgtaaaaacttaatcaaaacacttatcattaaaataaaattatggtttagttgtaggcactgtgcaattaaatcgtatgataatctgcggcatatgatttatcacatatattgtcatatgcatgttcaaattaatcatatcatctcatcagggataaattacacttaagaaaaatcacccctccgaaccacgtatgagcggcctttttcaagtcttaatcgaaaggaagtgaattctaatttttaaaattattttttaggaattcctggggctttaaaatg

SEQ ID NO: 115650 - DNA, 368 bp, Heterodera glycines
tttctaagaaaacgaaatgaccaaaaatattttttattttttcactaaaaatttgcgataattttaaaatgttaaaccaattgaaaagtttggaataggatgcgtttttctgtcacttttagcccagcaatttcttaatggcaagggaacactttgtcatgcttcacactttgttcagttggcactttttggtgctaaattgactttaatttgttgtggcatttgtcaatttaatttttcttcaccaaatctccgacgaaaataaaactcgaaaatctccccggattcttcctttactaatttcagcatattacaattacaaattgatcacccaaatttagggcagcaaagtctaatttgctgctatg

SEQ ID NO: 115651 - DNA, 761 bp, Heterodera glycines
ttatagggcggggggggggaggtcgagaatgagggtcgagagtgagtgagtggccgcggacggactgaccaactgcttggaatatttgcaaataaatgacctactcccgcccgccgttaagggccagccagtcgcgcacatcacaacacacttaaataacgcgccgccacccaccgccgcggacgcgcaaaattttacgcaccacgccgatgcctcgtcgccccctccctctctaattttgatgggacagctgctaatgaacttttcggttactaattgtcagctaatgtagtgtttgttgtaaatgtgaaattattgttaatttctttattgttttattacaaagttaatttcttttattttttattttatctgcaattgaatgtttttaactattcattttattttttatgcatcctggtataagtgcaattagtttttatattaaaaaaaattaaatttaattttttttttaatttttttttggaatttgcggtctctttgatttctgatttgaaataaattttttgaccatttaaaaacaaccagttttaatcgaaaaccaatttttttttttaattttttaaagtaacgcactttttggttgttttgagtaacgatacaatcaattatacatatcaactgttattcttaaacaataattttttattttacttatttaaatatttttttaatgggaattaaaataattcattcataaatgtacatttttatttgcacgatcagtctattttaaaatg

SEQ ID NO: 115652 - DNA, 1003 bp, Heterodera glycines
  unsure (1)..(1003): unsure at all n locations
ttaattactgaaggattttgcacaccctttaattaattagcaattaatatttctgcggaagtttcacattagaaaatgtctttctcatttctaataagtccaatgtttttattcatcatgccaatcaacaccaccatcattatcatcaccataattactcattaccatcactaatatcattcatttcatttaaaacccaataaaaacacaaaaaaaaatgtctacaaaactttcattgatgcgtaggcgagaaaaataatacaaaataacaaaacaattcgctgctccatgactgatgccgctgctgcctgtgacattggcctttcatcacatgaaaaaaggcattttctcgatcgccacaaattcttaggggagccggggggaaagagatcaaagttcagcggcaaaagaaaaattgtggtgcgcgaaaatatcgtcggtcactgctgctgacacacacataccaaatgatgacgatttgcacacacattagcaaaattaattaaacaattatttaatagtgatgggccattaagtgttgaatgaagaaggtggcgaagtgaaatgcgcaaggaaaagtgatggattgtccacatcccccgggggnggggggggggagagaacgacagcaaaatgacatgagtgcttgccggtgacatttttttgatcagttttattccagtttttggagcacaaatcggcgactcaaattgagcgcgtagcagcgaaattcgccggatggtttcgattacgtaatgatcaaggttaaaaaatcttgatcgtccaaaaaaggtatgtattatgctcgaatatttgatgatgaagatgatgacggtgatgatgatgatgcccggagaaacgccctcacgctcccaaccggaccgtccgctataaaatgggcagatggacgagcatttgacaccacaaattacccacccaattagttgaaaaccaaaaattaattggccgtgacgaaaacaatatcatcaaccacagaaaaatg

SEQ ID NO: 115653 - DNA, 954 bp, Heterodera glycines
ttgccaatcagtaataaataattcaaaaaaataatttaattgaatattacaaaaaataatatatattattttattaaaaacgtcgtaaaaaaattattgttagcactgacaaaatcattttagctttgtgcaatataaattagttacatacgtcaaatgctcatcacatacataaattgattttattccaaattatccgaaaattattaataaattaaaaaaaaaagatcaacccctccgactcgtccttctgcagctgatgcttccgaaatttttaattagcataaaaggcaaaaataaaaaaaggaaaataaatttacataagaggggacacgaacttgtgaaagcaaaaatgaacatcgagaacacaagctccgcgccgcctaagcacaaagcaatgcaaatgattatttaattattgggataaaaaaagtttgatacgtcataactcggcactcacgttcatttggcaagaaaataaaaatcatttttcttatgaacccatggctgttctcttgccacccaccaagtttaattcggaaaccagcacggacttcatcattattattttcttaatactagggttcgagccccgtccccggtgatgggacagttttagccgaggaaatttgtttgaaattttcaagaaattctgtctaaaaataacgaattattagattggataaaaaaacccaaatgaatggataaatttttcatagtttgttcccccattgtttttgtcgattttttaataaagaaaaatttaaacaaaaaaggataaaaaattgtaaataaagcagtgtgcggatctgtccttcagaaatagaagggtccaaatctgataaaatgaaaatttcctgatttgtcagatttgccttgatttggagatatcgagcaaaatttgttctgatttcttaaataaatttataattttttaaactttattgcagaatg

SEQ ID NO: 115654 - DNA, 182 bp, Heterodera glycines
agtgcgttggtttattttcagagggaacggccaatgccttggccaattggctaataagccaaaaatgagttccccgcccgttgttcaattcatttgcgcgtgtatatcaattcctaatttgtaaggtccatgaggttgtcccagcctcggcattggccgaccgtcccagcgcatgtcgaatg

SEQ ID NO: 115655 - DNA, 544 bp, Heterodera glycines
ttcggaatacagctgcgttaaactgtaatgcacaaaaatggaaaaagaaatttggtgaaaacattttttaggcacacaggtctctacattatctgttcttctgcacagcgtggagaggtgctaaaatttgttaccaaaaatgcaattttgtgtggcaaagacaaagtcgtgcaaacagcagttgggaacacgcagaagtaaaagcaaaagcaaaactaataggtttttaattttgtccattatttattgagatttgtactcattcctgtgcatggtggtaaaacaaaacgcagtcgttttttgtgcttagaggccggcgttgttaatgcttttaaatgcttgtattattacaatacgcttaaacaaggagcaacaaacgcgacaaacactttagccgagggccttttgcatgcaaatgtatcgcactgtagcagcttgaatgatcaagcattgttgaaagacaaaaacattaaccggtataaagtgaataaaataaaaaaacaatgctaacaacaacattgtaatcatcgtctttagcacaatg

SEQ ID NO: 115656 - DNA, 648 bp, Heterodera glycines
ttcgctctcctctccgtcgattggtgttccatcttttgtcgccgaagatgatgaattatctatattgagaaggaaattacaatattttttggcgaccgaccagcattattcgattgaaagtgcaagagatctaattggggaagaccaaagtaagcatttgcacgtttaaaaagctcatatgggttagcatgcgactccgaggggtcggcgggtggaaataactgattttagcttcttatttttgtagggaaaaaaatatttttttttaatagcctggaaaattttttgaattttatatggtctaaaaggattgagccgagaatgtcgcacttcgctccaaataaaatctaatctttttgttcgaattaagtaatcttggctttggaacacttattatttacaattaattgtttaagatttaatggaggagagagcgatcattatggggaaattaggacagcatttaaacgcattgaaaatttatacggaaattttgatggatttcaatggcgcagaaagacactgccaaacttattacgatgaaagaaatgcatcgactcgcaacgtaaatcaaacggacaaacagaacgatttaatgaaatttagattttcttcgaccttttccattattatataaaaggcgaaatg

SEQ ID NO: 115657 - DNA, 330 bp, Heterodera glycines
  unsure (1)..(330): unsure at all n locations
acatgctttnntncaagtttttcattttttctctataatttttaatagtttattaaataagtacaaaaaatataaaatgataaaaaatttttccagtaaagaaattatttgtttttttaaaaagcaaatatttatttcttttaatgtttttttcttgtatttatttcaatataaaatgctataaaaaataattcccttgaaacaaatttttttataattattaataaaataataatttttaaagaaatttccttttacaattttttcattttttctctataattttttattttaattagtattcattttttattattaatttaggcaatg

SEQ ID NO: 115658 - DNA, 75 bp, Heterodera glycines
ctgtctaatcgtgaagtgattgagaatttcccacccccaactaatgtcaaagaaataaaaagattccttggaatg

SEQ ID NO: 115659 - DNA, 718 bp, Heterodera glycines
tcaaaaatacatacctcgaaaatgaccatttttacattatcaactctaactccttaaatacttttctaatgggatttatcccttgcccgataaatagcaaactcattctcaataataatgtcagatatttcggatcatgattgtggttttttaaatttatattcataaaaaaattctttaaaaaaagttgtgcggaaacttatgttacaccctaagtaataccgaaaaaaatttgcccacataaaatatctatgtaaattcgtaaaagtgtgaaaatagttagatcaaaatgatggataaaaattttgtaaatgttctatatgatactactatattgaagaaaaaagttgagacaaaaatattttaaatctaaaattgagaaaaagggaattaaaataatccctccacatttaaaattttaaaaaacatcgccatcacttgagcctaaggtgctacagtatcagggctgcacgcaattgcggattgcggattgcggattacggaaattgcggggtttttggacccccgtaattgcggattgcgggttgcggatttttgggatttatccgcaattttgatccgtaatttgactattggattatttttcgagacgatttcttgtaagattattttttataaaatgaatttttttctatttttatttaaagaaaatatatacatttgtttaaattcttatttctttagcaatttaaaaatg

SEQ ID NO: 115660 - DNA, 101 bp, Heterodera glycines
acaacctcattccggtggggtgcccagcgcacatttttaatctggagattttttaagcttttcttatttttagacttttctgaaatcaacacttacctatg

SEQ ID NO: 115661 - DNA, 391 bp, Heterodera glycines
  unsure (1)..(391): unsure at all n locations
atttttttanaagtaattaataaagtttttgggttttntaaatttataaattgcacacaaaaatccantaattacaatactaaaaataaagaaagaaaaaaaggcatgagcaataaaatgcattaattaaatgctaattgcctatttgttttcgttgttgttgcattaatgaatggtatgaatgattagaaaaattaattaatcatttcatacaaaagaattttgaggtgtcaaaattgtttcttcttcaattgaaatttcattataaatatacgtttatgtttttaaaattattaagaattttatttaatttatattttaaaaatttatggaaaaataaaaataaataatttagcaaatagaaataagtctaataaaaagctgaaaaatg

SEQ ID NO: 115662 - DNA, 171 bp, Heterodera glycines
  unsure (1)..(171): unsure at all n locations
actnaaaaagaggaaaaatgcatttaaaaaaataattaggggattttttcattaaaaattattttaaaaatttattcaaaattgaagtgacactgttaacaaaaatattttcttttgaaaaatttaaatcattaaattaaaatgaatttattaaaatttataaaaaaaatg

SEQ ID NO: 115663 - DNA, 557 bp, Heterodera glycines
tgttggtaggtcgtccgtcaatacaatattttaaataatatttattttaaaattcctatttttgttagtgccttccggcgtgttgaccagtgacgagttggtcggcatttttctgacccacgcccacgcggaccgtcgtgccaactccgagttgtaccccaaccaatttcccacccaccatcgcactctgctcagcgcttttttcaacgaaaaattgattagtcgataaagctattttgcaaattgttctgatttttaaccaaaaaattcattaaatttatatcttttctttcttttgtcgctttaagttttgacttttgaaattaacaacaatgaaagatcgaactttttttggcattttttgcgatttaaatttgatttttgacaattttattgcacatcaacattatttaatgtgcaagaaaaatttacgcatttttcccctgaacatttcggcgacgggatcgaaagtttaaaattaactttttttttttcagtatatcatacatatactgtacccaaagcaaagtagtttttgaaaatttttcaggcaaatg

SEQ ID NO: 115664 - DNA, 316 bp, Heterodera glycines
aatttccgatcactgagccgatgatcacttccccatcaaccgctctcagtgatcgcctatcagcagagctcgtcttatctccaagttttgatttattatcaaaccaaaagcatccccttctcctccccccttttatttccctttgtcctatgcccactcttttcgcggattattcccaaatgaatttgctgatgaatgtttttttaaaaactttttgacgcactgaataaactaaatccaaacagtctcagttaaaattcgcataaaatatttaccgtatgcctcctcccgtcactaccgtagctgtgaatgaatg

SEQ ID NO: 115665 - DNA, 1003 bp, Heterodera glycines
aaaattaaataaaattgtaaatataagatataagagaatgttgcaataaaaatcaattatttattggcaatcaatacaattaggttgtccttgtctttaaaaatggttttttccattctaataaaatataatttaagcaagtgatattgaagaaagccaaaaaatattttttaaaaataaaatttaaattttccttttataccttttttatcatccggttaaagggctttgacttggaccaggaaagccgagatctgtatctgattttgaacagggacatggataaagggtttggcaaagttcggcttagtgctcaaagcagttcaaatgcaaaaaaggcgaagtggtcgatgttcaaagcacaagtttttaaaaaaaataaatttgaatataaatttaatgtatggtaaaataaatgtttttattctcgccttatcctaccctctcttctgggcggctcgtttcaagaattagagaatctatgttaagaataaaggacgatccatcaaaatataaaaaaatatgtcatgtttaaattgttgcatgagttcccgacccgggaaatttcctgatttcaattcttggtctcgtcggtctttgttttttggattctgagaaatttttatgctgttaaggattggagttctgttgaccaaactcttcacgttaaaaattggtatatgtacaaatttggataataattaattctagagttgagcgggaccgggaattttgggcaaacccgggaccgggacttcggtactcagttgtccgtgttccccggtcgcgctcaactctaattaattcttttaaaagttgaatttgacgaattgtcaattgtcaattttctttttttaaatgattaaattaaacggttaatttagggaatttaaagcaatttgaaatttcttcagactttttgtcaaatttcttatttataatgcaaaattatttactgttacctcttttgcccctttaccaagacaatgggctcagaataatg

SEQ ID NO: 115666 - DNA, 114 bp, Heterodera glycines
tttttaaaatgccaaaattaaaatggaaaaacattttttaaaatataaaatgtttccctgcagaccatcgcctttctgcgcgagggggtcacccaatgttcgtgctgccaaatg

SEQ ID NO: 115667 - DNA, 339 bp, Heterodera glycines
tttttcatttcattttaaaattggggaagaaaaaaccccaatttaaactgctaattgtttagtcgaatacatttcgaattaaaaaattattttccaaaaattcacacgcagaagaataattaataagtgaaaattttatgtgtgaaataaggttcggctttaacatttgtaagaaataacggaagaattaattttattaaaataaatatttgtaatttttgatatttttacattttgtcagtatttgataatgacatcagtctgatgagtcattatttggtcgttctgtgcccatcgccgggtgctcacactttcgccgatcaattggcccacaaaatg

SEQ ID NO: 115668 - DNA, 1003 bp, Heterodera glycines
gaataatcgatattgtcggccctttttatccgttaaattcattttttggcattttactaatgaacgataagggccaaagtgtgccaaagttataaaaaaggagaaaaacattttttggttgcccccaaaatcctaagaaatttatgccctaatttcttttggctatcaaaagcttcatttaaaaaattatcctaatgtaaaaaataaaaatgaccaaattatgttaaaatcttagttgactatgatttgcgctaacggattcattctttcgatcattttttgccgcaatataaaaatggtaaagagaggggcctcaaaaatgttaaatattttacaaatccaaaagaggttgagggccttaagaccgctcattgtcaggcaaaaatgaaaaattttgaatgaaaataaatgaggtttagaggcttttgttccaatttcaaagcctaaaagcctcacagtgcgagtcctaaaagaatgaatgccgatcagttgtggcctttgctttttaaaatttgttattgttttaacccctttgatgcataaatttttattttatttgcaattatttaataataaaaaataaattttaaattcaaatacttcatgtttgttgacactcccattttccttaaatttaaaaaatttctgatctcgaatactactaaactcaacttaaaccactgtgctaggttgtgtttcacgcagtcttggcattttctctcaccaaaaaatataaatagtattattacataacaaaaattaacaaaaaattgatttttttataatttattatttttataattttctttttttccatacatatgtataaagaaatatatatgtaaaatgtacattaaccaattaaataaattccaaacgcgaaattaggccaaataataagtttttactcaccttcactttttattttattttcaattcatttttatttctctttttcagtaaataaataattttctgatatatttttcccttggttcgaatg

SEQ ID NO: 115669 - DNA, 152 bp, Heterodera glycines
tgcaggcaaaaatgctcgggcaactaaaaaaatgctaaattaaaaaaaaaaattaatatggaagagaaaaaaatccctattttcattgaaaatttaaatacctaaattaatttttaaggttttttattttgtaaaaaatctatgttagcatg

SEQ ID NO: 115670 - DNA, 875 bp, Heterodera glycines
  unsure (1)..(875): unsure at all n locations
taatttttttttntgttnnnnnattttgttaatgtttatttttnattttttgggtattttctcaaaataacaataaaatggaatttatgttaaaataattcaaaatgagaaactttggttttttacttaattttcttaaaaaattactaaattttagctttatttatatatatttttttaaatgagtttcataacagatttagctattttcaatttttttttagcttaaatttaacaaatttgaagaattttggaaaatttatttgaaaaaatacaaacattttcaatcaattttgatggcgccgctgcaaactcagcgacggcggcgccgggaggcacgggcgcgccaactgctcgcccagcaatatacattttctgattttttattttattttaaatttttttgttcataaatttttcataaacatttttgtcttcagagatattggcccatattttataaagcataaaataataaataattaaatgaataaaaaaatacattaatgtgtcatttaaaaaaataataattacaaaacatgaaaaaagatgaacaaaaaaagacatctccacaggcattaattaactttttaatttgtttgtatttaatatattttcgatgcatttaatcaaatttgacaaactttgtacataataatatatatatatatatttcttgtctatttaagtgaggatatttttgtactttttgccaaaaaaattatatagcacatgctggtggatgatgtgttaaaaatgcgtatagggctgaatagagagggactcaaaacactgacacctttaaaaaaagataaaaatttgctgattggaaattggccaatgctgatcagcggcagcagacagatcatccaatg

SEQ ID NO: 115671 - DNA, 311 bp, Heterodera glycines
atgggtcataatttgaggcaacaaaggaaagaattgatcgctttgaaagtggcgaatttgggagatttgccagcttaaaaactaaacgatcggaaagggggttccaattaatgcctaaaaacttttgatcggggccgtgaaggacaaaattttcggggattttggaaattatttcattagaatttgaaacaaattcacgcagtggcattcctgccttttcaaaaagagaaattgccgctacggctttgtctacaccttcggtttcggtttcggaggaaagaagaatattatcgacataaatattagaaatg

SEQ ID NO: 115672 - DNA, 1003 bp, Heterodera glycines
tttctaaattagccgatcctttctaacgaaatcattttttctcacatttttctttctgagaaaaacagtcctattacaaaatttatttcggagccgttatttgaactttgaaccttaaacaacatgaatctcttcattaaattaataaaagcgaacaaatttcgttcattagcatgcttttacaagaaaaacgatattcaggcgacaacgaataataagaaatactttttatcaggatcagacggccaacaataaaaaaaaattattttaaacttttcagcattccgcaacaacacgttggctgtagcccgtcatggttttcggaaaaacaaagaatagttaaaaaagacattgcagaatttcggttataatttctcaatcccagacaggacgaaacacttttagaagagaacttgttgaaaagtagggtttgcattaaataattctttttattaaaatattttatgtttaataactagcagaaaatttaaaaaatttatcatttaaacttctgttctgaagaaagaaataaaaaatacgaaatacattttgagaaaacacggtcgtattttggtaaatcaaatgcatttccttggcaacctcaggaggattctggcaataacttgtgaaacgagaaaagagaagtaaaggtttacaaaggtttgctatttattaatttggcctggcttttatgaacaattgtgttttcttaacttttttctgtagaaaattcaaacattactataaaatttatttttacaccctctttctctaaagataataaaatagattattatatgattttttaaatatgcgtgttgaatgtattcgtatttagcagatttccttgaaaattgcagcgagggttttagtaataaaattccagttccattctaagaaacaaaggtttgctttgaataattttttcctgaatttgctgggtttttataaagaaagattttttttggaacatttttcttcataaaattacagcacccatatg

SEQ ID NO: 115673 - DNA, 102 bp, Heterodera glycines
  unsure (1)..(102): unsure at all n locations
aattaaatgcattttcattctaaatacantttgaaaaggataaaatgaatgacttatctttttaatatctctaaactttaagcatcatctggccttccaatg

SEQ ID NO: 115674 - DNA, 412 bp, Heterodera glycines
ggtgaggtggagaaaaaaatcataaatttataattttgaaacggagcatattgtttgaacttttgtctcaataaaatagccttgatttttaaaaatcctctcaaatcacaaaaacttaaactatttcccctaataatcaaaataacataaaactttaaatgtattgaaactgaatctcatcaaaaaaatttttgaaaaagaacattgctgaaaaataaggattttaatgcaaaaataaaggacattaaaaataatgatttttttagttccattccggaaaaaaatttgaaatttctttagctttttaaaaaaatagagtttgtcttaaggcaattttgtacagttttaaggctaaaacttattacttcctgtcatattttaaatatttaattattcggtccctctaaaaatg

SEQ ID NO: 115675 - DNA, 125 bp, Heterodera glycines
cgttcgttttccatttttctttttttcacatttttttttttgcctttttagtgcttttgtccgtttctctactgaattgtgtcgccagcgcagtaacggcacaaagtcacggcgccagtcgaatg

SEQ ID NO: 115676 - DNA, 252 bp, Heterodera glycines
  unsure (1)..(252): unsure at all n locations
cgaggcattcagccatcattacaaaatcaaaaaacaaacgtggaaagagagaagccaaggctgaagataccaaagactcaaaaaattgatgtcgcaaagagggccgcagaacgcgccgggagagacgtagaaagacattntaatcagatcaacaatatctcgaattccatccaaacccaactaaacacactacgagaaacaaatcctcaaattttagaagagcctgatataaaaatttggtttgacaaaatg

SEQ ID NO: 115677 - DNA, 379 bp, Heterodera glycines
aattttacaaaaatcaacctttatatataacttagaaatttcttgtaaaaactgaaatgaaattttaaaatttaataacatatggaattttgaaaaaattttgtactcttttagacagttcgcctttattctaacaatttcctgtaacattccaagtcattctgacaactaagaactgaatgagaaaatcatctttttaagcttcgcgaacgagaaaaccctaaaaatattatccctagaaaactcgaatccgactttaaaccacgcaggttttatcccgttcaataattccgtttaatctgtcccgctcccgtcttttcgtccgatttaatcccggcccgactaatattctttttataagcaggctgattcgataatg

SEQ ID NO: 115678 - DNA, 52 bp, Heterodera glycines
cttttcaaaattaagtgacaaaaatttgaccgttctggatgaattgggcatg

SEQ ID NO: 115679 - DNA, 508 bp, Heterodera glycines
ttcctttaatattttttaattttaaaatgtatttttaattacaaataaattaataatttacattttgctctactgatcaataagaactttaacaactgtcttcagtcttctgatcagtaggatttattattttcattaatttacattttcctccttcctactggtcagtagaaaattttttgccatttgatggtatttaagccaaataaaagtcaagctcttaattcataattcaactgtttgaaaacaaatattttccatcgaatttttaaattgctttttcaccaaaattggtaattttgtgcatttctgaaaaaataggccaaattttttggtataacgaaaattttcagcaaaaaacaaaaaaaaatttaatatgaggtggggtactttggattcagtaagaaaaggcaaacattttattatttccatagaaaagaggtgatgagaggagatccagttcatcaataaaaattatttttcatacttaataaatttaggaaaaatg

SEQ ID NO: 115680 - DNA, 1003 bp, Heterodera glycines
ataataaattataaaggccaagaaacttcagccaaagaatacaacgatttgatcttcgattgcgtcacgagtaattatgacatccgcaattatctaattaaaaaaacacttaaaaatgaaattaaaatttagcaccccaaaaagccttagaaaattttataaaaagttaactgattttctatagaaaatataaaaaaatgtgctgttaaaaaatgttttttttaccgatttgttagataagaaaggttttaaatttttgcattgttaacgaaaatattataaataaataaatgatttaaatcaaaaataattatgcaatattttatccttaatttttataaaattttatattacaaaacacaaatacttgacattttcaccattttattattatattatgataattttgaatactactttttaacaataaatgatttaaaaatttcacataataatcttcggaaaattaaacttttatataatttatttgattaaaactgatttaatagtattttaataaaatatatctttaatttagctttttaaacattaatcgaataaataaatcagtttaaattattcaaactaatttaaatatacataaaaaagaatattgaaatacatgggtatctgatgagcagtggggtggaaattacgcttgaataattaaaagtaattagttaaaagattaaatttatccaatacgttttattaaagttttaaacgctttatttcaaattaattatcttcaactagaaataaaaaaacattttaaaggtatatagttataatcaaaaaattgaggtttgtgccaaaacaatctagtttctaaaaaaaattataaatatttttacaaaagtttataaaattcttatggtactatactatactttataaattatgataaaattaaataaagaacctcatgcttattagataagtttataattaataaaaaatttttaaacaagcaaacgacaacgaagcaacttttactaaaatg

SEQ ID NO: 115681 - DNA, 768 bp, Heterodera glycines
ttgttaaccacttttgtcaaaaactgaaaaaattttggggtttttaaagaaaaataaggatttttttgcgccgccggagaaaaattttggaatttttaatgaatttcagtaaggaaatttattcaaatttaaagtttttcatcttttctccttcgctttgaccccccgccattacgacgaacgaggatcggggctgtctttttttttggggggggggggtgagaaattgtaccaaattcaacggcaattcccgctacaaaaacaggcgctgtccgcgctggacaatgccgtgctgactgctgctggccatcgacgcgatgcggccgcaattgttgcccaacaccagcaactgctgcagggacaaggacagctcggtgcaatgggaccgccgccaccaccacgggtcagtggtgtttagaggggacaaattggcatggatttagctggggtggggatttaaccataaatgcacaatctatgcattggccaaaaaatgtgttatttttccgcttgtttactaatgatcggcaccctatgtaagaattttgggcgaaaaattgttattttttgcgcccgtgttgctataattttgaaaaattacactggaaaaactggacggatagaaaaaacaaaatgtaagacttttgttgcccagactctgctgattgtgagtatatgaaattattttactacaaatagtagcatcatgatatataatgttttttgcgttcgtttgtttaggtgttgatcaacgagcggggcgaaatg

SEQ ID NO: 115682 - DNA, 881 bp, Heterodera glycines
ccatcaacagtccttcatacaacagtcgcgctggaaaggacaaagcattaatcattgtgaataaactgcaggacaaccttacacatcaccaccgttttttgattggacaacaaaaaacagctgaattcctccgaaagacatttaaaatcccgctagaagacgaaccgtccactagtgcgaacaatttggagaaaaaagattgattttttttgacattatttgaaggcgatcagataccaagatttttgatcactattgttgatactgtgatcgtattgttaataaaaaaaaaaaaattccaaataaacgtcaaactgtgtcggccaaagaaactaatttctgaactggaaaaggaagaagaaaattttgaaaattttgatcaattggaagaaattattgaagaagttgaagaatttgtacctattgtagaaattccggttttaacacccgaagaaattgttaccgagcttgaaagaagggcaaactttccctttccaatagtgcatatttacccaggaatttccaaagtaacgaaccaaattttaaaaactgaacccttcccataccaaaacaaaaccgtatataaattcactttgacaataactatttttccatactgcattttaaataacctagataaagccgattctttggaaagaatatcacaggaagtaattttagaagcttacttaaaagtaagagaaacactcaactctaaccctgaaaaacgactaaaatttgtcaaattcattctaaaagttttatcaagagaaagaaaaagtttattaaaaaagtggagaagatctgaaagaagtatagtattacaccctattaattcattagtccacaaagagtatataatttaaaaacttacgaaaatg

SEQ ID NO: 115683 - DNA, 456 bp, Heterodera glycines
taatccgctggtgatcactgaataccgcgccgattcactgttatataagcaaaaagcggagcagggcgaaggggtggaaaattcaaaaaaatgcttcaaaaacgaataaataaattccacttttatttatttatttatttattattctgatgttgttttgtttcctttattcagtgtgaggctttttcaacctgttgtcgttaatttaataatatcaatttatttattgaaaaaaaattttaattgctgggtgacataattttgcctaattacttttggttaccaaagccccctataaaaggcgaacatttcaatgcaaaacagcaaatgttcattcatttatatgcactgatgaaatttatttccaatttttcattttaatataaataaattaatttcaattttttataatatatattcgataacagaaagcattttctttattttgaaaaaatg

SEQ ID NO: 115684 - DNA, 319 bp, Heterodera glycines
ttgcttttccgttgagtccaatattttcttggcacaactgtcacaagttcccaaatgtttgcatggcaaaaagacgatatcacgctaaattaaaaatccgaaaaattctttttggcattctgtcacccacaatattttccaagcattcaatacagttgatcttttcatttgattgttcattcgttgacggagtttttgcgttttgattggattcgttaggtgatggcaactcggatgttaatgttgacgaggctggtgaagttaggctttggctccctatgctcttaaattagcaaatatgacaataatttaaaaaatg

SEQ ID NO: 115685 - DNA, 1003 bp, Heterodera glycines
tggtacttttttgattataatacatacgaaaaaaaatctgatttgatttttgatatttgtttgaatgaaaaaaatgttttgtatagtaaaaagagaatgaacaagcctttaatggattgaaagaaagcaatgtaaatctacatctcaaatttttctgttcgggtggataattatatgcagttgggatatattacgtgccgcttgctgaatgaaatttatgtggaatattttaaattaacgtttacaggtcagtttttgttttgaatttgggggtgggtgcaataacgattctcttttatatgtttttaaaaaaaaaacccctccccatctgcaaactattaacttaattactgctttttttgagcgaaaaaagaaaaagttgaaatgcttcttttttttgtttttgtgtacattcttttattctcaaagtttgtttcaaggtttaaaatatctaccgctgatttttgtaatgaatttaagacctagaattggaatttagatttgattgtgtttgtaaatgctaatgaattgtttgtgaaaaaagtcacatttaatttttttaaatatgaatttaattgtttggttatcagcagaaatttttgtttatgttatgattaattgaaaacgaattgttagtaaatgaaagttttgttgtttgatatgtatcatgttgtgctgattcaagttgcaattttttttacaaatggatgttttacgatatcgaagccaatctacaaaatgtgatgtttttgaaaattttaaaaattaacgggataacaggtcagtttgattttttctctttttattgagagataatttgaccttgcattatttttgacccactcatttttttttaattattttattaaattaaataataaatattcacatttgcttgaatatgttgtttggttcacatttatatatttgttattttgtaaatgcttttgttatgtaatgttctttcaggtttaaactttctactgcctcctttgttataatg

SEQ ID NO: 115686 - DNA, 204 bp, Heterodera glycines
  unsure (1)..(204): unsure at all n locations
taattaaaaaatgttaatatttacgaattgtggcataaaaaatgctgtgattatttatgattctcccgccagaaatttntaaanaatgtgatnntatatttctctaaatgcagggaatttgtgtgttttaatcacaaatcaacgcaaaattgatgtgccgccaatgcatggcacaaatgttgtgccgaattctttgaggaaatg

SEQ ID NO: 115687 - DNA, 98 bp, Heterodera glycines
ggggctagcgctcgaattttaaaattcattgaaaagttttcgagcagcagaagcacttgtatctggagcaattggcgcgacaaagtggtgcttccatg

SEQ ID NO: 115688 - DNA, 538 bp, Heterodera glycines
  unsure (1)..(538): unsure at all n locations
aaaaaaataatttgaaaatcttaaaaatttgggtcttttttaatacaaaatttttgtaaccaaatccacatacaaaaatttaaaaaatttttcccggggggcgcctttcgcccccgcccggccccccccaaatcncaaaagttttttggaaaaagcacgccgcaaaaacattattaatttttaaattttgaataaaatttttcaaaatgctgatttacaaaattttcagttcacaggccttcgtttttatgccaataaaattttgttttaagtcgttttttcatgtttttattgcgtttccttcgcgctactatcagttttagaaaaaatcttatttttggggtccgaatcttagttttagcctcatctgtccttattttgaaaataaaaacttggccgccctgataatgactgaaattaaatttttctcacaaagcagtgccggattaattctccccgatataatcaagttttttgttatttagcaaaaatgtcaaagtctttgaagggttgttaatggtgtcagtttaagaacatg

SEQ ID NO: 115689 - DNA, 333 bp, Heterodera glycines
attaaaagaggtacaacagtaaatagaagcggtcaaaagtgattagaataggtacaacagtgatgagaagaggtacaacagtgattaaaagaggtacaacagtaaatagaagcggtcaaaagtgattagaagcggtcaaaagtgattagaagaggtacaacagtgatgagaagaggtacaacagtgattagaagagatacaacagtgattagagaggtacaagagcgattagaagaggtacaacagtaaatagaagcggtcaaaattgattagaagaggtacaacagtgattagagaggtacaagagcgattagaagaggtacaacagtgatg

SEQ ID NO: 115690 - DNA, 723 bp, Heterodera glycines
tttggctagcgggatttcttacgggagcgagagttttgcgtgggtcccattcctgctcccgtaaaacttccttaattttcatacataaaacttaaggcacaacattttaatggaattttcctgattaattacaccgggattcttcactactcatttgtccctttatttattcgttgacagtagggttgggtcaccggccgtcggggttgaaaaattcggggttgggggcccaaccctagttgatagaattgtcaagtgttatttttatcgccctttaagcgctatatagaaagttaccgtttttgaaaattttttcacttttttttggtaaatttttttttgtttaaaaagtcatgaaaccaagtacccgggggttttagaggtcgctgatcatgaatatgacaattatttgggcctattaagaaatttggcgctagttataaagtgacagatttttaattttatcaaaaacaaagggggacccttttgttttgcaaaaatttttgagataaaaaatcgtgaatatactttttattcaccataattgtaatagaatatcttgaaactttaaccatttgctaaaaaaaagttaaaaagcatttatataaaaaaaaaattgcatgaaaaaagtttgaaaaaattttaaaaaacggtaactttccatatagcgccgacctttattttacaatgctttagtcaattactacaaaatttgtaaaaatg

SEQ ID NO: 115691 - DNA, 240 bp, Heterodera glycines
aaaaaaaaattattttttagggaatcaatttttatttttggggaaattctgaaatatgtaggattaaccataaaaaagtccaaaataggcaaaaatagcaattataaaattgatcctaaaagcttcaaaccaagctaaaaactcattttttatgcttatctcaatgttacatgcacccaaatttaggcatttgcctaaaaataacattatttttaattcattttcattttttttagaatg

SEQ ID NO: 115692 - DNA, 236 bp, Heterodera glycines
agtgagtgtctccctacctagcttcctccctgcctcccttttccaagtgccccaaaatacgatccctgaaagtggttaccatttatagggcgccaattttgcaatttttggaatggacacaaccatcccccccccattttcaagttgaccaaactgctgcgtccactgctggagagaacgatggggaggaggaggaggacgacccggactacaaagaggaaaatgatgccaaaatg

SEQ ID NO: 115693 - DNA, 82 bp, Heterodera glycines
ttcgcatttcagctggatttggaacgacgtgtggatggacattttccctcattttgaccatcctcaactcggcctcaaaatg

SEQ ID NO: 115694 - DNA, 323 bp, Heterodera glycines
agtttttgagtaattaatgtcttccgaaaaatgagtaatttctaatgtcaaaaatttagtgaaataaataggaaattttttgagaaataacctgacaatatcaatcaaattttttcaatttttttgtattaatttttttttgtcatatctagtatttaggcacctatttttaggctatttattttttgtgaaaattgttttaatttatcaatattacttctttttcttttaaaggttggcgctccgttttcggaaaagacccaattttgttgagcaacaatcccagcggcactttttattttgaaatttcaatcatcgatatg

SEQ ID NO: 115695 - DNA, 158 bp, Heterodera glycines
agtggacgaaattacggaccaaatcttcgtgaaatgggtcgaccaattggtgctgcgggtgcgttgccaatcattacgacattaaccccctcaaaatcggtgcactttttcaggatgagccgttgcctctttttgtgccgctcagagaccgtaaaatg

SEQ ID NO: 115696 - DNA, 478 bp, Heterodera glycines
taataacaccccaaactggctgctcatcggctgttgcaaacggaacagtcaagcgtaaattggtgactttgttccacacggcgattcaattttgggctccaagtacaattgccgtatttgctctttttatatgccagtctccattagtctgccagtctccaattatatacccccttctgagaaggttgaaaaataatataccatggtatataaaaagagcaaatacggtaagttggttttttcgtcttagtggtctgtgagttagtcaccaaaaggggggtcccaggttcaagtcctccctatgttgtgtgttaatttcaatttcttcttttaacggcataatttcgtgctgcgcaagaagacatcagtttgtcagaaaccgccgtccaactatgcagaagcggtggcaaaattcatcaattttgttgaacaaaggcgaaaggcgaagaacaattttcccggcggcatctttgcaatg

SEQ ID NO: 115697 - DNA, 257 bp, Heterodera glycines
cccccccctccgacattttttaatgttcaaaaaacaaaagattttgaaattttctaacgatttttctaaattaccgatgaaaattactatggtcacaaaaaaattttccttaaaattttattatgaaaaatttaaaaagttttttttgaaatatttctgtttcaattgtttgtttgttttttgattaattattcctttttttgtttttcaaaagttttataatattttaaaatttagacgcacagacgcccctaatg

SEQ ID NO: 115698 - DNA, 285 bp, Heterodera glycines
aaacaaagtttttcttagaaaaaacaaattttgaaagataattataacaagtcccattttttcaaggcatcaaaaattgctaaaaattagtataaaagtggttgctcctcctccgccactttcattattattattttccattcgccatttatttgtgttcgtctctctgtcttcgaccttttcccatgacaatgtctttaaaagtgattctgtacgttttgcgcatttcttctcgacatttacccttttgcgttctcattttttagactcatcgctgtgccaatg

SEQ ID NO: 115699 - DNA, 92 bp, Heterodera glycines
aattaatccgaagaaggaacatgaatgcggagagacctattgccaactttgtagtgtgagccacgaccccaagcgggggatgttatataatg

SEQ ID NO: 115700 - DNA, 1003 bp, Heterodera glycines
taacaaatttgataatgaatggtaccattgaaagcccataaaaaatactacaaaaaccgtgaaatgtgtttcccgttttgcctgcaacttcagcttttattacgcatctaatcaatattcactctttgagtctaaacatatgaccatgactgtattttttccatattttggaatttttttccaaaaaacccctattagaacggcccccataaactaaattggccgttttggtccaaacgaccggaaattttccaaaaaattttaaattttaaactttcttaaaaattagtagatttatttcaaaaataatcaaaaaattgaagatttcgtttttttggtcagtttcctctaaaattgcttttttttttcttctaaaacgagttattataccgtatttactagaatttaatgaatttggagaaattttggaaaatttacccctcaattcggaaaatttataacatatttttgccatttttgtccatattttcgggttacggtactacttttttcacgctctgttccatgaaggagtggtctgatcaagttggggtaaaagacttttttgatcagcatcaaaagttaagctaacctgaatttttgcagatttttagagccaccaaatattgagctttcattgattaaatattatgtttccatacttagcaccgccaaaaattggatcactttggttgcgcacccgtaatccgatgatcggaacttttgccgtttttagtaaggtgatattagggtttgttttggtatagaaaagatactccatccaatcactcatttcttatgaatagtaaaatgattgacccaaccaaatttcccgccttttatagacacaaaaacaacgatgtgaagacaatttttatcaacgttttttgccctataaaagcgcttcttcccccgcatttgccattcattccacaacacttttattccaccaacttcattcttcacccacaacatcctcgtccctccgcttcaatagcaaatg

SEQ ID NO: 115701 - DNA, 106 bp, Heterodera glycines
cacttgaagctccaacattttaatttgcatctttttacattgaaaatgtgctcagcggacgttctcaggcggatgtgtattatttgcagtgtaacagttgccaatg

SEQ ID NO: 115702 - DNA, 675 bp, Heterodera glycines
gtcgccaccggcttcatttcgccactgtccgccgtttcgtttaatttccgccgttctcggcacgggccattccctcccctcctcccctccctcctccccccgccctttctccattttttccaatttcaaaaaattatttttcaatgattttgattcattcacttcgtttggtttctgtcagctgttgtttgttggtcattatctctcattatccatctcattatccatcattatctctcattatccatcattatctctcattatccatctcattatccatcattatctctcattatccatcattatctctcattatccatctcattatccatcattatctctcattatccatcattatctctcattatcctttctctttctttctctctctgctcatttatttccctttggcctctcttccatctctctgctgagctttgttttatccatttccttctcaatccctttcactttctttggttcatttatctcattatttacttctttttcccaactttgtccctttttctgtcatttgtcgtcgtccactgattttgttgccagtaatttcattcattaattcatttttattgtttatttttcagtgttatttaatatattttgaaaatgaaaaaaaatcttaattttagtggctttttcttataaaaaaaaatg

SEQ ID NO: 115703 - DNA, 550 bp, Heterodera glycines
aggtattcgaatgggtaattaaatgtttcaattcaaaaaacttttggcttttataatttgtaattttgtcgatggtgcccatggacggtaaaaaacgaaaaaaattgccaaaaaataattggcgtaaaacaaaacgccaacacactcaaattgaaaaacaaagtatatttgatcatctgataataattaaattaatgaaaattttgaaatcaaattttcttcaattatttcgaacaattaatcatttttggactaagtgatcgaatattattagaaattcagagaaaattcaaaaaaaataatttaatttctgtagagggcttgaaccaggggaaagaagaagggaaagtcaaggagactagccactaggctatttgcacaattggcagatattaattaccgtatatgctctaattatagcccatgggggattattggcgctagttaaaaagttgtcctttttgaattttttttgcacttttttttggtcaaattttttaaaattttttataaataataatgaatattaaacattaacagcacaattatg

SEQ ID NO: 115704 - DNA, 294 bp, Heterodera glycines
gggaagttagaatctgggcggtgtaacattatttttttgtgcatttttacgttatttttaatttttatttatttaaaatatttttattttattaataataaataaaaaattttcatttgaattaaattattttttggtgaaaattttatttaaaaataattatttttttaaattaaagaatttaatgttttttaaattagaaattgtcaaaaaaattatatttggtgtaattttcaaaaattcgtaactcgggttagggagggtgaattttcacaatcaaataattaaaaaatg

SEQ ID NO: 115705 - DNA, 123 bp, Heterodera glycines
  unsure (1)..(123): unsure at all n locations
tgtttggcctgactgacagtgattttntaaaaaactttttgctttcaaaattaataaaaaaggaaatttggagtaaagttattttttataataccancaccgaaaaaattctttgcccccatg

SEQ ID NO: 115706 - DNA, 501 bp, Heterodera glycines
  unsure (1)..(501): unsure at all n locations
aagtgcaataatantggacaaataataattcacaggtgtgaaatgctaaataaagtctgaagtccggatgatcaactgaaactgaagaaaatggaaaatgtgaagattgcgaaaaataaatatatataaaatttgcatgcgaatgtttatcgaaattccgattaaattgttttttgagcgcagataaatcgcaaagcataagcaatcgtttgtaacgtttgataacgaaaaggaatagagatattctcgagtttgacaatgatacgaattttccttataaaatatttttgttttgtaaataatttctgtaaattcttaataaaattcttctggtcggttcaaagcttcaattcttaatctctggttcatatttccataatagcagctggtccctttgaatcaaaaactgattattaaaatgataaattcaaccgaaaaattgacaaaaaattttaacaatttatgccaacgaagtattttaagaatataaaacaaaaaatg

SEQ ID NO: 115707 - DNA, 65 bp, Heterodera glycines
cccctcggtaacgggcctgaataaatattatttttttaattttattactatcatttccaaaaatg

SEQ ID NO: 115708 - DNA, 417 bp, Heterodera glycines
ggttggttggaagagattgaatataaaattaaaaaatataattgggacactttggtgttaacatatttaacaaaaacactgtgtaacggtaattcgaatatttatgctttattcggaagtgaaaagggaagaacgtacagtcaattgtgtgtatatctccggattgtctttgtacaattggagactggtggaataaaatgaaccggggggggggggtgaacaattgtgagggaacagcttaaatagtgatcgggaatggactgccctctgacaaaacaatttctgtcactttatgataaatgcgcaagcattggggctcagatcattagtgcctaaatgtttggccaccaacagtaaaccatagaatgaatatccattcgagatttgattttcaaagaatcatctcttggcgaaatg

SEQ ID NO: 115709 - DNA, 226 bp, Heterodera glycines
  unsure (1)..(226): unsure at all n locations
tccataattatagttatctcatattaattactacncaattcgctgataaaaggaaaatntaataatgaatttattataaaatgttatcaaattaatgaaataatgattaaatgtggttaatattgattgaagaaaaattaagccatgctataaaattaataattacaaaattcattgcgaaaaatatttttataaaaataattcattatatttttacaaaaaaatg

SEQ ID NO: 115710 - DNA, 253 bp, Heterodera glycines
actcaacgagaagaagtatggtctgctgactcaacatctccccttcgaagtggccagcaaagcgcgtgctatgactctgtctaatgtgctgaataaaatgaacatgaagtgggcttagcgaacattcagtgactttattttgttttcaggcttttcggcttcaattacatgcctatgttcccgcaagcgtcgttcgtttttctgcattaaaatttcttatattctatcttatagtaagagcaaattcaacatg

SEQ ID NO: 115711 - DNA, 244 bp, Heterodera glycines
ttttgagaatttggaagctacaattttggaaaaattaacgaaaggaagagtgcaatttatagaggaaaaatgcaatattaatgagatgaagacaacaaaatgaaaaaattaagcaagtataaatgctatttataatgatttcgaatgagccaaatttattttatgggttaaataaacattgaaaggtataaaatgcaaaatttttagttctttgtattattattcttccattttcctaaaaatg

SEQ ID NO: 115712 - DNA, 59 bp, Heterodera glycines
agtaatcattttttgagttttttataataattttaaatttttttaaatttaaagaaatg

SEQ ID NO: 115713 - DNA, 1003 bp, Heterodera glycines
gccaacatttcaacttagggccctcacagcgggaattttttgatccgagttttagaaaaaaagttatgggctaacaaacgcaagaaaaagtgagaaatcggtccccgggactcagtcgtccgcgcagaatttttttctatagttttcccgaattctcctcaaaaagttgtaagacccttccaccactttcagggcgctcccggccttcggccgggagattttgttttttgaaacgaaactccttgtcaatataacatatatagtaactagcgggtgcgtgaaccgtcggctatttagctgggaaaaagcgcttcgcgctttgggagcttcgctacctagactgttacggggaaagaggtacaaccacgggtgggaaggtacaattgtgatcagaagagttacaactacggttttttcagggatttttaggccgcttcgcggcctcgaacgggcgctttgcgcccgtttttaaatttagttgggccttttcggccgcttcgcggcctcagacgtgcgcttcgcgcccgttacaacggtgttagaagaggttcaatagtgatcagaagaggtacaacagtgatcagaagattacaactttgataaaaagggtacaccagtgattagaagaggtacaagtgattagaagaggtacaaaagtgattataagaggtacaaattagaagaggtacaacagagattagaagaggtacaaatttgatgaagaggtacaaaagtgattagaagaggtacaaaagtgatagaagaggtgaaacagtgattagaagaggtgcaacaatgattagaagaggtacaacagagattagaagaggtacaaatttgatgaagaggtacaaaagtgattagaagaggtacaaaagtgatagaagaggtgaaacagtgattagaagaggtgcaacaatgattagaagaggtacaacagagattagaagaggtacaacagagattagaagaggtacaaatttgatgaagaggtgcaacaatg

SEQ ID NO: 115714 - DNA, 526 bp, Heterodera glycines
gttcgcccggtaaagaagaagcattgacaaagcagcagaagcgctctgttgcatgtattagcgcgattaggcgccaaaattttaattttaattttttccaaatttaaaaacagtcggcgacggatttagcggccccgtaggactgatggacttcatcggcacgggcagtccacaagacccgacattgccaatgacaatgatgaacgatgttggcacaatgaatcgaggaagtaaaaatgggaaatttatataaatatttcttacaaaaaattaaatatataaaaattattaaattttgtttaatactattaatcttatcaaatcaagcgaatgaatgaaatattaatttaattaatattttcttttttttaatttttaattaaaattttatttttaaaatactaattaaactattaattacaaacaataaccacctacctaactaagaattgaatttaattttgcttttaacaagttcattaaattaataattttaatttacaaaaaacccacctgcacagtgatg

SEQ ID NO: 115715 - DNA, 721 bp, Heterodera glycines
ttgcttactcgtagaaaaacaaatttgttttcgcttaaaaatttagattttgtcattttggcacttctctagagaaagggccgacaaaaaaccgagaatggggtgaaatttctacaagtgtttttcatgggatgaaattatgtttttcaatcatttttacaatttttcttttccatagcttaagggtagagaaatttaacctttttgatgcattttgtatgcaatttttaccataaaattagggattaaaattgttatcatgatcatcgaccagaaagcattcggctaatttttaatcgtcccctagtctaagacgaaaaaattaaaatttagcttttttatttgttaagattaaaaagatttcttaatttgttggaatttaaatccaaaaaaatggcataatgttgttacataatatggctaacaaataagcgactaggtgcatacctaacttttttcgctttggtgtgtccttttggcacccgtgtaaaatgacttttttacgccgtaaaaatttcgctaaaccgggttgggtttcgaattcatgtcaatacttgtataatcgaatttgagtcgggattctagatttcaaggtcatgatcactgatcaaggcggcccaaaactcataatttaaaattttttttcgaaaagggagcccaccattacattattaccataatatctgatgagaatttaggtacataaattacatagaaaatg

SEQ ID NO: 115716 - DNA, 1003 bp, Heterodera glycines
cgcgatccgcggtcgcggcaatttgaatgcgcgatgcgcggtgcgcggccgcggtttttttttttgcgcggtgcgccgcgcatttttaagcacaggtaagaatgggggtctggtgagaaaagagaagggaattggagaggaatgagaaattttttagaaaaaaaaatattttttttatttcatttaaagtattcctccataatcttatgtgttgtagtggctaaaccttctgaccttcagtgtttgtctcttgggttcaattcctcaacggaacagaaagttttttcatattttctttacattatttcaattgaaatttaattaataaagaagatattccaacttttatttttctttaatttttaaacagcctaaaatcacaaattaaccttggtcattttttgacaaattatgttaactaatctcgctgaaaatatcaaaatattccggcggcgcctatcggcaccgccgcccccccccccacaatgttcccaaaaagttttttggaaccgcccacaaaaacgcgatttaaaaaattaatagattgttaatttattcaaaaaaaatccagaattttgggactcagaaaatccaagattcccccccccccccccgcatgaaaatttaaaaaaaaatttctatataatggaaaaattcttcgaatgcctcccccaatgagtacatattttaatataggcaattttcgtaacaaagtgcagtcaaattttcaaattttttttcaaaaaaactttcacttgggaaaattttattgattaaattgaaaattttgtttttaaatgcgtggtccgcggccgcggcaatttgaatgcgcgatgcgcggtgcgcggccgcggtttttttttttgcgcgatgcgcggtcgcggccgcggcaatttgaatgcgcgatgcgcgatgcgcggccgcggtttttttctgtgcgcgctccagccctgattaggactaaaattgtaatgacgaagtaatcgatgtacacaccacgatg

SEQ ID NO: 115717 - DNA, 1003 bp, Heterodera glycines
ttataaagtatttcataatcatttaaaagacgaaaatatagttttttggttaatttttacgtgttttgctccctaaaaatccgtaataaaaaaattttaaatgccttttttcatgcctttttcgggattttcgtgccttttcatcccttttttgtgagctctagttacaacagttcttttttttgaaaaatgcatacagtcagattgcatactgtatgtttgacaccactagccgtttcgagaattggtcttctcaacattcatggaatttttttgccgtatttcaatttccttttcaacaatcgaacctttattttcggcatcttgctggaattcaaattttgtctttaaaatgaaaagtacgaaaagccataagcgtaaaaagccaaaaattcaaatctcaaaaagaagacaaaatagtcaaaccttgacccatgtagccgtatttaaattaaaaaactttgtttagtgaagtgatacgaaccttttagcttaaacttatttaactataaaagggctttataatgccgctacgacaagatgtttggactcatgattcctgtttggtctgttaatatttaataatttttggtaaataagccaatttaaaggtgtgccagtcagtgcattctacggaggaagacaaaaacaaacacgaattggatgcatcgcataagaaggcataaatctccaattttaaaatgaaaatccttttttatttgaagaaagttgtagtctacgattttctgtccagggagctttcttgcttgacggcaagcaaccaaagatcctttctttatgaacgatattatcgtgcgaatgcctccgttgcgggtcagtcggatttacgatttatggcactatctgatgataaacttcatgaatttaaataggtctcgactgcatttgtgagctcaacttcagctggtcggctgttcccctgtgggcgtgtacaatttgttacgtggccggtgaaacattggaatctgcggatgaccacatg

SEQ ID NO: 115718 - DNA, 194 bp, Heterodera glycines
tttttgttttatgtttttatggcgctgtgccgcccgcgcccaattcatcaatttcaatttgtccgtccgtccaccgttcacaaggcgcttcctttctctctccttcctctttttgcgtctttccgcttcttttcccccaaaattttacatccaaatgaaaaggaaatttttttgttcattttcaaagcgcaatg

SEQ ID NO: 115719 - DNA, 71 bp, Heterodera glycines
ttatccaattatttttgttaaaataattaatgttttttttcattttcagccgtcacgtttttccccacatg

SEQ ID NO: 115720 - DNA, 305 bp, Heterodera glycines
tcccattgctgatgtttgttttctattcaatatttagtttgaatacttcatctttttttctttttagatttatttttttgttttttaaattaattaaatttattaaaataaaataataattttttttaatttataaaataataatttttttaaattaaatttaaaataacttgaatattaaataaatacaaaaataacattaaaataaaataaaatctaaatattttataaagaaaaataaaattatgcacttttggtcgagctttttgcaataaaagaaaggaagggaaaagggcattaaaatg

SEQ ID NO: 115721 - DNA, 531 bp, Heterodera glycines
ggttagcgtagtaataaatttaaaataaatcattcttcattaacttaatttttgtttaattgtatttctttcgcataattaataattaaaaataattctttgcacggtttttgaattttaattttcatttacattttttataatgtatttttaaaatattgttattaattattgtttttaagtatttttccgttactttatgaaactttgtgataataatattataaaatactatagaattttatgaaaatgttatttctttcctttgtttaccttttgacgtttacattaagtttttagattgtgtacattaattgtttcaattcagattgattcatgacttctatataaatatttttaattaattgttcctaaattaaaaaatattttatatttttcttggtcactccctcctttataatgtttggtgttgtccaatattgtcaagtctataattatagattttatattttcgttaatatattttaattttgttttcaaataaataatattttcaataacagaataatg

SEQ ID NO: 115722 - DNA, 382 bp, Heterodera glycines
  unsure (1)..(382): unsure at all n locations
tatatataactagcgggtgcgtgaacgntcggctatttagctgggaaaaagcgcttcgcgctttgggagcttcgctacctaggctgtgaagcgattcaaattgatcgaatggttggagagattttttgaatttttaaaaaattattaggggtttttagtccacatcgaggctcaagacgggcgcttcgcgcccttcgcgtcctcgaacgggcgcttcgcgcccgtttctaatttttgttgtgcttttcggccgcttcgcggccgttttttaaattgtgttgagtcggacgggcgcttcgcgcccgatatttatgggttgtggagtttcgatccgaagcaatttgggattgcaaaagtgattagaagaggtacacatttgatg

SEQ ID NO: 115723 - DNA, 569 bp, Heterodera glycines
tttgagtaataatggcatttcagggacaaagtcattctccaatcaagaggtgaccattttggcatggcaaatgaatgggggagagcattttgaactacggaatttttaataaatagggaaaaatgaatgaaacggactcagaatcagcagatgatattcccaaaatgatcagtgaatgagaattgagtttgactgatcattgacgccgtcgtaatttgatcggcgaaaattttcccgtaggcatttgcatttttttgtccaaattgccaaatttgcattgcactcactcattaattgccatccgaaaaattgataaatttccaaaacccagagaaaaaacaaaaaaatttttttttaaattttatttgaaaatttaagaaaataattgttactaaacgtccattatatgaaactttcccattgagcccatagaagcaataatttgtcatgccattttgcaggccaacaaatatgaaaaatatgtagaaagtgatgataaaaagaacaaaaaattggccgaaaacttccaaaaaaggcaggcggacttggccaaattggccaatgaaatg

SEQ ID NO: 115724 - DNA, 976 bp, Heterodera glycines
  unsure (1)..(976): unsure at all n locations
tgattttanttggcacttcacttgatttcgggtttgaatgtgtctattcttagcttaaaatcccttttctttttattttatggcattccactttatttttggatttctatatcccatattctttgcttaaaatcccttttcttcttattttatggcattccactttttcagtctcagtaatgaaagtttttttagatttttcttcaaattttatgggtttctatcttttcttatggttgaataattaaattgaataccatttgtttgaaatcattagtggtgtgctgctctctaaattctttgattttttttacacaattaaccaacttttaaataaaaaagcttcgaattttcttatattttgctttgatttatttaattttcacatataaggctatgaagactcagttcaaaaagcattaagaaccatcccataaattttggatacaaaatttttttgagatatcttctattcttatttccttttttttgctttatttagccaacaattttattttataatgtttacaaaatttgtataaaatggcttattgtaatttgttcaaccacagaaaaagttttccttgtaatattttatgacttcagtgaatttcaaaaataacttgtttaatttaatttataatcaatttaataataaataaatttcaatgaaaatattaaaaaaaatttttacatttcaaatttttatttaataaaacccaaagttaaagctaataaattaatgaaaattttcaaatcaaatttacttcaattatctcaattttatttcttttaaaaatgccacgtgaaattatgataaatattgatcgcatttttggcaatgcttctccacattcattaaaaattaaataaaaaattattttccgaagaaattagcttaattttaatacaaatatatatattaaaaatattaaaaacttattaattaattattaattatatttttttagtgatg

SEQ ID NO: 115725 - DNA, 636 bp, Heterodera glycines
tatttatttttatatatataaattttacataataccaaatattttcgcgttcatattcttacagataaaatcgcgtcttattctggagtttgtcacagttgagacagaaaaatgaattatttatgtataattttcattttcaaattgttttaaatcagttttttatattaatgtttatttattgtttttattgtattaggatgagtttgaaacaaaataaatattatttatttaattactaatttggtaattctatctttaaacatttattttatgtaattattaaatgatcttttaagtgttaaattcctttttttaaaacatttttttttttttttgtaaatggtttgcggtacactagaaattttattttatttctttttgtattagtacattagttcaattttgttaatttcttttaaatcattaaattatatttttattttatttgaaaattttatttcaacttttttttaggagattatattattttttaaattcaagatcaaattttataaatattttattttattcacgcgcttctgcgacaatttcccgagttgagattgagttaatgtaaaatatttttaataattataattataatatgtataatagataatttccttcaatatg

SEQ ID NO: 115726 - DNA, 611 bp, Heterodera glycines
attggaccaaattttatgaaaatattgactaagaattgtgtcaaaaattaaaatgatggaaaatgaaggggaaaaaaccaaaaatcaagaaaaattaaaagttagcatctgatcaaatgaacggtttaagcatccgaacatactcagtgataaaatgagcgaataaatcgacgatttttcggcacaatgatttttttcgtcctagggctaaaattaggttttactaaaatgcttctttttggacgattttgatgttttaaatacttaggaatagaaaaaaagattttacattagtacttttggattaaattgaaaatcagtaaaaattaaattttcagacagtttttttccctccctattaagaaaaaatgaaatggaatatgtgtaattgccatatacatagcaaatatttttcaaaaattgtaaaaatgaatttttattattttatttttgttttaattttcattatttataaaattaaatccgtcaaaatcccaccaaattttgatgaaattttcggcaacggatgggacaataaaactgaagaaaatttgatgaatataaaacaaccaaaaattgatcaaaatgaaaattgggcagttcaacaaatg

SEQ ID NO: 115727 - DNA, 361 bp, Heterodera glycines
taaatccgcttaaaccttgcatatcatagagaaaaaattctgcatagattctatgtgaattttgaatttatctgtagtcaaattataggacaaacaaaaaataatattcttttcctctcatcttggcgttcttttttcaagtctctaacacatgaaaaaacatcaatttgcaaattctaataattttgcttataaagatacaaatcactttggacatttagaatcaaagaaaatgattagttttagcattttggttgaaatcatcaaaatgattaattatacatttttaagatgctttcaaatcgcataagcattttgttgccgcattgtaaagtccaatttggcatccgaaattggcatg

SEQ ID NO: 115728 - DNA, 71 bp, Heterodera glycines
gctctaattaagactcatcttcacttccggcggacccaattggtttgattgcaaaggcattaaatgaaatg

SEQ ID NO: 115729 - DNA, 243 bp, Heterodera glycines
actaaaaaataatatatatttaaaaaaattaattattaatttcaattttaaattataaattttacgcgtgccgatgaggtgaagggccttggccgaaccgccaaacttttcgattccgccggcaacggcggcggctgtaacaacacaaataaattaatatttatattttgtaatatgtatgcatagcttaattgaaaaaaggtcatttaattgtttatttagttggcattcttttcgaaaatg

SEQ ID NO: 115730 - DNA, 374 bp, Heterodera glycines
aaagaaaattaaaacatttttgaataataaaattaatagatcgacagatcaccagcggaggaggaaacagccaaaatagtaaaaaaaaataaaataataattgcaattaaaaaacaataataattgcaattttttgccctagcaaattacaacaacggataccaacagcagcaacaaacatcgcaaaattattacaataataatgcatacagcagaagcctgaattacaaccaaaggtaagaaaatggtaaataaaattgaaaataaataaaattattttagacctttggagcaaagcaattacaataattatgggtaaaaaataaagaaaattaaattatagagtaaaataaaattcattgtcagcagtaatg

SEQ ID NO: 115731 - DNA, 1003 bp, Heterodera glycines
ttaaaaccgccaactcatatgattatgtatgtatatccgttaaattaaatattcaataatatctattaatttttatttgttgtgcaagtaagtgtcagccggaaatattattagtctagcagtgacagactaaaaatctttattaaattaatttacaattatttacttaatttttatttggttgtaccaattacgaattagcaattttatattcgaaaattttgcagttgataattgttgctataaccacgatgtgtgctacataaataaatatcagaaacgttacgattgtgatattaaattttgcaattgccttaatgaatatcctaattgctttctaacaaaagtctgttctccaactcatatcttaaatattttattttttagaatatattatgctggtcagttcatattgttggagaacgttttaaagaaggataaaaataattattttattttaccgtcaatagatatgcatatgtattttaaattttttattgttatgtaaacttctaatatatatatatttatatacataatcatatgagttggcggttttaagaaacgccctggcggttttaagaaacgcccacctggcggttttaagaaacgcccaaagtggcggttttaagaaacgcccacctggcggttttaagaaacgccctggcggttttaagaaacgccctggcggttttaagaaacgcccaatgtggcggtttttaagaaacgtcccagcaccttaaatttttattatttagtgaatttttaaataatatctattataattaaatttcaattaatgtattattttattagtttgatacatgcacttttttcgtatttcgcccaccacgcttgcactttcgtactaccttcatcttaacaagtatataaccattatttatctatcaatcctaattaagcggttgattttttcaatcggataaatttgctgtacggcattctcgctgattcttgcactcccgacgcttgcccaacaatg

SEQ ID NO: 115732 - DNA, 152 bp, Heterodera glycines
ggttattattatttttgtttaattaaataacctttattaatatcccgttattaattaattagtcaatttaattaagtcagtttatatatattttttaccaaaattaagcgattcaacatttggacaaagtcaaatggaatggcaaaaatatg

SEQ ID NO: 115733 - DNA, 107 bp, Heterodera glycines
atttttttcatttcaattgggacaacaaaaaaaacttattttcattttaaatgtctgataagaatcacttaatattagcccttttaattcatatttcagttgatatg

SEQ ID NO: 115734 - DNA, 1003 bp, Heterodera glycines
cattaaattattgtcatgacacctacgtaaacttaagccgacccaataagttcattaaaattttgcatttttggtcaaacagcaataaaaaaagagataactaattgtcatttgagagctattatggtcgttaagagtgttcagtgagtaaaagcgggaaaaagtgaacaatgacagaaataattatatgtatggcagggaaggaagacgagaggcctagggctaatctcttaaaaaatttaaaaaaaatggaaagttacaaataaaccgccaccttgggcgtttattggattttgaattttatggtaaaagcagcaaacgaatcaatgtttacgcggtaagtggataatggtggacaatgaacagcgaggccctcatatttgagagtttagtctaaatttgggctttttgagggtattgatggcaaaatttcaatcaacaagtgaagttttttgaaatttttgagcaaatccgtaaaataaaccctttctttattcttgactaaacgaaaaaattttacgcaggtaaagaacgaatttttaaaagtggggtgagcaatggacaaaaagtgcataaataaaacatttgacattatcaaagcaattaaatataagtgcatttgtttccttttgaattatttaatttttttacataatttgaaaaaaaatcacctgttttcgcactttgtgtcccatggctgcatctgaagaagaaagacaaataaaaagccaacataggaaataaaaataaaatttattaaaaaaacaattttcagttttattagtttttaaacttttcataaaataatatttgactgacgaattcacaatgagattctcatataattttgatccttttaaattataattatttaatgctacagaatcttatcttcaaaattatgtatcactgactttttttctgggagccaaaaggataaaataaaatacttttcattgatcagcacaagaaaaacgacgagcatccattcatccatgacatg

SEQ ID NO: 115735 - DNA, 90 bp, Heterodera glycines
agtgaacaacggcaaatggccgggggatgggctaagggaaggtaatcacccgagggaaagtcgaacaaaagcacatcgcaatgtcaaatg

SEQ ID NO: 115736 - DNA, 897 bp, Heterodera glycines
ttaattttgcgggcacaaaattcgatggtcggtcggtcgcccaaattgcgcggcgatcatacgaccaatgaacgccgcacaacaaaattgtgaatgtgttgttttgtgcaagaaagtagaaaaaacacatttaagaaataattgaatgaaagttttattcaatttccgatcagcccaaaaaaggcattgatcaaaaaaaacaacaataaaaaaataacagaatgggaagagttcgccaaataatgtgaattttttgtaaaatttagtaaattgccaaattaggcataaataatttgatgaaatacaattaaataccaaaatgtaattaaacatgaaaaaattgtttaaaagaaattatgcaagaaattgtcttgaaaaataatcaaattcctgttacggatcaaaattatggaaaaatcgcaaaacccgtaaccaatacgcgtatttacgtggtccaaatatgccgtaatttccgtaatccgtaatttcttgtagccctgctaatcacaattgaattactcgaacaaaattgcacaaaagttttttttcaaggcacattgacaatttttaatcactttatgatcaaaattattcaaattcctatgatatttattatagtgtccaatttcctgaaggccctaataatttatttctaggaataatttttttaattcatacgtcattatattgattatggagcatacgcacataatttttttattttttatacattcattgatatcattatatgccattttaaaattcatttcattatttttatttcattaatatattaagaatatgactttttatacaggttttaataaaaaatttaaaaatatttctatatttttattgaatatttaactcaactctttgtaattcagagcaaaaatg

SEQ ID NO: 115737 - DNA, 163 bp, Heterodera glycines
ggaacagaaagtggaagagaaagtggaagaggaacaggaagcggaagagaaagtggaagaggaacagaaagtggaagagaaagtggaagaggaacagaaagtggaagagaaagtggaagaggaacagaaagtggaagagaaagtggaagaggaacagaaaatg

SEQ ID NO: 115738 - DNA, 169 bp, Heterodera glycines
  unsure (1)..(169): unsure at all n locations
agtcccgtctgtgcatgcgnttgatcgcgctcacttatctgctcgcatcactttacaaattggacacccaccagccccgggacccttctctaatcgctccgatcagtcgtgatcaacacactcatcgacttgcacctcccaagccgtactcnccgcagttgtggaaatg

SEQ ID NO: 115739 - DNA, 305 bp, Heterodera glycines
taattaggagccttttttgtcatttatttattattttttttttaattttaaaaggcactccgttgggcggacaatcagtgccttaaaaatggcaaagaaattacgggagcaaatcgtcgggaaatgcttggcacggcactgtacaaaatccatgttcagaacattccgcataagttttttacaagaaatattggtataacaaacaaatatatttgacttttttaattgaaattttgtaaagctttttataaaatttaattaaaaagaataatgtccaaaaaaaatttacagaaaattagtaaatg

SEQ ID NO: 115740 - DNA, 188 bp, Heterodera glycines
tataaaaatttataaatatttaaaaatttaacccttaaaaatgtatagctaagaaaatccatattttcataaaaaactgcatgcgtggcattatgtataagaatataataggtaagggaaaagaaatattcattttacacaaaccaaattcattttcatttgtaatgtgccctcattttccaaatatg

SEQ ID NO: 115741 - DNA, 238 bp, Heterodera glycines
ggtcagtgacctcgaaaacgcaaggaacttgtttttaagacaataaaatttcgctgacgcattttctgctgacgctttttccactgacgcattttccgggcgccatttgatttacgctcccttttttgtttagacatttctccgtgccaccacttctgtcgcttacaatgttcggcttgaacttctagtggctagccaaatgaatattgttgagccatttgagttggtgaacgaaatg

SEQ ID NO: 115742 - DNA, 197 bp, Heterodera glycines
atagtcatagttggctataaaaattttagaatttattctttaaatttctttaaaatatattttatttttttattatattgaataattttaatatatttgctaaataatattcgaatgaaaatttttaataattatattaaagctaattataaataatttatttcaattagtcatataattaccgttttcaggtgatg

SEQ ID NO: 115743 - DNA, 807 bp, Heterodera glycines
agcgggagacacgtgaacaaaggcggatgaattatgaagaaagcaaaaagaacgaaatggtgacgacgcggcgtggaggcaaaatggaaaaaaacttttgaggtcacaaaactttctcaattgtttttactttaactcaagaagttttgtaaacaaaatggatgagtttaggcttttacttttagaaaataggtataaaattatcgcaataaccgaaagctggttgaacaataaaataagcgactcgcaaattttagaaaattttcctttttctttaataagaaaagatagaaaaaataaaaagggaggaggggtagcgtttgtcatttttaatgaaataccgtttgaaattataaaaactccaaaaatacaaaattctgatatactttgtatcgatgttttttcgcccattgccgaatcaaaaatccgtcttattttggtttatagacctgtaactactgaaacactcgaaaatgttatgcaacttgtagaattaatttcgtcactaacagcagttggtcccccattctcacttagtgattacaacactgtaaaattcgacttaagactaaatgtttttccttgtagaaaatttaaacactttaactttaaaaaagctagttacttggaaataaatgccatactctcttctactgattgggttacctttttttcggactgtatagaaattgaccaaatttataacaaattcgcagcatttttacattttttagtatcgaaatatgttccattaacagtatcaaattttaaacataatttcccagaccatattaaaaaaaaattatg

SEQ ID NO: 115744 - DNA, 675 bp, Heterodera glycines
cccccccccccctactcatcaattccaactattttttgagccgtgggcggtccaaaacctgtgagtaggactaattcaaacagtgtcagtctgtttagttgttattcttgttcatttttcatatctttgatgaacctaatcaatgttaagatttttaatgatcaaaaataaaaaaattaatgtttatctttaagtagtgattttttgaaatttttcacttcgttatttttatcattggtttttagtaaatcgtatttatattagtgaaattgaaatgaaaaatattatttttgctaggcggcgcaaatgtcgcggcgcaaatgacgaggcgcaagtgtcgaccttgctgagcggcgcaaatgtccatttttgctaggcggcgcaaatgtcgcggcgcaaatgacgaggcgcaagtgtcgaccttgctgagcggcgcaaatgtccatttttgctgtgcggcgcaaatggcgcatcacgattcaaattaggaaaaggattttggaatatttttttattcattttagcactatttccctttactctgtgtctgtttttctttgtttgttttcatgggcagagattacaacaaataaatatttgttcaagcacatttcttctgccgattggtcatgtttcccccccccccctttgttcattgtcctaaatacaaaaatg

SEQ ID NO: 115745 - DNA, 943 bp, Heterodera glycines
ttcgaaaacccttaaaaattttacttaattttagttaattaataattaattaattaattatcccattttccgtctttatcacatccggcacttttgtttctgcttttcattgcgcttctctaaaatctctttgcactttccgattggtgagtaattggcacaaaaagcagtgattcatcaacaaaattggcatcatcaaagttcggcacacattttgaaaacaaatgctaatgcttaaatgtaaatctatgctcaaaaggactctcaaattatttttcggttatttattgaaaaaaatttaataatgtaaatggtttattaaattaatctttatatatatatatatatatattatatatatatatatatatatatatatatatatatatatatatatatatatatatatatttcttcatttatttagatattttgtcccaacatattacacattttgattagcataggaatttctgttttttgtttcacattaactaaaagtggtggctgatttttatttatttttgcattcactgcttttggtttattaaatataaatcacaaaaatttccgtgcaattttcatttttaatcgaaagcacagaaagtgatgatgatttcaaatttctttaatttttaaaaattaattaataaaagcgattttatgtttatacatattttgggatttacatatttttttttacatttttggcacatttttacattttttcgtacaaattttgcagtttttctttttatttatttatttttttgggatttttaatgaaatttttcttaaatgcataaaaatagaaaatttcataattttttcgtaagttttgagatcttaaggaaagttcaaaagaattttaaaaataaaatttttattttctttaaattttctcttaatatgaattggatgttaatttagaactaattatatg

SEQ ID NO: 115746 - DNA, 274 bp, Heterodera glycines
atttatgaagtaattgataattacaatttgataaattcgtaaattaaatccatttttattgtgaaatgctcacttgatcaagggcgtagccagggagtgggctaaagcccccccccgcccccgaaaccaaaaaaaagtaaaaattttcagcaaattttttgaaattttaagctatattcttacaattaacaaattgcattaaaatttttaaagattttccggcagcgcctaacggcatcgccggacccccattttaccatatttttgaaaaatg

SEQ ID NO: 115747 - DNA, 146 bp, Heterodera glycines
tcatctatcattgactggcaattagtcatcacaaattggataccaagctattggaaattttagattcaaatgaaataaggcaacaatttgatcgactattttcctggccataacaaaaatattccaaaaataaataataagcaatg

SEQ ID NO: 115748 - DNA, 217 bp, Heterodera glycines
tcatgtgcaaagcgaacgaacacaaaaaatgccaaaagattttttttgaaatcggccgtttttcagtcccaaaaagctaaaaattaaatgaaattaataaccgcatcaaacaacattcacttcttttccttgccaatccattcgcacatttccttttgttcagcgccaatgcgaaaccgtcgctgatccgcgccttgtggagcagtacctgaagatg

SEQ ID NO: 115749 - DNA, 274 bp, Heterodera glycines; identical to SEQ ID NO: 114698

SEQ ID NO: 115750 - DNA, 246 bp, Heterodera glycines
ttatttatttagcgaattccgtttaattttccgaggttttccctgacaaatttttgtttttttttcgacttttgagtattttcaattcaatcgtttgctgtccgattcaaaaactcgagacctgagactgaaaaacgcgagacttttttccgagtcgagattcacaacataataattactaattgtccctcaatttgttttctgttcgctgtgtccctttacaataccatcgaattgggccaaatg

SEQ ID NO: 115751 - DNA, 295 bp, Heterodera glycines
tgaatacgagaataagtgaaaagcggattacaaaagaaattggaaagggcaattagagaacaaagtgaaaaaccaatggggtacaattagacaaaaaaagggggggaatgggaggtttcccggccgttgtgtcggaattggccaatgagtgctgacccaattccgaattaaaaccaaattaagacaaaatcagaaagacaaacgaattccaaacaaaagatcgctttcaaaaactctttatctccaccaattaagtccaaggaaaaaaagcgatgaatcaaaggcgaaggctatg

SEQ ID NO: 115752 - DNA, 787 bp, Heterodera glycines
actcatcgatgtaaaaaataattatattttaattttaaatgtatatttttttaatgttttttaatcgacccataactaattgtttattgaaaaagtaattagtagggctgcttaagagtcgaaatttccgagactcgagatcaagacccaacccccccccccccaaaaaaaaaggccgagaaatttcagtacaagtttttttgagaatttttagaatgtatataaatattttcccaacaaaacattttttccaccttttattttattatttttgtgggcaaataattaaataattatcatcattaaatatttcaaaattcataaaaatttaaaaggcctatgctcggcctaacagctaagaccaatccaaagcacccaaaaaaatataaaatattcacaacaaaatgattcatcgatttttaattttaaattaattatttttgaaaataaagaaaaaaatttttttttattattattattttcaacttaaatatttataatcaattaaaattagaatagaaaaaaataaacttatagaggcttaaagcaaaaaattgccaaataaatatatccagcctaaaggaaatttgtgcaaaattttaaggattttgtaaaaaaaccaggaatcacttattaattttcaaacatttgcatttaaaattcttttgtaaaaatattatttttatatttacatttactatttttaacatcataattttctgtaaaacattttgctagcaaatgcttcaactcaaataaaaattccaaataatttggcactaaaatg

SEQ ID NO: 115753 - DNA, 60 bp, Heterodera glycines
cataaaacaggtgcttgagaaggaaagcattcaaaatttattggatatgttgacggaatg

SEQ ID NO: 115754 - DNA, 518 bp, Heterodera glycines
tagaaaaattttgctgtttttcgtgtacgtggaacaatcacaagaattgaataaaatgcaaaaatcgaaaaaataagtatagaatactaattaagatttatctatgtttatcatttgaaaatttaataatccattaatgctggaggacgaaaatagcgtcttttttgtttgttcacttagatagacaaaataaaaaagtgatgaaaataatttgaagtttgcttttactgcaaattgcaatactttttacaactacctaatttcagtactattttttaattttgaatctttgttcgcgaagaatcttgtagacaaactaaaaatgataaatgaaatttttttctctctctgtcttcacttgagcagagaaaaagagagagaaaaacgccattttttaaaaacatatcgccaattaaaagaattaaaacaaattttatacagtatatcctttttaacagccttattgaacctaattccaagaagaagcgtcctaaattcacacaacggacaaaaaaatg

SEQ ID NO: 115755 - DNA, 110 bp, Heterodera glycines; identical to SEQ ID NO: 98226

SEQ ID NO: 115756 - DNA, 461 bp, Heterodera glycines
aaatttttttagcttcattcccgcaacggacacgaaaatttgattttttgtacggtcccgcagggtcggagataaaacactaaatattttttgactaatttaataaagtcgaataatattgttaaactcatttttattgcaaatttcattcaaaacctgtttaccgcggagcataacggcaaaagttggacattttcctcattattaactctaaaaaaatagttcaacaaacgatatttagtctaacagatttgtccaaattatttttgatcaaattttgaaagtattaggggaatctatgtccgacaaagccaataaatcgagaaaaggaatttttagaaggtgaggagttcggatactccgtaaattgcggggtcagatttccctcgaaatcgccaaaatttttttggaccaaacttttttaatgtttgtaaattaagtccattatcgatgaaaaaatg

SEQ ID NO: 115757 - DNA, 964 bp, Heterodera glycines
  unsure (1)..(964): unsure at all n locations
gatgcatagcccagcgatgccactagaaatttacaaattcaaactacagtgtcaaaaaatgngtagttaagatgaattttgtgtcaattgngagtcaaaaacaatgaaataaattaaattttagctcacattcagctcaattaaaggattttgaagtcagatttggagttaattaaaattaggattccataattacgaagttttcgaaccccccgtaattacgcattactgggtttctgtgatttaaaatcttgttacgcccatactgggtaccgaaaagcgccatcggggaaacttttggaaaaataaaacgcattttataagaattttcatttagatttaaaatatatttttaaatttaattttctccaaaataagtttatggtctagcttcttccaccccaatttttgggtatttctcgattaacccaaatttattctttgttttttaaaaatggcattttatctgtacattctaccccaccacaattcatacgttataaattatagcagaattgcccaagaattttttcgtacatttttccgctatgatggaaaattgtaaagggcggaatcattagggaataatgcgaaaaaggctgctgaatgaatcaccaacaatttttagcagggaaaagcatcgaaattccaacacaatttgtcggcctcattcaaggcatttgcttttcatctctctttcgccaaatacagccattttccgacgtttttactaatttctatcatttatgttttggcgcattcatttttttgttatactaaaagctcatttaagaaatattttgggttttttaaattttggattttctcgtaaatgaaattaaaaattttgtagaaaacttctaataaaaataaatctcactctcgtttttcaatgccctaatttgtaaattgctaaattacagtattttatatttattaatatttcttaggacgctgaaaaatg

SEQ ID NO: 115758 - DNA, 792 bp, Heterodera glycines
ttttggcatataaactatttgtttttgttcatatatatttgttctaaggcgaatctcttccgaactctcggggtgcatgtcaaccaaaaggtagccaaaattttttgcgcatgcgttgcgataggcttgcataaagtgggcggtcattgacgggaagaggtgggtggctattgtacggatctgaagagcacccgctgggtttcgcattaataccaaataatgtgaatttgtgcgagcgacgcgcaactctttgttgaacaggtgttgggtcaccaaaattacgctcacgccccaattgtgtgagccgcgtgtgaaaagcgagtccaaatactgttgactcatccccactaccaaatcatccaatattagcaagagtttttcttttttggcgcaatcgcgtacctgttccgcagatgggaccccgctgtgcacagttactggcaatttgccaatttttccagtgcgttgcaaattcaaaacattagtgttcaactctccgtagccataaataacgcgctcaatgggggtagagatcattttctctaaattgcgtagaagactcattacccactctgacttcccactgcatgtactcccagatacaatcattgtgaatggatgacgaaattgcaagtccacgtgttcaaagcttggaaacgaatccattttttttttattgcgcgttgatatttaatatatatatatatatatatatatatatatatatatatatatatatagatttcatttatatatatatatagatttcattacagattaattttttaaatg

SEQ ID NO: 115759 - DNA, 294 bp, Heterodera glycines
ttggtgccaattgccaatttataattaataactcattaacacataattaggatgattaattggctctgttgcactttgcattatcatagaaaatttaatgatccacgacataaagtaacagacaactttaacgcttcataactttttccaacagaggcatctaaattaatgatcatccgatagctctaagagttcgctattagccaataaattttcaaaagtttcatttgaatcttttttttcaatcacttagattaaaagaaaactcttagaataataagaattgggcaaatg

SEQ ID NO: 115760 - DNA, 241 bp, Heterodera glycines
ctcctcacatacacttttttttgccccactaaatttttccattttcgggaattttcattttttgttactaattgtaagtgtctataaaagggaaggcattggaaaatttgctctcatttgcattcgtctgtatattcatcaatttatatttgcccattgcgtcaaagcatcgttctgctgctccttcagctacaaaatatcacagcaaacggaagaagtcgtcacacgtggtggcatcatg

SEQ ID NO: 115761 - DNA, 558 bp, Heterodera glycines
tacttttgtttaccttatttggtccatctcaagaaaaatgtccaaaatttttaaatttttacaattaatcggcacgccgaactgaaccttcaccgttttaatagattcaaaaacccctttgttaattttaattaaaaaatgattttaaataaattgcttgtagaataactttttgaatgagtaaaaaaatattctggaaattgatataataaaacctttttacagcaaattatagaattttatatctttctcaaaacgctgctggcataacttcgttctaagcaacgagcaataaataattgaacattttcattttttgtcgtaatatattcattagagaatggacaggcacgggcaccttacgggattttactggaccacccgatccaggaacgttaaattttcgaaaatcagaatctaagcccgagcccaaagccaggcacttaaattcctgtctattttttacacatattcatgattttttctattttcccattaattatttaaggagttttcgtcactttttgctattttctacaatttatttgcattaaaatg

SEQ ID NO: 115762 - DNA, 454 bp, Heterodera glycines
ggtgaggaaaaattggattaaaatgtggtttgtgattaattctagagcattcgcggatctaatgatagttcgagagtctcgacttatagaaaatttacattcataacaaaatattttgttataattctataagattttggatttggtcctatgtgttttccttttaccattcagaaaaacattagtgtttttgaacttgaaattttaaaaaaggaaaatacagaaaaattttctgtgaaaattttggaaagtatttttatgaagatacgcaaaaaaatttctactttttttgaagaaaaaaattacaaaaatgagagggagcggggggactgaagtgccccctgtttttcattcatgccattgattcacggattcttgattctttggaaattcgaaaatttacgagaaaatatttttgattgtaaaaattttctatgttttccaggtagacatg

SEQ ID NO: 115763 - DNA, 140 bp, Heterodera glycines
aatttttgaaaattgtcggccatttgtttaatttcataaattgtttcaaaatacctacattttctattttatatatacatataataaaaaataagtgtgtgtgtgtttagatcattcttaaattgttcaaacaccaaatg

SEQ ID NO: 115764 - DNA, 109 bp, Heterodera glycines
  unsure (1)..(109): unsure at all n locations
tgtgggcaaancaacgcgaaacagtagagcgggaagaacgagttattgccagcctcgacaaatttactttccaatttcggataactcagcgctcgatgaatccgaaatg

SEQ ID NO: 115765 - DNA, 243 bp, Heterodera glycines
acaacagcgatttgtttttttaatattatatttaattattttcatttttttaattaagatctcccgagaatggatgcgaatgaacggcgcaatcgctccgttccgcaacattctccagcaggcgtcgtccgtgacaagcactccgtgcgtttgttcatatttctataattaaagtaattagccaattaattagataatcagttaattgtctctttgctcagtttgccaaaccatcggccaatg

SEQ ID NO: 115766 - DNA, 330 bp, Heterodera glycines
ttttttgtctttttgtcggaagaaattaaaatgctgcaatttaaatgatgaaatatcttttaaaaacaattaggtaggtaataaaaaatcaaaaacaaagctttaggcatttcaaaattatatgcagtgaatactgacaccaaagcggaatgattcacgttatcattacattggttagcagttagcctaaatgggttcagcaatttttattctttttttactttatggcgttttatattcctataaaaagaatgagaatttggagtgatcgctttttatgtttgccgcgtccgcggcgtttgaaccaataacagttgtatttttgtgatg

SEQ ID NO: 115767 - DNA, 77 bp, Heterodera glycines
ggttttgtgcattagtgaaaatgccatttagaatttttcagtttagtcttttttaatttgtaaatgtttaagggatg

SEQ ID NO: 115768 - DNA, 526 bp, Heterodera glycines
tgtgcggcaccgttgtgcttcatatgaccgtaatttgcatgagagaggagacgacgacaaatggtgccgaacaatttaattaaattaaaaacaaaaataatgaatgcattaattaattggcttttcccgcaaccgaaattccctcattagcaaagagagatggactctgaaatcagaatttattaaaattttacataaagtatttggtttatcggaacaaaatatttatttaaatttattttttaatttaataaagttaaatttttcataaaaaattgaaaaataataaaaacttttacaaaaaccataaaattaaaaaaaatagaattgtcactataatatttatatattctattgtagaaaaaatgacaaaataaaaaccaatgtagaaataaattttgtgaatccattgaaatttttctccctttaatttattcaaaatttattattattttaattgttttttaaatccttttttgaattacgttttcattttgcctcagcaacttccttttcggccccgatg

SEQ ID NO: 115769 - DNA, 158 bp, Heterodera glycines
ttgtgtaactattaaattattttaaaaaatcatgccaaattaaaaaattttccgttgaaatgccaacaaactataattaattgccttcattttcaaataatctttttgctttttagcatataaaatttgccaatttgtttcccattttggaagaaatg

SEQ ID NO: 115770 - DNA, 1003 bp, Heterodera glycines
tagagtagagcgggacagggacctgatactgaaaaaacgtagccaaaaagtccagggttttcaacccgaaagtcccagtcccggttttacccaaaaggcggagttccgggatctgattatccaatatatgagaatttgatttcaagatgagtgtagagaagaatggggattgaatatttacacaccgagtcaaaaaacgagacatgtgtcaataaagagagagtgcagagaaactttttttctctaacttttctctccttttggcgtactatctaatattttcattattaggaaaaataatattcacttctctccatataactttttttctatgcatacaattttcaccatattttgcatatcgatagagaaaaaaatataggatttttcaatcgcttttttaaagaaaataatcgctttattttagtctaagatttaaaacaaaatttcgaacgcctatatcttttttctaactcattaaattgcttggcttttgcttagaaaaagcttcttctcatcaagagctttcgaatgataccaagattatacaatttggttatgaaaaccctccaaaaataattcccaaaaagcgtcattttttaattttttggacaaaaaaataaaaaatattcatgttgcacaacggactcgaacctccgccctttgtccctttactatctcacaaaaaccactccgccacacatgcattcactttttgaactaggggctcaaaattgactcggtgtgtttagtaggtattttcttagttcagcggattggtctgaatatcatttttttttttttgagtttagggaattttttttaaatatttgctgttatgtttgctctttcaaataaattttttaattttattttatgaaaaaaaatgaaatccgttgattttgatgatttaacaagccataacaaagcttaaatgtgcttaaattaaggttgctaaaaataaattcaaccttaaagaaggactttttgtcttaatcaaatg

SEQ ID NO: 115771 - DNA, 242 bp, Heterodera glycines
tgtgagcaaaatttttgtgcattaaaattttgaattaaaatacctatcgtttttacacctttttactcactgttttttttaggatttgcaacgacattttggtggacattttccctcattttgaccgtcctcagctcggcctcaaattggcactgctttcaccacgttttgaagcgctggtggacaaatattttgacggcaaatccgaactgacaatttggcgtccgatctccgttcacatg

SEQ ID NO: 115772 - DNA, 101 bp, Heterodera glycines
agccgctgggcagcagactcttttggctttgatggttcggctttttctaatcactttctctccaactttgaatttatttgtctttcagagcattgaaaatg

SEQ ID NO: 115773 - DNA, 235 bp, Heterodera glycines
ggcggcgccaaaccgcccgattcccctccctcgcgccaaagtggcttttaaaaagtgcgcttaaaaaaaagaaaccagtcgcctgggggcaaactcagtaaatgaaatgtcaaaatttcaaaatatccccgtttaaaatgctcaattttaaagttccttacagaatcataaatattaataatctatgaatttagtttaaaatttttgtaatttttcaaaactttttcaaaaaatg

SEQ ID NO: 115774 - DNA, 759 bp, Heterodera glycines
tttcttttctttcgttataaaattcctttgttaattagttagatagaattgaaatacttatgcctaaaatcgcaaaatagacattaataggcacaaaaataggcaaataaaaaatcatagacatcctaaatcaagcggaaaacgcgtttttcgtgcttatctgagcttttttaattctcgggggtgggtgaaacgtagcgcacccaaaaacgaaaccctagttattattaggcccggatcacggacaaaaaattaaaaatacaggcagaagtgtttgaatttggtaaacttgacaatatggacaaaaaatttagttctttaatttttgtgactaaaagcgaaaaatagtaactttcacgaaaacaaaaataaataataaaattaaaatatttaatatcaagagaaagatatataacaaatttttaatattttaaacatggaaaaagagacaattttcgaattttgcaaatgcccaaaaatggaagaaacataatgaaatatggacaaaaatgaatttgttaaaatccacgcaaatcacagagaaaacaatcaaatccgtctgaattttaagtccagaatttccgtcactttcagttgcgttgacagaatttttgtgtcaaaaatggacatttttgggtatttaaacgttctattcattaggccaaattcatttctactcacaacaaccatttgccattctgctgactggtgtttcgtatttgcttgtggcttcttcctttttcgttatgcaatggaatg

SEQ ID NO: 115775 - DNA, 191 bp, Heterodera glycines
aaaatcccattttgttttaacaaaaaaaataaagaaaaatttcggaaattttagattccctgtaaattggcgtttttattgccaaccaaatctcgaattattcaaaatatgccgaaatccggtctcaccaccttttcagtgttcctacgtcaagtaatttacattacgatttgttcacagcagaatcaatg

SEQ ID NO: 115776 - DNA, 270 bp, Heterodera glycines
  unsure (1)..(270): unsure at all n locations
ctctatccncatctgaaaacccaaaaatttgggatttttccctctataaatatcagaccctgtcaagttatttcaagattagtctaacctttgaaaaatgtagcctgatcaaaaatcacaaaaatacaggatttttaacccaagaatccgggtctaattcctggaacctagccctaacaaaatttttgaaaatctatgcaaatcctcataggttcgctggacaacaaatggagtatggacacgccgcggcgcgcgtatgataaaagtatg

SEQ ID NO: 115777 - DNA, 511 bp, Heterodera glycines
aatacaataaaagtaagcgaatttctaactttttaaaattatttattattttcagcgctaattaaaccttcaaattatgacaaattaaaaaaagatgaagcaatattttgaaattaaaggaaaattttaattttatttgtttaattaattaaaaaagcaatttacaaaatttgttggatatgaagccaattatggtcaattaattattttttttgaattatgtgcccaaaaaaaataaatcattttgagtaaattgctacactttccttttaatttattttttccataaaataaattattttataaattattattttttgcaataattatttcttaaaaaatttgagtaaaaaattgatttccatattatgtatgaattacgtcgtgaatcacatattaatttttaaaatattgttgaaaagaaaaataattgcgtaataacatttaatgcgaataaaacattaaataaattcatttaatgcaataaattcaatttccaaaagtaaaaatg

SEQ ID NO: 115778 - DNA, 144 bp, Heterodera glycines
actaatgaacaaaacggggaaattatatgtattcaagtggaattggaaaagcattgacaaatgagcattgtattgaatggagataaaacaacaaaatgaaaatggacaaatcactggagaaaggcgcaaaagatcaaagaaatg

SEQ ID NO: 115779 - DNA, 700 bp, Heterodera glycines
aaattgttgaatcccaattttcaccctttttttattcattcgctttttgaaatattcctttttcatgcaaattttattatttttgttatttgtttatgcgattctgataaattgataatgaacttagttttttataattttttaaaatgtagttttcgactttttcactaatttttggcttgggcgacatttcgacgcagcgacattatgacgcggcgacatttcgacgcggcgacattttgacgggcagcgcattaggcagagcaactttcaagagcatacatatttaaagattaaacattcgtcataatttgtcttctcttttttatcggttcatttcatcttccgccctcccctccccttttttcggccgatctctcccccccccccattctctccctcttttctcccatcagtcgttcattttcaattatttctttctcattttctgttatttgaaattgcaattatttacggttaaggagatgaatttattgcgtttgttaagaaagtgcagcgaagtgaagtgaaaggggcgcccatcgcttctcaattctcagcaaacgccggcggataatccgtcgcatcgattgacctttctttccccgcaaaatcgcacttttctcgcgccgatcacttctcccccccccctcctctgctcatattttattattttcaacagatcacttaaatactaatg

SEQ ID NO: 115780 - DNA, 1003 bp, Heterodera glycines
taaaatttttcttctaaacttttcaaaaaagcaatattcatggataaatctcaattgaattttataaaaatttgggaacaaacttataataataatccaataacagtatgttggttgttttatcttagttttcgaactttttgaccaattcaaaacgagattcttaaacaatttatgaccgtttgtgctacatacaacacttaaagctacagttattttttaaataccgtataggactgagcacagcggacggccaaaacgcttaaagcggaggcaaaagacccaaaaaagggtagggtgaatgggatggcttgatagctcagacggctccctgaaaatccgacaccggtaaatacgacactggaaaatgcgataccgtcgaaaaattagacaccgagagaaagttgttcatttcaagaaaatgcgacactcgtaggataaataatgatttatccttattttattgttttttgcaacgattgtttttcgcgttaatttaaaatatttttgcatccttcatttaattttccttttgattgttgtcttcgttttcgttcttcgtgttctctcaagttttttatattttgtgcttttgaattattgtaataaaactacaaaatttggtgcttttccccgtggactttcattcaacaacaacaaacgcccaaaggcttaattggtactgttatttgagttcctaattgcaatttgccttattctctaattccttgtcagtaaagtggtgttgaaaattaagtaaatctttccttgaccccaaaatctcaacccgaaccccagcaaatcccaaagtccctccccgaatatacgccctttctccaacgtggcgctcctgcaaaagcgacgtaaaatccaacctttcgacgccgaattgcaaaccgattgtgtgcaagcgacattggaaatttggtcaacactaattttggaggatttttgttttgaattttttctttctccttttcatttcaaagtttagaaatgtatg

SEQ ID NO: 115781 - DNA, 1003 bp, Heterodera glycines
aatatttcgaattaatccaattttatgaaaatttaatagcattttattcgaggaaaatttttttgcgtccagaatttacggacagaactcgtctgtacggtctctttcggctaaaaagtactaaataagtgtgtttcggcccaactgtagaaactcctaacttaaaaggcgcataacaacacaaacaaacaaaaaatgtaaaacaaatatatttattttcttggctaaattaataatataaatttattaatggcttgccgaaggcccaactggcaatttaaacataatcaaagacactcaagcaggttaagtttttttatcattctgaatggcatatagaaacaatgtagtcagtccatgcttgtcggacttagctcttttgatttgtccatcgggcccttaatacctatttttatatctatatgtcccatacaattattaccgaaaaacatatttccttaagtgactcacggtccatatacgaagcaatttttgaaataaaatttgaacccgaaattcgtattggcttacaaaaaactgtatccgttacagagaatttgagtggggaaaaagtggcagttagagatgttcttaagataagatgtatctatctattttaataaaaatacaaaaccttcgcttaaaacgtcaaataattcatccactattaagccgactaatgccccagctccgccaattaagagctcagatttttttaatagccgaacttcacggaagttttcccaaatttaaatttggccgcggaatattttttacctatttatgtacatattttgaccaatgttagaggtggcttattatatatttttacctagtcacacaaaattttcaaggtacttagaacccgtcttcgcactaatccaaagtctgttcttattgatttcgagctcggttttttatttttgaacttttgaatttattaaaataattaggagcgagaagcgcatttaaacatatttggcctcaaattcaaattagaatg

SEQ ID NO: 115782 - DNA, 952 bp, Heterodera glycines
tttctcttttttttttgacggggtaagtaaattttagtttttggatggcactttttgatgataattatgatgccatcatcttccttatctattctgtctatgaaaaggggcaaattgtgtgataaagaaaaaaggcattgcggtaaaatcaaaagaaaaatttaatggactatatgcaaatattctttttgtgacgggccagccagattacatttgggctaaacaaataatttcgtgtcagtggaaaaccaattcctaatcccgaactcgaacaagactcaaaattcgaagttttcgatttggttttttttaatttgcgttagcatcgggtcagttcgccgccccgtatcgtttctcccccggccctcggggtttttttttaaataaacttttgaaaaaaaaattaatgattttttttagaaaatttttgcataataattcatgaacattcttgattgaaaaaatcgctagaaaattttaatttatttttaaattaaattttcttgtaaaaaaattttcgtggtgggagaggggtacgaactgttccattttggggtcgctttcttttgattttaccgcaatgtcttttctttatcacataatttgccttttttttaaagactaatcagataaggaaaatgatgccatcatatttatcctccaataaaacgaaaaatgtgccaccaaaaaactaaaaattactcactcacccgtcaaaaaaaaagaaaatgccaaaacttcttccagcagagctgctcttagaaatgactggctttgtcaaatttagccgaaaatgggcaaactgtcgagtgtcatttctatttgacaaatttctgattgaaaaaattggccattggttaattcacatgcaaaaaattgtataaaaaatttaaataattaattaataattaatgcagaaaatttttaggcgaaaaaatgcaccgacaaaatg

SEQ ID NO: 115783 - DNA, 75 bp, Heterodera glycines
tgcaagtataagcgcagaagtgaatgaatgggaagaacaaataccaaggaaaaatgacagaaaataattcagatg

SEQ ID NO: 115784 - DNA, 336 bp, Heterodera glycines
aaaaatttaaaaatttagcctattaaatattttttttaaatttattatatttttttttttgaaaaattccgagttccgacttccgacatttttggggtcggaattccgacttccgaaaatttttagtgcctcggaactccatccctgctatatagcataagtattttggaattggcatacattttgtatttgcaataattttcccaacatcatttggtccttcatagacttgccttaattaattagccaactaattaccaataaatacccaaaatatccatcaaatataattcctttttttaactactaattaataataacaccacccaaaaaatg

SEQ ID NO: 115785 - DNA, 557 bp, Heterodera glycines
ttttgttcacttcgcgcgacatttcccgacaaatttagagcaattaacaaataacaagcttattgattttctaacacagcaaaaaaggcataaaataaaaagttataataaatatttttctccatttgttttctatattaattaactaattaattaggacatataaacttgtttaattacgtaattactcataaagtgaattgcattccgtgatcagcataccaatttgcgggttacttgagcctgggacatgtgaaaacgttgcaaaacatgatatcgatttccgttttctccaaaaaaagaatgtgagaaaatgaatggttaaagaataaaaaaatatttattaattaaaattctaataaaattattttaattgtgaaaaattttcattttaacaatttttatcattttgttttcaaattcactttttaaaaacacttttaaattctttgattgccatggaaacgaaaataaaaaccaaatttttacttttgcccagggtaaaacaacaaaatcatttaaaaatattttatcaaattgtttgctattaataaatg

SEQ ID NO: 115786 - DNA, 1003 bp, Heterodera glycines
attattttgggaatttttgtcactaaaaatccgggccctatttatctaatatgaatttaacggttattttttgtcaattacaaaaatatttcaaaatttgttaaataaaaaaaaattctgtgagaaaggagacaataataggagagattttagagtaatattaggtattgatgaaaaaattgggcgattgtttcatttttgtaattgaattctattgttttatatattttatcttgatttgacattttttaataggtaaaatcagtgtccgtaagcttaaaaaactttattcaatgccggcttttgccttctgatgaaagactctgctattcaacaactgacagatccagaaattgaatctgctctacagagatcgaaacaggtgatttttaaggaaaatttgcattgggtagggaatattttgtttgttattcgcattttgcaataagtgagtgttttatgttcacatttgattttatcacatatgtatatgagaatgcggcaattttggtgaaatttcttttatatttgtttttgatgatatttgtgttgataatggaattacattatacatttacattgcattgcatttccatttttgaactccaattttctatttcgttgttacaatatatctaaaattgagcggtcctatttagagtatacaacaggcgaggtctgcctcgttgcgaccattttatcattatgcatttatttagcttgctgcttctaacggaggacaaaagagaacattttccgacgacttgaattgtacgtacaaataacatttgtcgcttcacatttgccacacattttccttcgtttttttcattttcatttaccacgcgatttcatagtgtttgtacggtttgcaaactttgaatttcatgtgcattttcgatttaaaacattgacatttggttttggggtcaatactcaatagcggtttaatgtcctttttttagtttatccggccaagcgaaagagtaacggtaccgacatg

SEQ ID NO: 115787 - DNA, 752 bp, Heterodera glycines
ttgccaaattgttgaaatccaaataaccacacctggtggctccctacacttgctgagtgttaaggatttttgaagatttgaagataaaaccgcgtattgcggaacctcaccacaattgtgtcttttggtttttagttgaattgaactgctatattagcagacctcacaccacctgggtgctattggttttcgatgaattgcagtgtcttcagtagagaagatggctgctgactgcgccaatttgttgtgttcctccaattgaacacacaaagaataaaaatatttattgatcggtcggtggacaaatgcaaataataataaaaacgaatgaatgagggaagagtccaaaaaggaggggaatggtctccttataaacacaatgagaaggggggaaagggcgtggagaacaaagtacaaatatgaaaataattaaaaaggtcaaaacgccaatttaacatttccaacaggcacaaatgtcggggctccgggtaaatttagggaaattttgaggaggcgcggaattgccaaagacacatcgtaaaaatgacgcgattggtcagcagattttccctaattgttgcaaattaatgcacaaccgagccatttggcacttctaaaaatactgtttttatgaaagttttccaattttcaatgaattttcctgattttctcgtattccccccccctttttaagatgggtggacaccgccttttggcatttgttcttctgctccattctcattgtcattatg

SEQ ID NO: 115788 - DNA, 1003 bp, Heterodera glycines
atatataaattgtcctatcccaatggggaattgaacccaagggacagacaacgaaagaaagaaggcttaaccaccagactacatatatatgtttactttataatttgtaagcagcggccggaaaaaaaattgtaatttttaatgcgatttgtttacagatatttgtcaaaaaatgaccaaaatttaaaattgtgactttatgtcataaaatttcaaaaattctcaaccatgagaaaaaaattacattttcattgacataatgccataagtaattaaatattgttgaaaattacaaaaatttgtcaaatttctttgaattttttaaaacttttccaaatgcttatttccaaggacgtccttggcatccaaggacattttttattttcaagaaagagggtccaatttcaaggacgtccttgccattcaaggacggatggaagccctggatttacctattggttttatggttttttatacatttatattaaaaggaaatgaacaataatataattttgggattagagggggccagagactcgttaaaatttaggtaacatgtacttgagaattacggttccaacaatcaaacgttttatgtcttgaccatacttacctagtttcttatgccacaactttgttttctaacttagtcaaatcttacattcttgtttcttgagcacaaaatttagataatcaaaaacttatagactttaagctttcgattgataccaagaatgttgtggtcttgatcaagtatgaaaaaaagttatggcctaagaaatatgtgtggtcattaattggacgcataaactgcagtagagcccttttttctgttatagccacccctccattaaagccacccccatacgctttctttggccacaaaaataagttgcgcatttacaatgccttttcaattcaggagaatctcagcatacaaatacatattttttgtccaaattcccgtccattgttgtaaatacacaataataaacaaacgatg

SEQ ID NO: 115789 - DNA, 160 bp, Heterodera glycines
tttataagtgccattgattaagccaaagtaaaaaccgcttattaatttcggtaacatttattcaataatttttatttgaattcgttaagcaaaaaaaatatatataattgtgcaaaaaaagcattatcattgaattgttaagtgtgcgggcgcaacgatg

SEQ ID NO: 115790 - DNA, 518 bp, Heterodera glycines
ggtaatttcgaaatgagaaaatttgctgaaaaaaattttcatttttcaaagttggcaaacgcgcaaagaattgctgagctggagcaacagttggtcacacaaaaagtttgcttctttttccccgccgaaatccatccaattttgagcgaaaatttaagggaatggaaaagcaaaaaattgcgcaagcggtcgaagaacagcggaaattggacgaaaggttcgcacgattaggaaaatttaaaaaaaaaattttttttttttgtgattagtctagttggctcagtggtttttgtagtatagtcaatggaaaagggttgaaggttcgagtccgccccatgaattactaattttcttctaggcaaaggctaagcgatttttgacgatttagaaaaaaaaatatgggcgttcaaagaaaaaaaaattttttttctaaccgacccacttcaaaatttcgacaatgtgtattgcaatttttttatgtctgtgaaattatgtgttcgttcagtctttccaaaatg

SEQ ID NO: 115791 - DNA, 205 bp, Heterodera glycines
agtacgtcaaaatgagagatgcatttttctcttcattctattttttcgttaatccctcgttttttgggacgaatttttcaataattaacgcttaattattgcagttgcagcaaattttctcagattggcagtactaatacgtatcaatgatgttaattttaaacaattgcatttcctagagataaagaaattggagtttgaaatg

SEQ ID NO: 115792 - DNA, 208 bp, Heterodera glycines
aagtgaatgttctaagaattgtgactaaaagacgggggcaatcgtaaaatgaaaggcattgccaaagagtgggctttttatagcaccaaaagaggaggggggggattcgctgagtgaatccggcgacgtttcccttctcccctccacagcttggcaatcgcagtgtgcgcgaatgcgtttctttttactacacgtggaaaaaggcatg

SEQ ID NO: 115793 - DNA, 298 bp, Heterodera glycines
acgccaatgcaattaaatgctaaatgtcataccctcaagtcaatttgctgcagtgaaagtgattcgtcggtaagcatccccgacggcgcttgtgacgcgtccccttggcacttccaaaccaaatagtccaccaaagcgtttgttgaccggtgcacgtcgcggttgctttgcagagaaagaagtttgtagcaaagggccgggaaattgggcgcactttggtgggactgcttgccggggggcaattggggatggaaattggtgaattcgtggaggcagcgaaagattgagacgagcaatg

SEQ ID NO: 115794 - DNA, 79 bp, Heterodera glycines
  unsure (1)..(79): unsure at all n locations
attgattaatatcaacattattttattntggtcgaattaaaaaaagttatgaatctttaaacttgtctgcgccaaaatg

SEQ ID NO: 115795 - DNA, 74 bp, Heterodera glycines
tttcttttactgaaatgaaataaaaaattcaaagattttcagtcgctttgcaatttcccgagggcctcacaatg

SEQ ID NO: 115796 - DNA, 158 bp, Heterodera glycines
cgcacattgaagaggtcttcaatttgaaaattttgggttccgtgtcaagccagagaaatgcctctttcgtcaaagtaagagatcaaaaatctcggatttatcattgatcaggacggaagcgaccggaccaaacaaagagtcaggctatttctgaaatg

SEQ ID NO: 115797 - DNA, 148 bp, Heterodera glycines
  unsure (1)..(148): unsure at all n locations
tgggatttcgattaacgcaattaggtaattagatgcatttatttcncattaatatcaataaaataatttaataaccaaaaaatagacgacgacaaagaaggagaagacaaagaaaaaggaggaaaaggaaagggaggagatgaaaatg

SEQ ID NO: 115798 - DNA, 54 bp, Heterodera glycines
aagctgaattaattcaattccttaacttaatatggtcgatttaggcatataatg

SEQ ID NO: 115799 - DNA, 501 bp, Heterodera glycines
gtcatgttgtgatctgttgcaaagatatacaccatgtaaaatatgccaatttttgacggtgcaaaagaataggcttagactcaatttttttaatcgtttaaaactcaatttttaaatgactcaaattttaaatcgtttaaaactcaatttttaaatgtaactgaaaagtccctgctatgctaataatcagggcttctttttttatgtagatgtttttttcctgcattctccatagcctaattagtaggaaaaacactttctttttcatgtttgcgaacaaaaatcgggacttttaaaaattaaaaattttttttgaaaatgtacccctaaaaaatcgtttttttaaagatattaaaaatcaatttttaaaataaaaatgtgaacgaattgttgcattaaaatgagaatttcccgactaaaaatgtgttttttgtgcacttctcagtgaaacgaagcaacagaaaaaaaaatgaaaaactaaaaatcccatccctgcagatg

SEQ ID NO: 115800 - DNA, 242 bp, Heterodera glycines
tctgaagaacaaaaatgtcaatttgttcggctggaaaaaataagcaattttgaggactgttaaatttaatttttaaaatttgcccatttaataaaaaataatattccgttattttggggcgctttccccctgctgatttggtcttgctggagcacttttcttaagaacccaagattcactagcaatctacaaaatttgtttccaaaactccacggacacttggccatcctcccctgtaaatg

SEQ ID NO: 115801 - DNA, 1003 bp, Heterodera glycines
aattaatcaaagaagtttttaagtcaataatttagttaaaaagttaaattgaaggggggtgacttaattttcttggccgggtcacaaaaaaccaatcgctttttttgtgtccaaatttattcattataagaagtttaaatgtttacaacgaataaagaagaggcagttaacgaattaactaattatgatggcacgggaaatttaaaaaagaaggaactgctgcaatcaacaaaatctctggcgaaaaaacaaaacaccaatctcactattctaaatttatttaaaattaaaaaaccaattaatttattaccaaggctgagtttttaaaggctgcctattttatgtgttccggaaaaccttaacgttaatccgcctgataccggtcctaaaaattttatatatacctattctttccctaaaaatagagtttttaaattcatccccttcatttatatgattttttatttgcaaaaacccacaaattcatttttttagttcaaatctgttaaaatatggccataattctcaaaatttcccccgggcgcctgtcggaaccgccgggcctttccttagtcggtccgatcaattcttggtgcaatttaaataaaaatgaatttttctttttcttttttccttttattaaaaaaacatttttgaaatattgcatgctaattagggttatcgaatgatgtcacatatcaacgaacaggtttttattagttgactctgagaaaatatggcattagctatgtatgttagctgttctttcgtgatcattgcttacaagaatttctgctttgatactacctgaagatgcgtgcgttttttctcaaacatctcctaattcgtcgcttcttcttttctgattccacacgttcctctatttatgaaattctgccttgtctttttttctaatataatttttgttgtatttatacgttgtatatatatatatatatatgaatacgtcatatcttttttaaaaatttctctccaggcaatg

SEQ ID NO: 115802 - DNA, 1003 bp, Heterodera glycines
ataaattattgttgaataattaaatttctttttttctgtttccaagttctaaagcctaaataattcccctgatcgaaatcatttcgaggagggctctggaatttattaaattaggatttttgatgcataaattattgttgaataattaaatttctttttttctgtttccaagttctaaagcctaaataattcccctgattgaaattatttcgaggagggctctggaatttattaaattaggatttttgatgtgtgctaatattgtgattttaaaatatatttggcgttttgttatttaatttgtttcatttttgtttgtgatttttgtggagtgttggttgttagtttatgctgtcgcagttttcctattgattgtcctcgccctaattttatttggaattaaacgataatcatcttcggcattgggctgtattgttttgtgtttgctttgggctgttgtcttttgccgtgggcagtgcaacaacattattaaaagccccctgacaacaatcatatctgtttttacgacttggcgctcctggcaccggtgaatcagcagtggacaataagaaatttggacgtggcctcgaattgaaaaaagggaaagtaaatccctcgacaagtgttgaagaaatcggaaaaagggaaaacaaattcccaacaagagaagagcctaatcaaccgactgtggacagctaaaaattgtaaacgggtaaagtaaaacccacgattagacgagccaaagcgacattccggtaaacgggaaacatcccccaactttcaacggactgtcgacaaaaagggtgaacaaaaacccgggaaacgactcgaggagcagacgaacaaggcggaatttttttgtttggaaaacgggaaaagcaaatccctctacttcaaaaggaaattgtgaaagaaatcacgcaattttgtcagtccggtaaagtaaatccgtcgacaaaaactgactcgcaaaaccgggaaaagtaaatcccaattcgacatg

SEQ ID NO: 115803 - DNA, 150 bp, Heterodera glycines
cggattgattatcggtgccatttttacgccaggtgagcgcaggccaatccacggtcaatatcattggccaattggctatgtttagcatggcgacaggtcaagtcgaacctccaacagggacagctgaaccaactgcccccgttggacatg

SEQ ID NO: 115804 - DNA, 133 bp, Heterodera glycines
gaaatttgaataaaaaattgaaaataaaaaattttcaaaatttttttttttgttttaaattggattaaaacaaaccaaaacgttttggccccacgtttttgacgcccatgtaggggggggggggtaagaaatg

SEQ ID NO: 115805 - DNA, 248 bp, Heterodera glycines
  unsure (1)..(248): unsure at all n locations
ttaaagaaaaaattactcatttatatctataattttgttatcattttaatctattaaattttaaaattgtaaaacacgagactcaagtggcacaatccgaaatcccttcattcaaatcatcatgaacgaattgttaaggttggtaagaaacaacgaattntgggcacccgacgtttcggggccgtacggcgagggcaaggataagatattggcttttctactgcgtgccagttgacggcacattaatg

SEQ ID NO: 115806 - DNA, 136 bp, Heterodera glycines
ggtaataatttaaaatatttcgaattttaattgatttttgtctttttctcaggaattggccaatgcccgtccaattggccgaaattagcgacaaaaaattcggcggatttttgagttggtcgccgtacagagaatg

SEQ ID NO: 115807 - DNA, 138 bp, Heterodera glycines
gccgccgccaccaccatcacaaattgaagatcgtgttgccgttgccaatgccaccatcaaatgccaaagtcgccgcccgacagaaggccaagacttcatcgacaacaacagtagcaaaagtcgtcgccacccaaaatg

SEQ ID NO: 115808 - DNA, 387 bp, Heterodera glycines
ttttctcgccatattcatgcgaattttctaacattttccgcacgggcccagcgaggacagagaaagaatctgaaaaaaacaaatgccaagcaaattgtgagacggattggacgcgttaccccaggcgatgtccaacaaaatgatttgccaaattgtgttgtggggaaaacagcggagcaaaatgacagtgataaaagaacaattgagaacgacgagaagacgctgaactcgtgccgaaagtcggtcagtgaacaaagcctaaaatggacaataaaagggaagaaaatgatggaattgaaaaggaaacgaaacgaaaccaaagagccaaatgtgaaatagaggaagacgagaacaaacaacgaaaagagttgaagggaatagccaatg

SEQ ID NO: 115809 - DNA, 1003 bp, Heterodera glycines
aagcgaaaatttcgcttttcaggttgatttttttgctaaattagtaaattttaaggtgtatcgtgttttttcttcaaaaatggtattttaataccatatttagctatttttgaaagttttaccttacattgagcgaatttgaagaaatttttaaaatttacaccccaatttggaaaaatttatgtccatatttttgccattttatgtccatatttcgcgatttttggtccatattttatggccatattttgcgattttatgtccatataaatccccgccctaactattaccgacaaaattatgcaagatcacaaaagatgaaagtgaaaatgaagaaattaaatttaatatagactattattttattgacttcatcttctgaaacaaaacaaaaaaaaattactatttctgcgtttttgatttttggcgccgaaacgaccctggcgccgaaacggcggcgccgaatcggcggcgccgaatcggcggcgccgaaacgacccgttcccatttccttcaacttcacttcgccaacatttgctcgcgtacatacataccacatattgattttcattcacatttttcttctcgacaatattcctttgtttttccgtaattttaaattaaaaaaaacatttttaatcatttatttttaaaatttataaattaaatttatatgcattcattaattaatagggattccttttttaggcacaaaaaacgcaaaatatgcattaaataggcacaaaaataggcaaataaaaatttttattttgtctatattttattgcaaatgaaagtaatttaaatatttcaacttttttttgaataaggccaatttttaaataaaaaattttatcaagaaaaaatttctaaatttagaggatcaatttcttggaaaacttttttacttcttaggcgtttattgtaaatcttaaaattattttatgatatatacgcgacgcattttacaataatagatttcaattaaattaacctgaaaatg

SEQ ID NO: 115810 - DNA, 118 bp, Heterodera glycines
ggtgctcctttcggcccattctttcccattttctctcttatttagtcaacgatcaccgcaactgtgccaatacattcgtcgtcagtgttaagagtgccaaaatcaaacagaagaaatg

SEQ ID NO: 115811 - DNA, 62 bp, Heterodera glycines
ggtaatccgcttaatgtacatttattttattattaattattttgcttttgccttcagaaatg

SEQ ID NO: 115812 - DNA, 542 bp, Heterodera glycines
tcatcattttcgcctccccccatcatatcgatgtcccgtccgacagaaaaaagggggtgccgccgtcgtcgtcgtcaacttatgcgaggtcgagagcgatgggagaagacaaaatcagtggagaatgaatgtcttaagcaaaaaaggcgctaaaaggcgcgacaaaaaatttttgatgacaaaagacggcatttttcggagataaaattgggttataatttaaagttaattcagaaaagaattaagctgataatgagattttattttggtaaaaaaagggtggtataattttgatttaagacggcgacattttttgaataataattgttttttttttggagaatttaaatgataaattatgcagaaattggcattttgagggaattttttttatataaaatgcaaagaagatagtatatttttttgaatatgacaatctattttaaatcataatttaaccgaaaattgaattaaatttatttattttattaaattataagtaaaaaaaaatcaaagttaattaggcatttaattgaaaaatg

SEQ ID NO: 115813 - DNA, 1003 bp, Heterodera glycines
gtgtgcttcccctcccctccgctttttccatctttccgtccccatcggtccttgggtggaaaagctttcattttctaaattatacttttattcatttttatgcaaaaattattttaagtttttctttaacattttaaaattttcattttaaatttttgcagaaaaattctgattattacgcaaattattcattaaatataaatgtcgagcagtttggctgatcggatgaagctgatgttgagcacgggcgaggacgcggatgtgcactttttggtggggcaagaagacgcaaatgaggcgagttcggaaaaaatgtatgaaaaaatgaattctatctaatttgaaaccccctccccttgcaccgaaattgacttcaaaatttaaattttttgttttacttttcattgtttgtttcaatggatttttattttaattacatttgtgggcgtgttggaaaaacaaaaattaatgaagccgatgggggggggggcgctaggaaaatccaacactacaccaactttaaatttaaaaaatattttgattgtttttatcaagtttcgaattgaattaaaaaaaacaaattggttgcgccattcgatgggatattgccggattgtttacaaattttttgagatgatcaaaaagggcatagaaataaatataataattatatgcctaccttaaataggttttatggcaataaaatatttattttaaagaacttaagtatgtaacttttattgcaagtattttaaacattcactaagtcaaacaatcaaaaattatttgaaatttaaaggtggtatggtgtcggttttttcagtgtcggattttccagctccgatggagtggggctttaccatttttaattgtgaattgattttaagctcatacaagcccataaagtcattttgaagcgtgcttcggacgtgtttggggcaatgttccgttttgatgcgaagaaagaaaaaacagaaaatagtaaaaactcaataaattaatg

SEQ ID NO: 115814 - DNA, 629 bp, Heterodera glycines
aggcaattaagacattgtttaaaaaaagtgatcaaaaagaattttaaagagaggagaggagagagagagaaggagagagtggagaaaagaggggaaaatgagagagagacagagagaggggggggggagggagagagttagagagagagagctagagagagagagagagaggcggagagagagcatggggagagggtagagaggggggggggtccttgaaaaatgttacttattagaaaactaattaggcaattaagacattgtttaaaagaagtgatcaaaaagaattttaaagagagagagagagagagaaggagagagtgagagtggaaagaggggaaaatgagagagagacagagagagggggaagggagagagttagagagagagagagagagagagagaggcggagagagagcatggggagagggtagagagggggggggggtccttgaatacttattagaaaactaattaggcaattaagacattgtttaaaagaagtgatcaaaactaattaaggaatgaaaaatgcattaatcaactgagacaattttggtgcataaaaaacgctgatcaaaagagatgaccaatgtcagaaaaagcaccctgttgatcagtgggaaatg

SEQ ID NO: 115815 - DNA, 759 bp, Heterodera glycines
  unsure (1)..(759): unsure at all n locations
aacttccacttctnancancnncanntnaattaacanataaatttctttttttaatnanactaaaanttctncnatttatnattcctaatnaanaaattcnaaantnaactnttcttctatnnttccnacannaaannnncaatatcctcaaaatannnnncaaaatcncatccataaaccaaatccaatttcnnttctcaatttcccnaatctttnnttcccatttncantnccacatnaatccttttttcaataattttancatnttttaataantncttcntcaaattcccccatnattnaactnctaaaaatttcnnnnnttnnaanttctattcaatnatannnaatctannnnacnnanncatcnatctttcntcnttctctaattttctnttctctatttctcttcacttcttttnatctcnccntatccacttcttttaatnnnatancantaaatttcaataaattctnttaataaattaaaatatttacanttaacanaatatcatttntcaattccaatanactacaaccttctttttggtcaaaaaattagcagtttatctttggcgcttttttattatgaaaaggtaatttatttgaatattttattcaagcaattagcattattattttagttaattaagaataaaaatacattgataaataatgaaaacacaataaattcggacgcaaatggagaggctgaagaatgcccaatttgcttacaatcattagacaatgaaaaaatg

SEQ ID NO: 115816 - DNA, 174 bp, Heterodera glycines
ttttttgaattgcttcatcaacaagtggtaatcttaaaaactaattaagtgtaatataaaaagttacttttccgtaaaactttcgcatttcgacagtaaaatttaaaatttaagttttgatttttgtaaaatttaaattttaataattttacaggtgggatttatccgacaatg

SEQ ID NO: 115817 - DNA, 120 bp, Heterodera glycines
ccaaagtcggcactggcgctggacggcgcggacgacaggggccggcgccactcgagtccggcggcgccggacggcgtcggcccggcactggaacgcgtgtccgaagtgttgacgaacatg

SEQ ID NO: 115818 - DNA, 107 bp, Heterodera glycines
aagttgcggttttattagatatgccgaaataatgaataaataatttctctatttctttctgtaagaaatggactaaaaaatatttctttttcaggcctaaacaaatg

SEQ ID NO: 115819 - DNA, 56 bp, Heterodera glycines
acctgacaaatgcgtccgaattggagcagttgcgcaatgaaattgaactaagaatg

SEQ ID NO: 115820 - DNA, 184 bp, Heterodera glycines
  unsure (1)..(184): unsure at all n locations
ttttgggaagtgtcattcatttgtggctttccaaacgtatncgctgagggaatggcacattcgggacaaaatatgccnnnancaatgccaattgggtggcactttcaaaatgcgcagggttntattttatgttntattttattattttgaatattcatttcagacttctgaatcgttttgcatg

SEQ ID NO: 115821 - DNA, 123 bp, Heterodera glycines
gaatatcctatgaaaccacaagattttctccttttgtatattttgtaggattatgttttatttttatttttagcatcacggtcataaaaaattttttaaaagtctccaattgtctgcaacatg

SEQ ID NO: 115822 - DNA, 99 bp, Heterodera glycines
cttcctgatgctttgccatcaggagtaagaattaaattatatgctgatgatgttaaattatatatttgttataaagcaagaaccgaaacagaaattatg

SEQ ID NO: 115823 - DNA, 1003 bp, Heterodera glycines
caaaaataaaaaataaaaataaagtaaaaccatgattttttttcttgcacttcgttttcccttttttctcctttttatgacaataatttgcttttaccctttatatcactgattatttccgaatttttcatttttaattcattttctttgatcatcggttcaaattccgctcgaattttaaacattttttgttgtttcaattcggaaacattttttgtcaggaaaaggcattttccacaactaaggcatttgtatggttgttcagggttcggtttgcttttgccacaactataatttaaaagtgatggaatttcgaaggaacaatatttaaaatcttagtgagacacttgcggaccgcgttttctggattgaactgtctaaaaaataaagagtgatcattcaatttgaatttttacatgtgatttcgtcgccgaaatttcgccggacataatttagccgacgaatttaaaaaaaaataataaaaactcttaaaaaaatttttatatgaaaattcaaaggaaaaattttttgaaaaaggctattgtaaatgtgaaaagtttatataaaccgttcccaaaaaaatttcatttttcacgtccgataaaaaagtaataatttaaattttgaatatttagttatcagcttaccgtcattaatttcaattttgggaggatttgagtaatctttaaatgcattcataacttttttttattttttgacagttcggccccttatcagtccgcaaattgtcggctaaccatttaaaaagtggaatatttgttccaagaaaatttttgaaattttgcaaaaatagtttttttaggagggagggggggggggggggcgcgaatggcagctcctaatataataattaaatgtttaatttattattcataattctttttcgttttcaactttttctgtctttaaaaataatacaaataaattattttattttttctatgcaaatgtaaaccaacaagcaaagatgtttcccgaaatg

SEQ ID NO: 115824 - DNA, 196 bp, Heterodera glycines
atgctgaacaggcggggattcgtgaatgtttgtcccaaacaaaaaaggttggatggtattggcacttccattttcagtcggtcttttcgtcgaactcaaaatgccacgggcgcccctcccgcgattgtccagctttggtcgagtgcacaaacggtcgagcagtgtcggagtcgggccgaattctcggctgggaatg

SEQ ID NO: 115825 - DNA, 227 bp, Heterodera glycines
tatttcgtttcaaattgaatcattttttttggctttttgaaataaatgtgaaaaatatacgaaaattattttcggttttaattatgctgtacaatgcttttaagccccgccgtgcggcggctccccttttgtgcactattttagtttttaaaattggttccggactttttggctttttgaaataaattgtgaaaaatatacgaaaattattttagcttttaattatg

SEQ ID NO: 115826 - DNA, 446 bp, Heterodera glycines
aattttcttcccccactgctaattggttacttttctgttttagacccccccagaaattttcaaataaaaaatcatttctagggtaatttgtgacggtgatcaccaatataacctttgttttgcaaaattccgaacccctaatgaactcgaacaaaaattcgattcataaattacaaggaaaacgcattttggtaacagttcagtttgtcctcacattttttaattttattttaaagtcataaaaaacattttaaggggtattcgggatagctgatcacgaatataacatccgttttgaacaatttcgaaccccgaacatgaattcgaacaaaaagtcgaattgaatttcgctttttttagaaaaaaggtttaaatggtattttattccatgagtgttagattttggtttattttcatgaatttcattcgtttttagacgaaaaatg

SEQ ID NO: 115827 - DNA, 1003 bp, Heterodera glycines
aagaataaaaacaacccaatgactcatagagcttttaaaaaatgccttccttactaacacataaaagttccaaagaatcaaatcgtaaaaaaaaacagtttctacgaggccgattcagttctgtccatattcgtactgttttcacatgggagatgaacagacacagagagtagtagcatgttagacagtacagtttagacacacatgtacagtacgaataggggacagtatgcttcgtatggtatggtcctcccccaaaatctactatcatccgtacacacatttgctcttttcttcttccctttctcacttctttctattcatcctcctcctcctcctccgttttcctttccaattcttttccttttcctccttttctttgggcgccggacttttcgacagaaatattataaatttgaggaggggacttttcgacagtaaaaagtaattaagttgaaaatataggggttgtaaaattgtaaaatttacccaaaaatcaaaaaagttaagccaaatttatattgagataaataatttttaataatcaaaaagaaaatatataagtaaattttggagatgaatttttgagaaaatttttcatttttatgggtgtatttttctgaaacttttctatataaaatttttttgaacaaatttttggataggctaccgttatctttgtagtatttgtccctcaattaattaccttttttatcaaattgaaaaattacaaacaaagcaattatttgattgtaatgatgtttggtcggtcgatccaacaaaactcagtgtgggcataaaaaaactcagtgattgataaaataattaaattaaattaattatttctattcattaaattaatataattattgcattcatcaattatgtatataaaagtattttttttttaattataaatattgttaacatttaaaaaaataaaaataaacattctttttactttgggattatttttgagtgcaaaataatttagaacaaaatg

SEQ ID NO: 115828 - DNA, 230 bp, Heterodera glycines
aactctattggataaggatatttatgagtgattaattgtgtgttcagttagtgatcgacttgattgacagaagcaaaaattattgtccggctctttttttcatcaacgaaatcagtcgcatggacccgtgccacacatccattcattttttaccggtaatgacccaattctctattaaaattctttatctttcccatcattagcgcgtttcttggaaaatccgcgaaatg

SEQ ID NO: 115829 - DNA, 136 bp, Heterodera glycines
aatctcacctatgcaaaagtacgagttgccttttgtgcgagttgtcatgacaccacatttctataaattttactaaaaaaaaagaggaaatcttttgggagtgataacagattcatcaaaaatcggggtaattatg

SEQ ID NO: 115830 - DNA, 585 bp, Heterodera glycines
cccccctccccccccccgaaaaatgtttctagatacgcccctgggtttatacatgtgcttattttagcaccggccctgccgggaccgggacatttcttttcaataattccgggacctggaaaaccagtaattcccggactggtcccgctcaactctattcaaaatcgaaaactggtcacaaacttttgcagtttcgagggctcgattttttctcaaaaaaattagtataaaagatagagaaaaatggcaatgactgccattttttctacaaaaatattggctaataattcaggggaatgccatgccatacaaaatgtttcattcttgcttttgagcccctttatattgcttctaaaatgacaattgctctttcattttgtttgtgcattgtttaattttaaccgaattaaatttttttttcacacacaaaaaacgaaaacaattccatttaaattgacattttaatgattttttcctcttatttttgtaaatatgtaaatgcttaattaacatgattttaatcagttttactaagcaattttaaatccatcgaaaactatcttaataatttgccccgacaaaatg

SEQ ID NO: 115831 - DNA, 82 bp, Heterodera glycines
aagtatgctcaaattgttgtcctgtcgaactcattctgatttacgcttttaatgtggcttcgatttgcaggcagaaaacatg

SEQ ID NO: 115832 - DNA, 94 bp, Heterodera glycines; identical to SEQ ID NO: 97954

SEQ ID NO: 115833 - DNA, 215 bp, Heterodera glycines
attgtttcaattttcaaactaaaaatatactataatgttaacttggttttgcaatttctaatgttttgagatattaaaactcttaagattatgattgatgcggattttaacttttgagattagggctatacaaaagatacatagataggtgtcattttatacttgaaaactaaaagtgttttcgttttgtgttccgtttgctgtcctctgaaatg

SEQ ID NO: 115834 - DNA, 369 bp, Heterodera glycines
taagagcattttaaagccccaatttcatttaatgccttccatttctttaattaaatgtgtttatattttcgggtatcactcgcacattatcggacaataatgaactgactcaaaaaagcttctgttctgagctcaaaatatcgtattatcgtataaatgaaagacttttaaggccaaaggatgataatttctacagactggctaaaatttcttctctaacgatcaattttgtggaatttttttaaaactgaaaagaataccttttcaaattagccacaaaattgatatattattaattttaaaagctaaaaagatttggccatcttttttacatccctaaagattcattcggttaactaaaaaaaaatg

SEQ ID NO: 115835 - DNA, 676 bp, Heterodera glycines
attaatttttgatttctgtttttggaaaaacccgattttttaatatttacccaaaaaaataatttcttcaaataaaataaaaaaacgttaaaaatgacaaatttaaatactaaaaatattctatttcaggtacattttcaaaaaaaattatcaaaattttcttaagaaattttataaattctcaaaaattcccaaaatatgtaaaaaaaaataaatatgtacgaaaaaattgctaaatatgtactaaaaagtcaaaatatgtataaaatatttacatatgtaatatgtagaaaaatcccaaaatatgtaaataaaagtcccgatttttgtttgcaaacaaagaaaagaaagtgtttttcctactatttagaccatggagaagccaggaaaaaaatatgtatttacatattagcagccctactgatttatattgcaaccggtgaatgcccccccccccccccccctttccctcccttttctctctctcgccattttttgctcccttggactgccccaacccatgtgccgttatttttctctttttcattttgcattcgccatcctttcgtaattggggttcctttgaattcctcctcttcctcttccccctccttttttattctcccattttttcaaattttcattgaatgttttccaatttcagtttctgcaaatg

SEQ ID NO: 115836 - DNA, 115 bp, Heterodera glycines
caaaagccaacagatttcaaaaaggaaatgctgattttcacataattttttcatctttgctaagctaatttaagcacgtccaaaactgtcttaatcatttccgctcaacaaaatg

SEQ ID NO: 115837 - DNA, 178 bp, Heterodera glycines
ttttcagtggtcgtttgctctgaaaattgttatttttttaaacaaataaattttgtttttaatgcttaatttattttcaaattgtaaaagttaattaattaattctccaattttttctctgtttccatttcacttttcattattcggtttttaaccctttaagcgtgccattgaaatg

SEQ ID NO: 115838 - DNA, 175 bp, Heterodera glycines
gactcgcagaataaaaatggcacaatatttgtcgatgacgcggtgttcacggagcaatactgtgccccggaatttgatggtgacaaccatttggtaaagaaataaaatggttacggtaatcaagttgaaattttattagatttctcgaaaatttgacatttggtcactcggaatg

SEQ ID NO: 115839 - DNA, 266 bp, Heterodera glycines
ttttttgtgtcaatatgtgatggaaacgcaacaaagtaaaattataatgttactttttcagttattagcgcctgttttctagatttttattttgaagcctaaaaactttaaaaaaaattttgaaaactatattttggcgtttttaaagtttatttaaaaatgcaataaaaataattcacccttgaaaatcgaccccaaaaaattcttctgcaaaattaagtgaaaaatcctcaaaaattattttttagatttaattcttaaatatg

SEQ ID NO: 115840 - DNA, 430 bp, Heterodera glycines
ggttttgagaaaatggtaaaaaatgtatttaaaataactctgtattttttacttaattatcatggactaattaataattatgactctggttaaaattttactcccaaagttggtaaaaaactggtaattatttttacactcgacttaatagcaaatatataaaagaataatttaaattataccataaattaaaaaataaatgaaaaaataattttaaaaactctgttttgtattgatcaacttcttaaaaaaatttacacaaaattatttaaaaattggctatttagattaattatttcacagctttcacatctttgacactcatattattttttcgagaataatattatttaaaaaatattttcgccgcatttttccattaaaaaatattttctttttaattttcttccaccttttagaaaatattatg

SEQ ID NO: 115841 - DNA, 193 bp, Heterodera glycines
accaacgtttgggtgagtgtcggtgatttacacagcgcttttttataccactttgtgtaattaggcgttaattaatccaacatttaggcagtaatcattttattagtcccttctaattgacacagacacaaattgcaaaaaaaaaattttttatttctttcgccattttctttgacttttccctttaataatg

SEQ ID NO: 115842 - DNA, 323 bp, Heterodera glycines
ttaaatgattattttttcccttttcctaataatgcaaacaaaacctttccgcctccgttttgttcgtttcgttctttgtgtaaaacaactcgcagcttatgttgagtgattttgagcagtgaatgcttttggagtgtctttttggcccatttcattcattttcactttttgatttttgcattttgaaccttcaattttaaaaatgcttttccaaaggtcaaaaatttaggaaattgtttaaacaaatcaatctttttaaaatttgaaataccaaataaaaacagtaaaattaaattattaatatttattttcattttgctatg

SEQ ID NO: 115843 - DNA, 364 bp, Heterodera glycines
cggatcggagtcaataacgacttcgcaaaacagtgtgtcgtcagctggcacacaaaacacatcggccactcaaaatgttgagtcgtctccaagcagtaaaaaagtgaaggtcgaagatgttgaccgaccaatgtctgctattgaagcaatagcttcaacgccagtttcaactcaaagaaaccgtggcagacctataaaaaaaactcgaggaccaggcgggggaaaaacaaatgattcgttgagcgaaggctcatcaatggatcagagctccgaagccactttaaatgtagtggttttgcccaatgtgcctgaaaaaataaatttcaacacagtgccaattaatttcgccacatcgcgaaatatg

SEQ ID NO: 115844 - DNA, 75 bp, Heterodera glycines
taatttgatgttttcattgttttggtttaagaaaagttcattattataattttatgtttattaagtctgaaaatg

SEQ ID NO: 115845 - DNA, 76 bp, Heterodera glycines
gtttttatctgttggacgattcagtcctaaagacatctggccatttcagtcccgggtctgtaactcttcagggatg

SEQ ID NO: 115846 - DNA, 1003 bp, Heterodera glycines
aacggattttcaattttttataggaattaatagtttttcgaaaacatttagaaaaaatcgctgaaaattttttcaaaaatttaatcttgaaattttcgtaaaaaactttttgatttttttttttgcactttttccaaaaaactttttgagaatgtgtgagggaagagagtccggcggtgccgctaggcgccgccggaaaaaaatttgtaatttttaatgcgaattgctaacaaattgtgtccaaaaatttaccaaattttgcaaataaaagccaaacgacgactttttttgcttttaaaaatgcttttttttgcggcacgcttccaaaaaattttggggacagtggctcggcgaaaaatttgtaatttttaatgcgatttcttaacgattttgttcaaaaaatgacaaaattttacgattttgagccaatttaaaaaaaaaatttcccatcccctggaactttttacggtacctacccctgtatttacggtatttcgtcactaaaaatgtcaatgaaatggaatgttttagaacataaaaatattatatttttgatcaccgttttttcaacactgatcacaacaatgctgaacaatttacatattaataccaaaaagaaacatttaattgtccatcacatctttcgctgattaatactttaagctccaatcatattactttttttcaatttttgcataaaagcattttccctctcccattttttaggtcatcattttgctcaacagcccaagccaaaaaaaagaagagattattataaatttctaaaaagtattctaattgatgggtcataattttgcccaaattacttttttgccgtcaaatgccagcccataaatagaggggagattcagcgcaaaagatcaaatgttcatgcattcatttacatgcgaagatgaattttatttccaattttcatattttttttatttaaaaattttaatttgtagccagtccaattaataccttattaattcgaaaaatg

SEQ ID NO: 115847 - DNA, 132 bp, Heterodera glycines
tgctttattcttggggtttggtgcagataacaacacaaatagggggggggtcgggtagtcttgtggactccataaaaaggaaggggctgtgtagacctctgcctactctttccaacggtggtgaccaagatg

SEQ ID NO: 115848 - DNA, 174 bp, Heterodera glycines
ggtagggaaacttacggtagccattgggaaccaaaacaaataaagttacggtatgtttaagcgactgtggagaaattagaagaaacttttggtcaagtcagcgaaatgctaaaacaacagaagcagaaattggaacagttggacaccgcacaacaaaaattatgtgaaaaaatg

SEQ ID NO: 115849 - DNA, 1003 bp, Heterodera glycines
gagcaggacaaaacgtcgccagccgaaacgtcatcgggacataatgtcgccacaaaattgtttatttaattttagaaaaaatttatcaaaaatttttgttacctagcctgcctggtttgaaaaaaaatatagaaaattcataaaaattttttattaagaaaattcaagaaaaaatttttcatattttttccttcttttttctgagaaatcagcaaatttagttttaattaaaatttctaattttcaaaaaagctaaaacaattttaaatttttttttgcggcgacgtttcggagtgtacacgagtagttaacatcccgtacttgtcgtcagtgcgcgaaatgtttttcgcgcacaaacgccagggtgtcgggcggttttgtgtttgaagttgccgcttttggcatgtgttcgggattggtgggggcgggattctctttgaaggggccgacatcccgagggtattggcgggtttcgggaagtgattgattgattgatttatggtcgggagagggggagggggtgctaattgcgcgaaattttgattgatttatggactcgaaaaagggagggtggtggtagggggaatggggaatgcagcgcgagttatcgcaatgcgcgaaaacaatggaaatgaatgagggggagtgcgctgggtggcggcggtgacatctggcaacttgtcgtcgctcaacggaattttgacaggatgcggggggggggggggagagatgtcagagaaaggatggaagggtataatatgcagtggatttggctgaggggggggggaattcaatggaaaatttggagaaggaaatattattaatgtgaagctggcggcaccgtcttttgtatatggcggccattgttcggacacttctgttgatcgttgacagaattgtaagtatctttgggagaaatgggtcgcttggacatcactttctttccccaataaacatttttgtactttttttcgcttttccaataaattcccctagagaaatg

SEQ ID NO: 115850 - DNA, 588 bp, Heterodera glycines
tatggcaacgagaaacctctgatttaatttgagttcaaaaataagattcgaaaaaagatcaaattaatgcaataaagattcagcccattaggttatacatatctagacgggtctatccccttgatctttagtggaaggggcaagcatgaagggagtttgggattgcgcctgcagcggcgagggtggcaccgttatttcaatggtgcataacgaatttggcaataagaatgtttgcgtggccagcattcgttgtgcttgccggacgattttccaaactagttatgcaatgacgaattggggaaagcgaaaaaagcaaatttattttataagaaatatttggcaccaaacatgcaaggaaaggaaaaaatagaaaatcaagagagaacaatttttgactaaacttttggtactttttaattatcggtactcacaatcagatttcactttttttaacaatgaatttgttttaggggttttcagggtaggatccgatatttatttcaaccaattccggacccggactcgagcaaaaagacatttattttgataattgggttatttagttttggagaatcaaccaccaacatg

SEQ ID NO: 115851 - DNA, 433 bp, Heterodera glycines
  unsure (1)..(433): unsure at all n locations
gaaacaatgcagcatcagccagtggacccccagcaggccagagaaaagagagcaccagcccaacttcatcgcttcctgagtcgcgtgccttgaatgcatgnagagcggaaattggcggagggcaacagcgggctgccgattttgtggtccacatcgaactgtcgctttttgtcagcgaccctttgaggacactcgtgtggacaaacgtgttgtggcggacaacccactgcaggcgtttgtggattggctcatcttccaactaccagccaaatacgacacatacgcctactcacactttggcggacggttcgacatggttctggtctttcgcgagctattccggatcgggttcaacccggaaatgctgagacgggtactcaattaagatttttttttctaaaaaatattttaaaaatgtcagggcaacaaaatg

SEQ ID NO: 115852 - DNA, 116 bp, Heterodera glycines
cgtttggtaaaccaatgcgagaattagggcgccattggacaactcctccgaaaggatgatcctggagttggggagatgaccaacagtccgcgttcgagcaagctaaggcaattatg

SEQ ID NO: 115853 - DNA, 69 bp, Heterodera glycines
gatcggaagaaacctgaaggaagggaaagtgcgcgactacacgccagaatcccgggcggctgcagaatg

SEQ ID NO: 115854 - DNA, 731 bp, Heterodera glycines
ttttgcagcaaaaaaatggctaatttaatctttaaaaaaccaattaaaaaaatttgagatattttcatttactgaatattaacaaaataaggacaaatgctagagaaataaggacacttgacttgacagccattggaattaaataatcggtctcacagttacagttcaggacagggcaggagagcagcaggacagcttatttgttttttttaaatccattgtggcgttatgttttactgtctattatttttgttttgtttctttttgcttcaaaatttgcgagccactaattgtgtaagctcctgttctcagcaaacgcgaaaatacatttaaatggaatttcagagctctatgcattggtaggaacgttgtgaattttcaaaatttggaattttctactttcgagttcttgtctggcattcgaaattggtcaaaatgaatggcattttcgagatcaacgtccctaaaactccaataacatgttttcaaaacctttttttccaaaaaggggtggggaccatctgcagtattaccagatcagaaatgctctaacgtcgtctaaaatctgtgaaaattggataaaaaattcctatgctttttttaatgcgcgattcgcgtactgctaccgcggcacccttaaccttcactaaatgaacggatggatgaaatggataagatattccttttttttctaaaattcatatttatagaaaatttgttttgtcaaaatg

SEQ ID NO: 115855 - DNA, 707 bp, Heterodera glycines
tcgaactttccattacataaatgaaatcgtgactcctaccaacctgccaaccggtcgcttgttgcttctccttttaaatttaatataatataattattaaatatttaaagcctcatatctcggcacagaagcttattccgcagctagaaaaaaaatttggcaatacaacccaggggtggtctacccacctacaaagtttcatttggaagttccaccatcacccgaacactctcctttgtaagtggcacaatatgatgtaaaaaactatcaaaggggggggggggcgtaattcaatttacttgaaagtaagacaatatgggcatcaattgttgaatagcaaactgaagcaacaacaccataaccaaggagcagcaacaattagtgcggccctttcccaccatcacagtcatatcaatgtgccatggtcatcactttcttcctctctttcgtctcctctttcttcctctccttcgtcttcctcatccctcctttgcgagtcactcaataaatcctcaaaaaatgtgtccgttgtgttcgccctcttccgcttcctctcctccctctgtctgcttttaaatgctctcatgccctgcgccgttagcatcggaatgtccttgacgagttcctccgccgaatagcagttcagcctcgtcccgtccccactcgttgtgaccaccagtgatccgtccgtcgttttcgccaaaatg

SEQ ID NO: 115856 - DNA, 236 bp, Heterodera glycines
agcaatgtgctaaaagctttcaaattcgttacgtttagatgatgaccattttgggaccattgtgtgacgtttcagccattcatttttcgttgacttatgacaattttggtcgatctcaacttttccatttaatgcttaaacttgcttattatctttgaaaccctcatcagttgattaatctctattcttaatttcatcctaattgattcacttttcttgctgttatgtttcgaatg

SEQ ID NO: 115857 - DNA, 156 bp, Heterodera glycines
aattggtcttctgatgtcaattccgggatcatttctcgaaaaatttccttggaaatattgtatacaaaggtttcttttataacaatcttttttccaattggtctgttctcgcctttcggctctccttctctgtttcgttttgttccatcagaaatg

SEQ ID NO: 115858 - DNA, 380 bp, Heterodera glycines
ataagaaaagcccaattcatgaatagataatgccgaatgaccatttcatctgcggctcaactccgcttgagggcgtcgtcctcaactcaattagctccgcaaattggattaacgggacggtagatcaacctttaaagtatgagtcatctattgcttttgaaaattatgcggaaaatttagacttttgtttgcttccgatgagtcattacgggacattttcaatgattttctcgtcgtcgttgtgcgcgcttatgtgaacctttttcagacctttggtcacaatttgtcaagacaaatggacaaatttttgcgtgtaatttttgatgagtttggtgcactaatcattgaggtcgtttattttttgatacatctcacaaatg

SEQ ID NO: 115859 - DNA, 260 bp, Heterodera glycines
agtccgcttcatgagcaacggaggacagaacaaaaaatattaaacaaagcattggattttattgtttggttggaaattcgctcaattgttaagaaaaaatttaacaaataaattattctttacgttcttttacctttccatttggttttttaaatgcctatttttccgttccaaaattgattggagtgaggatgtttttgatttattttgtttgacatgtttcactgttacatttaaagtcaaaaagttgcgtaaaaatg

SEQ ID NO: 115860 - DNA, 406 bp, Heterodera glycines
gattaaaaatgcactgaatttgctaatttacttcccaaaatcgttaaaaatgataattggaggcgaaaaatacaaaagttgataatatattaattgtataaagtgttatacaagcgatttaagtattttttgttaaatgttcttatttttgaccctaaaatcttattttatggcctgtatgttcttattttgaaattttttcgatggaagccctgcattagaataaaaaataaataatataaatcacaattttttatttttaaaaatatttttcagagctctaagattattttaatgttttgtagtttgtttaaacagaaaatttttgcataaataaatacccatcaataataaaaatcattctttttaaaaaaatatccaatttgagaatatttttaaagaaatg

SEQ ID NO: 115861 - DNA, 75 bp, Heterodera glycines
  unsure (1)..(75): unsure at all n locations
attttaatgcaataaaaaatattccacccatccctctataatgccacngcaaatgttagatgattaaaaaatatg

SEQ ID NO: 115862 - DNA, 104 bp, Heterodera glycines
attagaaataaatgattgaataaatggtgacgagaatctcgtgattagtattgaaaaaaaagaatgacgaacgacagacagagaacggatggacggatggcatg

SEQ ID NO: 115863 - DNA, 458 bp, Heterodera glycines
tggtatcttacgatagcccttaaattgagttatcagcttgccaaatttctaaaaattttataaattttttcaaaagttatgacaatttttccagttttttggctagaacttttgaaaaacttaataaaattttttgaaattagcaatctaataaagcaattaaagagctatcgtatgataccaagatttgtgcaattttgttgtgtcttagaaaagttatgagttgatttagccaaaaatttagcaaatttgcactttttgtgaagtgacctagcaccgatgctggcagtaattctgaagtttaagttttttatgaatttttacttatgcctattattttaggggggtccggcggcgccacctgaaaaaatttgtaatttttaatgcgaaacaaattcatattttttttctttttggcgtaccttaaaaaagtactatactaaaaaattccggtaatg

SEQ ID NO: 115864 - DNA, 1003 bp, Heterodera glycines
ccaaaatagtgacaaaatagtgtcaaaaagtccgaaatagtgacgaatagtgacataattgtcagccaaaaattaagcaaaaataatttttattcactgattgcattgcaaatgagtagggctgggatttttaagggcaaaaaaaacaaaataggtacataaaaaaataatttttaaaattaaaattcttgcccctttttgagaaaatttttttcatttcttaggagtgctttttgaaaaatttttgctcgattcttaggggtgtattttttggttttattgcatttttgttaaggaatttcccaaaaaatgtcgaaatagtgaaaaaatagtgacaactccaaaatagtgaattttcactattttagtgacaaaatcccaaaatagtgatttctagtgaccgataatgacatcagaatcgaaaaatttttatgcggaaatgcgttttttgagctcctttcttcaaatcaattgagcaaaaaaaatagttaaaacctaaaattcacgtccctattaattaaagtaaatttgaaatttattctgttttccaattccaaaaagtaattaattatgcctttctttttcatctaccgactaattactttttatttctttagcgtttaataaaattttcaaattctcgctcgtagtgactttccatcgccaaacatattaatatttttttaaatttttgtagtcataatatgaaaatgtcagtagtcaatttacgtaatttgatggatttatttccgttaaaaaatttctgataaatttcatattgcgcgtattatagcattaatacgagcatgaatttcatgtgttttcatgtgattatccgattaaacacggaagaaaccccctcaccaacatatcatcagcattacgtaatcatcgcatataaatatattgaaattcttagcattcaattaaattaagcaataataataataatattttgtggtaattattaaaattaccattttaatacgcccccataaaaatg

SEQ ID NO: 115865 - DNA, 672 bp, Heterodera glycines
atcagcccttaaataatcccaaaaaaatcgggagaaattccaaaatcatcgagactcttgagcagcacctttttctgttcaaaaggccaatttccctaattaggtgcaaatgcgtgctcagctcgaaggcgcgtgtactcagttggagcagctgcagagagaagtgaggcgaataaacatttaaaatttctacatttatccattacttagtctaatcaatttgctcctacatgctaattgcccctaattatctcattagcattttcctttgcgcagattttcgcgttgcgcttcaacgcgtcccttcttttggaacatttgcagcgggcggaaactgaactgagcacaaaggaccgactgcgcgcgcaattgcaagcggtggcggcggaggtagcggacgaactgttggagagagtgcgcatctacgaacggcacgtcaaccaatcggcacgtcattcaaaatgctttttgccctattggcactttttcacattctggcattttctgtagatgaccagcgaagtgtccagctgtgccccgttggcctcaattgcgacgaatgttcgcctcgccctttgcgattacgcgttggaccctttggtcgctttttcgctgattttccccactttatcagttcattcgctttctcagaattccctgtgggtggcgatg

SEQ ID NO: 115866 - DNA, 79 bp, Heterodera glycines
tctgaatttttaacaaattcatttaattaatatattattcatttaatcaatttaattaattatagtactcaaaaagatg

SEQ ID NO: 115867 - DNA, 355 bp, Heterodera glycines
tctctccgccggccattcgccgtttttaggttcagtcgcgttatttgagcagccgccgtgccgaccttctcagtgcgtgcactttccccagcggcaccgccgggggcagccaccactttgtgtcgacagtgccgggctcagcccgccgcgttgggcttttccccatcggcaacgatgctaatcgcccggcaaattcggcagcaagtttcggctcacgaacattcccttccctcgcgcggtcattggcgccgtttctgttaagcggagccgacgcggggccaccgccgtacgcgcccccgggacaaagaggtggggaaaggatggagaaaaaggaacagacactaacggcacaatg

SEQ ID NO: 115868 - DNA, 369 bp, Heterodera glycines
atatatgttttaatcgatatcaacaatttagtgttttctggtaattcttcaataaatttgttgattattgtaaaataaatgccttaaaatcgactcaaacaaatgcttgaggttacattaagcaataaaaatacacttaaagaatattatgtaggcgtaaacccaattcctaaaatccgaaaaatgaaccgttagcgaccggtgtatttatttcacatattgttgaaaccgaaggatgcaagaatgattaaatacaaaattactgttaacatttttcaacatttattcattgtaatttttcaaaatcctaagttttcattctttcgaaacttgaattacggcataaatattttttaaatatcaaacatg

SEQ ID NO: 115869 - DNA, 67 bp, Heterodera glycines
ggtaataattgattaattattaaatgaattatctaattgatcaatttgaatgccctgaggctaaatg

SEQ ID NO: 115870 - DNA, 609 bp, Heterodera glycines
ctttcgccaaggtttaagccacgaagatataataaatcaatgataattaataacgagagagtcacatttttgaagtaatctgtatttaagcatcatttaattaattttaacatattaataatttaaaatttttattaatacaaacttaatgatgaaaaatcaaaaaacaatttttcatttttggacttttaataaatgtcccaattgtccatatgatagaccttaaaccattttgtattattctttcttcacatttcagttcagtgatgaatctgagtttgtctattttatatggacatgaaaatagaattaatttttatgtacgaaattccagaaaaaaaattttcaattattttttaaattgtttcacttaattcaatcatttacaaaataaattcaatttagaaattgaagaaatgtaaattaaataaaatattaaatgcaaccaaacaaaactaatataataaataatataataatattattttttgtataaaacacataataagttcgagcgataataactttttaaattctttcaatgtgaattaaaaataaattgataaaaaatataaacaaaaatatttgtcaaaatttaagacaaaaatg

SEQ ID NO: 115871 - DNA, 168 bp, Heterodera glycines
aaaactttttggtttaaattttttttttcgtggtgggcgaggcgaattgctagaggcctcctactgtaacagtatgcctgggttaaatgacaaattccagaatactggctctatgtatgaatgccctccgtttttttttctttttcacattttcgccttctgtagatg

SEQ ID NO: 115872 - DNA, 188 bp, Heterodera glycines
gctgaggaattgaggataaaactctctttttgtgattatatcccatcaaaatgtttattaatttaattaaattttaaagaattaaaaaagacctttaaccgttgtaattggcatttgatgcacgaaatttcataaccttaccttttttaaattcttaaaattactttatttgttgtttaacagagatg

SEQ ID NO: 115873 - DNA, 54 bp, Heterodera glycines
tcgccttcaaattgccaattgatgtgaaactgtcctacccattttgtgtcaatg

SEQ ID NO: 115874 - DNA, 58 bp, Heterodera glycines
tcgcggaaaagtgtcgagcggaagcggaggcggtccctgctcatcatatggaccaatg

SEQ ID NO: 115875 - DNA, 376 bp, Heterodera glycines
aaagtatttaaaataacaaataaatattataaaattatccataaaaagcgacgaagaaattgatgcagaagtttcctaatattttttttgttaatgttttattaaaacaaattgttcaatagtttttgcacgtttctgacttcaaaagttttgaaaaaaaatttttttgaggggggcttatattcgaagggggcttctatttttcaacctccctccaaggggggcttatattcgagggggggcttccattcgaggggggcgtataatcgagtaaatacggtaactttgctgaaaaaaaccaaattttaaattattaaaagaagctatcaaaagatatcaaaatttgtaaattttgttcattctgggcgaagttatg

SEQ ID NO: 115876 - DNA, 403 bp, Heterodera glycines
  unsure (1)..(403): unsure at all n locations
agcaaatttttactttttcactagttatagactaagaccaaaccatacaaataaaagccgtcggaccccaactgtccatgaagttaaaaaaagacngcaccgcaaaaaaaggtagtttgatgtcaaaaaaatggacaaataataaaattaaaatatttatataatatttttaaagtataagcttttatttcatgaaaaaactttaaaactctcgcctctcgtcctctcgtcaactctcgtgttttttgggactctcgcctctcgccaaactctcgctctcgtctttttggagacaagtcacacccctgctgtggccctatacctatcaattcctcaccgtatacatttactatgtgatactgtatttagccaaaaaaattaaaaagcattctctaacataatg

SEQ ID NO: 115877 - DNA, 1003 bp, Heterodera glycines
aaaatttttttcagaaaaaggtggggaacattcttaactattaccgaaatttctattaaaaatttttcgcaggctttttcaagaaaaatttctgtttgaaaatttaaaaaaaaattgtttaaagaatttcaacttggaattaattaattattataaaaatagaaaagaagttattttttcgaaaaaaatataaattctatttatcccccgggcagataaatagagaaggggagattatttttcaacctacttcgaaaggggtagattattggtgacttgcatataattagagaaatacggtagtttgactctttattattagggcttacatttttaggtgctaaaaactgccaaaataggtaggttttaggttctaaaaaaccccaaaaataggtgctaaaaatgggaaaataggtgccaaaaagttccgaacttaggggtgtaaaatgacaaaaattttattaaaaagtcaacaaatattaagacaaattgagaaaaataatttttaaaatcaaaaattctcgtaaataggtaaaaatctaaaaatgtaagccctatttattattacgttggtcagttttcaaatttcaaaaaacaaatgcgcgtctaacatttgcaaatgaaagttggataaaaataatccgtcaaattgattttttattgattgatttgggggtaggggctaaaacgcccggcaaatgtcatcattttgcaaaatatattctcctctgttgcgttccttccattccctttttctgctcgctttttgtcaatgattttcgtctcccattggcatattgtccaacccctcgggcccatttgcaacaatttaaggcaaacaaaattcagaaattatttggataaaatgtgattttcgttagaatttttggttttccgcttttctcattatataaaaataaaacttcaacgcaattaattcttctgctatttgtgtgacatcattcggaactcgtccaaattgtgctaattgctgccaaaaatg

SEQ ID NO: 115878 - DNA, 124 bp, Heterodera glycines
tttcctgtcttcagcttaacattgccgaggaggcgttagcccaggtaaaatttcaaaaaaaaaaaaaaaatttttttgggattttacaaatttgactgcgccctttcagttacttcatctgatg

SEQ ID NO: 115879 - DNA, 436 bp, Heterodera glycines
aaaggatggataaaaataattggagatttttatgatctattttttacatttcatttatcatttgatttttaaaaaatatattctgaaattgaattccttttctgaagtttaggcaattacatttctctaggacttttttcatgaaaatcatataaaatggtcacgaaaatttaaatatttcctatttaatacaaaattatgtcgataattcaaattcccggtttattaacatcttaattaaataaattcaaaactaacaaaatgaatattaattcttattcagtaagaacatttgccattgatctgtcgtccgtaatcatctataattagaacaaattccaatgatgttcggcttgccaaatgggctcgattctctttcccatttggcccatttttgctcatcacgcgcaattggacaacggaccagcaaaaaatg

SEQ ID NO: 115880 - DNA, 377 bp, Heterodera glycines
ccgccgggaaaattttttaaaattttactgcaatttgttaacggattttgtccaaaaatgacatttttacgattttaattgttaaaattgtgtttgaactcccatcgaaaaaaaacattaattttgaaaaatgagagcgccataagctccttcattcagctatattcagttttttagcgttgatcaacttccgctatttcgtaaacactcgcacccttaaattttaggagctagattacatgcccgaatagtttagtaatttgaatcactcagaatatgttatttctaatttttacattattttttacatctttttagatttggctatttactgtttcgatggcaacacgcgttggggacgtaaattgtcggagatg

SEQ ID NO: 115881 - DNA, 143 bp, Heterodera glycines
  unsure (1)..(143): unsure at all n locations
cctttgaaattgaacccttcgactantgggaagcaaaccgtttataaattgcttataatttcagcagaagacactccaacgaagagctcgagaaaaaactgatggaacaaattgtgaatttgcagacgaaagttgacaaaatg

SEQ ID NO: 115882 - DNA, 512 bp, Heterodera glycines
ggtgaaaattggaggaagggaagggcgataaggattattgagggggtcaaaaattgggaatgattcagcaaaaagaaagaaaatggtgaggagtgagaacgagtgaagagccagaggtgaatgtgtgtccaaatggaatggaatggaatggaatggaaccaaaacattttccccctgggggggggcaaagattaagatgcaaaagagcgacgccgaagggtacaaaaatcggcggggagaaaaaatgccaaacaaagggaaaaatgagatgaaagaatggccaaatggaaaaatgtgatctgagaaagtgtgaacaaagagacaaaaattcggaggcagatgtgaatggcagaaaaattgaaaagaaaagggcaaatggtggagttgaagaaaacattatgtaaatgagaaaaaatgaagagaaatggaaagtttaaataaagaggggtgaaaatgttgacgaatatagaaaatggatcgcttaacatggcaatggcccttatccgggaatg

SEQ ID NO: 115883 - DNA, 73 bp, Heterodera glycines
tattgacccgcaattgttgagaaccgtttatgaagtgataagaaatgtaaacccatttgcagatgcatatatg

SEQ ID NO: 115884 - DNA, 1003 bp, Heterodera glycines
tgaaaggaaaaagcgacggacggacggactcgccaacaattgctaattgcacgccaatttcggtcatttttgagaaaattgcataatcaaatgaaagggacaaaaataattaaaaattacgcaataaatttaaatgataaacaaattggaatgtgagaagaagaatgaagtgaaaaatattgaaaataaccacagaaaaaggtaaaaaaggtttaattgagttgattgagtcgctttaatagagaatgttttggaaaatgccaaaatatacatgcaaataaacttatttaatttaatttaatgggggaaatttaatttaaaaatttctcatttaatctacgtaaaatttgaatgaataataaaaatcaattgcatttttacaatttttatcttttttttttgccaacgatgccaaagtgtcatgtaaaaacacggcaatttaattttcggctgtttctgcttcatcattataaatgtcagaaaataaaatatcattcattattaattataaaaatgaatttttctattttatgtctcttttttattgcctttttagtcaaatgttcaaccccaacaaacacaaaaaatgacaaaaacggttggtgttctgtttgtgcgaaaaagcatttaatagttaattaattcattatttggtcccagcgaatggtgcggccgaagtgccaagacaaacaaaggacggaaaggacggcatggggttttgtggccaaacttggcaaagccattgcccttacggcaactgcgggatttgccttggtccgtctattgttgctttttggtcatcatagaatttctcagatttaaaatttagcaaagcgcccttagcccggcattaggcgcacggttggcatcgccaagggacggaaattggcacgaaggcaccggcacggaaaatgcgaatcaaaaccaacaaaaatgtgaataaatgaaaaaagagatgctaaaaaggaaacaaataaaattctttgtgtttaaaataaaaatg

SEQ ID NO: 115885 - DNA, 487 bp, Heterodera glycines
tcttttgtaaggattttgtgccaaaaactacccttcattttcaaaatggctctaaaattttttttccaaattccgcgtatttttattaaagtgtccgctttttagggtttttggtaccacattttttgatttaaaaaataaattttttaatgatttcaaatttttaatctttagccgatatttcggacatatttcgtccatttacaatcaatatttcactcttgatttttttgtttttagattgatttgcaacgacgtttggatggatattttccccctttttgaccgtcctcaactcggtctcaaattggcattgcttttgtcacgtttcgatgtgctgttggacaaacatttcgatgccaaaaaagtgaattatttttaagggtttttgttctattaaggattttgtgccaatttggggcctccgattctgcccgttttaaaagatttttgcacttttaattcttaacattttcagcaaccaatg

SEQ ID NO: 115886 - DNA, 480 bp, Heterodera glycines
agtaattttttgctgtgtttttattacaatgttccgagtccgaaataattttttttcgtaatttacgaatttaaaattttagttttttcatcatttctttggtactgaagtatctattttcacttgaacagttttcccgtcgctcaatttgcttcatttcgatttaccccaatcatttttagatttaaccaagaactttcgaatgataacaaatttgacagggttcggcattttcctccgtaaaagtcaggagtgcccacagggacgacttcagaatcgcgtacaaaagcgaattttactacattttcgatgcggggttccgggtccgaaatgatttagttttttttcgtaacttacgaattaaaaaaattcatttaattttccacttcagtcggtccgccggacctttacacggacgaagcgctgggaaatttggacacgcgccagcgaagggcgacgctcgattcactgaaaaaaatg

SEQ ID NO: 115887 - DNA, 772 bp, Heterodera glycines
ttaggcttaggcttaggctttattttgtaaaatacgagttgccttttatacttttgtacgagttgccactgacccggaatatggatatcatatgggcaacgatgcactttatgatggacctttttttgagatttgtcaaattccgactcaatttttttcaataggatttccaaattattaatgacaaatttcaaaaatctaatttgcaaaattccaaagcttaataaaagcattaacttcccccccccccaaaaaaataaaaataaaaattccctccgtcggtcagaaaaaggcgcgttcctccaccttttccgcctcccccgcctcgcgtggcatttttccgcgcctccaccgttcgctgtcctcccagcagcagcacaaattgttccgtgccaatgcgccggcgcacccaccgccgccgttggatttgcgcgcattggacgcggcggacggaacgccaaataacacgacggactatttggaggtgattggaggggggatgagggatcgaaatcccttctcacattgatgtgttgggcttagatcgtaattgtggtggaagtttcgagaccgagtgaccataagactcgataaatgaattcgagaccccaaaacccaaccaagagtttggcgagtgaatgcctcccccggggacgggacaaatctcggcgctgaaacttttttttttttaatttttaaggtgggccgagcggagggcggttggattcgggacgcaaatttttggagcaggcagcaggaattttggcaaatg

SEQ ID NO: 115888 - DNA, 1003 bp, Heterodera glycines
gtgagttgcacttttgtaaaaaaatgggtttttgagccatgggttcaaatccgccggactacaaattatttaaaaattgggtacttgtgcagtttacgccccataaaattttttcttaatgtttttaaaacaattacaggttttagaggtcgctgatcacgaatataaaattagaatcgtgctatttcgaatcccaaatccgaatttgtaacaaaaataataacaaagtaaacaaagatgctaattcactttaatattaagcttataagaatgttgcttattttccgcttaatacgttttatccatattgcagctatattaataatctacattatgacatttgaacaattttaccacacaaacgctttatgtttgttttaaaaatttaaggggcgtaaactgcacaagtaccaaaaattgtttctctggctttggacagccccgatcaagaatttgacacccatttcgccaatttcgaaccaatgacctgaactcagacaaaaatacaaaatttgattcaagaaaggaattagtgattaaaacggatgatcagaaaatgattcacaataccgtatatgctctaattatagcccagtctctattaatcccgcagtctccaattatccccccttttctgaggaggttgaaaaataatcccccatgggctataattagagcatatacggtaagttgccttgctttaccaactgtcgctcctgcaatggcataacttatatgcattttcatacctccagttcgatacgttattaatagcattttttgcgcatatgggagtcattttttcacgctcaatccctgctgcctattcttaacttcaacaacaatttatttcggaatcgcaatcaacaaaaacaatgaaaggaaaaatcctttatcatgcgaagtcagtttctatgaacgaggtctctctttctttccacggaaaagtgcgagcaatgacgtgttggcaactttgactactttgaaacgaactccaggaatg

SEQ ID NO: 115889 - DNA, 636 bp, Heterodera glycines
ggtgactctgcgaactttcaccggcagcaggccgatcatcagcagcaccaattgatcactttgtcccaccccaattgaaagcctctgatcactgcttctgcctataatgattaagtgatcaaagcgagagagagagaaaggggagggaatgcaacagacaccgagcggaaagtgtggcgaatggctggggaagggggtgggaagggtgcgggtgatcatttttttgttgctttttcgcgaccgctcactgtcgctgttgcgcgacgactgactcccctcctcgcaatgtatataagccactttcaaaggccaaatatggccaattttgctgacgagttgcgcaaagacaagcgcatagccaattaccttcatcttgccgctcaattgaacaataattactgcttctgccagcaaattagctttcccccacctttatcggaacgtttaataaagctatgagagtgatgctcaaaaattttttaaagattattaatttttaaaatttgagttactcagttttagttttaaagtttcatagtttggcctggttacttcaatttacatcaaaatttgactttgtgtatgccagttttgtgcctatttttaagaatatttgccaattttcaggtcaaaatg

SEQ ID NO: 115890 - DNA, 1003 bp, Heterodera glycines
  unsure (1)..(1003): unsure at all n locations
taaaaaggggaataattgctaaaatttacaaatttaggaggtgtaatatgacaaagttttattcaaaattaataaaattgagctaaagagtattgagatacccaattttaaaaagtaaaatccgggctcctcgactcaaaactgagcatttttatgagaaaatttttataagatttcgatttaggaataaattaatcgctagggtgcatttacaattatcattacaccgtataatgaatacggtaaagtaatgattggccaattaattgactaaattaatttgtctaaatgtttttttttgccgtgtgaagttgcccgtcgccgttttcgcctgtctgtgcccgttcatggccagcggcactgcgcttggcattctgttctttgccagcgttcggccagttcaattttggtggtcactccctttctgatcttggcactaggcctgtcaattaattaattattcaattaactaattgactaattaaataattatgaatttaatttgtatgaaaaaataaatgaatttcaaattgttgaaatttattttataataatttttatctttattggtaattaaagtactattttattgtatataaattcctgttgaatttaacttatttccaggcgttgatgacgcgttcctaatttccacgatcaatcgatcggtttttcaagcaatcattaagtggcatccattttctaaaatcaataaccgatctcttcccaagctaattaataatgatcgatttcaaaaattaacaataattgatcgcttttccaaaaaatcaacaatcaatcaaatttaaggcaatcaataatcgacttatgtacctttcaagtaaatcaataaatgatccctttcagtaaatcgataacgaacggtttttcccaaaaaatcaataaaccaatcgatttctaaagaatcaacattcaatttaaaacgccaaatatttttttctctgaaattttgtgccatttctaagaaaccttgngcatcatg

SEQ ID NO: 115891 - DNA, 692 bp, Heterodera glycines
ttggcggaggaggaggccacattttaattaacgaaacaagccaattgcagtgttattctaaaacagaaacggaatcaaaaggaaaaacaatcgaagacaaaaaaattgaaaataaacaaacctaaaaaccaaatttaaaatagacaaataaaaaagaaattgtcggacaaacacaacagaaaaaagtgaaagcttgttgttgacttgcaaattctgacaaatcttacggcagcaattagtaagcaagctttactttctcttgaattcttgctgttcctgtaagccgttttccttcgttcccatttttttcttttctttttggcattatgttttgttattatacatatttaaaaataccacacgcatcgttttcctccgattgttttccttttttgttggtttcgccactcactaacccacaaaacaaagaatcacaattacgaaatcaatctgaactaattttaaaaacaaaagagagacccttttggtgcgcaatttttacaacttaaacatttgcgaccctgaaaagcgttcacattttggtttttgaccaattttatcacttattatttcaggttaaagattcggaattggtagaaaaaatctcaactttgtgatttaatatgaaaaactcattttgtttctcacggacgcattatttgtgatgaaactttttagaaaaatttgaaatg

SEQ ID NO: 115892 - DNA, 81 bp, Heterodera glycines
aattgtcaaatactcgacaattatgataattaaggctgtctctttatgtaaatacatatttatatatttcttcagcaaatg

SEQ ID NO: 115893 - DNA, 139 bp, Heterodera glycines
taacaaaaaacaaaaagagggacagaacaaaggcagcagaggacaaaacggtgcaaacaatctgaaaaagagggcattaaaatggtcaaaaagcgaacggacggaccaacatcggccgagttctgagccgacggagatg

SEQ ID NO: 115894 - DNA, 126 bp, Heterodera glycines
agttgcagtcggtgtctgtccaggtaaaagtactgtagcctctaattacgataccaattttcaattcaatgaggggattattactatatgattattttctgtcaggaaggcgaacggttggaaatg

SEQ ID NO: 115895 - DNA, 302 bp, Heterodera glycines
tttgatccgaggatgtcgggaaggcgtcaaggtttaaatgcaagagagaatgatggaggacaagtgccggatgagagacggtacgatttgagagaccggcaaaatcggcgaaattgggcagaaattgagaatgaatttgatgaggctataagtcaggaaattcggagattggaaagagaccgccctcaggctgtaaatgcaaacgcccagcaaaatgtgaatgaaatggctgaaaatcaaaaccgcacttatccagttttagtgaataggaatgagagtttgaaaattttggccgagaaatg

SEQ ID NO: 115896 - DNA, 164 bp, Heterodera glycines
tattcattatttatttaatagtaagattttatttgtaattattttgctagtgaaactttaattttttaagcaaaggaaatccggtcattgtcataattagttttgggatttttagagattaatttttattagatttgtaaataatattttcaaatacagtcatg

SEQ ID NO: 115897 - DNA, 109 bp, Heterodera glycines
gttatttcaaatttaaaccaaataccaaaaatttcactgattcgtttgctaatgaagcttatgccttgccccctcccttttagaatttgttttgatatttttggcaatg

SEQ ID NO: 115898 - DNA, 385 bp, Heterodera glycines
ttaatacaggtaaaaacataaataagcgaagtacttttttaaatttaattaaaatttgtaaaatgacttttgtcaaagtgatctttggcgaataatttttatttaaattttttaaattacctaatttttttattcattaaaattatttatttttttaaacaattaattattagattaacgcatataattgcctatttatgatgtgcctaatcagctgaattcgttttcccttcctttgcttttacctttttccattagttcatatacaaaaacacaaaactaaatttatcagcattaactaaaataattttcttattatgaatctcggacggtgtagcatttgcactttaagctttgacttaaacgatgtttcagctctcaaatg

SEQ ID NO: 115899 - DNA, 60 bp, Heterodera glycines
tcacttttgcttgcgtttgaaggcccataacttttttctttaaactctgatcaaaaaatg

SEQ ID NO: 115900 - DNA, 103 bp, Heterodera glycines
ggtaattaatacattaattaatggggaggggggtaattaaagaaattccaatgaaaaaaaacacaaatttaaaaaacacagaactgtggccgccaccaatatg

SEQ ID NO: 115901 - DNA, 488 bp, Heterodera glycines
gtcaattaccccgtttaacgcccaccaaaaatgcgcatattcaaaagtcggatgaatttaaagttaattctattatttatgataaaatggttggaatctgttaatttaaaacaacaaaaacaaccaatcaaccaacatattacatatagcttccataagcaattgaacgaacccaaacccctaattttttctcatttaaagcaaactgcaatattttaaattgttttatttatacaacgatatcccttttatttttaaattttttggcttttcgtctttgcattcgccttctttgttcctttttgttctccgcttcttccgctctttttgttagcttttctcattgttagccaatgccagcacattttttcgtcattttttctgttcacatttaaaaacgaatgctgctactttttttttatacaaaattattaatttcattttagagaatgcgaattcttaagtttcattttcctcggtcaataatg

SEQ ID NO: 115902 - DNA, 669 bp, Heterodera glycines
tttcaaagtgatcacgcagtctcggggaaaatatgggcaatgtggtcaaaaatgaagacgagaacaagcgatacagtgtcagatgagcggatagaatcaagtcgtaaacaaatattatgaaatcttatgaaccaaagaatgaatcgaagaaacattcaatgcaataacaaaaacagcgttggcgacggaaaatttgatcataccataaggaacactagctataatataatatggcgttagaaattgatttctcataaaaaacacattattaattatgcttattgcaatatttgcaaaaaaagtttttgtttgaaaaatgttcgattccgggttcggggttcagaatttgtcaaaaataaggtcggattcatgctcagtaccctaaaatagccctagaaaagttttcccagaattttacaaaaaaaaaacgggaccagtaaactgcaggaattccccccacaattatgacaatgatgatgatatccttgctctttttgaggtctcacaaattttttaaaaattacatgagagaccaaatgaattgaaatgccatctctgaggtcgaattttaacatttcaaccacccattcttcaaaaattgacattaatattatataattaaattaatttttttttcaacagtatggaaccatcgaacgccagcggatg

SEQ ID NO: 115903 - DNA, 100 bp, Heterodera glycines
tctgagattatgcaaaagcgattatcattacttttaaagtcatttcgtagtcatctactaataattaataaataaattattcaaattcaaatctctaatg

SEQ ID NO: 115904 - DNA, 125 bp, Heterodera glycines
ggggacctctagagctattgattccctctcattctttggtcaatttgtcctttgcactgtgcgaatgggagagcagcgtggacgagctgcacccgagcgacccgcgctaccgacgctatatgatg

SEQ ID NO: 115905 - DNA, 1003 bp, Heterodera glycines
attttcccaaaaaacttttgttgaatgggcgaggggagggggaccggcggagccgataggcgccgccgggaaaatattgttatttttaatgcgatttttaacagatttttgtccaaaaatgaccaaattttgccacaaattttatattttcttgtaaaatagtgacattatggcataaaatttctaaattatgaggatttaggaaatcagaacaaaataagaacaatagcccaaaatcagaacatttctgataaatcagaacagatccgagccctgtttaaaatgtcaatatttgccaagaattattagaaagtaaatttacttcagttgcaactgcaaggaaaaaaatttttttttaacttatttttggctgaaaattatgtcactattttgtcacttttttggcacttttcgtcactattttagtaactattttggaatttttcgtcactaaaagttgcatccatatttatgagatatttgaatattttaaagtggtgcaagacttatttgtcactctgtaaaagcatcgtgtgtgagaatttccccactatttataggcaattctataacaacaaataaaggggaggtgctctgatttggtaaaaatggatttggtacaaatgttgaaatgatgagtagtataaaaggaagttggttcatcctttccggccattttattccaaataggcattaattaattcctgcgtattattgcggctgctgttctctgtccgtgccatcatcaaatcaactcaacgaaagctgagccatcggaagtgtgcacaaatcgactaccaaacgaaactgggcaccacaaatcaacaaaatcatcatcagcagtaaaagtggtgcagaaggaaacgcatggaccaaatgtgagaaaagcgggaatttttttttgtttttgaaaatttattttgttttgttttagcggcggcactttcagcgaccaaatttggctcgacacattggcgtggattggacgtggcgaggtcggatg

SEQ ID NO: 115906 - DNA, 237 bp, Heterodera glycines
actgcagttttggaagagtacgccatgacgaaggaagcgtcatttacttgtacaaattggcatctgtccaagtgggccaaaaggcattgcccgtcggcggattggtgccacggcggaaaggcgaaagggcacaaaaatggcactttaaaatgcggagaaacatttcgcggaagcgtttgttgaagattgtgtagatgattgggttcaccttgagggggaagaaagtgtggtcaaatg

SEQ ID NO: 115907 - DNA, 143 bp, Heterodera glycines
  unsure (1)..(143): unsure at all n locations
tcgcttcttgtagtgtttttggcttntcttattattagcatccactgaatcaaagagtttgtttttgttttgttaaaaaaataaatttatttatcattgaagaaaatgccgatgatgataatctgaataattcgaacggaatg

SEQ ID NO: 115908 - DNA, 101 bp, Heterodera glycines
aataaagttgccgttgtgcaaaagaccattctgttgtttccaaaaaatcgtaacatcatcatcatcatcatcataaacacattgacatcacttcccaaatg

SEQ ID NO: 115909 - DNA, 337 bp, Heterodera glycines
ttcgctgaaaaatgggggggggcaattagcacaatgaaaatgcacatagcaaaacaattaattacctaaataaactgacgatttaagtggcggtggaggaggacgaataattaagtggatggaatgaatgaacggaatgaacgtggaaaagcaaaatgtgtgggccttaaatagcaaattttttagtcggaagagtcaaatttttcggataaattcatatataaaaggcacaaaaattcatttggttgccatttttccattatttaattaccggcaattcatcttcatcaatcatcccttctctgtgtacaacgaaaacgacgacaattgagcaatg

SEQ ID NO: 115910 - DNA, 344 bp, Heterodera glycines
tggcattctgttgcccctcaacactccgctcatttggctggctagaaaccttgtgtaccctgacaattttgttcacattgtaatacgcagaaaaactgctccatttgataagaattcaaagaatttgtgattttatccgtttttgtctgccgttttcatccgattattccgtttttgtcttgaaatttaactgtttttaatcgttttctgccgatggtttgcgttccatgcataattctgcccgtcgtgttggccatttaccttcgatttgttcagccatacattttgcgttttatgcctcagcgatggcgtatttggtttgactcggtgctttacccgacatg

SEQ ID NO: 115911 - DNA, 583 bp, Heterodera glycines
ggtcggcacaatttgaaatcaaaatggaatttggaatttggcgggaaagtcggcacgaatttttgaaaaatttaaatgaaaattcatatacaatttgatcgtaaaatacggcaggatttttgaacaatttaaatcaaaattcaaatgcaatttgatgggaaggtcggcacggattctttgaaaatgtaatcaaaatttatatgcaattaggcggtaaaacacgcaataatttttgaaattaaaattaaaataaaaattcaaatgcaaattggcagtgaaggccggcccgaaattttgaaaaatttaaatgaaaatttaaatgaaattttgctggaatgtcagcatgaatttttaaaaatttaaatgaaaattaaaatgcttttttcatttcagaaattcttaccattgttattgaataatttcttattccaattttaaaattcaagcaaaataaaaattattaatttgcaaaaaaaaattaaccatttattattttaatttaaatttaataattttttgatggacataaaaatctaaatcccagttaatgatggaataaaatttatctgcggatttgaaaatg

SEQ ID NO: 115912 - DNA, 1003 bp, Heterodera glycines
tgtattgactttgcttggtgacgaaaaatgctatcgccattggtagctgctaacttttcacccaccaaacaaacgcattttctaactttttgctgtaattttgtttgttgtttttttaagaattttctaaatttcccttttcagttgcaaataattagttttgttgactgactctgatacaatttttgagaggttggttttattcgaaattttcatttatttcaatcaattctttacttcgtttaatactttacataatgtcccattggtcagtgaaagctgtgtctttgtcttctacgacatttatttttttaagaaagcatttaaatgcccaaactttaggtttttattgaaaaatcatattttgtttggtttagtgtcactgatgacacatagaatgagtgccaaagaaatggcgaaagtaattaattatttgtaaattttaccaaattcgtggaagccattcagttcattaagacttaagaaattaaaaactgcataaacgcatttttcattcaaatttgggtgtgaacaacagacaataattgtctgaataaagacaagagatgtcaaaagataagagcgctttcaaattttctcaaccaattagtcctcatttggaggcttaattaggaaaaaaaattgttgataagcagaaaatggttatggtaatattttacctgttcgggatggcacattcttgggactcaattgaataatttacattctcacaaatacaataaaataaagaaaactgtttattttttgcaacacagcaaaattcgtcaacaatgcggtttacttaatttaatgggtgggctactttaatttctcttaaatcatttaattacattaaatgagtctccccccccccattcttttggcaatatttgagcactttgctcgaactttttttttaaggttgtatcttattttcagcaaatttatacaatttttcaatccatcataaaaaaaacttgcgctttttttcgctgcgaagatg

SEQ ID NO: 115913 - DNA, 117 bp, Heterodera glycines
ggtgtggcccaacatttttgtgatttttgtttccaaattgtttagcattttctccgtgccaatgccatttcttccgtcagttacgaaattcatttttcttttcgcgtgccgtcaatg

SEQ ID NO: 115914 - DNA, 63 bp, Heterodera glycines
tgtgttactttttaaatttattaaaaagtttcttttgtcattttttaattccttttagccatg

SEQ ID NO: 115915 - DNA, 259 bp, Heterodera glycines
tctgtaatataataaagatatatttatttatgaaaaaattatatgtcatcgaattaaacagattaaaaaatttttgcttatgattcatgctcaccgaacactttctgccaagtatttaattttattattaaataatacggcccggcgggagcggggaggaagtttacgggagtcccgctcccgactcccgcttttttcggtgaacgggattttttacggaagcgggagtcttaaaatccttaatttgcttaaaaaaatg

SEQ ID NO: 115916 - DNA, 179 bp, Heterodera glycines
  unsure (1)..(179): unsure at all n locations
cattggtgacgaaacatgtcaaaatantttgtgccaatcccttataaaaaataatantttgctaaaaatacaattaaattttgttagtacaaaaatacaaaacggaaactccgttatttttggaatttttctttttaaacaccattaaacaattgttttaaaagggcaattaacaaatg

SEQ ID NO: 115917 - DNA, 462 bp, Heterodera glycines
tcgaaaaaaaattaaccaaatttgtgcaaacagtcctaaagagtaaagatgaacaataagcctattcaaaagccaacataaggcaattcatgtattaccatatggaatttgtatttaaacatttcaactaaaaattcaatttctaataaatggaataaacctctaatttacattagttcattcatcatttcacttcattttaagaaactgattttttcgcgatcgcaatcaaaattcacaaactcacaaccatcagcagctgctgaaggaaaaaaggaaatttttaaagtgggttcaaagaaaacgccaaaacataatgccaaaatattttattgcgttttttcaattttatttttgtttagtttgaaaaacccacgccaattttattgcttttcggattttcgataaccatttacatttactgtttacagttgtttaaattataaattaaagcttcccatg

SEQ ID NO: 115918 - DNA, 581 bp, Heterodera glycines
tcgaggacaaaagtgttatcggtgcagtttttgggtatttgttagtgcattaattaatgtttcttttggcgtaaataactcttttttctcaccattcatttttgagaaaaccgggtttttcaacaaaaaaaaaattgttgttccccattacttttgcacctgactgtattttgtaccatcctgtgaactttattttattttattttatttcgtttgctttgtttttactttttttgtacttttgcaccactgtaaatgtactttttccgtaccttgtgattgctcgataaataaataaataagtacgttgctgattatattggaaaatgcccttttagaaaaggtttaattaattaatacaattacgaaatattaaaaaaaaaagttcagtcagtgattgacgaagtcattaaaatttgatatcaatttttgcaacaaaaaaaaaattaccaatttgaagtacatttgactttttttgttccatttcactagatataatcttaattaattttaaaatttgaattttccacttgttgttctagtacggggcctgaattcttcgacattagtcaataagaatg

SEQ ID NO: 115919 - DNA, 132 bp, Heterodera glycines
ggtgggttcgtttgaaaattgaacaaacattcggtcgcaacattaagacaagaattaccgcatcatcaaactcctcagacgaaaataaaacactcagaaaaacatccccaaactaaatgctttggcagaatg

SEQ ID NO: 115920 - DNA, 96 bp, Heterodera glycines
ggttgttattttttgccagatttttacattctccaattttaaggtgatatcattgagtttgtgttcgaagcagcggatggtcaaaagccgacaatg

SEQ ID NO: 115921 - DNA, 293 bp, Heterodera glycines
ttttcagtgagtttattttgaataaccgcgatagatctttggaaatcaaatgcattggcagtgcttccgagcttccgggtgtgccattggcacaaattattcaatggcaatgggataggaatgggaaacaagtgatcaacgaagtgagcttattcgtattaaaaaaattggttttttgtgtattttgaaaaattaatcgtgaaaaactgtctggataatttttcgtattttctaacattttttgttaattaagtccacctatatgattacctaagttcttttagagtaaaatg

SEQ ID NO: 115922 - DNA, 519 bp, Heterodera glycines
tttccacttcagtccagccagttcagtaccaacagagcgtcgctccagcaatgacgtaatatttgcgaatagataatttctgttcaaaaaaaaataaaaatttcataaaagaaaaaataaaaatgccaatttgattagatattgaaaattaccttaaacttttgagaaaaccgtatgtactttttaattctttgaaatggtacaaacaaataagttttccaaattcagaaattctcgatttttaaatcacatttaaatacaagccttaattgagacaaataatccccattttaaatttcaatattctattatatttccttttctgtttcacaatataccgaattttggttttttgttcgtattttttaaaacctctttaaaccaaactaaaacagtatttaagtttatatttttaaaaatcaataaaacctctttaataatctcactaatcattgtaataccattacttctttttacagtacaccgccagcggtcgagcccgaagtacagttgaacatg

SEQ ID NO: 115923 - DNA, 236 bp, Heterodera glycines
tgcttttccccccgagttattcagtcgttcgttcgtcttcgtttgtcctccccccccctcccttttctgtttcattcgctttcaccgcccctttccctttaatgtccaacaaagtgcaataaacgcaactttcgaattcgaattgtcgctctgtctgttgttactcaatggttgacaatggcatcggttgttctgccgccgttccgccgccgcccttccctttcaacgtgctaatg

SEQ ID NO: 115924 - DNA, 64 bp, Heterodera glycines; identical to SEQ ID NO: 99473

SEQ ID NO: 115925 - DNA, 198 bp, Heterodera glycines
tcattgcgcgaaatgtttctgctgagttaatcggagattttaggtaattaattgactgattagtcgcttttatcatggaattagctgaacaggaattcgacattccaaacctcgaatcacttttgttgactttttttatttgtcagatttctccaaattgccgtgttcgaagtcgaacgtaattgggcttacgcaatg

SEQ ID NO: 115926 - DNA, 652 bp, Heterodera glycines
aacacataaaaattcatagcgtggctcaaattaaaccaaattaatttttcttggtatcattcaatagctttaattgtcctatatcagaatatgatttttcaaaattttttaaaataagtataaaaaaaattattgtcataacatttcaaaaatcttatgtcagcattttttgttcagaacttttttaaaactcaatgaaattttctaaaattttaaaggtaaatagagaattcttagggctatcgaatatataaattaaattagctcaattgcattttaaagactttaaatgtttattattattagggatgatatttttggcgctaaaaactgccaaaataggtaggctttaggctctaaaaaccccaaaaataggctccaaaaaatggaaaataggcactaaaaaccttcatttttaggggtgtaaaatgacaaaatttattcaaaaaagtaaaaaaattaggccaatcaaaattcaaatgaggccaacttagaaagcactgaagatgagtaaatgaataacagaaaaatgcaaataaataatcattagtgccagatttgggttaagtttaaaaattaattttgaaaccaattttaggcattcggaaagatttcaagaagctacacatcggtaatttgaaacttttttatg

SEQ ID NO: 115927 - DNA, 222 bp, Heterodera glycines
ggattggtaagaggagcagcaggcgttgatcactttttccaccattaatgtttcaactttgtttagctaccgcgcgaggacgtgacggagttgctgccgaacgacggggacttcctggtgcgcacgacagaagaaacttcgggcacagagcgcgtctttgcattgtctgtgaacgtcggaggcctggtgaaccacgtcatcttccgccgacacaaagggatg

SEQ ID NO: 115928 - DNA, 681 bp, Heterodera glycines
aagcgatgaaaaaatgggtaaaacgcgggaggaaaacagtaggagcacacgaaacattacattcattcttctggcacaaatttagaacatttgtgtattggttgtttttattgagcattggacacaccgtcccaaaaaatgagagatcaaccaataatgagagagtgcagagaaaaaaatagaatttcttcaaatttaacatattctgcattttctataatgaattcatttttgtctatggttgaatacaaaagttttaagaaaaacaaaatttcgaacgttcatatcttttttttctgattcttcaaattgcttagcattagttttgggaaagcttctcctaatcaagaagagctttagaataatgccagtatcgtccaatttgcattaaataattgccatcgaaatgttcaaaccgggtacaacttttaccacccactttatttttttaattaattaaatttttttttttttgcgattttcaaattttctccaaatatcatttggatccttcaccgttcgctcattcgtgtttattggcctggatatgtatgatgattaacctgctgctggattagtctagtaaaccaaagtaagaaattaattcatttaattagtcgtcattaaattttaattgtttttcggcactcggttgggccgattcgaagtgccgtgaaaatg

SEQ ID NO: 115929 - DNA, 122 bp, Heterodera glycines
tgtttgggcctacgaataattacgcaaagtgttgggctggggtaagaacaacggtatgtatttgggctgggacaagaacaaccaacaaaaatgattacggtatgtgtttgggcataaaaatg

SEQ ID NO: 115930 - DNA, 101 bp, Heterodera glycines
ttctcctgtcgtttatcagcaaaccaaaatcgggccgctttgtttccgatggaattgtggaacatgtgagatcggtaaaataaccaaataataagtaaatg

SEQ ID NO: 115931 - DNA, 314 bp, Heterodera glycines
tggttcaagaaaggggcattattcataagattttccaaaattgcgcgaaataaattttttagtcatgaacagaaaagtaccgaaataacttaaaaggagagataacccatctatttctataaaaaatgaacaaaaacccagccgaattaaaagtaataaatattgaaatatgatagactaacttgtaagagattgtgccgtgcagtcgtgtcttatggtggttttgtcaaatgatctatttttatgttctatagaagcctatgaaaaaataatttaaaaatatatcttggccattttgcactttttaccggatg

SEQ ID NO: 115932 - DNA, 77 bp, Heterodera glycines
agttcaaaatacaatttatcacaattgttagttttgtcatttaggtttttctttttgtggaagcattgaaggaaatg

SEQ ID NO: 115933 - DNA, 227 bp, Heterodera glycines
ggtgggggggggagggagaggaggaggaattggtgtcatgacaactcgtacaacggcttaggctgccaagttatagtctaaagcttaggctttattatgtacgagttgccttttgtacgaattgccattgactccattcgagattcccgaattttggcccaagaacaagcaaaattgaaatgtgacaaattagttttttccatcaatcactttccctgctaagaatg

SEQ ID NO: 115934 - DNA, 236 bp, Heterodera glycines
gcctccagcgctggtccatggttttggcgaattacgattttgaaattcgctacgtaaacaccacatcatttggccaagccgacgttctgtcacggcttattgccaattattcgcgtccagaggaagacatcctgatagcaaacatctgtgccgatacagattgctacattaattctgttttcgaaaacagaatggatcagctccccgtgacaacagtcgaaattacagcagaaatg

SEQ ID NO: 115935 - DNA, 221 bp, Heterodera glycines
tgatcgctgatgatgggccaaatgcaactgctggtcaagcgctgtgaaaatgtttgcacacgccgagaaaagatggaaagccaaagcaattgagttgttatgatgaatcagaacctccaagtttcgaattgatcaccaatttcaaagagatgtggccatattttagtaaaattaaaattgcatttatttccatttcccattgtttaggcatttctcaaatg

SEQ ID NO: 115936 - DNA, 956 bp, Heterodera glycines
tttgtattcgctactgtaccatttgtgaatgtaaaaaggcgttttccttgcctaagggcggctttagctgaataattttaatggcttagaaataataattaatgggacattctttgaatggtaattaattgagtatttaacgagaaaaggagggaaaggtcgtcgaaaagagtgccgcccatttaaacgaccgacaagtttcacagcccatcacttttcagtttatcaaattcaaaaagggtaataattaacgaactaaaaaccaatattcatacacaaaatacctctcacacctttattaaaccaaatgtgagcattttaattcacataataatcccctcttaacgtggccattgcgaattaaaatttctattttcggtttttgcctctaaaattgacgcatttttccaattttatttacaaattacaaaaattaaatttgacttttggagcaacagccaaaaaatgttttatgttttgtacttttaaaataaaaataaatttcggcggctcttttcggcactgccgggccttcctttattggcacttttctgtcaatttaagtgcttatttgttataatttgttaggcgcttttaaaccaagaattataatagcacgacaatccgccggcggtagacaattgagcagcgacaattgggcaaatttttttaaaaatttcttaaactaaaattcttaaaatatttcaattgaaaaagtaattatttatgaatttcttcgttatttttcacatttggcttttacataaagtgatttgtgaatttatagcttaatttacctaaataaaacagataatttagtaacccctccccctggcaattcaattattccaaaacaattccataccgtaatcacacatcttgttccccaaaaacagtattcttttttcaattaatccctttaaagctgttaaaaaaggcctttccccacaaaaatg

SEQ ID NO: 115937 - DNA, 110 bp, Heterodera glycines; identical to SEQ ID NO: 98226

SEQ ID NO: 115938 - DNA, 231 bp, Heterodera glycines
ttcacagagaaaagagtactgtagtcggatgaggggttggacagacagcggaaggggaggtaagctaatttttgtattggatttttctagaaattttagaaaaattaatttacaaaatgtatgcatataattttatatataaaaaaaattggcaatttgtataattaagaaggcgatatttgcagcaggccagccagctactgtcatgaaatgaaatcataagcaaaaatg

SEQ ID NO: 115939 - DNA, 254 bp, Heterodera glycines
ttcgtttgaatgaaatctaagattaaaatttccctctctattttaatattgcttgacaataaagtgaattaaaagttccttccttccctttaaattgtatgtttcagcagaccattaatgatccgattgacctttttttattttacaaatttgctgttttttaatttttttatttaatttaagctgatctcttctctggttaccaaatatttttttgttatctagtaaattttccattattcaagccaacaatg

SEQ ID NO: 115940 - DNA, 248 bp, Heterodera glycines
  unsure (1)..(248): unsure at all n locations
aatataaagaaaaataaataaaaaattctatttaaaaaatatacttaatttaattttttttngaaaaatattgaatttaaaaatgcttctggcaaacaaaagctgactttcaattctttctagctgttcccatttctgaaaaagttaaaagcacacgataattgtattatgatgagtcctttcaaataaatgcaaaatttaatttaatttgtttattattttaaaaggaattttatttgaataaaatg

SEQ ID NO: 115941 - DNA, 251 bp, Heterodera glycines
tttagaaacactgacagaatgcattcattggtttttgaattttgcagggcttcgattcgttgggaaccctttgaattggtttcgcagttcgacctttcgcatcagctgcatttccccttctcagcctcgaattattcttcgcaaacaaaagatggagcaaatgaaaatccgaaattgcattttctaggcatttcttttgtcttacaattagcatttgctttcctttccctcacccatttgtttaagacatg

SEQ ID NO: 115942 - DNA, 132 bp, Heterodera glycines
  unsure (1)..(132): unsure at all n locations
tttaagtctgcttttgacnttccaaatgggtcgatgttccgccncctgcgataccgtacntaagtccaacggtaacattggtgtgctacggtgatttgttttgtaacaaggaaatgctgcaggaagactatg

SEQ ID NO: 115943 - DNA, 87 bp, Heterodera glycines
  unsure (1)..(87): unsure at all n locations
gtttaaacgctttatattttcatagggaacatgtttcgcgcatntggggcatagccagaaattatcacaaaatgatgtaccgaaatg

SEQ ID NO: 115944 - DNA, 155 bp, Heterodera glycines
ttcgcgatttttcttacctaaaattagcagctctaataataatatttaattttattttaaacgaaattttaaattaaaattatatactttactaataaattacaaataatttcttcttttttttgaattggcttcatgtttagcccgtttcgatg

SEQ ID NO: 115945 - DNA, 278 bp, Heterodera glycines
caaaacaatcataaaaatatttttttaaatattaataaataatctgttaaaaaaggcttttctggatggataaagattccatccatctgggaatacaggtcgggtgggaaaatgagaaatattttttattctgtccattaatattgccaggaaaaatgttatcaatttttccctacagtatgccgaaattgcgcacacacgcgacgagtggtcacaggcgacgctgaatcccattgattaccccggaaaatgtagggttcagtttgccccggacaatg

SEQ ID NO: 115946 - DNA, 1003 bp, Heterodera glycines
aaacatttaaattgtcaaacaatttgcagagcagcataagttaataagtttttgagaaaaaatgtcttccgcacttaaacagaaacaacaaaatccgtgcgcacaatttttgttgtccggcggcgacgcggtgcccatcccggacagtctgttcatctacagtgcctttctgcgtgactacaaaaaggcgatgctgcgcggcgacatggacaacctgtgaggagcaggctgaatttgtgtggcacttggagggattaggatttagaattcccgaatcttggcagtcgggcaacagtatgccaaaaaccccggttttatgggatttggaattttataaatttgtttaaaattatcgggttttgttcatttttggcgagcccttataataaggtagatatttttgggtaaatttttcatattttccgcccggtgggactcgaactcatggcctttccacactttggaatttcatacaacaagtttctagtccttagccacaattggcacttttgtccccctcccccccattaatttttgtgctccgtttcagtgaaaatatgactattccgttgccggttgtctccggcaaacagccgttcaccaagcagcatttgaccgtcatgactcagtttttcgacctgtgcgtatagtgcttcttaaattttacaaaacctatctcttcccagcctaattacagtaccccttttcccagttacacgcgtcacaattacggtgcgggcagttccagtgccaaaaaagtgccctccacggtggacttgcagggcaaatgcggccccggcgcggcggcacacaccaaagcgacgccacggggcgtaaacaaaacggcggcgccaccggcggggggaaacagcgtcgtcggcaacggacgcgtaagagcgggggcgaatttgaacgatcagaaatttttagaatgatcagaaaatttttatcaattttcacccccccccttccctaatcgaattcgacacttttaaaggacatg

SEQ ID NO: 115947 - DNA, 349 bp, Heterodera glycines
ttttgaagttcgaattggcgccgcccgtcgcgcttcgcaatttgttcagtaattggatgcccatttttagaattccactgccacttttcttaattttaaaataataattattatttaagtatcttaattagggtaaaaattaccgtactttttcttttggcccaagtgtaggttcgttacgcgcaagcaccaacttcatacattcgcgtctcataagcacctaattattttctgtttttgtatatctacggatttactcgcgcgacaacatgccttacccgtttctgatcgtcaataccaacaaattgacgacgatgaatgataatccgagatggagtaggaagaaatg

SEQ ID NO: 115948 - DNA, 688 bp, Heterodera glycines
ggacgatcggagattcaagaactaagcaatttaacagcgccaagatttaagctttatcaaaagccattgaatcatttgtattctcattatatatgatgtacaattatatagataaaatattggtcataggtttgtacaagcttaataaaattttccaagttttttgaccatggtaatatttacaagatttctagggtattggtcattgatcaagttaaaaccaaccaaagtttcagtcttgtaaacttataaatgcttcaattattttggttatgggagataagtacaagattgttcaaggtcttagtcatgggggggggggcatttcccacgatattgaataccatgttggtcttattcctttccaacgtacagtaataactagggctgccaaaaatatgcacgaaaagtggccaaaatatgcgcataaatatgcaaataaagtcgtgaaatatgcaccaaatatgcacaaaaatcgcaaaatatgcaccaaatatgcacaaaaaaaaacttgaaaattaggggtgcaaatccaataaaaaatttttattcctcataaattttatcggttttttttgcaattgaaaatcaataatttttcaagattttcggcactaaagctccatcctattgtctgccaaaatttacttaagggatattcaaaacggaaaatatttgaagaaaaatg

SEQ ID NO: 115949 - DNA, 460 bp, Heterodera glycines
aacaaagagagatagagagagagagagaaaatgaattctgcacaaattgacacgttgctgagaagattgcatgcaacaagaggtaagttcatcggtgtctacccgtcaaacaaagtgccgctgattcacgacagacagagacgactgcagcgctaaccaaaccctgatctgtctgcctatctcaacaattttcgccatgttcaagtgaacacgcagcaaattcagttcccctcatcggacgcttgcggccacttttgtgtctatttcttggccagccgttgttccggtgtcccgttttgcgtggtggttgagacgttacgcaaaacgcgcgggatggcggactggttggtcaaatggtatgtacgcatgttagtccatcatgtataaaagggtgactaaaagagagggatgccacacaaatgcccgctcgctataaggcggataggcactagaaaaaatg

SEQ ID NO: 115950 - DNA, 55 bp, Heterodera glycines
tgaaattgtgatttttgaattccaattttccctgagtcttttgtttactcaaatg

SEQ ID NO: 115951 - DNA, 71 bp, Heterodera glycines
aatttttgttaaaactcccatctattacgtgtaattttttggagtattaggcaatgaaaattttacgtatg

SEQ ID NO: 115952 - DNA, 224 bp, Heterodera glycines
tcattcaatagccctaagtatcctctattagcctacaaaatttcaaaaaatttcgttaattttcaacaaacttatgaccaaaagtacatcagaaaccgggtttttcagcttttttggccataacttttttgaaccttaacgaaatttttcgaaattttgcaggctaatagagcatgtgaagggctttcgaatgatatcaagaaaattagatttggttgacaatg

SEQ ID NO: 115953 - DNA, 93 bp, Heterodera glycines
ttttgtttcttgtttctcgattctaaaaatcatttatttttaattacgatcttagaatttatcgattttcgaaatacttattttctaggtatg

SEQ ID NO: 115954 - DNA, 186 bp, Heterodera glycines
acccggaaggggaggagatacgatatcgttaaaaaaaaaaaaaagttttattctttccgtaatttacattttggcatttcttttcttggttccatcctcattttgtaagcattgtcttttctatctaatttagattttgtcctccacccaatttcctgtttttgtaatttctgttccctcccaatg

SEQ ID NO: 115955 - DNA, 231 bp, Heterodera glycines
agacattcggcatttttttaacccatgtacaaaagcaaaaattaccatttttctcacaataattaatccataaatctttgatagagagggaaaatgtaaatcactaagcccaagacgggcagaaaggtggagcctcattagtataaaaaggaacagttggcctacaaaaattattctcaattttactcatctctttgcttacctgttcctttccacacttttgttcccatg

SEQ ID NO: 115956 - DNA, 501 bp, Heterodera glycines
tcacttaaaagtatatttaaattttgatttaaaaaataaaaaagcaattacggtttaaatctgctaaatacaaatttgaaattaagctttaattttagaaaaatatgttctctacagaaaaaaccggttttaggttaaaagggatacggggggataagcggatggcttacaaagccgcaggcaaaatttaataagtaaattaaaataaaaaatatttttaattccaatttatctaataacataatgccaaacgagcaacaatttaaatttattttgtcttttaatttgtttttaaaattaaaattttttaatttgtttagtttgaacatttttacttcgaaattaatactactctctcttcctccttcgtaaattcgtttttatgtacaacaacagcagcataatcaacggcgattgggccgctgccaacagcatttggaagaccgggcacgagaatttgtgcaaggtctgcaacgaaggccggcaccggccttccgaatg

SEQ ID NO: 115957 - DNA, 862 bp, Heterodera glycines
tttatttatttttttctaaaaaattgttataaaaaataaatttgataatatttatttccacttgtaaaggtcaaatgaaataatcaaaatttatttaatagaaaattccttttaattaatggtaatttatttatgttgtaatccattagggacccgtattttaggcattggttattttttttattaaattgaaatctatcaccaaaattttcatcgtaaattaataaaagagctgatttaatttaatgtttaaaaattatttattctattaaatatttaaaatatttctttattattttcaaaaattaattaatttccaaaaactgtaaaaagattattcaaaaagtttaacaatttgttattcatttatgaaccttaaaactgattgtattgtgaacattgtaaatatttttcttcgtttaaatggggttcgcttcattgacacaaaaaatgggtataacatgaataattaattgcctaattaagcaaatgccggaagcggagacggaaggatacggtaaaatttacaaatattttttgcttccgttaattacgcaaaagtgcaaaaaatgtgaaaaatgcggagatttaattactctttttataaaaattatttttttttaaacaggaaattgctacaaaaaggaaacaggaacagaattttacaaaaattaacttaaaaagttcagacgattttatgcaaaaataattagtgtagataaattaatttattgataattaaatttaaatgaaataaggcatttaactaaaatataattattttaaaaagaaatattagtttaattaaatgttatttttttgtcattttttaagaaaaataatcaaattctcagcgctaatg

SEQ ID NO: 115958 - DNA, 292 bp, Heterodera glycines
tgatgaagtgatgagttgtcgcgacgaaatgtgtagacgagcttggcgcgcactggtgttgatgttgcgttgagttgaaggctggctggcactggtgaaaagtgaagaaaaccgtcgccttttatacactttttttgctgcatgaatttttgcacccgaattttgtatataaggaggtggattttgcacattctcctcactcagcagcagcaacacttcaagcaacgctctcaacgatcacacatcaagcacccacaaagccagcccgacaacagcgacaacaacagcaatg

SEQ ID NO: 115959 - DNA, 264 bp, Heterodera glycines
taaaaaaatatatgtcaagcgcatcataaataaccaataatttgatcaatctattcaaaaatggcaatatatttttaagttttcaatattttattatactcataaaaaagttatacattaaaatttacaatttttttttctccatctttgctcttcacattggcttattctacgatagaaacatacgtattgtaaaatataaaagaattatttttttttaaataagaatttttgattttttttttcttacagttacaggaaatg

SEQ ID NO: 115960 - DNA, 98 bp, Heterodera glycines
acaaaaagagagagtggggaagagagaggagagggaatcttttgaggtgaaagaagatgagagaattgaggaaatagagagggagggatagagtgatg

SEQ ID NO: 115961 - DNA, 1003 bp, Heterodera glycines
tcattactcgtgttttctgtgttgaactttgtgccaacattgcgcaaatccgtcgtaaaatgcaaatgagccgaccatcacaaaaagggaggcaaatgcatgggacaacccgaaatcattgtcgaagatgagtacggaaaaaagaatgttcaagaatttgcggagtgccaaagtcatcgaaacttgcagagaagtcgtctcggcggccagccgataaacggaacggacacaaaacaatctaaaattaaaaaataataaataaaatttaaaaaatggattgaacaaactgcaagaaaagtgtggcagagagtgagagaaaggggagaacgtagggaaaagttgacgaagtgtcggaataaacggaaaggtccgaccgaatttcaccggcgacaaacgcaaagagtggcagagagagaaagtgctaaatgcaaagccaaattggttagttaaatggccgaaatctgtccattttcgaggtaatccggcaaatgataaacaaatggaaaagcggagaaaaattaccacaaaaaacatcatttcctcgggatgctttccgtagcgcaaaacactttctcctgcacaattcccaaataggccgaagcaaaggaagaacagctgaggaagaaaacacctaaaaagcaaaaagggggagattaagtaacgaatttaaaaaccatacgaaatttattttgagtaaacaaacgaatgaatgaaaaatgaatgtgtttgccctttttggtaatactgtgccgcccccccccttttcaaaaaaattttttcgcgtatagagaatggaatttttagtcaggaccgagattaataaaaatgaatccgaaccggttcagattgacagatttggatgtctttttcgaaacaacccgggtcatgcatattcaaggccgggaaaaccctgtcaggaccctgctcccgtccggtctcgtttagcacccaagcaggacaaaccaagcgcaaagcggacaatgtgtccctgctgttgctgatg

SEQ ID NO: 115962 - DNA, 107 bp, Heterodera glycines
accatcggccggcggaaagattgcaacagcctcaacagcagcaaagacagcaaagggtggtgagggaagggacggcctctcggagggtcagtggaagcaccagcatg

SEQ ID NO: 115963 - DNA, 222 bp, Heterodera glycines
aaaatcccgtcaattttaacggaaatcccgccgggaacggcaaaaatttttttaagaaaaaaattttttttctaaaattttactttaaaagtcaacgtaatttggatattaaattatggcattatgtcaattttttttgctcatagttcagaattattgtttattattattattaatatggtattaggaatctttcgtgatacccatttttatttcagaatg

SEQ ID NO: 115964 - DNA, 154 bp, Heterodera glycines
aaaacaacccaaagggagggaaaacaaaacaaaggaataacggagtgttaataaattaggggagaacaaaattagtaaatcaaatcggaaacaaaataatttaaaggattacatttctttcaaatgttttctaggaccctgaaaagtgaaaatg

SEQ ID NO: 115965 - DNA, 345 bp, Heterodera glycines
  unsure (1)..(345): unsure at all n locations
gggcaagcagtccatgcacagagagagttacacgtgcatccgcaatgcacccaaatcattcaaatatataatccccagctgtaattgatgacgaaaaaaaacacaaatttaattggggtgggcggggaatgaatggtgttccttccccttcccncagaaagctatttaaatgccaatttttcacagcagaaccataaagaacggcaaaaaataaatttttaggtattttagcaataagaaatttatttaaatcaatgcattttaaaaaacaattaaatcattattctatttttaattattttcagttttcctaatattaacaattaataattattagcacaaatg

SEQ ID NO: 115966 - DNA, 1003 bp, Heterodera glycines
aaaataattaaattggcgtgctgttgcttttgtttttatctttatttctcccaattttatgtaatcctgttttttttttgaagagttgagtgtcatttattaacagattttgttcaaaaattgtccaaattttgtgatgttgagctgagctaatttttaaggaaagcgtgcggtagacgccgacggaaacatttttgaaattttggctagttatttacagacttttgtccaaaaaatgattgcgtcaaattttaaatttctagataaaatatttaacaaattatgccataaatttcatattttgtgaagaattttaaggaatcagaacaaaatgtaaataaaaaacaacaatatttacttctttcaaatttaacttttttttctttaaatgacttttaaagattttttccaagaaatttacgtggtcttttttttattgaaaatttgctccctgatcctcgacttttctctccccaaggatcggggagatccatttcaatctgtagcctcttgtattcgtccgttcttccaaatttcgacattatttccgaccttttactttaaaataatgtgccaagtcgtaaatcccacctttccattgaggatttatggtcacgaccattgaaaaccatttcaactcagtactaaaacgggcacccgattataaaggcgggcaaaaagtttaaatgcatttttgtttgttgaaaagattgaagatgaccaccggtggcattttgggcgattagtgcagtgccaaatctatgcatgcaattaaataaagtaaaggtcggaattttgttatccattttatgcatccaacattcttgggattttttttttttttgttattcttcatagcctggagaatctgtcctatcgtgacgaaaatataattcacataccttaaataactagagcctggatttttatgtgctaaaatcctgaaatatgtaataaaaaatgtgctaaaatgccaaaatatgtgctaaaaacctaaaaaatg

SEQ ID NO: 115967 - DNA, 715 bp, Heterodera glycines
gcttggtttgaagcttctaggatggatttctatatccatatttttccatatttcgcgattatgtctagagcccggcgcaggaccggatcctgcgcaggattttgcaggatcccagtccgcaatcctgcattttttggaaaaaacaggatttgcaggattgcaggattaatccggccggatccggtcctgcaaacatttttgaattccaatcctgcaacaggatccgcaaatttgaatttttgtgcaggattatgcgggattttattgattttttaaaaaattttctaagacagaatgccaaatatacagaaactttgtttttataatatacatggattaggtatgaggagacttttgcaaaggaatttaaataaatgttattttactttgatttaagctattattatgagccacccaatttggcaaatcggtctttttaaccgaattaccgaagattcggtcgagtgcttggagtgtaaacaaaaaaacgttgtattttgctcttaaattgtcgaatcggagtatcaaagggctcaagacccatctgtttgccaagcacaaagacacgccgtatgcagaaatatatttaaaactggatgaaggcaagtcaaagaaggatggtccaaaaatcacagattatacaacacggagttcgggtccaagaataaaattgtgattttaattaattaccattttaggcaaattaagtgtgatg

SEQ ID NO: 115968 - DNA, 258 bp, Heterodera glycines
  unsure (1)..(258): unsure at all n locations
gactaatgacaagcactttagcaaaaacaaattctaattcaatatatttaagatctttttatgaagctttataatatttntaatttgcaaaaaacaaatataaaaattaaattaataaaaaaatatttttttcgattttttggcaatttttgggaaaaggtaacactcagataaaacttgctaaatatttttcaactaattttttctacgcattaccaagtcagagagccaaatatttgcgttcctttgtgagaaatg

SEQ ID NO: 115969 - DNA, 1003 bp, Heterodera glycines
ttaatttatggggcacattacccattaattgttttgttgtgttggcattcgccatttttattcactttatcggggggagtttcccatgacaacgccttgtcgaatcacaaaacattagttattagtttcaattggttctcatttattcggcatccctttgaacgaacaatggccattttgcacccaaaaaataaggtttaaatgtttaataattgagaacagaagggaaaagcgtctctttacaggaagaacttgaccaaatcatttccaactctggcgaaagactcattgtcattgacttttttgcaacttggtaaagtgtttaaatttttggatttcatttttaattacgctttgttaaggtgcggtccatgccgacaaatggggccaaaattcaatgtttttttaattttgtttttaatgagtgcgaatgggaggggcgcataaataatgaaggaccaaattgttgatgagttaaactcgctttgccatatgaaagtgcggaagttgtagagaccggaaaggacaggatactgtacatgattttctcagagtcctgatccgggtactgtatttttttggaaaatcccaaggacccggatattgttaaatttctgaaaactaacattttacctttgagatataaatctttctccgttcattaaaaaatcaaaaaaattttcctagaaacttgctgccgaataccctgagccaatttacatcggcattgatgtggacgaacacgtaaagaccaacagagatacataattaccaatgccaacaaaaaaaggataatttcctatttttgggtggggaaactgcgaattggccaaatacgaattgggtttttgctgaaccttaagcacaattaattccgctccttttgtctgtttaaaatgctttttgcaggaatcagtcgcggcattttacaacataaatgtaatttgaattccaaatattttaatgatttcatttgattatctcttttaaaattcaggtaatg

SEQ ID NO: 115970 - DNA, 164 bp, Heterodera glycines
cgtaagcagtgaaccatttcacgtgatactatgtgctcaattattcattcattactacaatttcatctgctgctaagaaaagagtggcgccagtcgagctttaaaagtggcggccgagtaatgcgggtaatcagcgcgtcaattgtcccccgcccccctttatg

SEQ ID NO: 115971 - DNA, 63 bp, Heterodera glycines
agcaatgggagtcatcgaaactgccgattttccatggacgaaaggacaaatgaccggcaaatg

SEQ ID NO: 115972 - DNA, 196 bp, Heterodera glycines
tttttgagaattccggtctctaattatttgtctcgattttgcgagagtgtaatttttaaataattgtcgtcactaaattggtggaagtgattggcaaatcttaaattgaatatcgatccaattaaaattgcatcccttaaaacattgcaaatatttcttttttattattttctaaatgttttctctttcgaaaatg

SEQ ID NO: 115973 - DNA, 400 bp, Heterodera glycines
aacatttgtagaaggaatgaattgccaatgttatggaaattaattgctacattgaaatataatagataaattatttgttctttttttcgcattaaccaattaataatgtttttgttgcgtaacatttgaattgacatcactgatttttattgacttgtctggataaatccaattaatcattgtttataaaaaaataaatttattttataaaagcgcatcctaattttatttgatttatataaaaatgaatgtctgtatcaaattaatatttaattaaaataaataaacattgaacctacagaatcatttgcaaatttatttcattttgaactcagataaaattgctgtggttctctttttcatctttatatttcttaaaattttagaatatttgaaaatg

SEQ ID NO: 115974 - DNA, 178 bp, Heterodera glycines
ggtaattcactcaaaaaatattttaaaatgcttttgaggttttttctgataaatcaaaggaaattcgctgacgaataaatgaaaattatttttcaataaaattttaatcttatataaataaataatttactaatccaaaaaaggacgagcggaatcagctgctcacttccctggcatg

SEQ ID NO: 115975 - DNA, 1003 bp, Heterodera glycines
agtcgagactcgagaagagcttgaactgatcctcattgctggaaacccaagacttgacctcgagactgagacttaacccgggactcaaccgtaaaaactcgagccttttctcgagtcgaggccaagaggaatttgaacatatgtccattgcttgtttgacatttgacgggaaatgaatctgtatcattcattgacactgatcaattgatgtctcgcggattgaatgagctgaattccggccaccgataatttaatcaataatcacctccgatcacactcagttgcgcttcccctctgccgattgtatgctgcaacggcactccgtctacgaattgcccgtcgtttggcctgatcgatcgccgattccaagtacgtaacaaatcgagaaattcgatcaatcaatcaaccaattaagttctgatttattccgtccgcattgccaccgggccgtccaccgaccaaacaaatccggaactaattgtccagcttaatctgtagggttttcatcatcttcattattatggtttttcaataattttttggtttgataatgttaaatcttatttcgttcatttttggttttctgataaatctatcaaaatttcaaaaaatcattttaacaaatttcactaaaagatattttgcttggacagatttggtgagcatggtgatgttggacaacgaaaactaatcagagatgaactgcaagaaactgtagcttctgatcagcagcaaaaggaaatgccaccaccactttttgcgccgaaaaccgtaacacttttttatttggtagcgcgtactgtaagtgtcactattggcttcagagttgcgctttcgagtttgaggccgtttccattggggacattcattgtgccgaagtgatggtggacactgtaccaaaggtaccaaccaattcatattaattaaacggcaccctccggtctaattactaattttaaatgtgccgcaggacacagatttttgttgggagtgcacagagatg

SEQ ID NO: 115976 - DNA, 365 bp, Heterodera glycines
tgtgcttgccatcctaattgccgtctagaaaaatttaattaattaattatttaaacaggaggaaaattcaaattgaacacacaattttttattgactctttgaaattggatttgaatttaagttttttcaatcttagaggtcttaaacagaatttttgggtaatgtttctcatgaacaaatgctatctgcaggccaataattaatcattaagttcatctcataaaatagagagaactctgatcactccgaccactctgatcatctttctctctctctgatcacaattttgtttttaaaaaataaatttcctccatttagtcattaattattttatatataatttatatttgtagccccgaaaatg

SEQ ID NO: 115977 - DNA, 357 bp, Heterodera glycines
ttagtctggacacacttatgttaacagggttcatttcctccccgaaggacagataaaggggcaaacaagacaatttaataaacatttttgtccattttcaagtgcgtccttgaaatttaagggggccaaaaaaggctgaaacaatcttaaaacattattttcaaatttttcgatgacagctaaacagataacaaaaatgctcaagattcatctgttttcaaggacgtccgtgccatctgagagcaactgaaaggatcaataattgttttaattttttttttggggtttttctcatatttttataaaaatttgttcattttcaaacacgtcctttccccattcgaggggaccaaaatg

SEQ ID NO: 115978 - DNA, 1003 bp, Heterodera glycines
acaaaaaatgtattttttagtggaaaaaaaccaaaaaatattattaaattttaaaaaaatgatttttttttactgaattaagtaatttggtgggaaatttaaaaaataatttgagctaattttcagtgatatactctcctcctttttttccaaaaatgatctcataaaaattcttaaaacgtcaaaatgatggcaaaataaatgttactaaaaatattatatgacatatataaaaataaacagaaaaattaagtcgtgcgacgtcgcaacgacaaacgattgtgctcttcataagaaacccatgggggaaagcaaattggcgcggggctttgtccctaaattcgccagattgggaaatggtgccggcgggcatcaaaaaatatatggaaaaaaagctggacgagaacagcggtggattttggtaataaaacagggaattgaaattcttaaacgtcaaatggattaattacaatttttatatgcacaaagctttttggccaaatttggattttttgcactctttttgtcattttaatacagtaaatgcatcttaaataattaaaaaaaaaacaaaattacgaagcaaatgttctgtataattttgagactgcattttgacaatttgtattttttattttactttaaaaaaataaagaaaaattttgtcaagaggtgaaaaagttttcaaaaagcagacgttttccattttttcttccatttagggcatataaaaggcagcaaaaattatttattgcattgcatgcatttacacttaattaaacaaataattttttttttgcataatatttttatggcaatgcactaaaatacggttaaaatagcagggataaaattattttaatttttggccaattgcattgctcacaaaaattaaaattgggattattttgccaggattctgctggacgacttcatccggctgttttccaaaattcacctttgttttttggaaccgcacgcgatttctgaagtgcgtgagatg

SEQ ID NO: 115979 - DNA, 197 bp, Heterodera glycines
atagaaaatgattgtttatgataatttgattgttagtaaatttttgaaaaagcattatttaatagagaattaattctcctaataaacaagaaaactctcttttcttaattttaagatcgtttaggcaatttgggcttgaaaatttttttgttagaatctgttttggacataggcgtaaaatttcaggggcgcaaatg

SEQ ID NO: 115980 - DNA, 155 bp, Heterodera glycines
  unsure (1)..(155): unsure at all n locations
atttttaaaatttaaaaattnttttacggaggtataaccgccccgggtgctccgtggggcctcatttgccttcgctacgaaattcgtacgattaaaaaaaaaaaatttatttttcattttaacggtacgtcttttaaatatttccaggcacaatg

SEQ ID NO: 115981 - DNA, 208 bp, Heterodera glycines
atttataattattaaaaaataattgaataaaaatataaaataaatttaagtataagtacaatattttaaatatctaaatttttgttattattaattaaataatttaaatttacgcattaatatttaatattacttttattgtttttgaattctataattttctctatttacaaatcaaattctaaaatattgttctaatacagggatg

SEQ ID NO: 115982 - DNA, 439 bp, Heterodera glycines
aggcacaccacgaggccgcgaagcggccgagtgagtaccttcggtgcaggaaaattattaaggaagagagttcattatttatttgttttttgcataattaatttataaatatttttttcagaaagggttctgaaacgcaccaaattttatttacatgttagtttaggcactctgatgctttttctatcaaattgggagatgaataaaatttttaaaaatttttaattcctttttaaacaggccaaaaagtttaggcttaactttttagtgaaaattcaatcactcatttttcgagtagtgatcagaagcgcaccagattttgcaggggcctaaaaaggtcaaggaaaggcgtctctgcgttgatttagcagtagtacctatgaatttaaattttctatgaatttttaaagtttttagaaatttttttaagtgcaaaatg

SEQ ID NO: 115983 - DNA, 742 bp, Heterodera glycines
ttttgccgaacctttactaattgggcccgacctataagaaggtggtcaaataacactcccataagtaagcagaacagcaacaagttcgagtaccaccggcggatgtgtgtccttttatgactaccattcctatagttctattttttctctctccgttgacagtcgggttgatggatttatgctttttttttattcacaatttttttttgttttttaaaatttattacaatattatttatgaatatattcataaaaaagcactttttccatatgtcaaataataaattatggatttagcttttaatattcacaaattttctttaatcaaattctttttctttatttttacaaaattatttatgaatatattcataaaaagcattttttcacgtgtcaaataataaattatggattttgctttttagcattcacatttatcattataagtttatttattttttatttttataatttttccaataactgtaaggcatttgggcacccaaaatcggcaccgtcaacttcattttgtcttctttaaaaacagagaatgaaaaagtcgattttaaacttcgtttttatgaaagcattaaattctgttgttttttttactagtgaaatctttattctgagcgtatgccctttatccttctcatgagtaaagaattgaattttgaaaaacccggaccattcattgacccgggtaaaatccttttcacgcatcgctttaactttttagatg

SEQ ID NO: 115984 - DNA, 504 bp, Heterodera glycines
atgtcaaaaataaaactcgagaaatttccgagttttcgggttgtttaggtctcagttttggtgccaattcttaattttggattcgaaaatcacgcgtttctctgtgaattcggttcggtattcaaaaaatttctcgaattttttggaccccggcctctagtccaggagaggtcatcttgttcacggggctcaatgaagcgacaatttcccaaattttctcgaatttttttggagtttttggattcgtgtttccggtcaattctcagtcccgttgctctcgatagttccctttttacgtaatattttatagagttcggacccgtatacgccgggttttcccgtatttttcgacgatacgagtttttacggactatggtttttacgggttattttagcccggtaagtccgtactccgtatacgtgccctaacacgtaaccttttccctaaccagtacactcgaacaatttgctaatattttgcatatatgtaggaagcgcatcatg

SEQ ID NO: 115985 - DNA, 337 bp, Heterodera glycines
ggagagagaagatcggggattaggggggggggggaaattgtccgacaaaagtttggcacaagcctacaatgagaaaatttcggagggggggggggatccctatttattttattttttgctctttaccccaaagttttcccatgtaattttacatgagggtttttggcagatttgtggcccaaaaatgccaattttgggaaaaaatctaaggcgtaattaggggtaggggggggggcggtgccgtgccgaaaggcgccgtaatgggaaaatttaacaaattttgaaattcgtatgcgcatagattgccgaggttggcccagcagcgggtagtgccatg

SEQ ID NO: 115986 - DNA, 957 bp, Heterodera glycines
  unsure (1)..(957): unsure at all n locations
atgatgtaaattttcaaaattttcgagctaggccccctagnaatttcgggaaatttttttcgacgaaaaatgggggtgaaaaatattttnctgggtaaaataaggtgctgagtacgaatatgatgtctattttaattntcataatttttggaattttttaaaaattctttattttttggcaattttttggccctcgggattttgggctaatatttgaaaattcataactcagttcagatcaggtctattttggcgaattaaagctttaaaaatagcaaaaaatcgggaaaattttatgagatttatttgaaatttatagcacaaaaacaaaaaaagttattccagaaattctggaaattttcgatttttcagaaaaaaattcgtagctgccttctgaaaagctattcgggaaaagtaaaatactacaaaaatccgcaattttttgctctattaaataaattttatttggcatttttatcacttttttgcgaattgttataaaaataaaagtgattttgagattcgggaccaaaggggggtgaccaggatttttgagtggaaaattttttttaacaaaaatcttccaaaaacatgtcattagggctatttgagggtgctgatcacgaatacgtgatcagattttacttttgacatcgtcaagtcctcagaatccctgtgtgattggggattctgaggcatcatttttgggggggggggtcaaagttcgaatccggacggtgtaacattatttttctgtgcatttttacgttattttcaatgattttaattaatttaaaatattttgttgagttaataaataaaaaattatatttaaattaattttttttttgatgaatacattttataagtttaaattaattatttttttaattgatagaatttcatgtatttttttaaattaaatttgttaaaaaatattttcattttaatttaatg

SEQ ID NO: 115987 - DNA, 553 bp, Heterodera glycines
aatttagaatttggaaagaatttaccagaaaaattacgcagtttgttttgtttatgacataaatatcaatctccacgaccgcgacaacattataaaattacattcattaatacacaatcagctccaagcaaaaaatttaacaattggcttaattttgcatggcgcaaatcagggttttatggtgatgagcctttcccagaattcattcacccagtaaaatattgttttgaagtgcccaaacacaatgacgaatgccaaaaattaaattgtgacaataacattttgctccgttgtgctttttgtgaaatttttttatgctttaaacatttttttaatgattatcatttatgtgaaaacgaataaatttaaaaataatctaaatgggaatcaattttcctcggccaaataatttgcataaagtgcaaaaataaatgggaaaaaatatttacataatgaaaggtcagaaaattgaaattggaaaaataagggtaataaaagtgtgaaattcccacccgggaaacattcttttggcaatcgacagtttttcaaaatg

SEQ ID NO: 115988 - DNA, 204 bp, Heterodera glycines
atggcgaacaaattgaaggcaaaaaagaaacgaacgaactcggatcattcgtcgaatgagagcagcatttcgacaggaacgcgcagcagcaatcgatcgcaacgcgtatgttggcgatgcggtttgagacattcgtcgagcaattgtcgacatgaaacaaccgtttgtcgaaagtgcaagaagagtggccacttggaaaggatg

SEQ ID NO: 115989 - DNA, 204 bp, Heterodera glycines
accccggaaaagggggggaattccttctttggatgagagttgcaataaaacgaattgatcgttttctggaaactgtggagatcggagtacttactttcgctcagagaaagagatcgtaacaaccaagctggagaaagtctcccaagagagggggatattgtcttggtcgaagaaggggaagccccactgtccatttgcctaatg

SEQ ID NO: 115990 - DNA, 271 bp, Heterodera glycines
caatggccttaaatttgaatttgaagaataattagtaaaataaattttgaaataaaataaaggagcggagaacccgaatttaatattaattttgagccagttggatcccgaacccggattgagcaaaactcaaaattaaatttcgaatctcgcatttttgggagagatttgattcacccccaccgctaaacaattaccaataaatttaattaaataataaaaaaagggtcaatggcaactcgtacgaaaatcaacttatataccagggatg

SEQ ID NO: 115991 - DNA, 267 bp, Heterodera glycines
  unsure (1)..(267): unsure at all n locations
ttttttttttgtttgcttcttttttagcaaaatttgttcattcctaagggggcaaaaaaaaactaataggataaaggagacgcagaaataattatttggattttttgatttaatgtccctaaatngtggaagaggatctggcccagaaatttttttgtcaaaatataaaagctggttgatcgaatttgatttcaaataattcattttacagattttgttgacacgaaaatgttgcaaaatttttgattaaattaagacaaaattatg

SEQ ID NO: 115992 - DNA, 1003 bp, Heterodera glycines
acacgttctatataattaaaattaattatttaattattcactgagattttttgtggatcgcccacactgaatttttttgtggatcgcccacactgagtttttttgtggatagactcagcacggttatggtgcccaccaatttgacctctccaatttatctctgaattattttttttatttatttctccggcaaataaacttttataatttttatcttcggacataacagttattaagaaaagttttctttatttcgtttttggattgaaagtgcgaaggatatctttaaattgtgtttttatatgacatcataaaatatttcttattatacaccaaaaacaaaataccaaaagaaaacataaaaaaatatttttaaactttaaaattcacaaagaaaaaatactgaaaaataataaaactatgaaaaaaatgaaatgataaaatagtctaactaatgactttttaaacaaatcttaaattaatatttaataatactcaaaaaaggatatgtataagatattagcgcaaagaaaattattatatataaaatcacgacgcgcgtgagcgaatgaacattgcgagccgcgagtacatatatcaaaaatatgtgaaaaaatcaaagttattatatacgatgctttgttttcgcgtaagattatagaagaaacctcagtttaacagaattaataaattaataagcatgttcatgaaaaataattccaagtattacttaatataagagaaaaaaattaacttacgtcagaatgctatcaacgagacttatcaaggcaatacttttaaatatttttttaaaaaactcataaatatgtcataataacttaaaagtagagttgctcggtaccggtaccggtaccggtactggccggtaattaccggtttttaccggtaacggtaccggtaccggttttttcaaaaatcaaagtaccggtaccggtttgtctagtaccggtaccgccggtaaaaatttgcactggtaagaatg

SEQ ID NO: 115993 - DNA, 102 bp, Heterodera glycines
tgccattcgccgggatggtcggcgagaagatcctcccttgttttgggggagggcaatttttaggggttcaatcactggctttccaactgattttcaggcatg

SEQ ID NO: 115994 - DNA, 338 bp, Heterodera glycines
cgtcaataaactgaaagaaaaaagttaaaatttttgtttataaggcagcgtttgtgacaaaaccaacaaaaccattcattagtcaatcattgaaaagtcaacagattaattaattaacttgatgacgattatgtaatcgttaagtcatttcgaccatttaaaacgcacttttatcaccaattaattgttttattttctaaattaaattttaatttattttttttatttagtttattctttttattcctcctccttagttaatgagtttgttcttccgatttcgctatgccattctctttttggccactttttgcatggcttgcatttcgtccaatatg

SEQ ID NO: 115995 - DNA, 1003 bp, Heterodera glycines
aaaacccatcttaaaattggtaattttttacaaatttacggcataaagttgtaaaaaatttggtaattttcacaaactcattgccgaaaatttatttttttcaaaaattgagttgaaattttttttttcgatagtattttaattattgttttcaatttaaaaaattttcccgtttaaaaatagtaaaatatttggtgccgttttgggcttttgtgcccatttatgctcctcgaaatatttatatacctttcttttatttttatcttttacatatttcgatttttaagccaagaaatgaaaagaatgaatattattttaatactttgctgctgcttcctgggagttcacctcgcaaatccaaattcaaaggaaaccgaagaggaaaggtcgaattgggggggggggggggggaactccgtacagtgcaaatgtgaaagaataattgaagttaataatgtaaaaatttaattaattaattagaatataggcaattatgaactcataataattccaaaattttatttattggttcgagagtctcggtcccatgtcacgagacaagagccgatatttttccaaacccagggaatttgctatacattggggctgtattttctgcacaattaatgttgtctcttaattgccataatttaaaattttgtaaataatttcaatttcattttggcacatatttttaaaataataaataatatgattatcattccatattttcactattctgagttggtccttgcacaatttttgtttattgctgacatctttaagcagatcgattcttcgcttaaaagtgacaaggcttccatcacctgctgagtcattgacgaacaaagtttaggtgaatgatagcgacatcgatgcaaatttgacaaagttcttcaattagcttaatgacccatttaataagtctaacctttggcaagatacgtaaaagttctcaccggtggaccggcccaccattatcacttctcagtggctaaccatg

SEQ ID NO: 115996 - DNA, 736 bp, Heterodera glycines
tgattaatagggatgcgatttttaggtaagaaaaatcccagaataggtacttaaataggtaaaaaaaaatctcaaaataggtattaaataggtacaaaaattccaaaataggtaccaaaataggtaaataaaaatttttattaacgattttttagtggaaaaaagcaaacaaagagggaaaattttggttctacatatctctttgtaaacgaaaatttaaatatattaatattttctttgataatattgacattttaaattaaaaattttgtcaatagaaaaaataaataaattttgggataaatttttgagaaatttttccaattcttagggtgcatttttgaaaatttttttggtcgattcttatgggtatattttttgattttattgcatttttgttaagaattttttgaaaatccttaaaataggtaaccaaaatgccgaaataggtacctaggtaataggagaaaaatcccgaaataggtaaaaataggtattataaaagtgggtgtaaatctccaaaccaagctaaaaactcgttttttatgcttatctcaacgttacaagtgcgcaaaaattttaggtatttaactaaatatcgcatccctactgattaatgtaattaaatttaaccgattttttcgatcactgtcatggtcatgatttttggcttttcttatttcttagtgtcacggcggacctaaaaacagaaagaaactaaatatttttcaaaatg

SEQ ID NO: 115997 - DNA, 292 bp, Heterodera glycines
aaaaaaaaattccatgatgacgacttttggcaacgcaaggacccttcttttttttacgaaatttttatttaaaaatagatttaaaaaaattcggtctaacattaagcaaaaaagatcatcagaattccctccaatacaaaatcccggggaccgtccaaaagtgaacgagaaaattaaggcaatattttgcataaataaatataaccaaagagagttttttcaacatttataggcctcaaaataccagctgcagaacaaatttgccgcgatcagacagaagggagccaaaatg

SEQ ID NO: 115998 - DNA, 568 bp, Heterodera glycines
aattcttaaccaagtaaaaggtgactcaaaaattttccggatctatttaaaagcatatttcgctttaaaaaattattcaacgattttcatcaaaaattttaccttttttcgcggcgcgttttttcaaaattttttaaaacatcggcgggggaggtccggcggtgccgataggcgccgccggggaaaatttttataattttaatgcaaattcttaacaaattttgtccaaaaaatgaccaaatttagcaatttgaggcaaaaatttctcaagaaaaataagattttaaggtccggcggtgccgataggcgccgccgggaaattttttgaaaatttcagtgcaatttattaacaaaatttgtaaaaaattgttaattttttgaaaaaaaattcaaaaaaaatttccgactttttatcaaaaatttcggaaatcggaagtcggaattccgacgtccaaaattttttcggaaatcggaattccgtgccatccctgctgtacaccgttcacatgaaccaaagccaataatatttacaaaaaagtttattattagggtggtcgaacttgacatg

SEQ ID NO: 115999 - DNA, 229 bp, Heterodera glycines
ttggcgttttgttttttacgccaacgatttttttccgctttttttccttttttaccgtccatgaaagtgctttccgcaaaaaaattctttcggattaatgcattacataccaagaggaatcgaatgatatatcatttacatttgttagatttggtgaggtttaagtattcttgaattttatcacttatttgctttttgttgattaccttggcctatttttgcaaaaatg

SEQ ID NO: 116000 - DNA, 1003 bp, Heterodera glycines
aaaatttgcgattttgaggacccgagcaaataatggcaacgccacggtcattgcttggaacaaaaggagttgaagaaactgaagttcatgtcgtgcttttttgcagctgttgaaagagaccaaccaactcagtgaggaaatgcttcacttgcatttgcttcccattatcaccttttctcaaattaatagggccgcaataattaatgagttaactatttttttttttgctcaatggtttttgtgaaagatgcccaaaaaacacatttatgcactgaaaatttaattttttaggggctgacggcatttttttacaccacctataaaataaaaaaaatgtttcaaaaattgatcgcaaaaattttatatttttttcttgaaaaattttaaaatttaaaacttttcattaaacgaaaaaattataaaataatttatttaatgatcatttaaatgaccaaaattaagtttttggttaagtttttcatgttctgctcacggaaaatctttaataaaaaacattttaaatgccttttttcatgcttttttcaggattttcactggggtcccgcaaaatcccgcgcgggatcccgttccgcgccgcactttttatcaagaaaataaaatgaaattttggcgatcaatttttgagtaaaagtcaacgtagaagactcaaatcaagtggaaaatacgttttttatacttaatatgtataaactagtgcgcagaaaaacggcatctctaattattatcaatgaatatctaagttttctcgactgttgactgagcatggcattttatattacgcaaaaaaaaatatttcaattattaatagggctggcaatttaagtcacaattaaactccaaaaagtcgactaatttagagtcagcaaaaaagtaaattaacttaaattgcccctaaattatcaccattcatttaacaccagtaaagaaataaatgtctttttatttgacaattctaattttaaggttcgcatggccaaaaatg

SEQ ID NO: 116001 - DNA, 211 bp, Heterodera glycines
ttttttggtcgggaaaggcagcaaaaaaacggcaagattgacgaattgatgtttccattaattaacaattcataattttcaataaaccctttcaccacagtgtgtagagaaatgggggactaattgtaatttaaccatattaagggcttaatggcacacaaaaccattctgatgggggcatctgaggtttttgaggcaatgttcaaacatg

SEQ ID NO: 116002 - DNA, 717 bp, Heterodera glycines
tttcagttatctgattggcctccagttagtatcgcacggtgtctctttccgaaaacgattatcaaggagttggtttttattttaaatgaattccctgaatacaaagaaaaggacaaaaggggaaggactccgggttcctccctttgttttgattgatttttattcgaactttacctttcaatactaattagcgcagcatttatgggaaggacccaattttttttttggcttaaatcattttttatacacttttttggtttgaacctgttggaaattgagatgaattcaatgaagttttaatgttattttaagtttgccagattaaaattatttgtttctatcgactttcatttccacaccgtcctttaataatatattttgcattttatttgtggcgttgtcgctttcttttgaattatgaaaatggtgtgcaacaacatttgttacggaattttgatgaggagaaacggccagaaaatccgccttttgctttgctttggtttttgccgcatttcttcgcttaacacacagccgcccattctgagatggggcgtgttgtttagccatcaaataattctccctctccccaccattttattcccagtgatccgctttgcacttaaatatctgatcgatctttttcaccactgattttgctatttctcagttttgtttcatttttactcacttttatttttactaatttttcagcaaatg

SEQ ID NO: 116003 - DNA, 346 bp, Heterodera glycines
ctcaatatacattttgagacgcaccaccattgggtgcaatggaaatacgtagaagctcactcattgctcttacgttgagggaaaacgcaatatacccctttgggttgcgtttgatccaagcgctacggctgcgctttagatttgcttttggcttagaggggatgaatcaccacaaataaatattatttcaaaacaaaattgatcggttaatcaatttttggtcgctttggcgacaataatagaaaaaactgagaatgaaattgttatgtcaaacataattataaatgaagacaatttgttacaattttcaaaatatagaaattgggaaaaaattattcgaacgatg

SEQ ID NO: 116004 - DNA, 520 bp, Heterodera glycines
attcctcggaattcacttaaaactgttcggaaatttgtagcgacattacgtgattcagagaaaaacagcaaaaaacgacaaaaagaaagggcattttggagaaacaacgaacggaagaaatatgaagaattaaaattttaatttgtgcttccacctcgagagcagcagaacatatgaaagacattaagcgaaaagcgcatgggttggacgagattcactgggagaagagagcttaattgggcccattcagaaacattttggagaaatggagaacagagagtggccttatgaacggatttttaacaaaaaaatgaggaattcatcagtttgggaagagccaacaaattaacaaaattttaaatttatttgctcacaaatatttttatcggattcataaaaaattcgataggactcataaagcgcaatagagccgctttttccttttaccgtctgatgtacaataaaaaaggaataagaaaccccacccattcttcagtatttcccgttttcttttccaatg

SEQ ID NO: 116005 - DNA, 97 bp, Heterodera glycines
  unsure (1)..(97): unsure at all n locations
gcactgtccgtagcgttgtgtttggcnttgtgtgnnccggccaatggacncacagcgactctgtgagtgacgtgttcaccacatatttggacacatg

SEQ ID NO: 116006 - DNA, 214 bp, Heterodera glycines
  unsure (1)..(214): unsure at all n locations
tttttatataaaatctttatatatatatatctctttttattttatactttttatatttttgggtttacgcctctgaaaatattagttcgacttaatttcagctaatactcntaaaatataaaaaatctattttttgaaagtgagtgaatttcatctattatttcattacagaagagtgaacaaaatggtagtcttgatgttgcttaaagccatg

SEQ ID NO: 116007 - DNA, 94 bp, Heterodera glycines
  unsure (1)..(94): unsure at all n locations
atttttgaaggaaaattgatctantttggggcatgtgactgtcaaaacaggaataagtccatcaccggaaaaggttaaggcaataaaagaaatg

SEQ ID NO: 116008 - DNA, 615 bp, Heterodera glycines
attttcaaaaaaaacatttacttttggcatagtctctagttcggcgctttcataaacattcaaatattgttggcctatagagagcgctattactctgctattatattacgtttggccctgctcagtcaaacaaggatggttcgtccgacttttgctgactaggccaatcgtcctgtgggccaatggttttataagccattcgccctgtaggccattcgtcccaaagtccaattaaaggacaatcgccgccgtgtaggccaatcgtcttataggccaattgtcctgcaggtcatttgttatgtaggccaatcgtcccctaggccattaaaggacaattgcagtgtaggccaatcgtcccttaggccattaaaggacaattgcagtgtaggccaatcgtcccttaggccattaaaggacaattgcagtgtaggccaatcgtcccgtaggccatttgtcgggcagtagccaaaaactgtttggatgttgtcgaactgccaaacaagcctaatgaaagagcatctgttaataattaaaactcaaatttagcatcattcaattatttgttttgatttttaaggcacaataaatcgacgtcaatcttcaaaataaaaaatg

SEQ ID NO: 116009 - DNA, 188 bp, Heterodera glycines
tattggtgatcagcgaccctcaaaaccccatgcccaaaattagtggcataaaataaacccaaaaaaacagaacggccagactaagctgacccggtccgacctaatttgtagacaattcattatccaatgtttttgatcatgttttgattcgagattgtaaaaacattcatttttagcgattaaaaatg

SEQ ID NO: 116010 - DNA, 687 bp, Heterodera glycines
ctcggctctcgctcgcgatttacctgcccgctcacctgactccttatcgagagaatgctcccgattaaatagttggacttatggaacggaataaagatggggaaaagcggggataaatggtgtgagaaagagattgaacggatgtgataactcgcaaattccttcccccccccccctttccttttccaaattttcgccctttccttttccaaatttcgttgcgctttctcttttccatcagggattcctcttcttctctgttttttcacaagcctcccatccattcgtcttgcgcactgactctgaccagccccccccccaaataacaacaatttctcatcgattctttccgtccatcgttatcgccgcaactgggtcttttagttggcgtcgcaactgcctccaccagtcgccccccccctaagtaacagcaatttttcattgattcttttccgcccatcgccgttatttccgcaactttggatggcgttgaatttgaaaaaaattattcattcgttttatgcgattaaagattttaccaaatttaatatttaattcttttaatttttttacttatattcaaataaaatttaaatcccgaatcccataataaaaattaggaatattttctgtcatgtgagtcctttttcaaaattatttaattttttcattcagtatttacaaatg

SEQ ID NO: 116011 - DNA, 784 bp, Heterodera glycines
tttgaaaggacggccaaaagaaagagctgaaaagcattaaaaacaaaactattgaattacaaatttcaaatttgccatctctgagaaaaatacgacgcatagacaaaaaattgccattttaaaatattttaaattaaaaaatcggaacattttgtgtctttcattagtttctgttgtatgtatatgtttcatgtactttaaatatatcggcccattctttgtactgaaacaacatctctccaccgctcaatgcaaaagttgctgaacgcaaacaccccaacccgaacacttttatgttttgtatttgttcgtgtcttaatttgtcgctccctccaactcttccgattttgtcctcccttttttctgagtttaccttctaatcagcaactcccttccaattttcctctccaatccgatcatccaatttgggtctttctctctttcctccctcttttccctgctcttttcagtcgccccatcgtccgtccttccccccccccccccctcgtcattcacttaacatttcatttatgtcattgtatcgaccgatcgtttcgctgttatctcgttcaatctctcctcatccttctcttccttccgtttctttctcctccgcacttttgttcacttcatttcgtgacttctcctccgaatttcaacggcataccgaaggtgcgctcctttattggtacctaatttccgaatttgttttgagttggactcacacaattttcttcataaatactttcaacatatttcagcctgtcccaacaacccaaaaatg

SEQ ID NO: 116012 - DNA, 103 bp, Heterodera glycines
attcgtcggtttgctgctctaccgaatgttgttcaacaacaaacatcccatggacaattgggagccaaagcgccgtttggacatggaatttatggcaaagatg

SEQ ID NO: 116013 - DNA, 554 bp, Heterodera glycines
gcatgtttttggcaaagaaagctattgaaaaagggggacgggacgaaatctcgccgccggaatctcgccggccgaaatctcgccgagacaaaatctcgccgccgaaatctcgccggctgaaatctcgccggccgaaatctcgccgcagaaatttcaaaaaaaaaaaattcaaacttagaaatttttcaaggaaaaaattttagaaaatttttttataagaaaattccaaaaaaaactatttgctaagtttttttgaaattttttcaaaaaaaaaacagtaaattttcataaaatttctaaaaaaaattgctgaaaaatttttcaacaatttttttatttaaattttcttataaaaaaaattttctaagaattttttccttgaagaatttctaagtttgaattattttttttttgaaatttctgcggcgagattccggcggcgagattttggggtgcaccccttgaagtgtgcactgccgggtaaaaacgtctttccgtccattttcattgcattccattcttccatccatgcccaaatttgcccccttcagatg

SEQ ID NO: 116014 - DNA, 1003 bp, Heterodera glycines
gattattgtcgttccgttgctccaaattattcgctgtttgctgtccgaacggcaaaaaagcactgagcagaacgaacagtcgtctgttgagaacaataaaacataatcattcagagataaatgatacgaaatcaaatattttattctcccgtgcatttcgtctcaaaaatattgtaaaaacgcaattttcatctccaattttgcttcgaaaacaaatcggcaattgtatcattaacgtctagagattgaaaatttgctgcttatgcttaacaaattgttacacgaatcctttttcatttcaaacagaattttccgctttctttgtgtttatataaatcctcattttttaattctatcatttggtcaattttctgtacctaatccctgccgatggatttgtatctgcattttcgttgtcgttgtttctgttgccattggctgctccccgaaaagcgaccagcagttgtcccattaaaattcgttccgttttaattattaatttgttgtttatgcgataatcgaaatgggaggaacagaaaacgcataaccacgaaaaatgcgaaggaatgagtcgcagcagcgaccgacgaagggcagccggttcttccgatcagcctgatcaatctccacctacactcttttattcaaagatgtgctacttctacatatgtaatgttgctgttctgttcaattttttgaacatttagaacacaacgtcagaaaacatttaagcataaataattaaattctatttgattttaaagaaagccgaatcccggacaaaggcttccctaatttggatggaaacccataagtttctcgttgtttttcattatacctacaaaatatgtgcatcctttaacatgacaaattcaccaaggtagaaaattccaataattcaaatttaaattcgtttaaccaaatttagttcctttgtaattcgattaataatgttcttacatttaaaggggaaagcatcacatattattaaacataaaaaatg

SEQ ID NO: 116015 - DNA, 421 bp, Heterodera glycines
atttgggtagcatttgaagtattgtaaatgatgtccaattttttttttttttgttattcgacgccaaagttgaaaatgcttttaattgagtgtcaatttatggaacataatgcatttttgcttccaaaaaagcgggtgcatctcatttccacagccccccccccctcccccttctgtcgtccttccgagaaaattttaaaatttaataatagaatttttcaaaaaaatctagtaataaaaattttttagccagaaaaatatagtatctttaaaattttgaaaaacgctgaaaataatttttaaattgcaaatacagtttccggtttacagtttgcgagtttgtcttgtttagatggaaattttctcgagtgattggaaaacgaccgactttgaaaaattgtctaattgattctcccctatg

SEQ ID NO: 116016 - DNA, 933 bp, Heterodera glycines
tttggcgctgactgctttttgagcgatatttagagcgaaagtggcgtaagaagtcagcatttttcaacatcagcgggctaacattcatattatgtttaactgtacgtcttcttccttttacatgcttcattttgcaacataaaccaatggggggagcccgccctgctctccatatatattcgtttttaggcgcagcaattccggactctcggggtgcatgtcaatcaataggtagccaaactgcttttcggttgcatctcggtatgcttccgtgaaatagttgtttttcgttggaaatagctgcgaggcgagtgtgcgcacttggagcgcccctgccgggttacgcatcagcaccagatagtgcgagttgttgcgcgcaacccgtagttctttcgcgaacaaatgttgagtgaccaacacaacgctaaccccccaattgtgcgatccccgggtgaacacagtgtcaagaaattgttgccccataccaaccatgagatcatccagcaccatcagcagttttccatcactctcttttgcgcgccggttaacctgctcttcggttgggcttccagcatgtacaacaaccctacagccgccgatgtgtccacttttctgtagctgtattatatttgggttcaactccccataacaatagaaaatctcggagatgggttccgaaactagcgcattcacattcctcagcattcgcagcacccattccgattttccactccccgtgctccccgagattgtcagcgtgaacgggtgtctgaattgcaaatgtttttcatcaaatttttgaaaattgtcagccatttgtttaatttcataaattgtttcaaaatacctacattttctattttatatatacatataataaaaaataagtgtgtgtgtgtttagatcattcttaaattgttcaaacaccaaatg

SEQ ID NO: 116017 - DNA, 117 bp, Heterodera glycines
aaacaattttatggagctaatgataactcatgtccaaaaacgaggccccagcccattctgacttattttctaaattgaattcgcaaattccatattttcagtatgatccggaaaatg

SEQ ID NO: 116018 - DNA, 93 bp, Heterodera glycines
attatggcgactcaatttccttttcaaattaattatcaaaattgtcgttaattttttcaaatatagcaatgttttctgtcattttgttagatg

SEQ ID NO: 116019 - DNA, 617 bp, Heterodera glycines
taattgcggacctcaaaagccgcgcaatttcagcaatccctaattttaaaataaaaagttatcaattttcaaaaatttatgaattgcaaattgacaccaaaaatgaataatttcgtggttttttaagtttttctaagacgtaaaaaggttttaaatttcttagtcaaaaaagtgaagataaactacaagtttagccactggatggcttgagcttttttcgaaaattacattttattttttaaaaacataaaatttggccatctatttttattattttctgtcacaaatgtatcgaaaatttttttatttttttaacactcacgccgtaaaaagcctctgagtgcactttcgttctgaaagtcacttgtgtggacagccaagtcacggcggtgaccgctggttgcaacgcacttgtgcgacttccaacagcaaaaggcaattatctgatcacatcacatcatcaatcactcacttatcaagccaatccgttgtggtttctgaccgaagctaagcaaaatacttattttgactcaaacaaaaacatttccaaatcaaatcactctctcctctcattcatttcacttaaaatctgagaaatttttcatcacgatcaaatg

SEQ ID NO: 116020 - DNA, 198 bp, Heterodera glycines
ggaaaaaacaatttctggaagaaattaggacgggtgagaaatccgggaataaattcttccgggggattccgggaagaaacgcaccggaagaaggaaaagccaaaattgccaccggaagaaacccagccgaagaaggaaaaggcaattttggaaaaaatacgctcggtggcaaagccggaaaagatacattgaaagatg

SEQ ID NO: 116021 - DNA, 239 bp, Heterodera glycines
aaattaaaattaacttttaaaaaaatataaattaacaccaaaaattaagggccgttatgaagaattccggggggatatttgaaaggtgccaagaatatggaaaataatttaataaaaggtatagagaaaaaatatgattttaaaagcattatattttttttaaataaaaaaataatttaaataaaatataataaattgaagaataatttaattttgaaattaaaattggatgccttatg

SEQ ID NO: 116022 - DNA, 110 bp, Heterodera glycines
tcaatacttttttttccacctatatacattaaacaatttaaatacttaaatatttttaattacgggcgccaatccaggaattattttcttagtcgccgtagaaaacaatg

SEQ ID NO: 116023 - DNA, 941 bp, Heterodera glycines
tcaaaaagggcgttatataaaaaaccatcaaatgaaaaatttcaacctaaaactgtccataactcttgtcaaagtcaacagaattaaacattcttggtatcatgcgatatccctaacatttctctattagctcatctaaatttcaaaaaatttggtcaaggttgagcaaagttatggccaaaagtacacaagcaaccaggttttcaaaaatttttggccataacttttttaaacctaacgaaatttttttaaattttgcagggtaatagaggacacatagggttaccgaataatagcaataaaataaaaaatgaaaataatttctaactaaaattttttaataaaaataaaattattttgatcatcaaaaattctgatcaaaactttcttacaacaaacaaaataagatgatcttgatattattcgatagctctctatgtgtcctcaattagcctgcaaaatttcaaaaaattttgttaggtttcaaaaaaggtatggccaaaaatgtctgaaaacctggtaccttgtgtactttttgccataactttgctctaacttgaccaaatttttcgaaatttaggtgagctaataaagaattttagggctatcgaatgatactgagaatgtctaattagattgactttgacaaaagttatgggcagttttttgttgaaaattttcatttggtggtttttttataacgtcctttttgatggcttttttataacggctcagcaccgatacgatttttaggttttagcttattttttcatgagctccccgtggcctgaaacgcacgaaaaataagttttttttggtggttgttaagctacttgtcgagttattcgagcctattttctaggtctttatttttagagcttaaaacctaaaaaatttttgaaaaaagctatttgacctattttggcgtgacggaggggatg

SEQ ID NO: 116024 - DNA, 282 bp, Heterodera glycines
aaaaattcttttgtttttttaatttagttgttacagaaaataaaagttgctgaagttataaaaaaaaatcagacaaaacttgtgtttttttcttgaattttctaaaatcttattattttttttgtggtgaatacctatatcccagtattgtctcggcgaccttttttcgacaaattttgatttccaaaaattggcaaaaatggtttaccagtattgtatgaaactaattttggctatttgctagtattgatcatttattctacccccttttcagccgccatg

SEQ ID NO: 116025 - DNA, 556 bp, Heterodera glycines
aagagcagtgggtggtcagtgagagagagagagagagaaaaagcaaaaaaaaaaaatgccaaggaaattggagaaaggacagaaacaacaaatggggggatacggtagacagtgttgaaaggatgatacggtaaatggagaggggagaggtactctgtacagatgtattgggatgtggtgtaagggctgtgcgaagctgaaatttaccgagacaagattaacaagaatagagcttaaatattcggaaaatacagtaactggctcggtaattttacggtacagaacaaaaaattacagtatgttttaaaagtttaaattgtaaaacggcggaaatttgatttgactcctgagaaagttgatgtttaagctttcgcatagcccatgaaaattggaaaatatgtaatgacgatggcaattgtttaaaatgggaataaatattattaataaaatttaatgccattggacacgtaatgccaagctttttttatctgtgccaattttgatttcaaatggcacccgttttgattttcccacagctaaatttgacaaaaaaatg

SEQ ID NO: 116026 - DNA, 137 bp, Heterodera glycines
  unsure (1)..(137): unsure at all n locations
tcagcgtgttgaacggaagcgacaaatcttcaaagctggatttgaaggaggcggatcttcacctaaatgttgacgataaagccaaggaatgcctgaccatttgcacgcataaaggcttatancaatttacgcgtatg

SEQ ID NO: 116027 - DNA, 312 bp, Heterodera glycines
aaaaaacttcacaactcggaaacggtattccgaggctccaaaaaatatcggaagccataggccggaattccgagaccaaatgaagtcggagttttaataataaaagaaattagaattaaaaaaactttaaaatttaaataattttactaaaataaaacaaatgaatgtgtttcattttcacagatttacataggttttatcgcaaaaaataaaaatttccacaaagaccaatgtatagccatcaaaatttttaaccaagacgcaaaatttttttatgatattagcgtacaaattaaattattgaatccaatg

SEQ ID NO: 116028 - DNA, 244 bp, Heterodera glycines
aattacatttttaattgaatttagtaagattctaattaactgtaaaagttataattttcgatgggttttatagtaagtttaaggacagtcattatttgtgtattttttgtacaattattatactttttttgatagaccgtgtaaaagaatgattcgaattggatttgagttttcatctgttggttaacccatttatttaaatatcaaatgcttaaaaatatattttcttaatctttaaaagatg

SEQ ID NO: 116029 - DNA, 371 bp, Heterodera glycines
tgatattgtatattacagtacttctatgtttttttatctccgagtaatgttactgtattttacactatgtctatgctttatatgtccgcgtctgggttttacaatacgtctaagttatatatgtccgagtgaagttactgtattttacagtaattcttggtttctatgtgagagtcattttgtctatttatcaaattcatgcagatttaaatgctttttaccttctatgtgacatcagttgttctcataaaaatacacctttaattacagtacagtaatgcccaggttactgtaccgaaattacttgacccaatgattttctcctctaattgatcctccccatcttccttcccctatatcaaggtgccatg

SEQ ID NO: 116030 - DNA, 307 bp, Heterodera glycines
atctcacgtccattgtacttttctactgaaagaaagaaaagaaaatattctcaacattaaaaaaatccttgggacgcgtaaaagtcaatgggacgcgtattctcactagaaacccccgagaatttaaaacaaaaaatctaccccctccccctaattttcagtgaatttcctcatcgaacatggagccgaccttcagcatgttgacgtggagggacacaacgctttgatgtgggcagtgatcaaagggaagacggaagtggcgcggcatttggtggccatcggcgcgggcattcaccaacggaacatg

SEQ ID NO: 116031 - DNA, 570 bp, Heterodera glycines
tgatgatagtttaaagaacctcacttggtctgtaggccatttttggatgagttttttgtaagttgtaggtcgattgatgaaaaccgaaagagtaatttgggatggatatacagcacaactgaaaaggccaaagaaactaaggaatacagagattatatttttaatttatgttagaaaatgcttaaggtattttatgagaagatgaagcaattccattaagaattttgcaaaatttttcctcgtttaataaagtccacgtgaaacaacaaaacgccatatattttaaaattacaaaaatcttcgacttgaatttctaggtgggatttcggaatttaggtaactctttctcggcatttttcctgaccttaccgggtattacccaaacaataataagatggggttttggcagatttttgaaataaagaaaatctataaaggtgtttttatgaaagtttgagtctgggacctatgattgatatttttacccgacataagttcaaaatcctcgttttattactagttttctgttttcctttcatttaaatttatttagaatttccatttataatg

SEQ ID NO: 116032 - DNA, 1003 bp, Heterodera glycines
actgtctgtgccgtgccggtttaccggttccctctgccggcacgcatgctctcggacgcctagctggttatgttgaaaaattgttttgaaggtttttgcctatcaattggataatattggtatcattcaaaagctcttgatagaggggccgggccgttttcgtacgagaggatattcaaaaaataaataaaacaattgcatttaaattatacatattactaatgtttaattatgctttttaatgttttgaccaaattaggttttgataattactaaaatgaaccaacagcaagtaattaaaacaaaacgaaacaatgagaagttggagcatgacggtgcacaatctaagtttggtgtcgtattttcaaagagtcttttcagctttatctttttcttttcttttttcgggtttctattagttttttgacaccttttaccttttcataatcataaataaaaaataataaataattttttcatccatcaaattataattcatccgtaattttcatcttttctgctcataattatgtcaacaaattcaacgaatcagcagaaggtaaaaattaaatgaaacaaaacaaaacaattcccccatttcacaaccaaaaaggaggttgcttttgttccaccaattgaagccgttttaattggcctaaatgcgttcatttgctttattggaattgcactaaacgcgtcgcttgtccatgtgactgtgaaaagaaagtgctgatatttcgatatttcataatttaataattcattaacctaaattaataaaattgcaatttcttgggcttttttttaatttgactggatttcctaatataaattatttaattttgttatcaatttgctgatcaggactctccattcccaatgcaacattctgatcgctttgtatgctttcttagccattttcctcctcggcggattgtgtgttaaatttttcatctttcttttcggcatcaattacatcacacttgaacattgctactacatg

SEQ ID NO: 116033 - DNA, 460 bp, Heterodera glycines
ttttgattttaaaaatttttgtttaaccccttactctaaatggccattttttgctggggaaatccccaatttttgctggggtagcgaaaatgccatcggtcacatggaaatgcgatgaaaggggcgaaagaatgagaggaaagagagagagaggaggaggaggggggggggggggtcacaattaaaatacgattaaaaaaagttgggataaatatttattatataagggaaagatgaggaatttaataaattaatttaaaaatgcacatttatttcaatgggataaatttggaagggatatttttgaaatgaaacggagccaatgaatggacagagagagggggggcggggcgggggatttaacggagagcacaaagtccattaaaaagcaaaaaaagagcccgccaattttcgctaattttattttgcacaatttctgttcatttaaattttgcagatg

SEQ ID NO: 116034 - DNA, 397 bp, Heterodera glycines
aataatagtttctttcaaaacacttttcaggcaaagtttactgtcctcaactctcatgggccgacacgttggacgactttgaccaatgtcgtgcaaaaaatttacgtacttttgcaaccattatgtgaatatttcaaggaagatggacctttaattctacgcaattttttttatcacaaacatctgaagttattatcaattttctcaatcacgttttaccaatattttccaaatcaattgatgcacttcaggtggcttttgtgttttgatttaaaattaaacaacaaaaacaacaaaaccaccttgcaacagaaatttattaatgagcatccaattaaaaaacggttgtgtttcattataaaaatatttatggctattttttaagaagaacaaaatg

SEQ ID NO: 116035 - DNA, 81 bp, Heterodera glycines
tttcccactcgggttaatgatttgtttcttttagtgaattttttaattttgtaaattaatatatttttattttcagtgatg

SEQ ID NO: 116036 - DNA, 247 bp, Heterodera glycines
ttttgggttggtggcattttgggtggtgctgttttgtagtgctgctcgagagtctcggtctcgagtctcgactccagaaaagtctcgggtttttttggtctcggtctcgaatctcggtctcggcttttcagtctcggtctcggtcttcgagaccgagacttttttacacacataatgattggctttttgtaaagttaaaaaataaatatacttttagtaacttttttgctttatttccttagtaatg

SEQ ID NO: 116037 - DNA, 739 bp, Heterodera glycines
gttgattttgcctgaaggaaaccgagacgatgttgataatcttacatttgggttggattctttggaaattatttttgttaaggatttgcatgaagcagtttgtaaatgtattaatgtttgaataaaaaatcgtcttccctaaatgtttaattttcatcaaatctgtctaccgtatttcctcgattataagccccggggcttctattgttcaacccccctccaaagggggcttatattcgagggggggcttccaatcgaggggggggggcttttattgttcaacccctttccctatataaattcttaaaattttttgctttctgcataatggtacaatttaaatcttaatctaaatttttgaattgaaaagatttttcattttttggcccttggaaatttaggcgaatgtttgaaaattcataattcacttctaaatgaatcaattaaagtgcaaaaaagcattaaaaatagagaaaaatctggagcattttatacttttttagaattttctatcttcaaaatgaagaagttattacataaattttggaaaaattcgttttttgagaaaaaaaaattaatagcgctgttctgaaaaggttttttgaacaacacgaaattcttcctctataagcttctgtttattctatatttttataagacttttgaaaaaaagtacaaaaataaactgattttggaattcgggatcatagatggaagcaaagcgattttttgggccatg

SEQ ID NO: 116038 - DNA, 317 bp, Heterodera glycines
  unsure (1)..(317): unsure at all n locations
tgactcatttaaataaaaaattcannataataatagtgaatttattagattagcantaaaatataattagtgaaaattattcatttattatataaattgataataattcaaattaaataaaatacaaattcttaagaaaataatagaaaattaaatgttttattttaaaaacaaaaataattagaatgtaatttattaattaatatgtaaaaaatgagaatcgacaagctcatagaaattcaattgaagaaaatttgaattttttagttgtattttaacttaatgagttggcaatgcccgtggacatgtaaccgatg

SEQ ID NO: 116039 - DNA, 93 bp, Heterodera glycines
aactattagacaaaaggaaaagatgatgaacgagggtttcctgtacattttcgacaaatctaatgtagacatcagcatgaaattctggcgatg

SEQ ID NO: 116040 - DNA, 216 bp, Heterodera glycines
tttttatgctcacaaattgaaagataaattttatttttcataaactacataatataaaattatgcataatttacagcttcctaataaaaatatttaatgtgatcgatctattgactgctcgattaaaaacaaaattgatgatcaatttaaattaatacaaaaaaataatggacaatatcatttaaaaatattttcatattttatttttaaaaaatg

SEQ ID NO: 116041 - DNA, 257 bp, Heterodera glycines
ggtttctgtttgcattaatttggaattgctatgcttgtagttttagtagtagtgagtgaaggttttttcattttgtgttttattttatttatttattttggtccctgaatacaaatgttaattttcatgttggaccgaaatccgcgaaagattagccccctttcttgactattttctgttcacgcatttattccaaatttttcggcgcttcaattagatagttgtaagtgcaataatgccccgtttttagtcggatg

SEQ ID NO: 116042 - DNA, 409 bp, Heterodera glycines
aaggttatcatgacaacttatacacaggcaactcgaacaatggcttatggttagactagtcataagcttaggcttttgtaaatttttttcttatattagttgaatttctgttgacatcattaagtgtgcttagagttgcttttgcacatttcgatgatcaaagtatacaaacaagaacaattagactattcggaaggtataaaattttccgattaacggttcgaaaaacattttttgacgcgtaaaatatgatgggacgcgtaaagtgtgatgggacgcgtaaaatgtgatgggacgcgtaaaatgtcatgggacggcgtaaaaagcgacttagaaaccccaaattttgcttttttaagtgacaaattatcattttaattttaccaaatttaacaatcgaaaagcaatg

SEQ ID NO: 116043 - DNA, 125 bp, Heterodera glycines
ggtagagaagaagtacaaaactgaccaaaggaaggccaaaattaagcggaaaggcattgattctggacagactgttggcttatttgcacaaaaagggccatcgtgtccttattttcacgcaaatg

SEQ ID NO: 116044 - DNA, 105 bp, Heterodera glycines
tcgctaaacatcaccgcaacacagaataaaactacaaagtgccaagctcagacctgtccattcggtggtgtaccttattttcataatttgtgaatcattaaaatg

SEQ ID NO: 116045 - DNA, 423 bp, Heterodera glycines
  unsure (1)..(423): unsure at all n locations
aattttgacttaaaattgtgnaaataatttncagaaagtgaatcttgcaaaaaataatgaatagcagcttaatcaaaagctaattggaaaataaaaataatacatcttntaatttagaattgtcccataaatttttgttttttaaaataataatatgaaatttgcccatacggtaccaaggggttttgcgaaatttagccatacggtaagaaaaattattatgatttgagtaatagaaaacgccaatagcgaaaaaagtgtaattttgaacttaaaattgatgaaataaatttcagaaagtgaatcctgcaaaaaataatgaatagcagcttaatcaaaagataattggaaaataaaaataatacatcttttaatttataattgtcccataaatttttgtaaaattttttaaataataatatg

SEQ ID NO: 116046 - DNA, 114 bp, Heterodera glycines
catactcatatccacgccacttgcacttaataaatgaattttttgaaaaatattagccgtattctgaaaacgcgcacagggttattggtcatactgcaccaagcactgaatatg

SEQ ID NO: 116047 - DNA, 512 bp, Heterodera glycines
ttttgtggcataaattgagtgtaatcaaaaaaaaagtgtcaacaatttgtcaggccaagcggagaaagcgcgattaagattgcccagaatgtccttcttgctgcccgccggggccgaggaaccggcggcggaataagtgtaggacgccatttgttgtaataatttggaatggaatcgaataataatcacacaatgatgtatttctgaatattcggtcaattacactatgtatttaatgtctcatattttcaaatgaacgaaatggggttttttgaaccggctaaaaactacaattttttctcattaacattcaacggacatttggtaggcatgaaaaagatatagcacgggaaaagcgaataaatgagaaaggttaattgtttagattcaaaaacccctattggggcattgtaaaattaaatataaaaataaagatgaaaaaataaatgtgaaatatgttcaagtaatttttataaaaaatagagattatgatgatattttagccaggtatg

SEQ ID NO: 116048 - DNA, 1003 bp, Heterodera glycines
aaccagaatttcttgaaataattttatatttatgatattaatcatttttcggatcaaaaatatgactatcattgtctttggtccaattatttgctgataaaataatgtatcacttatttacattaaaatgaaaggtcttataaacttataaagaattaaaatttttattattctcaatacataccaaaacttgttggtgcacagctagtaaaataaaaccaattattaattttattaaattcatgcatgcaaaacgcgttaaaacttgacttaaaatgcaatttttatattccgcacacgaaaaaagctaatattcgtatctattcttgcgattttagcagttttaaataatgttacatttataaagtaaaattgcctattacttttatttattttgtttccgaatttagcaaccagaatttcttgaaataattttatatttatgatattaatcatttttcggatcaaaaatatgactatcattgtctttggtccaattatttgcttataaaataatgtatcacttatttacattaaaatgaaaggtcttataaacttataactagcgggtgttgcatgcgagggtggcgctggggaaagcgcttcgcgcttcttgagcttcgctacctagattagctatctggttgtgaagagattttgaatttttaaagaatttcagtgatttttaggccgcttcgcggcctcgaacgggcgcttcgcgcccgttttttaaatttggttgtgaccagacgtgcgcttcgcgcccgttttttcaaattttgttgagctcaaacgggcgcttcgcgcccgtttttaaattttgtttggcattttcggccgcttcgcggcctcgaacgggcgcttcgcgcccgtttttaaattttttttaactcaaacgggagcttcgcgcccgttttttaaattttgttaagcttgtgcgggctcttcacaaccgtttaccacgggtggaagaggtacaacgatgatttgaagaggtacaatg

SEQ ID NO: 116049 - DNA, 859 bp, Heterodera glycines
  unsure (1)..(859): unsure at all n locations
tagtagcgaatatcgttgtgctttttaaattcttaagtaatattcaatttttattattatatttggtatcaataaaagatttctaaaataattatntaaagccgatagagtcagttattctcatcgcgcaatggacaaaatcaagaaaccgtacacgtaataggacaactcttgaaaaacgaattttcaaaatatattaaatttatatctattagcataattcagttagttcatcatttaatttaaattattaacaatagaataattaaaattatgccactaaaaatacattagcttactcaattttaaattatttgattttggtttaagagtttttaatttgaatgtctttccaaatatcccaataattaatttaatttaatgaattaatcaacacggaattttattgaaaatgtaaacaataaattcggataacaaaatcttaaaaaaaacttttcacaaacaatctataaaaagttaaataaattacgaaaattttaaactatttattacataatctcaaaaatgtttgaatattatataatgtaaaaaaaaattcatatttaaagctaaattgatattataaactaaagaattattattatttttctgccaatttaaaaaatctcaacttaatgcaaaaataaaattgactcaattaaaaattaatataataataaaataaatttgcttgaatttgttgtacggcagcgaagagtaatgacttttctcttcagaatttaatttaattcattctccaaataattcattctccaaataattcattctccaaataattcattctccaaataattcattctccaaataattcattctccaaataattcaatccccaatg

SEQ ID NO: 116050 - DNA, 545 bp, Heterodera glycines
ttggcaggaattgctcagtttccgacggcgtttgttaccgtacacacaaaggaagtcagcccaacggggggtgtctcagctcgggaaaagccgaaatttgctgccaggtgagcaattaattaagcaattgtggtaaatgggtgccttatcatccaattgttgataacctttttctcaggtggagctaaaggtacgcgcggatgtttgatttctttatgactttttgccagccatacaaaaaatggaccttccaatcggtccaactcaaacaaccgtccatcgtattcattctccgttatcgaatctttgaacggagtgccaatgaagcgaaaggggagggccaatgggagcaaagggtcgacgaacgaattgccattccgctgaacaaagggtcgacaaaattcgaactaaacgcaagggacaaaacggcggacgacagaagcgaacatcgggtggagattagtgcgggtaaggtaattagtggccaaatcggataaaagttccaccaaccattgccagtcggcggcacaccccaacggaagatg

SEQ ID NO: 116051 - DNA, 433 bp, Heterodera glycines
attttacttgtcccaattatgacaatccgcgcggggaccgaatccatcgcattattcatttttgcaaaaattgcgagatctaataaaaaaatgatgtcagattcgatattagctgattagcaaggccagccaaaaacccctcggtaaacatttaaaaaatttttgcaagcaagaaaaggttccccaccactatggttttaataaaatacaaaagggtatttgcaagggagtgccatggttttcacaaattaattttgccggaattgcttattcttaagcagaagcggcaaatgtttgaaaattcataaatagtgccaagaaaatttaaaatgaaaatgcatatataaatttaaaatgttacctatttgtttcagtttttaattagttttcatttttcaaaatcataaacctctcaatctttaggtacaaaatg

SEQ ID NO: 116052 - DNA, 1003 bp, Heterodera glycines
taacaaatgacaccaaaaggtccataatttttggtgaatttaataaactccccctcgaccacccgccgccccgctcattgtcaactaaaaaattcttgctcacaggcgaataattgcaattttcttgcacgaataaatttgttggcttcagtaagtaaggcttggaatatttgcataaaaaagagtaaaatatgaactaaacaccaaaatatgtgcgaaaaataaattttgccgattaattttttccgtcaaaaaattttttgtttgtttttttcatttttcattataaattattaatccaattttttcatcaaaagactgaaaaatatatgacataaaataaaaataattttaattatttgactttatttaaaacggggtaaagatgagacataattcagtggtgtcatgaacaatcgaaatcggaacttcaggatcaaaaaaatcagatttttgggtcaaaaactgtgttattttacaatttattcagtcaaaaaatcaaatattatttttcagctttttttttttgcttttcgcaacgcttttttgcagcgcattttttcaaaaaaaaacttttgtgcaactgggcggaggggccagcggtgcctcctgcccagaggtgtcaccgggaaaaaatgtgtaattcttaatgcgatttgttaacggattttgtccaaaatctgaacaaattttgcaattttgagccaattttttaaaagaaaaattaggagtttttggaacccggcgtcgccaataggctccgccggggataaattaaaaaaaatttaaattttacttctgaaacgcccaacacattttgtttgttttttatgatgagcgaaaaaagggaaaataaattttatttatataaatattaatattaattgtacgaattatagtaaatttgatgtgataaaattaaattgccaattcattaaagggcattgataaaccataaagatgaatttgggcattttatatttcataaaaatggagtttaatg

SEQ ID NO: 116053 - DNA, 248 bp, Heterodera glycines
agctttacaccttcgataaatcaagtgcggacggaactagttattttggagatgcgaatacaagaactcctgcaaagggagaatttggacggatttggacgatcaattcattcgtttggcaactcctcatacctgtccagtgaacgcagcaaatgttgaggcgcagaaagtgaagacggcaataaaacgacgagcactcaccacgttagaaccgccagcagtgatccgatccgaagcacttcagaatg

SEQ ID NO: 116054 - DNA, 1003 bp, Heterodera glycines
agtgttgctacaatttcaggctgttcctgtggccaatgcggccatacgggcggttacagcagtggcggatgttacggttgcatgtccggcacgagcggctgttactgtggaaagaaaaaatgaaaaaaaaatttttcaataaattagaggaaaaaaaatcggagaattattttaaagaaaataaataaattgttctaatgcattttattgtaatgttatttttatgaataaaaacaaattgattgtcatttttgggattttaatgatgataattattaattaattgattaatagtgctttttaaataaattaattgccattatgtattaatatatagattctattttaatttaaatacaaattatttttttaaatttttcttttcgaatgatgtcatgtgcttttttaataatatatttgtacaaaaactcgacaacatttttttaaggtgtaatttttttaattcccaaaaagtcgatctttattctcgaaaacccccaaaatatgacttatattcactaaaaattttagaaatgctatttttgagtccctttcttcatagaataagcgccgagattacattagcttagataataaaagaatacattttttaatttttatttaaaaaaaaaatttaaataactatctcttattttaaatattttttacgaatttttctttcgtccccaaaacctaagtcttaatgagatgattaattggttaattaatttgatccatattttggcagttcatgactttgtcatgagacataaattaccccctccccccaatatttggctagatttaattgaaaaagagcggaaaatgtttaaagtctcgacctaaacttgttttaaattgagcccaattcaacgcattcgtctcaaatttttgtgtctatttaatgtttgattttgtgttgaatcccatcatttttatttaaaaaaaataataatttaaattaataattatttttatatttgaagacgatttttttcaaatg

SEQ ID NO: 116055 - DNA, 818 bp, Heterodera glycines
tctgattttttaaacacactcataattttggagttttatggcataatgtcaatattagtcaagaaactttcaagtttacgcaaaatttggtcatttttgggcaaaaaatcttaaaaaattattcaatttaaaaatgcactgcaaaaaatgttaaaaatctgaaaaaaggttaaaaaaccattttgatcacaattacactgttcctccacaacattgttataaatgatggaggtgaaaaatataatatttttatatttttttgattaaataaattgtaaaaaacagctgattaaagcaatttgcaaaatgttcttatttttggctttatgttcttattttgaaatattaatggcaaaataataataaatagggctgggatttttatgtgctaaaaatcctgaaatatgtaataaaatatgtgctaaaaaccaaaaaaaggcctaaatacgtgttaaaaaatgcaaaaatatgtgctaaaaattggaaaaaccaatagtatttttgcataaaaattccaaaaaactcattctttttattttcgcccgcacaattgcaaataaaaaacatttggaggtgtttgggggtaaaattagtccttttttgataaattgtttttaaagataatttttccatcagttgagtaagttccagcaagaaacttcgatatccagtaacgaataaatgaagaattcgattttcggtacacgaaataaataaagaaaattttgaaagagcctataaaaatggcaagaaagttgatttttaggggtgcatttttgaattttttgtgtttttcttagatatttttttcaaaaatg

SEQ ID NO: 116056 - DNA, 190 bp, Heterodera glycines
  unsure (1)..(190): unsure at all n locations
ccgaaataccagaaatttttaccgtatttttccactattcgtgaatncgggtgtaatattcncgggttgtaaccaatgaattttgaactggactttcgacactgaccactgaccgagtggccttacaattattcgtcaaaattattttatggtcgcttttaatttgcattcaccactcggtaccgaaatg

SEQ ID NO: 116057 - DNA, 74 bp, Heterodera glycines
aaattgctgaattccgcgaagaactttacgaaaaaaagttctttggaacaatccttggatcaggagagtccatg

SEQ ID NO: 116058 - DNA, 537 bp, Heterodera glycines
aatcacaggtgcgtggacccgggcaaaatcttgccttaagaccaacatgccttcgcaaagaaaagtttatgtcttgtgttgtaccagccacgcaccacgacactcccttaacttcagcatgagggtcacgggacatactgtgaaccgtatgtaacaatgtatcatcaccagcgtcagaccacatcgaacgggtctgaccgtctgcaagcgccagacggggcatgtggtggtgcctcgctagttcaacattgagtccatccataacactcaaacatacgctttctcctgctgcagtcagggtactcacgtacgagcgcatggacgcacttttctttcgcaccacgaacgtgtctcctccgccggacagcaaacccaccaaagcaaggcgatccgccaccatcccattaccacacaagcagcctaccagttggctttcactagtgcagcactggacggcataccaaatccaacggaagaagtacacattgctcgcggcactttctaaacagacctgtctatccaattcacattcacatg

SEQ ID NO: 116059 - DNA, 138 bp, Heterodera glycines
ttccctccccccatttctctcttcttcacacattctctctctttctctccctccctttctctcattattttcttattttttgtctccaatttttaataataagcaaacgatcgccacaaaaagtgaccacaacaaatg

SEQ ID NO: 116060 - DNA, 323 bp, Heterodera glycines
cctttaaggaggaaaattcaaaaattttcttttagttttcattttggggtggcgtgggaaccccccctccctcctgcggttacgggagcgacccaagctgcacaaacatgctaaaaaatcgccatatttttatgtgcattttcaacatggcaggtataaatctcccccaattaatgctcttaatgccatgaaattcctccgatgaatccctcccttacgctctgtgccatcgcgttgacaatgccgtggctgttgttgccgttgttgttgtgttgcagtctgtgcgggtgttgttgctgctcggtcggtgccaccaactgatg

SEQ ID NO: 116061 - DNA, 239 bp, Heterodera glycines
tcccccccccctttcctccgtctcttccgatcccttcgcaatgcttcaaaatattttcgctaaaaaatgggcagataattatcgataagccagctgattgttccttattgcttgcttatgttttcacaacaaacttcatttgaaatattctttcctttttcatttgaaatttcataataatttttgtaaattaactaaatttagttattaattaattaactaattaattatccgtaatg

SEQ ID NO: 116062 - DNA, 721 bp, Heterodera glycines
  unsure (1)..(721): unsure at all n locations
gatgatttcgcaaatcagctcagatggtaaacgttcctttatgggtttntggggaagatgaaatgaatggtttgactgcttgcattggcaacgaagggcccaatatcggaagacccgttgtcttacaataagccccaagggaataaaatcaaaggaaaatttgaaaatgcctccactacagggtattggtgtcgaaaattatcgattactgggcggaacgtgttgaatttaagaaattcaaaaatacattccttgagggatagcgtcgaaaattattgattagtgggaggagcttatcgacatttggacggctttaaaacacacacccgggcatcataatttcatttgctctattttttaaataattattattatttgctgtgctgttaaccagggcgggagcccgacttacagaaccccgtttatcctggcagcaatttctaatttgacttttagtacttgaggtagtgcattagacaattctaatttccaaagctgtttaggtgccctgtcgtcttgtgcttcatgggtggcagtgcgctgctcttcaggtcaatggttggttttgaaattaacacatttaattgaattgatacacaaattttgcacatccatgccaatttgaataccatatataaatatgttgctttttctccatgtttcattttatttattcaaaaaacacaaaaaaataatatttaattaaaatagattaaaaatg

SEQ ID NO: 116063 - DNA, 57 bp, Heterodera glycines
ggtcagtcagtcccttttcaatgactaaattctcatctgttgctctatttggccatg

SEQ ID NO: 116064 - DNA, 199 bp, Heterodera glycines
  unsure (1)..(199): unsure at all n locations
ccctttttgatagaaaaagcatcagagtgcctaaactancctgtaaataaagttttgtgtgtttcagagcactttctgaaaaaatacttatgaattattttgcaaaaaataaataattaatgaaaaagtcagaatttcgaaaaattttaaaaacaacaagcgttggcattttttcaggttaagttagtcctttacaatg

SEQ ID NO: 116065 - DNA, 448 bp, Heterodera glycines
gcattatagtgttcattcccaaaaatggaggaccatagtcaacagcagcacacaaaaataggacagctaataaaagacaattcggactagttgtgtgcattggcaaggaccaaatcctctaaaaagtgtataaagatggtgtgtcacgcaaccagtgaacagctgttagcactcgtggaaatttgtctaaatcttgtcgcttcgcgtttccaactgactagccgacagaaaagaagactgatgccctacgtggaaactgtgcgacggatgagcagagcgagaagtgaacgcggtgcgagacgtgtgcttgtgcagaaaggatcaggattcggggggttgtttgccgccctcctaacacccgtgctaattgaagtagcaaaatcatttgtcaccaaaaacgcataaataccccacaatttgttgttcacgctcacatttttgcaaaatg

SEQ ID NO: 116066 - DNA, 182 bp, Heterodera glycines
gctgaacaccgattcgatttggacgtttgcattaaaaaatcattaaaaagttataatgcaccgttttgttcccgaagtgaaaaatcgtgatggggtcgagaaatagaagccgtcatgttccggactgcctacgaaatcaccccatttcacaccgacgacggagtgaaactgttcccgaaatg

SEQ ID NO: 116067 - DNA, 154 bp, Heterodera glycines
aaattttgccctcgctacccattgtagtgcaaaattgctgaaaagccaaaaatctatgtacgacgattgcaattttagaatgttttttaacaaaaaatttaaaatcaaaatacccaaaataccgcgtattttggctttgcgtttaaatcaaatg

SEQ ID NO: 116068 - DNA, 313 bp, Heterodera glycines
tggcgctcctggacaagggtgagcagagtttgttcgattaatttctattgatttggtggtgcaacaacaattcggggactattagcaattgtccacaccacaaattcgacagagaaattaaggagtcatcaattgacgcgcctgttactcattcttgtagaagagtaacaaaccatcaaaaaaaaaaaaaactacaaaatcgccatcgtcccatcgcccaacatttgtgcactttcttgtagaagtgtacaagaaaaagcagcagcaagcattcttgtagaaacttgcaaattcttctcttctcttcacaatg

SEQ ID NO: 116069 - DNA, 131 bp, Heterodera glycines
tcgccaggccgctgccacgccgccaccagtgccgatggatcagcagccgcacacgcaacgcagtcacgctcagcagcaggcaattttttaggaaaaatcattaaaattaaaagtgtcaaaatggtcgaatg

SEQ ID NO: 116070 - DNA, 66 bp, Heterodera glycines
ctgtacgtaaaacgtttttttcctaaaatttatgaaaaccaaaattaatgctctaggtcagagatg

SEQ ID NO: 116071 - DNA, 291 bp, Heterodera glycines
  unsure (1)..(291): unsure at all n locations
tgaaccgctgctgagagagcgcggnaaaagtcancaaaaaatcaatcgaaacgatgtccaaaattattgaccagccaacgtacatacacactgcatcaccagcngaagcggcgctaccgccgattgccaacattggcgcccggcttgcatactgaatggcaggccgatttagctatttttgaccgacttggtaaacaaaatcgtggcttcaagtacttattagtctgtattgatacccttagtcgacaggtgtttgttgagcccgtaaagaccaagacgagcgctaacatg

SEQ ID NO: 116072 - DNA, 124 bp, Heterodera glycines
aattttgacccaatgatatgtgttgcatttgctcaagcttatcttttttataatttgtttaaatggattttaaaaaaatttacgtgttgaaaaattataaatcgttttaccgaagccataaatg

SEQ ID NO: 116073 - DNA, 455 bp, Heterodera glycines
tttttgggctttgaatttcttctgtttcgctgggaaaatttcgaagaaattctgttgcactttcacaaaaaggaggccgaactgcctgtttcgttattgttgttgctgattttgtatgcataaaacaaacagcagcagaagacgaacggaaaatgtgggaaaaacggggaccaacccaaactaaaaaatttgaaaaatgaaacaaaaaaaaatattatgtattttgaaagataggaattgaagatttaacgcctgtcaaaacggcaaaagtgtgctaattgcagcaaaaaatgaacagacggtaaaaaaaattttttaaaattacaaatttttcgtttacccaattctagaagctttttctaagctattgcttcgcgattagacacgtagttgtccaattaagtccttaagatttgatcgcaaaaaacaattattcttgctaattatccgacatg

SEQ ID NO: 116074 - DNA, 509 bp, Heterodera glycines
catggcgcataaaataatttaaggccgtacagatcttaatcctttattaaacctttgtgacatttctttttataatttaaaacaaaataattgtgcaaaaatccattcataggcggaatgcaccgctaaaattatatttttattaattaatcgaacaaaccgccagatgctaatgcactctaacagtgacgtaaaaaaggaattaaaaccaagattaatcataaatggtagtcaaaaatcacaaaataagtgccatattaaacacaataaaaataaatcacgcctctcaatagtgaaaatatgcattagtgcttattatttcttttgcaaaagccaaaagaatgttttgtattaggatttttaaaaaccagaaaaagccctgaggggatgcggagaagcctgccaattaacgccggcttaatttggaaatttcttttttttaaatcatcgataaaatataggataaaaattgctgacccccccctccccacctccttccttgtgaaatg

SEQ ID NO: 116075 - DNA, 60 bp, Heterodera glycines
ttgcccttccgtcgctttccgttgccgaaaagcgttccgtcgatgtgccatcggcgaatg

SEQ ID NO: 116076 - DNA, 296 bp, Heterodera glycines
atgccaaataatcaatcagtcaataaattaattcaatccatttttagtcttagtatcaattttccgttaaaattatcggaaatcggaatcagacggcccaaaaaatttcggcaatcaaaaatcggatttttttttttttgtaaaaacaacaaaatgttaaatacttaattaattgcttcaaaatgatatttttcaaatgcgttttttgttctaaaggaatggaaaattgggagcaattgcgcgcggatgaaaagctttgttttacccaaaaaagcatccaatttccgaacacgatg

SEQ ID NO: 116077 - DNA, 632 bp, Heterodera glycines
aggagcaaaaaataaatgatgaaaaaagttattgtatacaaatttcaaatgcaaacagcgataacttctcattattatgttgaactatagaaaaataattcactatttattttcaatatactaaataattctatatgtgtaaaaataaatataaactttaagtaaataccatctaaataaaataaaatgtcatacattttgaaagtaaattaatatttttgcaacaaatgaataatttttttaagcaaaatccatgaaattaaagaaaataataaattaatataatttttattgagtttataattaattcaaattttctttttacagatcgtggagcaaaggacatgagaattaaaaatattgaataaattttatacaacaacttaaatccattaacggaaaatgaattaataattaatatttatacaaaaacaagcaattaaatagttcagaaaagcttaattaaaaatatagcagaaatcaaaaaattaacagaataacaaaaatcattaacttaaaaactttttgcgaaaataaaaatcctaaaaacaaagcttataaattataaaatttttgtgtttgtaattttgaaattaaattatattaatttatcttttccagacgaattaatg

SEQ ID NO: 116078 - DNA, 1003 bp, Heterodera glycines
ttaaaaaaattatttataatgactagggctaggatttttatgttttaacatattttttttgcggcttagttatggcgagagaagcccaaaaatagcattttctccgaacaaattttggtttagagcgacttataaaaacataaaaacacatattttggcgttttggcacataaaatatgttagcacatattttggggtttggcacatattttgcacatattttggcatttttgagaaaaattgcaataaaaatacaagaaaattgaaaaatacacccctaaaaatcgacttttttcctaattattaacataattttcaaattaaaaaattttttcttcgattgtagaaactaatgaaatctcgaattcattaattcgtcattggatttcgaagttctctgctggaactttcaatttatagaaatgatttatcaaaaaaagacaattttaccccaaacacttcgaaatgtatttgatttgcgttgtatgggctaaaaatgataaagaatgagatttttgggaatttttatgcaaaaacacacttattttttcaatttttaacacatattttagcacatattttggcatttttgggggtttttagcacatatttcagcattttttagcacatattttattacatatttcaggatttttagcacataaaaatcctagccctaataatgacgaaaaatctataaaattaagttttacaaaacgatttaacacggattaaaaattcagtatttaaggacatatttcttttcatgatggtcattttttgaacactttctaagcttgcataaaattgtaatttaaatttgttttccattattttattttcatttggtatgttttcggcaaaaataaaaacctaaattcatctaaaaaaatttcggggcctagaaaaatttccaaaaaattcaaatttaaaaatttcaatgtgatttttttgcatttttttacatttttttgcaagttaagcgacgacgacagaaggaatg

SEQ ID NO: 116079 - DNA, 478 bp, Heterodera glycines
ttagagctgttcaccttcagagaaaaaaggcaaatgtcctccatctctgatctctcttttttcaccgaattttattttttgcttaattaaaaaaaacttttaccgattgagggaatatttagcattttattatgttaaaattaaaaatataaaaaacgcgcagaaaataaaatgccaaacaaatttaagaaaatttaaatttattaaacctgtacatagagttgcctaaattgttattcacttacttatatatcaacacttcctgggtgactaactaatgccagcagaagcacagatttgtgatgttggaaaagaattttccggtgacatcggcaggccaaatttcggaataattcaggcacttaacgcatagacttaatgggttttgtggaattgaactaaaaaagaaaaccaattttaggtgataaagacagccgaccaaatttattacagagacaaaacattgtacagcaaaatg

SEQ ID NO: 116080 - DNA, 863 bp, Heterodera glycines
tatgagttcaaaaaatttaaaaaacgggtgtaaaagcgcccatctgaaccaaaaaaaatttaaaaaacgggcgcgaagcgcccatctgaaccaacaaatttaaatttgacatttaaaattgattatttatttctttttaaattaaagaagtcatttgttttttaattagaatttgtcaaaaaattaatttcaatttaaatatatatacaattcatgtacatttcaaattctcattttaattaataaaaggaataatttattttattttttaaatttataattaattgcattcaatttttattcttacttttaataaactatttccttgattatttaattttaaaaccatgagtgtaccctttttaatcactgttttacctttctaatcattgttacacctcttctaatcacttttctacctgttctaatcatctttgtactgattttgtacccttataaaaaagaattgttagaatttgcgaaatttgtatttttttatgtgttagagacatgaagatagtacgccaaaaggagaggaaagaaataatttatgttttgttatgtaacttttgagtttgaccatagacaaaaataattcagcattaatcgatgcaattttttttctatcgatatgcaaaaattggtattgatttaacaaatagaaagaaaatttacacagaacgaagtaaatattgttttacatcataagagtgtttattattggatttccattaaaattttggtcaagctcctttttaattattttatgagtttaaatttttataatttgccataaaatattgcagatttgtttctctttactcaacaatttgcggtttaataattaaagacgctaaaaaatg

SEQ ID NO: 116081 - DNA, 142 bp, Heterodera glycines
atttcaatttgggaagcagtaaattaacaaattcactttttatttcaataacattttatttgttttttcggcactccgttgggccgacgcaaaatgccgtaaaaatggcattgaatgttcagcagagaatcgccgtcaaatg

SEQ ID NO: 116082 - DNA, 325 bp, Heterodera glycines
tagtcggcgcggtgctgtcatttctttcctgctctatattccttcctgtactgtatgacgtcgataagaacgacgtcagtatgttgcctcctctctgaaaattgcgccccaaaaaaagcctttgtcctctccgaccttagtgaccaattagcggacgttgcgcgcctcatgaatagcaacgacgcggacgatgagaccagcgactcgccgctcctgcaaacacttttcaaaatttttttgtcgctctctacaacaggtgcaactgcaacaacaaatcatactgccgcagaaccaagacctgctgcagtccaagcagtacaaaatg

SEQ ID NO: 116083 - DNA, 237 bp, Heterodera glycines
tactttcgttcttatgagcctctctgtttttttcccatatgaattgttcaaaatttaaattatggctttacgccgttgcttatgtaatgctttattcccccaccccaccatccattacatttttacaaattcgcagatattttggtcgctccgctgcgtgtcgctcgccgacttaccgaactgagcgacgcggaaacagccgacttgtttgtggtggccaaaaaagttcagaaaatg

SEQ ID NO: 116084 - DNA, 327 bp, Heterodera glycines
  unsure (1)..(327): unsure at all n locations
acgcggaattgagaagcatttntggaaagtgatcagaactaaaatgctgcttttatgggttggaaaattagttaaattgaaaaacaatcaatttcattatccaattttcagaataatatttaaattatttaaaattgatgccaaatattattatttttattaaatccgtcttccataaatttatgtaaaattaaaattttatttaaatttaaagttttgtatttcaccgacgaaaagaaaattaccgacgcattgcgccactttctggggaataataactttataataaaaactgatgaaccggaaaatataattaggcattatatg

SEQ ID NO: 116085 - DNA, 255 bp, Heterodera glycines
tccccccccctctcccctccctgcttcttcttctctcacaattggccgtattcattgtggggaagacgagcacatcttgggagtacagcagttgatgaatgaacagatttcatgtgcagcatcagttagtatgccattgtcactttaaaatattttaaacttttcgtttgggagagaattgccccgtcactgattaagagcatttagttgcctatttttaatgatttttgtatttaatccatttttatttagatg

SEQ ID NO: 116086 - DNA, 679 bp, Heterodera glycines
tttacaaaaagttgtatgaaaataattactatttctgccacaacttatgttaaatttgataattttatttgaagttttccaggctaatagagaaaaagctgggctatcaaatggtaccaagaatgtataaaatttgattgattttaagcaaagttatgccagtttttgtcgaaaaattcgctaaaatggcgggttttatgaaacgacccagccgtttaaaattcatttaatttttattttttaagagcaaaaaatattaatcgaaatgcaaaacgaattcaaatcacttttttccatcgaatcggaaccaacttttaaaagcaatttcatggactcggacaggatcaagcaattaaatgcaaaagtggcgatttggcacttcattcaattcaatgaagaaacattaaaaatgatgaaaaagctaaaagttaaaattatagaaaataaaaaagatattttaatcgcgaatatccaattaataaaaaataataatcttttgtatgcttaaggcaaatgaatgcaacagcagtacatccgatacgcaaaagaaatttgtgaaggaatgggaaaatttagttcaaaaaattggaaaaaataacgtcaacaaagacgtttgtctgttgcaagggttcgcgcaccgaataattcgaaacgaaaatttaaacaaaaacgaaaaatg

SEQ ID NO: 116087 - DNA, 1003 bp, Heterodera glycines
catatttttagcgcgaaaatatttcgatttagctttactattcatcaataaaaaattgggttttatcactttattagtgaccgcccaccattttggcgttttaacttttttgccataattttactttttgaaaataacaatgcaataaagtgaactcctaaaaggactttaatctttgactgtttttagttcattttttgtctcattttattcacttctatagactttgtcattattttatatttattcgcgtttttgcattaatatttagctaactattttaagatttttctccactaaagttgccagcacctattaaataaactaagcataatttttctatattttgcataaaaaataaatatagcgatgctgcattattttatgtaatattaaaataaaaaataaacaaaaaatataattaatatgacgatgaaaggataatgtaaattccaagtaaatcctttaatatttaaaacaagaataaattattaataaaaaatacaagaacaattaaatttgtatttttgttgaagttttttggtttcctttttagcatttcaatacttaactgaaagaaccaattttagctggattatgtatactagtcaattttataaaatttatttgcatttcatatttcctttttttattatttgtttttagttaagtataatttctaattgtttggtgaatcctttatattttttgatattttttagtttatagcatgaaataaaattaatagactttttaaaaattcttaatataaattgcatttttttttctcttttaggttaaggggagggggtcgacggtccctggttttcacaccaaacggaccccgattttttttaccgccaaaattttttcaactttaattttggtaatacaaaaaaaagtctaattttgaattacgcaaaattaataaaatatttatgagcgtctgcagcagaatgccccccccccctccccccaattgaccccaggcaaaatcaatatg

SEQ ID NO: 116088 - DNA, 261 bp, Heterodera glycines
actgtttcccattccgtcaaatcagctgaccaagacacagagaattgaacgattatacatcaaatgtaaccattacgctgatcgtatgggcgttcggggaaatacaattaataccgcaaacggcaacccgttggcgcacagcaatttgcgaatggccatcaagtatataatagacagaagagcgggccgtcccaccattaaaccaccaggagcgaacctattggaagagcggcttaggcaggacccaattttgtattcatg

SEQ ID NO: 116089 - DNA, 199 bp, Heterodera glycines
aaatgaattaattccttaagttgaattttctacaggtgagtttattgactttctttctgccgcttcggcatttttttttcttcgttacctgccggtcggccatccatgtcttacccaatactttggatgaagtgattttagttgaagtttgttttgcttggttttttattcaaaattatgtttataaaatttaggtatg

SEQ ID NO: 116090 - DNA, 428 bp, Heterodera glycines
agaaaaacaccgagcagcgactgggcgtacttgccaatgcgcacataatggaccagcagaggggaggaagtggccagctgatcaaaaggacaaagtgatcatcaattgagaataaattaattgatttggattcatatcattagatagattattggttaattgatcagttagaaaaatctaaatgatcaagatcaattaaaggaatttggcttgatattattggctctgattgatccgttagaaaaatgaagttaaaatttcaaagtgatcaagatcagtaaaaggagttgagcttgatcagcaacagaaggcagagagtgcaaaaaaaaagtgataaaaaaaaagctgatcattaggcagatcagcagacagaaagtgatcagcagagcagaagtgtgcacctcgctgacgtgttggatgcgcggatg

SEQ ID NO: 116091 - DNA, 623 bp, Heterodera glycines
  unsure (1)..(623): unsure at all n locations
aaatagatgtcagaatcgtgttcaccatccaactgtttctaccactcgtgtgcgttctcgcctcggccgcgtcgctgtcgatttgcagtgtcgntcatgttcgttcacgaagtgtcgtcgtcacagatgagcaaggggaggcgancaccagtcancagaagcagattnngtaagtgaagaaaataatgatggattactgcaaattnttgcctatttatacacttagacagcgttcaaaaaacgagagatgaccaataagnggagatgccagagaaaaaaaataccctctcattttgatgttctctttctttgtctctctgttaatagagaaaaactaaattattgtgggcacattttgacgttaaaaaaatattcgaaattcgtcggttggaccttgaatttcgcgttttggcacaaaaattgggctaataaaacgaattgaccaaaaacgaaacatccttcgtccgcctatataaagggaacggttcgaacaaaatgctctcattttgcgtccgtcagtattttcatcattgttttctatttgccagttgtgtcaaagcatcgttctgctccttcatcgatcacagcaaacggaagaagtcgtcacacgtggtggcatcatg

SEQ ID NO: 116092 - DNA, 72 bp, Heterodera glycines; identical to SEQ ID NO: 112797

SEQ ID NO: 116093 - DNA, 89 bp, Heterodera glycines
ttaaaaaaatatattaaaatgaaataaatttatgtaaaaagtcatataaaaatattaatcaatattaaagggtagtttttcgcactatg

SEQ ID NO: 116094 - DNA, 1003 bp, Heterodera glycines
ttaaagaatatattaatatatttttaaaattttttccctttaactccaattttcattactaatttttcacttagacccccattcttaccagtgcttgtttttcccggttcccggttgccctaccgggaccgggacctgagcttttcaaaatacgggaccgggaaccgggacctcggatgaccgggaattcccggcccggtcccggtcccgtggcactctaatttgagttctgaaattttcattgtttaaccaaagaaaaaaaggatttattccctattttgttataggtatattagtccaaaatcggctggaaagaaatcccgacttccttttttcttattttcgaattacttaggtttcataacttcgtttaaaataaatcaaattttaaaacttgatatttttcgttagccctaagtgttttctattatcatgcaaaatttcaaaaaaattcgtcaagttttaaaaagttatgacctgagaaactcaaaaaccaagcttttttaatgaattatatcaagatttttaaaattaggttgctttgagaaaagttataccaaaaaaaaaacaactttcatttgatggttttttgacgaacgcccattttgttggtttttgactaacgtcatagcatctaagagatgagatttcgaaagcatccctatttaataactttttaattttcttgtaagaatttttgcacgatttgtctgcaaattgtcgtgtcaatgtctcatttgtctaaatgtcgtcattggcaagaaggattttgagcttaactgcttaatctatacacaacacttaaagtatgaaacgtcaaattaatcccaaaaatatttttgaagtaaacttataaaacattgcaaattaaaagttcaaaaattcgtcaaatatagctaattaatgaaaaattcgcgcacatcactaattagaaatgccaatttttaaaaatatttaaattaaaaaaataatatatttaagcataaggcgtaagtaaaaaatg

SEQ ID NO: 116095 - DNA, 835 bp, Heterodera glycines
ttgtttaccaagctgacgcggattatcaagtgaggagaaatctgtagcatacagtagtacatgtgtacatcacaagtaataaaggcatacggtacaatttgtaaagtgaaagacaaattttgttcaagcagcaaaaattggcaaattattttgtacatccataataatattgcacaaatattaaggctcgtcattttgaaaaagcgtgaacagaagaatggacaacgatttgataatggacagacaaaaaggcctttagggactaaaatctcttttcctgggactttctgtttccgggattcccggccatctgattaagtacaaagaataaaaatgcgtaagcagagaaattcccccgccattaaaaagggcaaaacttttttacgagtgtaataaataatacataaacttgtaaatggacagatgattgactctgacaacaaatcggtgttggtctacacaaacatagacgcgccgcagtacaaattgatcagagtcagtctcaagggcggcacgaaacagacgccgcaggtggtcatccccgaggacccaaagcaattgttgcgatttgtctaccccgtggccggagacaagctgttggtctgctacatgaaggatgtgaaggtgctaattaccagtgaaccatcattaattaattagttaattaattgaaatgagtgtccattgttcaagtgatctcccgatccgatttttctgatctaaagccggattgattgattaaatagccaatcaacgctttcatgggtcttattaatttcttaaaaatatccaacaggacgctctctatgtgcacgacctgaacagtggcaaaatg

SEQ ID NO: 116096 - DNA, 167 bp, Heterodera glycines
tttaacttttaattaacatttggtgcgtttcagagctccttgctgaaaaaatacttatgaattaattttgcaaaaaatatataagtaatgaaaaagtcagaattttgaaaaattttaaaaacaacaagcgttggcattttttcaggttaagttagtcctttacaatg

SEQ ID NO: 116097 - DNA, 232 bp, Heterodera glycines
agttggaaagtaaggaacaatcgcgaaattgagtgcgccttgcaaataagagggataacactggataataaaaccatagaaaatatgcagtagggcagtgtacaaggtaaatcataaaaatgatgaaatattgtgggaaaatgctgcagtatcagagaaaaattcggaaccgaattcggaaaggagcgaaaatttagacgcattttttgctttaaatttgacggacgaaatg

SEQ ID NO: 116098 - DNA, 216 bp, Heterodera glycines
agttttcttaataattacatataaaatgtttttttaattaaatttcattagataaacaaaaaatgcaattaaaaagaggatagcatttccgcccttaattcctctccccaaaatttaaaaacattttaaaaatccgattaaaaattgtacattttgccgtgccgttcaggtgaacgctattggctccagttgttccgcgattggctgcgcggtatg

SEQ ID NO: 116099 - DNA, 678 bp, Heterodera glycines
ttcccatcattatgttttgttctttattcaaaacccattcacattcattgtgtgtattattgtctggggccttgtactatgtccaacatttcaaatggttgttataacaatgggtaggggattttgttgtcattgagcattttgggtttgaaagttgggcaattccatccgtctgtctatttattccttctattatcaagtgctttttttcaaattttccattccattccaactttttcccctttttttgggcgcgggatggagagagaattaacttttgcattattcaaatcatttttcgcattgcctcatttttaatactgttatcaacaaaaaaaaaatcgcctgtttgttgtaatgaaaatccagggggtgagacgattctgttacagtaatatttaatgttaatcctgattaagcattaatcgcgtcagaaatattcttgaatcttgtgatggatttatataatctcacaccgcaaaataacacttttagtctaatcaaaagacacaaaagcattcattgctaatttcttttaaataatttttaaaaatatatttataaggtttttcaaattatgtaatttttttttaaagcgcattctttaaaaaaatgccaaattataattttttattattatttctgccaatgttttggccactcctcaatttcaaaatg

SEQ ID NO: 116100 - DNA, 709 bp, Heterodera glycines
  unsure (1)..(709): unsure at all n locations
caaaaaaattttacctaacacactacctctgcaccatctgtagaggttaagngaanaaaanaanggnnnnttttcttttcttagaaaaaataaaaactttggnacgtcataactcggcactcgtgctcatttcgcagaaaataaaaatatttttcttaagaaaccatgggtgctctatccacccaccaaatttcatttggaaatcccacggacacctggggaccttcctttgttagaatttttaattactttttaagaaatttaaccgagaaaagcaaaatcagtgatgactttgatttcgtgctaacacttcaaacagttgccgaagagagcacggaattaaaggcggagaaacggcaaaagtcaattaaggctaaagataatgtgaattgtttcaattgcttttctcattagcaattcgtttgtgcttactaattgacgaaaaagaaaaattggcagaaaaatatttgccaaaattcgtattcgcattgaaaatgtgcacaaaagaaactaggtaaaaataaaattgatttttaattttttatttcgatttttattttattaagcaattaagggttgggaaattttaaatgaaaaagggtgaaaaaatagaaataaaattccacttgtattaagaattttaattatattggtaaattaactttattaattaagctgtaacaatttcgaactctttgaacacaaaatg

SEQ ID NO: 116101 - DNA, 261 bp, Heterodera glycines
atggaaaatatactgtagagaattaaattaaaagtacggaagcaaatgaaggaaaaagatgcgataaccaatagtgaaaaaggtatggcataaaaaaaacacaaaatgaaaaaagtatggaattaatttttaagaaattggaaatgatgaagggaattactgttgggtttgctactgtactttcttgttttactgtgtttgctctgatcagatcagtcggtgcttcgcttgggcgatccgttgttcgcctactccaacatg

SEQ ID NO: 116102 - DNA, 253 bp, Heterodera glycines
tttcgatatttattatattttatgtaataaatgttaaataaaaaactaaaaagtgacgacggcaaattttttaaaaataatttatagctaataattatataatattttcaattgatatgcaaataaatcaatagaattggctggatatgaaagcagagtaaattatttttttgaaaaaaaaagaaattttatttaaatttgatagagaaaattatgaatgaagtaaatttaatattttttaagcaaacgtatg

SEQ ID NO: 116103 - DNA, 284 bp, Heterodera glycines
ttttgagcttataattagaaataatattgtttaaaaaacaatacgatgcttgacttccctggctcttaaactaaaatgaaaatgggttgaaacatttatagacttttttattctttgctctaaaaattgattcgtcctgaagtcattacacattcattttatttttgccgctgaaatgcgttggattggaccaatcttccgactttcttccgtggtctctccaccgtcgatttatcgtcgtccgatttttagccaaggaattgagacagagccgcgagaacatg

SEQ ID NO: 116104 - DNA, 1003 bp, Heterodera glycines
gattcgtgaacagttaccccgaaaacccttggaaatgtgttttcatggctttcaaaacaaaagttgaaaacaaaagcttgtttgcgtccacttttcccaattcaaatgtcaaaacggtgattgtcaacagttctctgcgatctgtctttacaaaacaaaacaaaacacaaataaatttataccaaacaaaataaaatagcgacgacaaacaaaataaaataatccagcacaatttctctccaaaattaaatcataaaacaacaaccaaaaacatcacaaaatatattgagtctcttaaaaatatacgaaacgccacagaaattaataatttaaaattgaaatgaagtcaattagcacacaaaaaattttttcgaaaatgttcgaactcgggttcagggttcggaattcgccaaaaagtaggccggattcgtactcagcacctcaaaataccccccaagaaatgtgttattagaattttcagaaaagtttaaaaaacaattttttcgggaccagtaaaagacatgattgccagaaaatggcctgcggccgaaatcaatgctggaaaaattcataaattttgaatgaaattttgttaatttagtaatgtttgaaatttttggcattctgtcttaattttaaaattgcaacgagcccgtttcccgcacaaaaaaaaaaatcaaatttgcgggtccgtccgatgtgggattggaattcaaaaattgcgggacctgatcccgcaggattaatcatgcttttccaaaaaattcgggattgctagctgggatcttgccaaatcccatccctcacctgactagtttttgagtcaattttaggagattaacgaattattggctctgacgccggggaaaaccataaattttcatttttatatctgtcctttgccgaaatgcccagtcatcttttatcatacttccccatccatcgatttattcgatatacctatttacttttcattttcatcttatttaggtgaaatataatg

SEQ ID NO: 116105 - DNA, 323 bp, Heterodera glycines
ttaggtacttaaaaaatgttattatgattacagacccaaagcataataaaacacaaaaaaattcaattaggatagaaactttttttgaataaagtttaattaaattttaaaatcgttttatttcttgtttaaaacagcatgaggttatctgcttgggacctaaacaatcctcatcattattgcttaggtataccgggttgtaaaacgccggcttgggtgtcgcaagttaggcacaaaaactccaaaataggcaaagttaggcattataaaaggatattgttattattacgtacatattcttttttagattatttacaaagatg

SEQ ID NO: 116106 - DNA, 238 bp, Heterodera glycines
gtgaggatcgaatgataatatcatttatataccagggatgggccgaggtttcgtttttctcatttcgcctttcgcattattcgcattttttggcgtttcgcatttcgcttttcgcatttcgctttttggcgcgaaatgcgacttttacacccctaagaattggattaaattcccacaaaatttttcaaaattttacctataaataggctaattttcagtgaaaacctgtttataaatg

SEQ ID NO: 116107 - DNA, 167 bp, Heterodera glycines
cagaagatatgcattagttatccaatttcaataaataaataaataatgaaaactcgatacattttatagtgtttgcttaacctgcccagggtctgcttgatgcgtcctttttaacgcgtcaaccacagcaacaacatcagcagcaggcagccaatttccaacacatg

SEQ ID NO: 116108 - DNA, 116 bp, Heterodera glycines
ggtggcaaatgacaactctctgatcaaccaatgctttaaatgttttgaccaatttgcaggaactggcggagctgcatcaggaactggtcacgacgggttacaccgcggcaccgatg

SEQ ID NO: 116109 - DNA, 165 bp, Heterodera glycines
atccttttgcttcgttttgttgtttatttgttgaatgttacatttaaattcttctcaatcttacaagggaatttcacatgttcacaatcagtgcactttgtgccttatttctctggttttacccttttgtaaaatcatttcaatttttactgtgacaattcgatg

SEQ ID NO: 116110 - DNA, 928 bp, Heterodera glycines
gaactggtcaacaactctgctggattcaaacaacctgcaggacaaaacccattgaaaatttaatcaaaaaacaaattttcgaacgtccatatcttttttctactcatgaatcggttagcatttgcttataaaaagcttctcataagatctttcgatttataccaagattttccaatttggttgtcaaaacctttcagaagctcattttctgaatggtgtgttaagtgaaatttcataccatttagcacaaatttaatgggttttggttaaaaaatttataaagtgtatggcatagtgtttaatttttaaaaatttatttcagtgacgaaacacaaaaaagaattatcactcacttttgccgtttcatttcgtatttaatcaatcctttttcattggcacattcggacttattccttcacttttgtatttaaaatcatttgcatttaaattgagccccgtcactttttgtcaaatattttaaaattttaatgttgacaagtaaacagtttaatcctttcattcatttgctactttcacattacttacaaatttaataaaaggatgtgagaagttcaaaatagcaactctaaaatgcccgagaccttataaaatcctgataagtgtaattaaaaaatggatggctagaatccctaccggaaaccccaatcaaaaatacgttcctaagaatcgaattcaaatatttccagggaatctcggcttgagaattcattgaaatattctaatttttcaaaaattacatatcttaatgttagaaaatgttaggaaaaaatgcaaattcaaattataacaccaaatttacccgaaatgaaacattattaaatcatttgtgaatagcgaataaacaataagtattcaaataaaaaatgatgaaagtaaaacaaaattacaattcgcattgatgaaaatg

SEQ ID NO: 116111 - DNA, 256 bp, Heterodera glycines
aagaaacaaagataaaatgagataatcatttaaaagacaaaaaaacgaatgtaaaaattttaatttaaaataattaataaattaatgatattgtggaaaggattcagttacgacgataacgcgtggaagtctgagaacacttggaaagagccaaagtgctttttgaagagttcaaaaaatgaaagttaaaaacagtgaaaaaataaaataatttattagaaaaaaaaatcaaataccttccaatgctacaaaaatg

SEQ ID NO: 116112 - DNA, 346 bp, Heterodera glycines
  unsure (1)..(346): unsure at all n locations
tttagatagggaggggcgcaacaaacttttggaaaaattgttaaaatttttgatttgtttttgttgcgcaaaaataaattggtatggaattggtcgggagttcaactttgagcaaccttggacgtcgntcggcttgtttttgcccattctgtacacttgggtcggcaggcattcgatgtcacaatggtccatcagttctttgacattcgccaagtcatcggttgcacgttgagttggcgtttggctgttgctttcctgcaattgcgcgatgacaacgctgtgcagtcgtcgttcttcgtcaaaaacactgttcgggttgcttcctccgtcctgctcgcgtaccatg

SEQ ID NO: 116113 - DNA, 588 bp, Heterodera glycines
tttaacttaggaaaacttttcaagttggttagcacattatgacaatggggacagcaagggagtagggagggctggaggaaaatcagaaagggtaaaacgaggaatagaaagaaatatttgagatggaaaggataggtgttgtgccgtcaagtcccgaaccggcgataagtcccgaaccggcgaattgaataaataacaaatttattcaagttggggaaaacacaatataaataaatgacgagggacagaagggcaaagggcgaatattgattaaacaatataagcaaaataaatgggtacaactgaatgacggagaggtcagagggcgcgcggtatttatgtgggacatgaacgaagagagaaaagagaataaacgggagagaaataaagaaatgaaaataataatgggcggacaaaagagtaccaatcccaacaatagagagaaacatttgagagagagagggaaaggatagagcgaaaatttgagagagagagagagagagataaaagaggaaagagaaatagatatacccaaaagaaaatccaaatctctaatcagttggtcaaagtgtttccatttccgatatg

SEQ ID NO: 116114 - DNA, 411 bp, Heterodera glycines
  unsure (1)..(411): unsure at all n locations
aatatggcttcattttntaggcaaatgcctaaaattttgcgcacttgatacacaaagataagcatgaaaaacgcgttttccgcttggtttgaggagtctacaatgacttttataatgcctatttttgcctatttcggggtttttgtgctaatgtgcctactttaggtttttgaaaaaaatcattaacaaaaatgcaataaaaaagaaaaaaacaccccctaagaaatgacccaaaaaaaattttacaatttcacaaaatatacccaaaagaattaaaatttttcaaaaaattgacccaaaaatttaatatttttttctttataaaaatttttggtttaaaaatttgttcttattcggaaaaaacttaaaattattttaatacatttataaccgtttgacactgcgccaatg

SEQ ID NO: 116115 - DNA, 273 bp, Heterodera glycines
tacgcatgttataagaggaacaaaagtcgagcaatgcgcatgtttaccgtggggaagagtactgtgcttgtacggtaggcatttgatacggtaaaactgttaagctgtgccatcttttagtacaaaggtcaagtgccgaacgagaaattcggcattgtttttggcacattcaaccgaagtcggccgatttgtctgagggaattgcaaaaatttgcatttgtaaaaaataataaaaataataattgtatttaaattttattttttgtacagatg

SEQ ID NO: 116116 - DNA, 260 bp, Heterodera glycines
aaaaactgaacaaaaaattgttcttaaccgggccggtccgggttccggatcaggcacttttggtgccccgaaagtggtgcgataggcttccggaaaatgaccaatcaatcactgagcttttttgtggaacgactcaccacgtcactggtctattataaatgtcttaaagcaaaatcaatgcgatcagaagcaatcactatcaaacaaaaactatcagatgccattcattagcgttttattggtcattatttgcaaaaatg

SEQ ID NO: 116117 - DNA, 727 bp, Heterodera glycines
ttattggcttaaaagttaatattattttttaaaataaccaatcccacattcttttttcccttatttctcaagataacaagctggtgtagctcccgatttttcgacagcaacgggcttttcgatagtgaaggacttttcgacaataaacaaaaaataatggacttttcgacagtaaacataaaaataaattatggtttgtcagttttattaaatttcttttaaattagcattaatttgtatttctaaataaatattaggaatacgtttttttggttttaccttttttcctgagctttaagtggcccgaaagtacgcttgttaagctactcttcgattatagcaactattttctagttttttataaagtttaaaaatacatattttgatcaaatttatttatatattttcttaaaaatttttgtttgaaatatttgtatctcaatactaatttggcttaattttgtttctttttgtataaaactttacattaaccccctaaattgaaacatgattgcttttacttttgaaaaatctattgtcgaaaagtcacctcataaaatttataatatttctggaaaatgtcctttgttgtaaaaattccttctgtcgaaaagtccggcgcccgctggtgttcgaactttttaaataaagtaccggttttaaataaaaatactctaattttataataaatcaataaaattatcggctttaagaaattgcaaatatg

SEQ ID NO: 116118 - DNA, 62 bp, Heterodera glycines
cgcacgcccgcctccatctgcacgggcggctggaggaggtgcggttggcgggcggccgcatg

SEQ ID NO: 116119 - DNA, 341 bp, Heterodera glycines
gttggagctcattatttttttcagccatcttgaaattgtttaaatctaagccatcaaattttcaaatatttatagctattagctaaattaaaatcattttaaacttttgaataaagcatatttttatttttttcataattatgtatacaattaaggttgcttcttcatttattctcattaaaatattgttatactctcgtttctgcagcaaaatttactcacataattttattagattctggaatgtttttatcgttatagtttttctttctatgtttatatatttctttctaaataattaaaaatttaatttgaaatgacattaattaagtttaaacatg

SEQ ID NO: 116120 - DNA, 107 bp, Heterodera glycines
ttctctttccttagttccgttcgtccgccgttccatttcgtctgcccctctttctgctgaccgtccccaaagttcgctctctgccgatgatgttaattcgcgccatg

SEQ ID NO: 116121 - DNA, 351 bp, Heterodera glycines
attggctttataaattatttttcaagtagttttttttgttaagtttggtgtcccacttttggcgaaattattttgaacggcagaaattgtctttccacacactattttcacaatttgttttctctgttccattgtttgtattggagagaatggagagagacactcaaaatatgcgtctctgcatttcaaaaaggcagacatgggaacagaaaaatttaaattacgagatcattcactgacgactaaatcaccgtcaccgagaaccaacttttaattagatacatacctaattagtagggaccattgacaaaaaaagccaaaatatggattataatatggacgaaaaaaatg

SEQ ID NO: 116122 - DNA, 106 bp, Heterodera glycines
ttttgaccccaattcaaaaaaggaaaaaaaattggcagtcaaaaaattattcgaatttctccaattttgtttccatattttccgaaagttattcggtatcataatg

SEQ ID NO: 116123 - DNA, 375 bp, Heterodera glycines
ggctttttactccttacaattagtcgtctttcatcttatttactgtaaaattccccttcccctccccccgggcatttcagtccctttccttcgcttctttcccagctattttttcactgtcatttccatttttgtgacctatgcatttccttccagtttcatatcttttcattgttctattctttgttatatttacataagaattaaagtatttattgttcgtttttaagtgcaattagctctgaataaataatttttaattacttctacattctaataaaatttgacgtttaaattgaacacattaaaatactcatttttatttgtgaattttgcaaattttagaaaaaaaaattgttttaaaaatatcaaatg

SEQ ID NO: 116124 - DNA, 181 bp, Heterodera glycines
ttttcgtaccgccgttttcgtacctgagacgttttcgtaccgccgttttcgtaccggagacgttttcgtacggccgttttcgtacgagtgagtatcgaaaaaattgcattcaaataatttgctaattttttaaaattacttttaatgttttgacagttaagcttttattaactacaaaatg

SEQ ID NO: 116125 - DNA, 337 bp, Heterodera glycines
tctttgttaattcctgacctcatggaaggttcacaaattcgatgaaaaggtacgtttttctttccttttgcatttccataactttcctatttcagtggtgtcgtctccaaattcgcaaggcaaagatagcggaattgctgacaagagtgcagaattacataacgtcaggtcaggaagaggcacatgcattgcgacgcatcacggaaaaagatttccatgagtaagtgaaaattcgaatatcaaaatggcaactgaattcagtctgacccatgtgcaaactaacgaagagctgatggacattcatgcacatttccagctttattacggtcaccaaatg

SEQ ID NO: 116126 - DNA, 133 bp, Heterodera glycines
cagatgcgtgtggtcaatttgcattattttcttgacacagcgctgctccggaatcccttattgtgaggtcattgacggtctatataaggttcgcccgagggccgatttttagttaagcaatttgtcagtaatg

SEQ ID NO: 116127 - DNA, 97 bp, Heterodera glycines
ctcatttttcctccgctccttatttttcatttttccattttccattttcttttttcaatttttatttttatttttcagtttttcatttgtttagatg

SEQ ID NO: 116128 - DNA, 678 bp, Heterodera glycines
tttttttgtaaaaatataatgaattatttttataaaaatatttttcgcaatgaattttgtaattattaattttatagcatggcttaatttttcttcaatcaatattaaccacatttaatcattatttcattaatttgatacaacatttttataataattcaattattaaattttccttttatcagcgaattgggtagtaattaatatgagataactataattatggagatttttaaggtaactatcacaaatatcacattttcgttctcatctgatgtcattaattcactaatttttttagcacatattttggggattttttggaaattttatttttattttttacgaaagtagcttttttgcactcaaattcttggcaagatatccaaaaatgctcaaaaattttccttttttttcttttttttctttttgcaatttttgatatttttttaatgactttttttcatttttaaggcaaaatttgaattttatcgatgaaaaacagaaaaataagtaaatcttggagagcgagaaaaatatttacgtcacaaagaattgaaatgtttttgtgtgttaaatgggaaataatttggcttttgcacggaacgagggctgttaactgaagtgatccgtccacttagcgaatgcgtcttctcaagcaaagtgcgcgccgcaatg

SEQ ID NO: 116129 - DNA, 492 bp, Heterodera glycines
tgctgaaagagaaaatacataaataaaaagttagacaaacatttttttttcaaaaacgaaattaattattgaataaaaataacgccctttgcttttgttgcttggaatgtttgttataaagtcccaattaatggcactgcaaaaataaaaatttcttaaatgacataattaagtgacaaaaatgaaataaaaataaaatagttatgtggataaaattcaatttttcagactgccgatgtgtactgaaaatggggagtagaacggggcgcatcagctgaagcgagcagttcatgaagaaatttaaattgcttattttaatgttagagattacaaattttggccattaatttcgaataaaatctttttaaatttcaattacattaaaataccaatgcagttggagtaaagttgatagagaaatgagtgaaaatggatctgacaaaaattaataacttaactaagtaaggtaaatagttttttagaatttaaatg

SEQ ID NO: 116130 - DNA, 138 bp, Heterodera glycines
  unsure (1)..(138): unsure at all n locations
cattatacctcattccctacttctatctcctttctctcttaccatctctctctttctttctttctctcncaaatctctctttttcctttttcaatttgtttcatttgactttttttaggttttcccgaatttaaaatg

SEQ ID NO: 116131 - DNA, 84 bp, Heterodera glycines
acgaaggagcaacttaagtgcatcatcctcgtgattgcacttcgcgacgagcaccacgatttgcgccaaaagtgcctaaaaatg

SEQ ID NO: 116132 - DNA, 107 bp, Heterodera glycines
  unsure (1)..(107): unsure at all n locations
tggaaaaatcaaccttcttccgagaccaaatcaaatatttgggtcaaataatcgatcgaaatggacgccgaccggacncagcaaaaattcatgcaattgtccaaatg

SEQ ID NO: 116133 - DNA, 56 bp, Heterodera glycines
ggtgccaaaaattgcgcaatttttaaaagaattttaaaaattattttaagcaaatg

SEQ ID NO: 116134 - DNA, 53 bp, Heterodera glycines
ggtatggtcaagagtaaatatttttgtacttacaaataagttgttttctaatg

SEQ ID NO: 116135 - DNA, 901 bp, Heterodera glycines
tttggtatttcattttttcctcagtgtttgtgaatgttgattgtggcgccgacggactttgattggcattctcaaaattttttctaattgttttatttttttgatttcgcttaaacttcttctctataattctatgaagattaaggcattttttgtacatttgttaccttaatcaacaaatagtcgtctaatttgcggcacttcgttaagaattttaatttggcatgtctttttttttcttagcacgacatatcttttttcccttatctatcatcaaagactgcttgtcctagagggagggctttgcctttggattaaattttttgatattaaaaagacaattacaattagttatcggatgggctcactggtactaaaacggaaaattctcaataaaaagcaaaaattctagcctgtaaaaaagttataaaaaaaccaaaatttttgttttttttttttgttgcaattttcatgttataactcttttggtaattgtctaatcgcgaagtaataagaaatagcttctgaatatgttaagctttagaatgatatcaagattgtacgtttaagttgacaatgaaaaaaattatagtccaaaaacttaggctggcgccgaaacaaccccgaccacccacccacagtggtagtgtcaccttttgtcaaattgtacaaatatcaactgctattttataaaatacaagaacaatattttagaattttcaatagaaataatcatggaaatctttgacgaatttattattgttgacgaaaaagtgatcagcgaattgtttggcccaactgcaggaactttttcatttaatgaaaaaaaccgatttgcaactctgtaatttcattttttaattttcatttataaacacattttagtcaatttacgatcatg

SEQ ID NO: 116136 - DNA, 679 bp, Heterodera glycines
ttttcagacaggacaatttaaaaaaataacccgtcggttttacacttcgttcatcattttatcattcatattttattctcatctccccctcccaataagccaaataggaaggggaaattcgatgaaatggaatgaataaagtaaagtgaatattttctaatagagagttggtggtctcacaattggtgacaaatggcgggagaggggggggggggggggtacggctttcagtgaaaaatgctaataaaagcaaaaacgccggtgttgggaatcagtagcagtgattgtgaaagtcattggatttttactctcatttgctgtgcaatgtcattataaaaaatgcatctaaaaaaggcattacaaaaaaatgaaaaattttcaacaaaaattacccataactttgcttaaatccaaattaaattttaattcttattagcattcgatagccctaacatttctatattagcctgcaaaatttcaaaaaatttcattaagtttcaaaaaagctatggccataaatttttgaaaacctgatttcatgagaatttttggcctaactttgttcgaactatgcaaaaatttttgaaattttgcaggctaataagaaatgttagggctatcgaatcccgaatgctaataataataattaaaatttaagtcgggtttaagctaagttatg

SEQ ID NO: 116137 - DNA, 504 bp, Heterodera glycines
cgggcgcgaagcgcctgtttgaggtaaacaaagtttaaaaaacgggagcgaatcgcccgtccaaggccaataaaaattgaaaaacgggcgcgaagcgcccgactaaggccgcgaagcggctaacaagctaaaaaacgggcgcgaagcgcccgtatgagttcaacggatttaaaaaacgtgcgcgaagcgcccgtccaaggccaacaaaaattgaaaaacgggcgcgaattaaggctattttatgacgctgatcacgaatacctgatcagattttactttggacatcgttaagacctcagaatccctgtgacgattagaggattctgaggcatccttttgtagtgagaagggacgaatgaatccatatatattaccaaactaggtactaaagacctacatatacagaaagtaggacaaaacgccgacataaatcgaaatataacaaaggaccaacaattgagaccagattgatataatggaagccgaaagccaaaaaaaaaaatg

SEQ ID NO: 116138 - DNA, 643 bp, Heterodera glycines
attgattttggctgtctttgtccccccgggcgctttctgttcatcaatacagatgagtattttactttatcataatgtgtacttcgtcgtgtgttaataattaattgacaatttgatgatgacggactagcggtgaagaagaagaagaagtggccaattggagcaattagaacattaaaacaattttattatttgttatttttttatgcaacaaatattaataaaaatatatgtttttatttatttatttttattcatttattttacatatttttggggtctattttttataattgaaaaccagaaatatttccttgaaaaattaaaaaagagccccctcccttgaaatactcccctcctcctttgagtgaggttgaaaaatagaggcctaattcattaagtattcttaatttttaatattctaacaagaaaaaaccaaaaattcaagatttgttttttacatttcattttcaaaaaaaacaatttttttttttttttgagaaattcggtttttttttgtaggcaaaaacgaggaaaatggcgggggggggggaggcaaccagcattcacaacagatccccctgattaaccgaatatattttacataaaaaaatattttatgccaaaaatagtcaaacaaatg

SEQ ID NO: 116139 - DNA, 690 bp, Heterodera glycines
gactttgggtttttgaaagtaggcgaatattttgaaggcgatgaacaaaagaatggcaatttcaaaatagagctgtgtgccaaatgacaatgacatttcctgtcggattttcccacttcgtttttccaaaagttcaaatgaataaattttaattttccaccatttaaatagggagaaaaaaatattttgttttattttatcagactttttaattagtccggtaaagaattaagcaaataaattcactcgttgcaggcttatgttaaaccgatttttgtttttgttccaattaatccaaaaaattacacaaattaaattaaggaaaatatgcaattttaattaaaaattgataaattttaagaattttaagtggatatcaaatgaaaaaagtaaacttattattattttttgaaaaatttcctacttagtaaaagcaccaaaatttgttaaaaaagcaatgacaatttatgtatgtacttagggtgaaacataagttctgtcggccttcattttttgaagaaaatttatttttcaaatttcaacaaacacaatcattattcctaataattaccattattatcgataattgttgccatttttcaggcaaaagatcaatcccaatggaaaagtcattaaggagttagagttgataaagtaaaattggtcattttttaggtaggtattttgatg

SEQ ID NO: 116140 - DNA, 279 bp, Heterodera glycines
ccataacttttttcttatttggtctatactacattcgttggtatcaaatgaaagcttgaagtcccagtaattcataaatacaagaaaaagcaaatattgacacaagaaaaaaattacaaccaaaaaacaggaaatgcagatttttgtgagtatattcttgaatatttttttgtttatctgttggttttagcacagattttagttctttaaatctatagactttaagttttcgtttgatgccaaaaatgtggatattgaccaagcaagaaaaaagttatg

SEQ ID NO: 116141 - DNA, 186 bp, Heterodera glycines; identical to SEQ ID NO: 105842

SEQ ID NO: 116142 - DNA, 705 bp, Heterodera glycines
tgttggagagggaaaagcacgagtgcgtttttgggggaattgcgaaggcgacggcacaaagaattgttgaaaatgccgaaaatttgatttgggctttaagggctttgttggatcgccaactgaaaatggaggtgatcctcagcaacatcgccaacgacccgacctttgatgacgagtcgcgcactcagcaggtagaaacaaagaccaaaacgaaatgccattcagtgttgggcgctgggcaaagtgaactaattactagtaattgctcgaattcgtgccgttttttgggggggggggggttttagactctgctatggttagttgtaacttgtggtttttgatggtctatcgatgctacacccgaaatttttatggaaaattttgtatttttgctgagattttcgattttccttgttcgtacccacccacgccaagacctcccttgtatacggtagtgatgttttgatgggccgatcgcattactgtattaacatttttccaacacgaatttgtcccctacgattgtctctgacccgttattagagcgagctgttgttcaacaacaatgggatatggtgccattgtttatcaattagaccgtaattagtctacggtgtaatgacgtttgatgagggattgccttactgtacatcatttccatttgtgtcccatcattcgtttgccaaaatcaaaaccccaaagatg

SEQ ID NO: 116143 - DNA, 110 bp, Heterodera glycines; identical to SEQ ID NO: 98226

SEQ ID NO: 116144 - DNA, 507 bp, Heterodera glycines
aattttcaggggccttccgcaaaattttcaattttttaagagcctttccacccataaaaaataaatcaaacccaggcctaggcctttaaaatacaaatgttttttatgtaacgaaaatgtcgctaaaaatttcaattttcccgagcagcttccgccttttgccgccaggccacaaatgttttaatttaggctaatttctccgtttctctgccgggccactaattatttttaattagacttaattgttttttttgccgttgcttttccgttattccaattaaaaagcaggaaagttttatgtatcatttttgggcaagaattctgtttataaatctgaaaaatgcaatttttcattagacggcgccaaatttttgaaatattaaaaaatatatggatgagttggatcataccgtttttttaataatttaaaatccttttaagtctggcgatgcgtctactctgctgaactcgcaggagcgcaaggcacagcgactgttgtccagcatg

SEQ ID NO: 116145 - DNA, 1003 bp, Heterodera glycines
tgttcagaattttgcgatgaaattggtgaactaaaaatatgccttttgggcataatggaaccgaggcaaatgagcaaaagcgacaaatcatttgccaatcgtacaaaatttataaatgtgggggggggtagaggggcaaagatactaatttgtaaggacaccctcaagatgacgaaaaattatcaaaaaaaaatgataatatgcatctaatataatgtgggaaacaaatgaatgatatgcctaatgcctgagttcttaatgtgtttatataataatttttattttatataataaacatcataaaactaattaatatttaaaaatatctatatacagtacattatttcgaaaatttaatgccatcaaatttttatttgttgcccaatttttggctattttagaaaatttcttacttgagatttctgatttagacaaaataaaaattaaatttagctgaatagaaataaaaacaaataaaacaaaatcaaatttgtcaagccatttgagtacagaagaatgtaaaagcccattcattttattgggtttattcaatttgtccatttgcttcatcagttcacaaaatgatgatgctaaagggttgactttatttatgccatcgaattcacaaacaaaattttgaaagttttattttgcctttttttgtaatttttagtttattttataattttttagttcatttaagtacatttattttcctgggtgttatattctaaaattaactttattttctggatgtgatttaatttgtgattttttatttcgaataagaagaaaattttagcatttctttccattaattaaaatgtaatttaatattttattttatttttaatttttcacatttaaatatgaatttgattttaaaacattgcgatactttttttgaataagaaaaaaattacctcgccgttagttcattttaaattttttcattttattactaaatttaacaaatttttcaatttcacttttaagcgtaatg

SEQ ID NO: 116146 - DNA, 60 bp, Heterodera glycines
ggtgatgagctgctccttcatcatgttaacgtaattgctgccgttgagcccgagccgatg

SEQ ID NO: 116147 - DNA, 619 bp, Heterodera glycines
cggattcttaagtttttacttattttttctgcggctttaactcagcgagaaatgcacgaaaaacacattttttgttcgaaaaaccttcgttttaacgcccctatccgatcctaggaatccctattttggatgttcgcccctaaaaatccctattttgagtgttcgcccctaaaataagtttttatccttattttggcgttttgtccttattttcgcccttatttcgcgatttttcggaaattattaagaagaatgcaataaaaaagaaaaatacacccctaagaatcgacctaaaaattttcaaaaaatgcacccctaagaatcgacctaaaaattttcaaaaaatgcacccctaagaatcgacccttaaaccccgaaaatttcgaaattacttcatttctaactgcaatcagtgaataaaattgtttgccttagcttttaacttatttacatagagaaaacagcaatttaaaaaattgcacccctaaatttgaaactttttcgcccctatttcgcgaattttttgcacctatttaggtccctaaattggaatttttcgcccctaaaaatcccatccctattcataaattttaacgtttatttttaattaataaaaatg

SEQ ID NO: 116148 - DNA, 923 bp, Heterodera glycines
ttttctccacattgttcttcatttgccttttcagtgaatgttttgtcaaatttaaatcttttcgccaatttccatgaataatttttgttgccgaataataattcacttttgtaacacaacgaaaaacttaattgggttaattaattaaagcaaattaattaattgaaatgcctttaattagtttcaattaattacctttcacaatttccatgaatttcatatttcacttttaatgtgcaaaatggtctaaattccaacggcactttgcttaattgcttcagattagtaaatgatcatttgaatatttgataattttttttttgattacattgtgttattggcattggaaacagcgaaaagatggatagaaaagcaaaaaataacaaaatttaaatttacaaaaaacatcttaaaattaaaattatttaagattcatacatttgtgccaaaaataccgaagccgaaattaatggcactcaattgataattaattaaataatatgacactctaaattattatgtattgtattaattaatatgacaccgaattatttttaattaattaatatggcaccaaatcatttttattgcttttttatttatttaattaaaaaataatttgcacatttaattaacataaatcatttttatttgtccattttcccagtgaataattatcataaaatttttttttttgatcattttcaattagtcatcagaacagtggctgcagaaagaatatttgtgggatggaaagtgaatgattcattaaaaaagccaaatggaaaacgaacaaaaatgtgaaaagcattcattttacaatttattagtccaaataaaaatgaaaataaataagtcaaattaatttaaaaatatttcagataaaatccaattaatttcaacaaatttttttttttcaaatg

SEQ ID NO: 116149 - DNA, 116 bp, Heterodera glycines
atcaaactgattccgaacataagcatatagttcagctgcttagggtaagaagaaatgaacatgtgaagtttgactgcgaatggaaatttcaggatgttcttatcagtaccaagatg

SEQ ID NO: 116150 - DNA, 110 bp, Heterodera glycines
agaaattttctatgcaacaaacgctctcgaacatgaaacgaagtgcggtgcgccgtggccattttatttttcaaataatttttaaatttaattgatattccagaaaaatg

SEQ ID NO: 116151 - DNA, 338 bp, Heterodera glycines
ggtaaaatcaaaaaattaaaaatttttataataaaattttagggcgttacgatgcgcactttattttgcgcgcattaaccgaaatgggatatatacctgaaataattatttcagatctaaaaatttatcaaataaagttgggaaatttgttttttagagatttttagctgatgtcacagaataaattatccgatttgccaaaaacatttgggttggactgcactccaaagttatatttcccacacaaatataactcaaaaaaaaattatggtaaaaaataattattaattaattttttatggtttaaaggtaaaataaatccaacactaccccccatg

SEQ ID NO: 116152 - DNA, 74 bp, Heterodera glycines
tgatccacggtcagtcagcctcatctgattctgaataaccaaaaaaaagtgaaaattttagagtccggccaatg

SEQ ID NO: 116153 - DNA, 371 bp, Heterodera glycines
actatattttaaatatttccagtataaaaaattctttaaaattccaaaaaaattttcacccccagaattattaaattttttattagtgcaagagtagtgcaagagtagtgcaggagttgttcatcagtggttcattagttgttcgtgagttgttcaaaagttgattattttacataccaagatgcacatgcagtatcttggcgagagttgaagttatatccaaaatttaaacgtcaaacatctttttacattgttttaagagtttctgatgtattatttttattacttaacctaatttttaaaattgaattttttcggattctggacacaatttcccatgaagtatcttggtcagtattggacatgtaatg

SEQ ID NO: 116154 - DNA, 247 bp, Heterodera glycines
atcatttgaaagctcaacatgtttagaaacttttcccgattgcttcgcgattaaaagattactaaaaaaagttatgcatgaaaatttaaaaaaatcgaaatttttgaagttttttcagaatattttttcataggctatcaatcttttctttctaaggctaatatagcctgtaaagagctttcgaatgtacaaagattgttaagtttgtttgacaaagaaaaaagttataaggccagaagcacaaatg

SEQ ID NO: 116155 - DNA, 264 bp, Heterodera glycines
taataatcaaattcaaaagctaaaatattgtaaaaattaatgaagaaaagatgtaaatttagggagaaaaagagcagaattaacgaagtgaagaataaaactgaaaaatataagtgtgcatcaactatttataacaatcttggttttgtttttctgggttaaacaaacatcaatctgtataaaaacggagaacaagatcactttattcaatcctttattcaaatatatttaatttattaaaataaataatcctagctaataatg

SEQ ID NO: 116156 - DNA, 194 bp, Heterodera glycines
ttatgggctgatcaaaaaaaaaatacaaaaatttttttgaattagcactttctgtcttttggcgttttaattttgaattcaaaatttgggatccctttcagcgatctcgatcccgaaaaatggataaatcaaacccttcttttttgtagtttttcaatttctgtttattatcaaattttatagcaattacaatg

SEQ ID NO: 116157 - DNA, 279 bp, Heterodera glycines
cgttttataaatcgaatgatcgatgaaaagccggggttaatggggacaatagaaacattgacaactgagggtaaacgaggcgcggacaacattttggagaagggtggatttcaacgtcaatttggtacaggacgaagaaagcgtataaaagctaacaaatcacccattctatcgcaccagactttaattggaaaaactattaccaacccactaattaaaagcaaaaagcgactcagatcagacgcatttggactttattaaaaaaaagaagataaaatg

SEQ ID NO: 116158 - DNA, 114 bp, Heterodera glycines
ttttcccggcggcgcctatcggatgcgccgaaccccttgcgccccaaaacttattttggaataagcgactccaaacatctgctgctcttgtgatgtacataatcccaaaaaatg

SEQ ID NO: 116159 - DNA, 280 bp, Heterodera glycines
  unsure (1)..(280): unsure at all n locations
gcagggtgagcagagaatgcaattagggcaattaaaatgccaccgaaatgacatttccaaagaattaattcgattttatnggaataataactcattnnaagagaaacaaaattaattttattgcaaatattacacgtttgcacgtgaaaagtgaaattttctttttcagcatccttctgtcacattgttacaaaagtttgataaagtgaaacatttggaagtgccncaattaacgttcaaatttgcgaatttaaaaattaatttagaaattgtcacaatg

SEQ ID NO: 116160 - DNA, 63 bp, Heterodera glycines
  unsure (1)..(63): unsure at all n locations
aatttcctccatttattcatntatttanaatgttatgtnntagtatcnaaacagcggcagatg

SEQ ID NO: 116161 - DNA, 128 bp, Heterodera glycines; identical to SEQ ID NO: 107395

SEQ ID NO: 116162 - DNA, 61 bp, Heterodera glycines
ggtggaaaaataaaatacattcaaatagcaaataaaattcagaagttttccattccatatg

SEQ ID NO: 116163 - DNA, 139 bp, Heterodera glycines
ctctagagtcttaatttcaaaattaaagtgttcgaaataattatggaattttttttcacgtccaaaatttttaaacaaataaataccaaattcaaatttgaaaatttagccaagtgatgaacaattaattaatgaaatg

SEQ ID NO: 116164 - DNA, 797 bp, Heterodera glycines
tttttagcggcgggcagagaagagaaaaatagtaaggaaatttgagagaaaaacttctctcaatttaacttgatatttctaaattgtgtttaaaagcggaaattatcgcatcgattttttccataatgttccttttttcacttatttttattctcaatgaagagccaattttttttaatactttattttcattcaaatttagaattttgcctgccattgtttattttacattgacgaaaatgccgacactttgatcaaatcggatggatttttgcaaattgaccaaaaaatgttgtgcgaaattttggaacgcgacgaattgcaaatccgtgaagaaatttcaatgtggaatgcagtaaattttttttaatttaaaaatgttacaaatttatttttaaataagtccgaatctttttttaatcactaaattgttttgaataaaaaaataaaattttctcttcaatttccttactattttctcttctctgactcgtcgctgctaccatttttagcggcgggcagagaagagaaaaatagtaaggaaatttgagagaaaaacttctctcaatttaacttgatatttctaaattgtgtttaaaagcggaaattatcgcatcgattttttccataatgttccttttttcacttatttttattctcaatcaagagccaattttttttaatactttattttcattcaaatttagaattttgcctgccattgtttattttacattgacgaaaatgccgacactttgatcaaatcggatggatttttgcaaattgaccaaaaaatg

SEQ ID NO: 116165 - DNA, 1003 bp, Heterodera glycines
aatggtaaactctaaactgggaaggagattaaattttatgaaccgagaaattgttcgcatatatttcaaaaacaaatcaaattcaaaacataatttcataaaatattaaattaatatttcattaaaataaaataaaataaatttatgaaaataaagcattaaaaccccataaaacgagcatgcattagattcactttgatcgtataaaaattcataatgtgataattaaataatgacctcatttgacttttaaagttttaattgatttggcatattgttttttttgtgtgtctttcattttcatttgatgttttttttcactcttcgcccggacttaaatttgtgatgcggattgtgtgtggtaattttaatggtgcttttaattgttgtgttgtttaaatttaattgatttggattgctgtggctttaagtgatttaaaaagtcttccttctcattcttctccttcgccccgttttggaattcggcaaagagcaaaaaagaccccgacagtaaagggcaatttatttacgacgataataatttttaagtaaactttgtttttaagacatttttgatcaaatatctgaaaaatgcgaattaattttcaaattttgtacaattgcctaatttaattaatatttttttaaataaaatttaagtaaatacatttggctgatgcgacattgcggcgattaaacttgcggcgttacattttcggcgcagaattaaacggcgtctaaccaaatatatttttattttatccattcctccgtttaattatgtatgaactggacaaaatgttaagccattggtggtaaataaagaaagacaaaacaactttttcttaagaaaaaaattgttttatcggagatcaacatttaaattgttatttatttatttatttagcattttgctaacaacgtataaaacaacttgtttttaaaatttccgtcaatttttgaaaatttattttagcgggtaataattttatggagagagatg

SEQ ID NO: 116166 - DNA, 316 bp, Heterodera glycines
agaccatcgaaaggacgtgaccaaaacacacacaccatcccaaacagttctctatataactataagaaaaaagaaaaaccgttttctctgtattatgactctttgattttttcttttgtctgtcgtttattttgttttttctttttcgttcgataaacttggatggatgacttgggtgtaattatcttctaaattgtattgtttttatcatattttacaattttacccctattcaaatccaatttttgtctcctgtttcgggatttatgccattccttttactccaatgaaaaaaattgattgtcatccaccgatg

SEQ ID NO: 116167 - DNA, 403 bp, Heterodera glycines
cctgaaaaaaacacaattatgtaaaataattaatagggctgcaaattataactaaatatttataaatatatttttcaaggggtttccatgcttaaaatagtagtaaaaaaacttttttttatctttttttttgtgtttacgaacaaagttttggacttttatttacatacttttttagctttccctgatttttctataatttaatcatgtaaatatattttacatattttggactgttacgcaatttttttgtatatatttttacaatttttaaggatttttttaaagaatttttctttaatatccaaaaaattcttcaaaattttcataatttcgtacaaactctaaataataaacaaattttttagtaaaataaaatttcaggagggggacctgttggatg

SEQ ID NO: 116168 - DNA, 252 bp, Heterodera glycines
agacgcgtacaaatcgtcactggcatcccaggcgcgtttgcctacctagacgacggcataatcgcctcataaaagcttgaagagcacatttctttgctctacaagctcttcaaacaaattcaggaattttgcctcaaaatccaattggaaaggtgcaaattcatccaaccgggttgctttttctcggcccatttcatctccgtgaaaggaactcgccccgaccccggacgatcagaagcaattcgccaaatg

SEQ ID NO: 116169 - DNA, 108 bp, Heterodera glycines
  unsure (1)..(108): unsure at all n locations
tccgccnncctccgccacttcccttccaccacatttttcncaaaatttgtgggactaccaaacaaatttatgcacattcatacatatgttaagtgctcaaaaagcatg

SEQ ID NO: 116170 - DNA, 1003 bp, Heterodera glycines
aaattattaaaaggtaaaaaataagaaatattacataaaagaaatggtgaaggatacggtaaattaatgcgatttgatctttgttttttgataaaagtaaaactatttagaagtacaaacaaaaaataataattaaaaatcgaattttggtttttaaaaaagtattatttctttttgaaaaatggaataaaagggaaaaattactcatcgacttttcgtagggttcaaaattgactataatcctcgaaattgtttttataacaaaatcggcgctacttgtgctcattttcagcacaaaaaatcatcgattaagcaatgtcatattctaggcgttttcaagctcaatgcttcattaatttttctaataaaaatattttaaattttccaaaagcaaataattaattcaatatttttcggtaaatttacatcaattccaaaaatacattttgcagttaaaaggtcaattttcgaaaaaaaataatttattcaatatttttcggtaaatttacatcaattccaaaaatgcattttgcagttaaaaggtcaattttcgaaaaaaaattaaaaatttctttgcatatgtcctttaatttgcgtttaacgaataaaatataaaaacaaaacaaaattatatttgaaccgaatcaagacataaataaatccattgtcacattccattcttttttgacccattatttttgctgatgtcccatcggaatcattccgcaatcagatcaattgcaagggtaacggtgtcattcgcattgaaatccgtgccgtctttgacatcctgtttaattttgtttatttacgagtaacatggctgggaccggacccaaatagtcacttctttttttgacaagaattcgtaatttttttaccaatgaaaaatttagaaaaaaaaaattaaaagcaccaaaagtttaggatttcccataaactacaaacaatggattaaaatcgtattttacaaaaatcacagtgaaagagtaagaggccgatg

SEQ ID NO: 116171 - DNA, 93 bp, Heterodera glycines
ggtggcccatcagacttcgtttttccaaattttaaaacaattctttcccaggcaattccctgctccatcgacgaacgcattgcctggctaatg

SEQ ID NO: 116172 - DNA, 241 bp, Heterodera glycines
ggactttttaattcatttatcgcagatcaagtacagtactttcaagcatttaatgagttcggagtgtcagtcatttgtacgccttttaaggctgtgctcgtccttaacccgttaatccacgaagaggaaaagcgtcgttcggaattaaagaaaaggcgtcgtaaagaataccaagtgctgttcctaatgttactttatttttcaatgaaaatagaatgccgaacgtgccgagcgagcaatg

SEQ ID NO: 116173 - DNA, 70 bp, Heterodera glycines
ttgcgctggtggccggagtcaaggttcactcttttcaatggattagtgcaaatccaacctttacacaatg

SEQ ID NO: 116174 - DNA, 235 bp, Heterodera glycines
tcattacaaaatcaaaaaacaacgtggaaggagagaagccaaggctgaagataccaaagactcaaaaattgatgtcgcaaagagggccgcagaacgcgccgggagagacgtagaaagacattttaatcagatcaacaatatctcgaattccatccaaacccaactaaacacactaagagaaacaaatcctcaaattttagaagagcctgatataaaaatttggtttgacaaaatg

SEQ ID NO: 116175 - DNA, 232 bp, Heterodera glycines
aaaataactcacaaataaatttaaaatagattgacacaaaattgaaaaatcactaagcacacttggaaatcctgacaacacatacatatgcttatgcatatgtaatttctttccctactcaataaaatatatttcgatttaattaataaattcttttttccaatttgataaaactaattgtaaaaaattattgttttttttctatttttttagattaatcaacatagctatg

SEQ ID NO: 116176 - DNA, 72 bp, Heterodera glycines
tttttattgtgtgtgtgtgtgctgtttttgagtttgagtctgttatacgaataggaggcaatcgccgaaatg

SEQ ID NO: 116177 - DNA, 246 bp, Heterodera glycines
ttttatattgcttttgtagattatttgttctctttgattatcacaaaatgcttttttaaaggatggatgagttttctgttctgaaaaattcatcggttggtgttttatatttgctataaatttgattgttcgtttcgttaagggtgttggtcgtcgactgaacgatctccacgtttccatcttcaatttgttgcagcaatgggacaaagagaaccagaattgttgtgaacttttggaaagcatatg

SEQ ID NO: 116178 - DNA, 53 bp, Heterodera glycines
ggttaaaactaataaaatttaaaccataaaataatattctttttagcggaatg

SEQ ID NO: 116179 - DNA, 299 bp, Heterodera glycines
aaaagtaattaaaggagatactcgagagtctcagtttcgaatcgagaaaaaaaaattggcccaaaagcgctttatttgtatctgttacaaattgtcttaaaaacgatctatcggcactagggatagcattccgaggccccaaacattttcgaaaatcggaattccgagcccaaaaatgtcagaatcggaatttcatgccatccctgatcggcaccgccttccgaataatttggcaaattagtttcattaattatttctgtttgattaaggcactcgtcgctcgtgtgattgacaaaatg

SEQ ID NO: 116180 - DNA, 61 bp, Heterodera glycines
agccacctggagcggccatatttgaagagaggcttaggcaagatccaattttgtattcatg

SEQ ID NO: 116181 - DNA, 126 bp, Heterodera glycines
tccaatctctgggactcaacccaccagcaattcaatctctggggctcaattctccggcattccaaacaatgggactcaaatttcccgcattccaaacactgggactcaacccaccaactttcaatg

SEQ ID NO: 116182 - DNA, 214 bp, Heterodera glycines
cgcagctgggaagcggaacaaacgcgcgggtattttattttccaaaattcccaattttcggtatcatataaaatgatttaattaattttaattttttttgtaaaattagagacatttaggcagtgttgaccgctatgggacttcaaccgttggcaatcatggcattattggcaccaaaattgatggcgactgtgccaatggaagcccaaaaatg

SEQ ID NO: 116183 - DNA, 167 bp, Heterodera glycines
tttggaaaaggaagtcgaaaatgggcacggtgagaaaatggaaaaggaattaagaggaaatggaaaattaggaaaatttgaaaaaaagaattggcaaattgcataagataagggggattgggcaaaaagggaaaactttgtgaaaaattagtgaaaatgaaaaaatg

SEQ ID NO: 116184 - DNA, 768 bp, Heterodera glycines
tgtcgcgacgactctgtgttgaaaacagtgcaaattaggcacggcgatagttacttaacgatactaattgcgtcaattaaatctaattgggggcaaaaggactccttttcctaacattttaaatagaaaagaatttagtaaattttaaagaaattcaaaaaaatttaaggatttaaatccatgtagatcttaaaaccttaactaacaagtttgaaaacaatttaaaatcactcagccgttcccttgtaaaaaaaaaatatttaaaaatttaaatttttcaagaagtagagaaaatcaactcgttttaaagagattaattttaaaaaatcaaaaaatttttaaaaccaaaatttttttaataatttaaaaaacctagaaattttgaagaaaaaaattctaatttttcatttcgaatttttttttgttgaagaacatcaaaatttgcaattcttagaattttactatcgtgggggaacaacaattaatgaatttgaaagcatttggccaaatttgtgggccaaccagggctgcacgcaattacggattacggattgcggattacggaaattacgggttttgggagttacggattacgggttacggatttttgggatttttccgtaattttgatccgtaatttgatttttggattattttttcgagacgatttcttgtaagattatttttataaaacaaatttttctattttttatttaaagaaaatatgttcatttctttaaattcttatttctttagcaatttaaaatg

SEQ ID NO: 116185 - DNA, 131 bp, Heterodera glycines
acatttccaaaaaaaaagcagaaaatgatagtacagatgatgataatgctgatgatgataatgatgattatgagtatgatgacaacaaacaaagttatgaagggaattcagaaaattcggattatgaaatg

SEQ ID NO: 116186 - DNA, 413 bp, Heterodera glycines
tcgatttggtggtgatttggctaaacacagccactcataaaaatttgtaaaaattaattttttcaataaaatttggtttcaattaattatttacatactttttggggtaataaaaaataatgatcaaatttgaaattgattcacggctcattggaataattatcttataaattcctagcatttttttgcaattttgtgtattaatggtccacaatttttttatattaattgattcaatcaaacaaaaattacgcataattaatttcatattaaaatttcattaaaaatttagatctaaatccttctcgtatcagctgaaaatgtcctaattacccattttgtccatcctcaaaactcccatacaattaacctcattaccgacgtctttcatcacataacgacaaaaaaaaatg

SEQ ID NO: 116187 - DNA, 110 bp, Heterodera glycines
agttgctgaaggcgacatttaatttgtaatgtgaggacaagccctttttcccctactactacaacaagaaagaaaattatggagttcgattacaacatctgccaacaatg

SEQ ID NO: 116188 - DNA, 144 bp, Heterodera glycines
ccacaactcttttttaaagaatttttttatgaatataaatttaaaacagattttcatttattcattttttgaaaataatttttttttattaaaaaaaccttttcaaggagtcgaaaattaaatgcagttggctgtataaaaatg

SEQ ID NO: 116189 - DNA, 86 bp, Heterodera glycines
ccaaaggccaaaactggaagggaattcgtggcaattcattttcccccccccccccccccccgcccatccatttaaaagctctgatg

SEQ ID NO: 116190 - DNA, 209 bp, Heterodera glycines
ggggggggggcataacgaaaaagtttcgaaaattccttaaaaaaaactttaaaaaatgatggaagtaagcaggaaaaattcagtgtcccgagagattccatatgatttttctggaattttattaaaaattttaaatcttttttgagcatgaaaaaaccgaaattttttgaatttccataaaaattcagccctttcaaatcgtccggatg

SEQ ID NO: 116191 - DNA, 1003 bp, Heterodera glycines
gatttttatttgtttttatttaaaaaaaaataaaaagttaaaagctaaattaaattaatataattttcaaatcaaattttcttcaattagttcaaataatttatcaattttggactaaatcatcgaatattaatagaagttcagatttacttttcatatcacttttttcggcgcgctttttccaaaaaacttttccggagcaagggcggtccggcggtgccgatacccgccgacggggaaaatttgaaagtttgagtgtaatttgttaacagatttccaacaaaaaaggcaggtttttgggggagaggtccggcggagccgataggagccgccggggaaatttttgtaatttttaattcgatttgttaacaattttgtccaaaaatggacaaatttttaaataatttatatttaaaacaatcgcttcaataaaaattttctttttaaaatcttataaaaattgccgcggattcacaaatcccgcggatcgcgcatcgcgtatttaaaatcccgcagtcgcggatcgcggaaaaaaatgccgcgaatcgcggatcgcggtcgcgctccacccctgcttgcatacttttcataatattttttggtttttccttttccttatctttttttcaaatttcgaatttgccttttttcgcaataataccacaaaattataccgactttttccgcttttgtaattttttttggcaatttttatgatttttgaatccactttttgatgattctcgtctgtttttacatttggattttgagttcaactttctcttccactactccgacgagtacttcgaccaccaccaataaattgtcctctacgcctcccgcggaaatcaaaaataaattgcaatgtttggcatggaatatttgcaatttgttagtttatttctaatttgaaagttaaaatttatcattttcaaggagcacgaaattgaagcagtcaaaggtttcgcgacgatttgcaattagtcaaaactgcgaggaaatg

SEQ ID NO: 116192 - DNA, 937 bp, Heterodera glycines
tatttaaatttacttaaactaaatattaaaaaataaaatttatttttaataaataagaaaagttttcgtcacgtgcattatataagtaatttttgtgatttgcaaaaattgtgttttctaaaaattcgatttggaggcatttcatatttgcattaaatgatcttactttcttaaaattgagttaacaatttttatttatttccaaattattttatttatttattaggaatatgcatcaattatggaaaactaaaataaataatcatatttgtcgtttaatttagcttatattgtttgcatttgttttaattctttttccatttcatgttgaattttttcatttcaatttataaaatagaatatgttttatttatgatctaaaaagtactttttagataagatttttcttagtagaaaaaatgctaaataattgtttaatcaaaaatcattaaatttatatttcctaatattttagttttacgattttaaaatttcatttccataaaacattttctttgtagtttactattcgcttcgttcggaaaattattttaacttaggattttctattatttcttaaaataagttttgcagtttaatcatttaactattttttaataatttaatttttacagtgatttattattataaattaaaaaacattttttttgtctaatatttttattttaaattttctttgttttattttaaattttcatttctttgtttattttcatgagaatacaataaaacatgtagcatgtgtgatttatgaataaaacatttagcaaaaatttgtggtaaataattttatttatttataatttaatttaattaatattgaaaatttataaacatagaattgttttgatttgctgaattggtgctactatattcaaatttctttgttgttacagtataatttttatttaaaatg

SEQ ID NO: 116193 - DNA, 507 bp, Heterodera glycines
ttgctgtgttatttttccattgctaaaacatgtgtcatttcttttcacattctttttgaatttaaaaaaagcattggctaaaaaggaaatgttatttttcatgctttttgaaataaaaaatttgtcattctgatacatttcctcgtgaattatttaatgaattatcgtgttttaaaatttcaattttaattgataaatattattatttaagcggttttaaaaaaagaatttttcattcctttttcggtgaaaaagcccattttacgtaaggctatttttaggagcacaatttcgagaaaccctagctgcttttgttaagttgcttttcgagttcaaatctaccactaaaaatttttatataaaagtttttgttacaaataatttagaatttttcaataaaaacagccaaaaaaatgttcagaatattaaaccaattagttcatccttgtaaatattaataattttcactaaattagttcatatttttgtatttttagactttaaatg

SEQ ID NO: 116194 - DNA, 98 bp, Heterodera glycines
ggaggggggcggggggcgaacggaggacgatcattcatcggcatattgcccgacatttttattgttttaattttagaattctcgacgagcgtgagatg

SEQ ID NO: 116195 - DNA, 1003 bp, Heterodera glycines
ctttcggtcatcgatttgctgataatttgcccaattactttacttcgtccgcctctctctctctctctttttggcatcggacggaacagtcaaagggtctctcagaacgacacttttttatggctacaggacatcagccaatttcttaactttgctcaggtaataatgagcaatgaatgagtgctgtctgatgagatccccaattagcagttaattagtctctttagtcttcctaatttagtaagtactcaatgaatgcgctttctttggttgccattaattacatttattcctgctcatccaaacgccaattattgcaatttgtgtagagcggcaaaaagaaagtgttgtgatcactccactggaattataaccgatgctaatttatcaagcttatcagtggttagagtttaacagaatttgcaaaacaattggcaatttcattgttgtccgtttgcttccacttttcttctcacttttttgtgcttttccatcgatggcattttcaatttgattcattttttgccattttcccttttctcgcactttttcctctcttaagttggtctttgatcgcatctgttggatggcaaatcaatcaccccattgaatgagctttaatgcggcggcgggcggcggaatgatgaattataattatttaccatcggtgggatgggatggttttgctggtcactctccccccccctatcccttcgtctcccgttctttcccccattctccgcctcgtcctcctccgtctgttccttcctttcgctgattgatcattcatttgtcatttgtgtggccaatcaaagaaaaaaaagtcattcaaagcgaaaaacgaaaggattctttttcattttacacattttcatattcgcaagttcaaattccttctttccttctgttgcattttatttattcaccttaaagaaaatccgccaaattaacaaattaatttataatgccaacagaaaatttgccgcccgaaaatgacacaatg

SEQ ID NO: 116196 - DNA, 140 bp, Heterodera glycines
  unsure (1)..(140): unsure at all n locations
tcatcaatgcgatgtacggatttatgtggatatgnngggaaaagttcaattcgacggagcgaccaaaaaattacaaagtgatcatcggcagcgaaaattgttcaaacaacgacggcactcatttcaaattcattcgtatg

SEQ ID NO: 116197 - DNA, 284 bp, Heterodera glycines
tttttattgaaaatatgtttattattttcgaatgagctctagtagaaagtaataaaattttatttaatcattaatttaccaattggcaattattttgtcattaagataaaattattattattattatttctttgaaattaaacaggatttccttattttattaagtaaaataatgatttattcagttttgtaatcagaaaaaaaatcatttaaatgcctcaaaaaatgaattgccatttaattgaagaaaaataaaataaaatcatttcgagacgacaaaaatg

SEQ ID NO: 116198 - DNA, 1003 bp, Heterodera glycines
attttttttcaattttcctatattcttttttttatcaatttatatgtacactttcgtgttaccagaggcacaaaaataacggaccagaccgttttcgtacgagcacatgttttttgactataacttttttctttgtcaaccaaatcccaatattgttggtatcattcgaaagctctttagatgctctattagcctgcaaaattccaagaaaattttgttcagtttaaaaaaaagttcgagccaaaaaagttggaaaatctggtttttttgaattcttctgaccataacttttttgaaccttgacaaaattttttgaaattttgcaggctaatagaggatacatagggctatcgaatgacaccaacaatgttggatttggtcgataaataaaaaagttatagccaaaaacttgtgctcgtacgacatcggcccgtacgaaaacgaccctgcccccaaaaacaacgcaaaaatatcaaaaaaatttgccaaaataaaaaaaactcccgtgatcagtaaaatttttttggacataatatatatttacacaaacaatctcatcctcaaaataaaacagcagttgtttctgttcaacatgctaagctttatgaaaacaaaattttttatttttttttgctgaattttctttttgaaatctgttcattatttcgttacattttttttttgttaaacataaacaaaaaaaatttgttattttaggtccacaactgttgttgctgaactgaacgacaacaattagggtatgttgatcgtggccaaattttgttgattgtttatggccacaaaagagcttcgagcaaattctttgatggaaaatgttgtttactcaaatgaactctcgtaaaatttggcctatataaaaatggccaatgaataataaaatagtcaattttatataaataataaaagaatttttattttaaatattttaatttttattttaaataaaatatttaaatttaagaaaaaccaattcttttaaatg

SEQ ID NO: 116199 - DNA, 1003 bp, Heterodera glycines
ttggagcggcaacttcaaagggaaacagccccacatggtcgggattttgcgggtgaaaatcccgaggcggtaacttcaaaggaaaacaaccctccaataggttagggattttggaggggtccttccgttacccggacggtttcagggtcatatactattggcgcctcaatcgtcacctaaatcgtgctaaaattaaaatctactaaaattcctaatccaagttttgcacctgtgatgacttttttcaatctgcattagctctgttcgatccgtgtatatggcgaaaatacgagggagagaaagtctgggaaaatggaaaaaaaggcgaagggcaaaaaagcaaaataaaaatgttatcggccgattggcctttgctttaaagaattgtcaatttgctctttcaatttttgagccaattgctgaaatattgggtgactaattttcctatgtcaaaatttgtcccttttattctgctccttttcttcgtgtgctcttacgcatttttttgactattaaaattttctcattttacattttcttcacttcacttcttttcttggactcaatcgaataaagcgcggttacacctaaggatatgcgagaaatgagttttcccgagaatcaagaaacgagagcgagaaatgaccccgagaaacgagactgagaagcgaaaaacccgagagatttctcgagtcgcgaatcgagactctcgcacatccctagttttcccacatttgcgcctcggacatttgcgcctatgtccaaaatcgggttcaaactgaagttttttcaatccatgatagcctaaatagcattaaatgatagaaagtgattgtatccgttaaactgataattttcgaaaaaatcatcaattatccaaacaacagaattactgctcctacataataaactaaaagactgtttttttaaatttcaattctgtttcggctatcagacagggtttgaaaaagtttttttgccacatttaaaaaatttcaagatg

SEQ ID NO: 116200 - DNA, 1003 bp, Heterodera glycines
ctaccgaattagccaggctctaatgcagtttacgcgtccaatcgacttttaggcgtccaatcaatgaccaacctcggtttcttaatttttacttaaattataaaatttataaaatgtttgtttttttattttatttatgtttattaatttattttagtgtttttttctttggaaaaatggacgaataaaaaaaataaacataacaaaacattaccatcatcatcatgatttgtgcagaatcagccaataatgggaaataatcatatgatagtgcccaaacagtaattaattcataatttattgaattttattggtgttttatgaatttcatcatcattatcttgtaaatcatccttacggaaaataatcttgtgattttttgcattttttatttttatgattaaaaataattaaatgggccggaaattgtttgaaattgcaaaattagttgttaaaatttgcatcatccacacttaatccatgacgaaattagtaagggcaaacaaataaaatggcatatttaagctgagaattttgtaataattttaacttaatgaaattcaaaaaaactaataattatttttttttaattttaaaataaaatttttaaaattcagaccattcatttaattataagaaaatattacagcaaaacattttatgattttgacaatatttatttccataagcataaataatcactatttagcaaaatcaagtttaaaataaataaataattcaattaataatttaattgttcaccttaaatgtcaacattttacattccttcaattctcttttacggatttatttggcattttgccaatattttgctttgttcggcaccaaatccaatgaacaattttgcaattaataaaggttatgaaaatgtgatttttataaattaaatttctaatttaaaggctcaccattttttggccaatcgccaaaatttcactttcaattaaaatcggaggaacaaaaaaatcattcaaaaacgatg

SEQ ID NO: 116201 - DNA, 319 bp, Heterodera glycines
ttgatcgttgttgatgatcaggaaattttgaagaaggaaaaaaaaaattaattgtataaattgcaagtataagaattaaaattaaaaagtcaaattattaatttccttgaatatataaaaattaaataaaagagaaataaaattttttattataattggaaaacaacattatacataaacaagatggataaattttataaaaaaataacaattttaaataggaaaataagaattgataaaaaatcaaaaattaaaatgaattttaatttttcatttatctgagtcagaaaaccctttaaccccgcttatttaaattatg

SEQ ID NO: 116202 - DNA, 475 bp, Heterodera glycines
cgtggggctgcgctaattggcaagggaagtgccacgaattacaaaaaattcgcgggactcagctctgggaccaaaggaagcgctacggattacagaaaatccgaagggcaaccttccgggttcaaatcctaccgtcccctgtttttcccttttttgccctgcccaaatctcaaaatttcctcttcccccaatttactcactaatcccaaatgctcctgtgcgcaatgtctgttcggccgctttttgtccacgcacggtccgttgaagtgccagggtcgccacttgacgcagatgggggaggggtctgcgccgatttgtccgtttttcgctgccgccaattgcccaaatttgccgcccaagaaattgcaccaaaatattccacaagtttatggctcaaacttgggtaattaaacccatacataagaaatgtgtgagaaatacaatggggggaaattgtgacaatggggacaaaatg

SEQ ID NO: 116203 - DNA, 607 bp, Heterodera glycines
tcactacatagggagactacttcaattatcgattgattggcttcgcagctttttttctctagctttttttttctcttgcctatatgtagtctctaaccgcaattaatttttatttatttttgaaatattttttaaatatttaaatattttgattatttttatttattttttaaatttaaattttattaaattaaaagaaaaattcaaaaacggtggaatcgaacctttggttcggccgaagccttaaccactcggccatgtagcactggggaaaaaggaagttaaatttgtttatgtttgttacccgataaacggtgagaattgaatgaaaggaaatagtatgtctttcatagaaaaaaaggatggaaaagcggccattatttttgtaacattctttattttcagcaaataaatttttatttttaaataattttattcgcaactaaaaaaatgttttttgttcgatggaggcggagtgtctccctgtccaaacaattttcttctgctgctaaagcattcgcacatttcacttttaaaattgcaggtgttaacccaataaatttcatttcttattcaatttaagtttttattttttatagaaaaaatg

SEQ ID NO: 116204 - DNA, 144 bp, Heterodera glycines
aagacttcaaattaataatcaaaaattctcttaaaatttttttgaacccaattcaaaaaaggaaaaaaatttgcagtcaaaaaattattcgaatttctccaattttgtttccataatttccgaaagttattcggtatcataatg

SEQ ID NO: 116205 - DNA, 73 bp, Heterodera glycines
ggtaaattatccattaactaaaatttggtcgtcaatcatttaatgtttcaacgtttaagccattacatctatg

SEQ ID NO: 116206 - DNA, 91 bp, Heterodera glycines
ttgagcgatacagattttcaccaaaaaatgaactattttgtgatttagagcaaattttcttatagaaaattacagaattaaaatcccgatg

SEQ ID NO: 116207 - DNA, 361 bp, Heterodera glycines
ggttttttggactaaacaccgggactgggatcgctccccggtccattttccaagtcccgccaattaggaccgcgactgagtttacgctattaatctcgggcttgagaatggtgataaaaagaaaatagctcgggtttgattcctcttccggaaattatttcttcttttttttgtatgacaaataaaattctaatctttattaaataaagtgcatgcaaatgctgtctgtgcgtacaattataaagtaaaccgaaattttcaaaaaaaaaaaatcaacagtttaaacaaataataatctcgactgaatgtgtttgttcccctgacattttgattattgaaagactgaaaattttctaacatg

SEQ ID NO: 116208 - DNA, 247 bp, Heterodera glycines
caacagaatcaaagtgcactaggccatcaaatacctcgactggtactcccacatcaacaatgtcaacatccaaactgctcactcccggtacggcgaatatgtgtttaagcgtgaagggcaggtataccaagtggacggctacatcaaaggggaaaatgggaggcgggacaaaataatcgaggtgaatggttgtctgtggcacgggtgcgaggagtgttttgaggacttggacgacgaaacgaaaatg

SEQ ID NO: 116209 - DNA, 173 bp, Heterodera glycines
ttttgacaaaaattggtaaaatgattctgggtttttggcaggcaaaatgttttggcttttagtgggcgtgtctaaaaccgtgactcttttcaaatggtgtaggcgtggccacacttttgcgcatataaaagtaaaatttttcaacctcattccaatttcattctcctgccatg

SEQ ID NO: 116210 - DNA, 803 bp, Heterodera glycines
aattttaaattttcgcataaacaacaaaactttggccatgattaaacccgattaaatgagaaaaaaccggaattttttgggataaatattaatttgtaaaatattgataaaagtcaattttcgaattattctatcctttctctattagtctcctattatattttttaaattattcgacaaaaatattgaatttttttttaaattaattttttcttcctttttttaaaccacactctcttagtaggggaaaacggggagcaaaaattgtttccttctaatggatgatgatgatgatgatgaaagtggcaaatatttaattgatccttttcattaggatttggtgcaaaataaaaattgaaaatattcattatttatttatttttttatttatttatttttgcaatatttaaacagttggaaaatttagcaaaaattttaaccccaaagggacggatctcacaataaagaattcttttaacgaaaatgttcacagttttcctctaccaatataaggaaaaattaaaataaaaatgaaaaataatcgctttttaatagtcccggagccctaggatttatttctaatttttaaaaataaaatcgtcccattcataaaatacaaaagtggaaattctaaaatgggaagggtaatcttggcacaaaattcaatgctttttaatttctcatcgaatttaaataaaatgaactgaagacatgtaaactattagcctccaagataaatttttgagttaattttaatattttaaaataatttttcaattttttcatagtccgcggtgaaaatg

SEQ ID NO: 116211 - DNA, 1003 bp, Heterodera glycines
taacccaagagaagacacgaccaaaattaagcggaattctgttgtcatagactgacgggatatttattcgaaaacttttcgttgttttttcctaatttttcatcaaattccctcaaattgcaccaaattgacttttctaatcagatgatgcccccaccccctgctggaaattccatctgatcatgccattccattggccattcattcattccttggccaatcacttctcggcttattcccccacccctttcacagatgaccgacgattggtgcgccggagaagcggtgacgattgcctttccgtccgatcagcagctccaaaattgtgtccttcggagggcacggctgagcttcttccagcgccaatggcaacgcatggagcaaaatcatttcgactttttgcgcagttttattcttttggttttccccgagggcgaattgccggcgggcgcaaagcgaaggctgacaaatttagtgggcccaaaattattcgacactttgtgggcccattccgcaaatctgctcagggacaaacaaagtcagtaatttaaagaccaaaaaatataaataaatttaaaaaatcaaatttaaattaaatctttgcctttttacttttaaattatcaccaaactttcaaaataatgagataaaaactccaatatttatttttcagttcattttaaaattgggaagaaaaaccacaaatttaaactgctaattgtttagtcgaatacatttcgaattaaaaaattattttccaaaaattcacacgcagaagaataattaataagtgaaaattttatgtgtgaaataaggttcggctttaacatttgtaagaaataacggaagaattaattttattaaaataaatatttttaatttttgatatttttacattttgtcagtgtttgacaatgacatcagtctgatgagtcattatttggtcgttctgtgcccatcgccgggtgctcacactttcgccgatcaattggcccacaaaatg

SEQ ID NO: 116212 - DNA, 201 bp, Heterodera glycines
ccaatttttcaattaattaattagctaattaccatgcaattacggcatagtgaagttaattaaacaataattagacggaaaaacgatagcccaaattagcaaaaaaaaaaaatccaagctttacggtcaacttactgtacctatatgtattctaagttaatttgacgaaaatcccattataaggacaatcggcgatttatg

SEQ ID NO: 116213 - DNA, 1003 bp, Heterodera glycines
cgtaatgaaaatgtcaaaaaatgatgcggaaggctgtactaattgcttattaagaaaaaggcttttttaaatatgaaaagtcaatcaaccagaatcattagaggcaagaaaagtgtaaaaaagaataacatctgtctttgacaacgcgttagatttgattctaataaatatggatagttgaaaaacaaaatattaaagataaaaataaattttatggctaaatttttgaaaaaatttccatttcaatgggttgtatttttttttaatttttcgaccaactcttctgagttatttaggttatttattagtttttggcgtaaatgaaaaattttcattaaatcaaaaaatataactgctgtcgaagataacaaaaataatggtaattagaaaaagtttatgatgacatttagttctcaattaattaattggagcctttcttagattgttcaaatattggatatccaaaaaggattttttattacttacttctgcaaaagttaatcaaccatattcattagaagcaagcaatttgtaagaataacacctgtcggtgacaagcaaaacaaatattttaatgataaataacaccacccaagcagatggtttgcgtcaaataagtaattagttttctaattagggaaaactcctttaaagttagttccttgtaaaaaatacacgaaaaacaatttaagtaaaattgttttcctcatccaatgttaaaaagtaacggttaaatgtccataatttacaaataaagaggtataaaacacgaacaaaagtaacataaattagataaaataggaaaaaagagataatcgtcgataaatgcaatctatcccgatgactaaaaactgatcactaatataaaacaagaaatatacaatcagcgaaatatccttgtgattgtgccgaccatttacatgatctttttcttgtcgcgcaacgtcactcattttcattcatgattggcattcatgttcccctcgtgtacggtctcagcatg

SEQ ID NO: 116214 - DNA, 55 bp, Heterodera glycines
tcctgcgccttcgccacggaccgcaacacatcgctggccaacatcaagcgcaatg

SEQ ID NO: 116215 - DNA, 698 bp, Heterodera glycines
ttgcctttgaagcaccttttgctgatgaaaatgacaatggtgcaaattatggtgggatgaaactgcagaagaagtgtcacatttttgtgcggggacgggtataaattaataattttaaataatgaatttcattcacattttaaaatatattttataataattttagtccatttattattttgggtgcactaagtcctcccaccacccgtaaaatattaaaaaattttcaacaaataaattttttataagaaaattagaaggaaaaaaaattatgaaaaatttaagcatttttgggaaaattttttgaaaaacattaaattttgaaaaatcactagatttttcaaaaattttcttataaaaattttacctatgtttttttttttgaaaaattttctaacttcgagattaaaaaaattcaggttggtgggggataacaaactgatcccatttattttaattgtatatatattttttatatcaataaaataaatgttgacactttctgatccaaaaagtcaaacaaaaaaagataaaacaaaatttgtttggcattttttggttacaaaatttgtttggcattttttggttacaaaaatttgtttggcattttttggttacaaaaatttgtttggcattttttggttacaaaaatttgtttggcatttttttagcacaagccgaacagcatgctgccgatg

SEQ ID NO: 116216 - DNA, 471 bp, Heterodera glycines
  unsure (1)..(471): unsure at all n locations
ctgccaaattataaattttaaatcatttcaatattntgctcatacacactaaactacaaaaaatggatttgaaccttataaaatgccaaatttttatcaacttctagcttcagaattgcaaacaaaagacatatcaagattatttagtaataatctcattctttgccagcgaaaatttacgaaagcgaacaaaatacttaaaaaattcccaaattccgaaattcttttaatttaaaaaaaattacataaaattaaatgcatgccaaatatggttgaaatttaatatgaggatttttatgagtataaattttataaaaacttttcaatgaactttttgtttgattccaaaattttgcgggattattttcaaaaataaataatatatatattttatcatttttcaaatctcactttgatttcttcactaccctcatttatgattcaaatttttgtttagacactttccgaatg

SEQ ID NO: 116217 - DNA, 834 bp, Heterodera glycines
tattgcccaggaagagcaacagtccaaagtgcttggcaaattgatcccgacggcaaccgcttcaaaatggggcgagtgacagcaccccataatcatccacctatttttggccaacacaatgtattaaatatttaatttgtaatcgaaattatcctatagttagccgggatggaatttctatgtcaaacaatacactaaatgatatttaaaagcgaaaagacccaaaactaacaaagtgtttgtcttcagcgtataagccaaaaagtttttgggattgcctaaatagcccatccctgctgatcagataagggaggcgaatgaacgagttcgtgaagaagcgcgcagcgactttcctacgactagccgtaacattgtacgtgatgttcgatcagaaatgcaagtcgatgtccgaataaacgcaccgagtcccagcaacatgcgcagaaactacaacaacgccaagaaaaaacaccaagaagaagtttttgaatcacaaaatcttttcttagtcgatttaggcaggagatgttggtctcgatgcacagcccactgcccaaattgtcatcccggctgcattgcaaaatcgtgttattttaaaccagcccattgaaaataacagaatgattgtgtttgcgtctgcctttggccttgattcgcttaggcagttcaatgctgaagttgcaattgacggcacttttgatgtgagcttaagagattaaaatgtgatatgatttaaggcggggaattgtgttttggtgaatgttttatgagtatattttgtgttaattatttttaaagacagcgccaaggggatttgctcaattgtacacaatg

SEQ ID NO: 116218 - DNA, 1003 bp, Heterodera glycines
ttatgtttttagttttaaatttataaattatttatttattttatctatttttattttgatattttgctttatttttaagtcattttatgaagtttttcggatccaagttggaatgaatgaccaatttgtccaaattcgtcttttcaggcatcttggacatgtcgtagtgagtaaggttgttgatcggtctgcagcaacacctttgctttggtgaatgctttttcaatttgtatttaaatattttggcatttttgataaatataacagtcaagacaaggcattcctattcctcccaagggaaatttgagaagaacttattcgtttgccaaattaaggactaaattgcaggctctatacacaaattactgaaaaatttgaatgaaatttttttgtagggaaccgcccactttgacgcaagccattttggctcaaaacgctatattatttttatttatcatccaaattaaataatctttggtatgattttgaatggcttcatggtgcttattagcctggaatgttttaaaaaacttagctgagacataaaaaagttgtggccaaaaaggtgctgcaacatttgcgcccctacatttgagccccgaacatttgcgccccaaacatttgcgccccgaacatttgcgcccctacattaattccttttgttgtcagacgaaatgaaattgcgtggagagtcgtagcccatgctggtgtctcatctgatttcgtttgtactcatcttcatcttcgattcgactaataaacttttaattgtttttctgtttaggttttatcttaaattaccttgccaaaggtggattttgatgaagctggattagaaacataacctacgatggaaagtaatcaaagattgaatgcgcttgtatatgtgcattatttctgagttacgattgaggtcgtgagatgtaaactttaggatcattgttttgatgtctctgccagagactatacaccggatttttttttggaaaaatcacacattatg

SEQ ID NO: 116219 - DNA, 223 bp, Heterodera glycines
ttacttttgtatgttttttaatttactttataaatttaatattttaaaacaatttattgtttttttttttgtaatttatatttcaaatttttatagatatttgaggtgttgtataagttttgttatttaaaaattcttaacaattcaagtaataaagcaaatttacgaataattgcttaggaccaatgtcatggaaattcgtacaataggcagtcgtactatg

SEQ ID NO: 116220 - DNA, 52 bp, Heterodera glycines
ggatgtagtgttggtcgaggagaatgacactcctcgatccgtctggacaatg

SEQ ID NO: 116221 - DNA, 1003 bp, Heterodera glycines
aaccgggaaaaacccgggaatttcccggtaccggtcaaaatttgtcaaaaccgggactgggtactcagttgtacccgttttttcagtaccagtcccggtctcgctcaactctaatttacataaagaaatttttaaacaatttaaaatattttcacttgaaaaataggtaattcaaagtaaaaattttttaaaaatcaattttttccttaaaatttttttcccgtttcccggcgggattcccgttaattgacggggtttgggtgccgttgacgtcatacgggaacagttcggcatgggcgaggaatgcgatggcgagcagtgtggtgcctagaaagtcgctcagcgcggtcagcaatggaattgtttcacgttcaggtcccagcgaaggcgccacaagttcggggtagctgatcactccatttcgacctatttcaaatccctgacacgaattcgaacaaaagtcgaaattcttactcttgtccctaaatgaccaaaaaatgggtcattgaaaagatgcatttacatagtcttataaaattagatgcaacaaaaataaatgttttttaacgaacagatttaaagcaacgagaataaataaattaattaatggattttttcaatttgacaaatcggtcatcgcgagaaggaatgggcaacgagctaatggtttaaatttgaatttcacaattattttttgaataatatttttataaatttaagttttttaactaatttttatagaaactcacatcccattttacttaatagttatttgtggaaaatatcagtcctaacctatggctcggtgatttttgttgagctatgggagttaagaattgaattcgataaattcgggttcatataaggtattgtaccggaacaccaacacaattatagggcaaaattgctattgttaatgtaaaatttcttaaagtaaaactccgtatcctttttatactctccatgagaaataacgattaaaaaacgaataggtgaaaaaatg

SEQ ID NO: 116222 - DNA, 325 bp, Heterodera glycines
cggaggaaggaaaagcggaggaaaaaggaagccaaaagcacgccggaggaaggaaaaagcggaggaaaagggaaagccaaagggacgacggaggaaggaaaagcggaggaaaaaggaagggccaaacagcgaagaatcggctgaagaaagtgtgatggaagaaagtacaacaataaggacgacaatggaggaagaaaaactattgggggaggaggaacagagcaattcaaagcggacaacgaccaaaagagcgacagcgaaaggggcaaatttgaaacggaaagtgcccccggggctaaagcataacagacgaagggtcacaatg

SEQ ID NO: 116223 - DNA, 75 bp, Heterodera glycines
tggccaagacgtccagctaaatgcaatgcaaatgtttttgcgtttataccgcaaaaaagtgggataaaggacatg

SEQ ID NO: 116224 - DNA, 478 bp, Heterodera glycines
aatggttttgttcgcgcagagaatacgccgaaattccgttggcacaaaaccaagcgaatatttcacgggcaattgacacataaaaagcgattgaagaattaaaaggtgtggccttcgaacggagaacattttgttggaaagggcaaatcttttgcttctctttctgttgccgaaaggcgtcactgatccgaatttgtatttgcccttaaacgggtgattttcccaaattgggcgagtgaatgtgcgcataattatgtctgtcatttcttcgttattcttttttcctcaattataaattttggtgctcgtttcccatttccttttgcctattattaacagtttgatccgttttgcatttgtattttcttctttctcttttttccgtttccccttttacttttaattgctttgccaattagcgcggttaatgaactcaattggttgcccttcctcctccaatggtccttcctccgctatg

SEQ ID NO: 116225 - DNA, 627 bp, Heterodera glycines
atatttgatttttggcgtttaaatttattttaattatattgtcccttcataattttgtctctttgtctgtgattgtactctctcgcctatcgatatttgccactcccttcccagcagaatatgttcccccatcttgccttcagttcattctgttggcagtgcactttcatatttgtattttgttcttattttcctccgactcttctcccattttattgttgcggttttaaataaagtgatttgtctccgtcttggaaatatttgtggaggagaagcagtgtattagcccgacccgaaaagcattatttagcacgtggcgctcctggcgaagagttagctgtgccggcattgtgggatttttgactgctgagtagaagccgattcgagaagcgtccagaacaaacgcattgttgcggttctgcaattttcttcgttgcggacagaacatacgcattgctgcggttctgatatttaacgcattgttgcgattcgtcaattttggtaccactgttaacgcattgctgcgataagtgaggattggcgccgacgtatttaacgcattgttgcgaatttgtggactggaacgccgaattttgtgagtcttggattgccactgcggaagaaatg

SEQ ID NO: 116226 - DNA, 166 bp, Heterodera glycines
ctgactgtgacgaaatcacattgggatgacaataaattgattttatacttttaaaaatctaataattcatttcgagcgattttattagtgaataagcaaaattaaacacatcattttgaaaaagcaaaattaaacatacaatttagaaaaattcctaatagttatg

SEQ ID NO: 116227 - DNA, 152 bp, Heterodera glycines
cattttttaggctgcccaagagttgcgttccatcaaagacccattgaagacgaagacacgcactcgcgacttgctgttttctatgggcgttagcaaagcgagggtactttttctttttaaagttctttaatttactattgttcagatcgatg

SEQ ID NO: 116228 - DNA, 408 bp, Heterodera glycines
aattttgtttttcttaattgattgaattttcaaaaaattttctcaagctctgctttttctgttgtttttgttcattctccattcttttttttaaatttccgccaaatccgcatttattcttactgtaatagaaaaagaaagaaggacaaaacagccaattgggaattgacagcagactctgtgacgcggcggtctacgctcgcttctttctccaaaaagcattcattttatttttgttgaaaggaaagccgttaacacgagatgatgagaagagaagggggtctccataatttttttttattgcaaatggcaatcgattcacttaaaagtttatcgaaaaagaaacccaaactgtttttcttattcattttagaagaatttctcaaccatcataggaccgaatagatg

SEQ ID NO: 116229 - DNA, 75 bp, Heterodera glycines
aataattacatttagactaatttacataattttcttttgattgaagccgcatttgtcgcaacaaatattaatatg

SEQ ID NO: 116230 - DNA, 136 bp, Heterodera glycines
ttcttaaatatatataattaatttatttatagaaatcggctgttattcgatgagtgtggaaatgggcaatttttctcatttttgggcacctctaggcaattttgcagaaattgattgtgtgcaaggcgcaaaaatg

SEQ ID NO: 116231 - DNA, 328 bp, Heterodera glycines
attggcccggaaacgcaacggtgcactcgccaatttggtggagagggcgcagaaagcgcgggacgcggatttgccctccttttttgacgacctttacgacctcggggcggcgggggacactccgtcacagaggtcgttggccttagattgaactcttattttgtccatttgatttcttaatgccaatgaatgctttttacctttagttcgtccggctcagacgaccaatttaaccaaattgtcggttcatcggacagttgcgaaaatcagacgaaaatcgctgaaggcggagggaagaaaaaaccgcgcagagtccgcacttaccatg

SEQ ID NO: 116232 - DNA, 204 bp, Heterodera glycines
  unsure (1)..(204): unsure at all n locations
ccaaacntcatcggagcaacttcagccagtcggcatttaactcaaccaattgtttgtcatccctactgattagcttttagctttcagtagaagttatagcgctgctaataatttgtctaggcgacatttattagctcatccacgcgcacccactcaatttgtatctaggcgctgcaaataaaagagtggagaacgacaaaaatg

SEQ ID NO: 116233 - DNA, 85 bp, Heterodera glycines
agtagacaaaagaaagcccaatgttacgtaaatcattctctttttttttgcttctcagctccaaaaccatttcgccaagcatatg

SEQ ID NO: 116234 - DNA, 433 bp, Heterodera glycines
tcaaccgccggtggtcgtcgctgtttttcgtcgccgtccttgtcctcatcataccacgctagggcgaactttacgacttgtaagcattttggagaattggcgtattttttggtcactattctttccttcctacccttatcgtttccaccgaaatttttcatgaaaaaatttcaaattgaaattttatagaaaacatgaaaaaaaattttttttttttttttgcgattttttggaaattttttttttttttgtaaaactaaataattttcatcacaaacactatttttttcttaaaaatttcgagtatggaggaggggctcttctgggtgggagcggtgactatgcaaaaaacaaaacaaaaaaaacggtcaaaaggaaaaaaaatttttttaaattttatttgtcccattttcagcctcaacctttgcaaatg

SEQ ID NO: 116235 - DNA, 571 bp, Heterodera glycines
ggtaaaagtcaaagcaattaaaaaataattttttaggaaaagagttctcccggaagcatacaaactcgtcaaggcaaaaatactcaaggatttagatgattgcgaattttcaaaatttgattttattgacgcgattacatttttgattttcaactcaataaatttgcttaaaaattatcccccccccccccagtagtattgggataaaaatctggccccccctgggcagagagatgcgcattcactataggagagtggagagaattagagaaaaagagtaaaaaaatatgcgcgagaaaacagagataagtgattaaattgtaaagggacccccggtcactactttgaatgctaaaatcctcgtccacagcgcagtgcgctaccgttttgtgttcccccaaattaagcgatcgatatcaacggaaattatcgatttgttaaaaatttgaatgcacacataattatgaatagggctccaatttttaggctctaaaaaccccaaaaataggctctaaaaatggaaaataggcactaaaaaccctcatttttaggggtgtaaaatgacaaaatg

SEQ ID NO: 116236 - DNA, 532 bp, Heterodera glycines
attctcactgatcttgaccaattgaatttaatctgttcctatggactgttccccgatgcaattggcgatgatgggccaaatgcaactgctggccaaattctctccaaatggttacacacgccgagcaaaaatggccaaccgaagcgattggtttgtgcgaattttgacgaagaagtcaacttagattgggtcaacagttttaaggaggtgcgtttgttcacattctcataaaattttggtatactaccgctgaccattcaattttttgaaaaaattttgaaaatttttaatcggatgggtcaacaatttgaaggagttgacctgctggttgctgccatattttcgttaaatgaccgactgatgattgattgcatttgattttcgcttcctttttatttagacatttctcggtgccaccaccacttcggtcagctacaaaattccaatttatttgcattcggaaacatcgccaattgagccatttgaatcggtgaacgagcgaaccaaagaaaagctgacattagaggaaatg

SEQ ID NO: 116237 - DNA, 456 bp, Heterodera glycines
aatattaaacaattaatataatttattttgaaaatgtcatttctaaatttaatctgaatttacgaagaatttatttataattataattttaattataatttaaatcaattttaatgtaaggaaacgacatcatttcccgtaagtccaataattatttatttttaattaccctttaattacatataaattatttttatatagcaaattatacggtgccaagaagtcgtcgacttcaaccaaatcaattttttgctgaaaattgaagaaaatttttcaagaattcggagctcacccacccaattgtcaaatgcttacatcaaccaattcacttcactggaacacttaatcaattgcagtgaaaatttgttggcaaaggcacacaaattttcggtgaataaaaattaaaattttcaaaaaataaattattaaatttaagacacttccaccgttgccatg

SEQ ID NO: 116238 - DNA, 207 bp, Heterodera glycines
ttttcagccaaaaaaaaactcaatacaatgatattctgaatttgttttttgatatttgtccttttttgttaaaaatagcaaaaattaaatttttttaatgaattgttttacaatttgcgctttattagtatctaattaaccactaattaggtgccatttcctcctaaaacattgttcccattctctaatttgcgaccatttaaaatg

SEQ ID NO: 116239 - DNA, 344 bp, Heterodera glycines
atgcttctcgggttggtcgagaatccgtccatttttgctattgaagcgatttcattagtttggcatttattccccacaaatcaatcatttgctttcggtccgattcggcatttttgtcccaaaaagatttgggatttggtcaaatccaatatttgtttcaatttcaaataccttttccgaccaatcaaattggcaatattaaatcgggtcatttttcatcaatttgaattggcatttggcatttagttcatggctattgcggaggcaacacgccggattggatgtgggccaacagcacggagcatccgttgaaaaactaccagaaaaataacaaccagaaaatg

SEQ ID NO: 116240 - DNA, 1003 bp, Heterodera glycines
tttgaaagtccaattctgggtttatgtttatgtataaaaatccatccctaataattattaacttttaattttcaatttaggtgcttgcttcggagcgtctacgagaagtactcgtcgatgaggcatccaatcaatcggcttgccgaaattatttccattgacaccatgaaaatcgtaaagatttttttacattatcaattgaaaaatgctactttgaattatccacatgggttcagggggcttcggtatgaaatttatgagtggttgaatatccaacaagggaacatttcaaactgtaaccacctagatcacttagaaaaatcgataaaaataacaaatttttaaaaattcataaaaacttctaaaataatgatagagcaattaaattaatttaaaatgataagcaaacaattctctatgaaatagcatcataaaataaatttaaataactgcataaaaatatgctagttggaataacactttttaaaaaatttaaaataattcagcatctgtcgagcggatccgaacccacgactgtgggcaataacatgaagagaaaaaaaaatccattttttgctgtaattttcatttaatgaattttttctgatcatttttggcgccggcgccaaaaaagccgaaaaaatcttaagaaaaatagtttcaatttttgccaaatgagcatgtttgcattggcaaaaaattcctaatttgtaaggttttaatcggtaaaaaaaaagaaaaacaaattgacttgggttacttttttctgctcggttcgagtccgtttttatgcaattttattttctatttaaaattgtgtcttttattatcttcccattaaaatctttgacattttttatctcggtacacatgcttatttggcaaatattttaagtccttttcttaagaatccttggtgctctacccacccataaaatttcataccgaaacccaacgggcacctgaggatcctcctttataagctattccttacttttgcatg

SEQ ID NO: 116241 - DNA, 161 bp, Heterodera glycines
ttttttactttgaaaatcaaattttaaatttggaaggtatgaagcaaaagtttattttatttcaatttattgcttttgattgagcttgcctacaattggactcgccacaaaataaatgatgcctttgtacggaatggtcgaccattttcccaacacttatg

SEQ ID NO: 116242 - DNA, 1003 bp, Heterodera glycines
aagtcatacaaaatttatcaccacgtttatagctgttcttttgaattcaaaaagagattttcttgaccctttggataaaacaaattttatttaacaaaattttttgttcacttttcattttttgttgaacaaattttacctttctctcaaattattttttctcacattctgagacaacaaataaatgttaaaaaatgaagaaaaatagattttacacagaataaaaaattataaaaacatataatgttgagaagataaactctttttctttacaatatgaaaattaaaaaagaaaaaagcttacaacaccttcgattcccaggacgtctccgttccaagtactaagaaggcccaacgttgcttaacttgccagatcggacgggatggcgtgttttcaacgtggtatggtcgtaagcgaaagcgctccatttgaaagcaactaaatagtcaattttataatgcattttttctcttttaacttaatcattaatcaaaacaaggatatttaaagaatttggaatacacttaaataaggtaaaataaaagaaaaattcaatagtttttatcaaaattaaagtgcaaaaattcggaatttgaattctttttttaactaatttcccaactgcaaatcggctgaaattgaaaatgagttatataaatttgcatttcatcaaaaattctctttaaaaagcacttataaatccttttcctaggaataatttaattttttaattagaaaaaacattgaaaatcaaaatttcttatgaaaattggttaggtggtgattttaagaaagtaatacacccatcatttatagtggttaaagtcatcttttaaaaaatctaaaaaaccatttcggcacaaaatgccaaaaaaggcaaaatggggatacaaaagtcatacaaaatttatcaccacgtttatagctgttcttttgaattcaaaaagagattttcttgaccttttggatctaattcatcagattgtggtcttttttcagatg

SEQ ID NO: 116243 - DNA, 292 bp, Heterodera glycines
ggtctcgataaatttaaaaattctgaaatattaaaaattaaatttgtgaaattatgatgtttttctctaggcgcaagagtcaacattaagccaaatgtgggccttctcacttgttcatccggtgcttcaaaacggaagtggccgcccgaaatttgtttaccaactcgatactttttacccaaaacggtaatttttaaattgttttatcattcctttttataattaccataaattaattaaaatgttttcaaaaaatgataaatttaaaaaaaggaatgaggcggtcaaaatg

SEQ ID NO: 116244 - DNA, 190 bp, Heterodera glycines
ccatatggggaaaacagcccattccacgttccgtctaggcagagaagtctcgctagacaagcttccaagcattccgcttgaaagcttctttgcccgacggatacgtgaggcccaactcatcatcattgatgagatcaccatgctgcacaacacggtgatagaggtcatcgaccgagtgtgcaaagaaatg

SEQ ID NO: 116245 - DNA, 68 bp, Heterodera glycines
tgtgggaaagcgagcttaatttaaaaaaatgatgatgctaattgattccttttttccagcaatgtatg

SEQ ID NO: 116246 - DNA, 512 bp, Heterodera glycines
taatatagatagaaatctattaattaataaggggttttattttctataattaaatttacatattcattcaacaactgtttggcatataccccacccccgcatatgccaaacagttgtttgtcatacgtcaaagcccccatttatgaataaaattatagaaaagatattatgtggtgccaacaaaatgtatggcatttgacacatatcattttcccctttttctctgccataatcttcatttaacatactgtctattctacattgtcttcgtatcttttccgctatcctttatacaaatactattttcatacctaccccatattctcatatgactttccatattagaacagattgtgaatatgaaaaaattattattatttattgttaggggaatagtgactgagaacccattactaatgaaattttcatttttccattatttatcaaaaagtagcctcgggttcccagtcaatttttttgtataaagattaaaaaattttttatagaaaatg

SEQ ID NO: 116247 - DNA, 1003 bp, Heterodera glycines
tggctaaaaaattgtaaatttaattttacctttaatttatattataataaataatttaataatttcaccaaataaatctcgagtagtttagtaaattagcgtatgctaataaaggcttatcaaaatatagccatacgaaagaatacgaccaaattttcataaatacattttatacaaatccagattttctcaaaatttttttacagaatatcgaaaaaccgattctctgatgccaatttaaaccgttcaatgcatcaatttattaaaaaaaaaatttcattcacctatttcttaatatttttaagaatttttgtttattacaaattaattttcatttttttttatttttttctaattttattaatggatggctaatgtaaaaaatggtaatttattcatttttttctcttttcacaacggtccgtccgatcgaaaatttaaaaataatgatgaataagcagcagagcagtgaaaaaatttacccacttctgtgaccactgaacagcagcaggcaaactgctgatggtgctgctaatgatgatgatgatgattatgataatgagctaataggcattaaattgtaaacacaccaccaaacactctattcaatggggcaatagaaaaaataaaataaaaactattttctgaacatgacagtcattataaaattgaaattttttcgatttttagagttgattgggattagagacaaactgtaaaattaaatttctgatggctattttaaaggattaacgtacaaacttttctggacagaattttgagtacattccactaaaattagtatttgaaaaatgagaaaaatggatctgcttctcctgtaagatgctcctctccgttaattaattttcaattaatataatcactctgtgatcctaaaactctaggaattcctcaatcactcctatttttatttaatttattttttgtttcaaaaactattcgattttagaccaaaatttaatacaacaagtgacagacaatg

SEQ ID NO: 116248 - DNA, 995 bp, Heterodera glycines
atcaaatttttaaaattgtgataataattgttaattccataatcaataaattgtgattagcatttaacctgtgataaaacaattctgttaattccttttttgagtaataaaaggttcatttcatttattattttaaattacggtatttaacaaaatttcaaactgtgtcctaaaaatataatcgatttaaattcaattgacttgtcaaatcaacccgatcagttaaatcagatcgagaatattgaaatattaccggaatttgaggaaccaataattatagagaacgaaaatcagaatatcgaaatatttgaacctaacgaaattgaacaaataacaaatcaagacgatttaatttttggaaatttctacggggctttaatcactgaaccattgtcaaattattttaccattaatcaagactatattaccaaagtcaaaaaatttaaatttaatccttctaaatatatatttaaaattactattgctctcactgtgcatgtacacaaaaatttgtcacaccgtaatatagaaattttctgtcaaacaatttctgaagaagtaacaaatagtatactatcagactttttacacacaacagaacaaaccataattgactcaatcaaaacggaccaaagaaaaatcaaattaacaaaatttctcaagagaatagaaaatcgaatatctaagcagattaaaaaacagtggggtccatattgctatcatccaattcttgtactttcaactcataagtatattttttaaatatgtcgggtcaactcagagcaaaaataccgttacttaaccgagtgttaataaaagaaatacagaaaattaagtcaaaaatagaagatgggaatttcgagtatgataaaaataattttgatgactgttctcgaatttttaataaaactaaagaaatcattcaaagaattgaaccaaattttgaaaaattaaaaattttgcaccaaaaatggcaaaatttaataaggcaaatg

SEQ ID NO: 116249 - DNA, 388 bp, Heterodera glycines
tttttgcttggtagttggatggatgagcaaattcaaatgagcaaaagaagaaaagtgaggaatagaatgaccgtgggcgctatttatgctaagaaaaaatggcggctaaaatgtgcaggcacgcggagactcctttcgtgttgaaaaaaatccatttcaaaaagtgacgccgtcttactttctctctcacacactctctctcgtccatttttctctgctcccaccggggatttgcattgtctgtcaatgggatgggcgttccctccactttagcgacataaaagggctcactgtgccccattccccactttcattagaaagcaaacgaatcgattcaccagctctcttcaacaaaaccttcgcctctccacatttcgacgacaaaatg

SEQ ID NO: 116250 - DNA, 812 bp, Heterodera glycines
  unsure (1)..(812): unsure at all n locations
tcccgttttcgggtttgattctctaacgacgaatattggctaattaaaaagaccctctttaattccctccctcttttgctntttgccattccctcccttggtcagttgcacatcccaatttggatgcgtgtcttcggcagattgctctctctgttcaaccctttggccactttgcgtgcggctgggccttttggttaatttccacgtgaaaattagaaacaatcaaaaaactttaaaggcgctcggctggtgaaaaaattgcgttccgaccttgggattcgctatgctcaccaggacccggacgccatttacgaatacatttaccaatgcaatgcgatggaacccacgggtcagtgtgggcacaaacaaataggcttatatgtgacaaaatttaggcgaaattgcatttggaacaatgtccaagaattttgggtgggctaagcgaccgatgattaatcggtcggtttttgggttcactcaaacatttcccaattcaaaatgtttttagtttcggtgggataagtccatctgtgccggtcactttcatttggggtggaaaatcgtggatggtaaaccaatcgcgaataataaaatagttttgtcatcattgacatttgtttaggacccgggcccggcctatgaaattcaatacaggagacaagaggcctatgtggatgttcaggtgatttggacaatgccgatttgtaggttttattttatattttgccaagattgtcacccgtgccggccatcacgtctacgccgatgcgccagcggacttttgccgactgttggcccacgtttcggacatg

SEQ ID NO: 116251 - DNA, 228 bp, Heterodera glycines
  unsure (1)..(228): unsure at all n locations
tttgtcacttttatgagtcaacgttttcgctcgccgtttgcccaaatgtnccgttttcgttggccaaaaaaaaggcgcccttttccaatcgatcgaaggaacgcttttgaagcgctttaaaaatatacggagaggaaacgaaaggggcgtcgagctgaaaagtcggctaattcagtcaattagttgattaatgaggggcattggtcgttcatttcactcaccgaaatg

SEQ ID NO: 116252 - DNA, 198 bp, Heterodera glycines
tttttttttttttgtaaaactaaataaattttcatcacaaacactatttttccttaaaaatttcgagtatggaggaggggctcttctgggtgggagcggtgactatgcaaaaaacaaaacaaaaaaatcggtcaaaaggaaaaaaaaaattttttttaattttatttgtcccattttcagcctcaacctttgcaaatg

SEQ ID NO: 116253 - DNA, 1003 bp, Heterodera glycines
tttaaatgttattcttttactaataagattaaattttctcataaaagaataaaaaggaaaaatttatttttattttttaaagaaaaaagcattttcattatggataatttaaatagaataaaaaaaattaatttaataactgtaaaatgatgatctttaatgcaaaaaggcaatatgttaaatagctgaaaaaatctgtcacctatttttttcaattgcctaaaggctcgaatttttaaatttaaatttttgttaatttgtgcatactgcagctcagacagttataaatgaataataggcatattttgatattcattttggtgtcttcaaataaaaatttaaaaaatattccatttttaccaaatattttcttaaaagaggtttttgcagctttttcttttatgatccgatataattaattaggacgatcaaaaatataaatttcatccaaaagcagaaatattttacattaatttacaacaaaaaaacgcatatagaattcatatacattggataaatgtaaaaaatgcacagattaagtgaaaaactccatatttctctgcatacaaaataaaaagcgtctttttttggatttcaaagattgctgttgatcaaaatcacaacacctgctgttgtgttgttattttatcgaacatttaaaatgttacagtttaccgttgttgctatgcccatgacatgtgctacataaataagggacaaaaacgctatgattgtgataaaaaatttgcaattgcttatatgaaaacgttgattgtttgctaacaaaagtttgttttgtttatttttaatgagattcttatgtttagaatttgttatgctggtcagtccatatttttggagaacgttttaaagaacagtgaaaaataacggattttatttgattacagttttcaatattcatagtttactaattatataatatgtataacacaaacataaatttttgaattcataactctatactaaacatatttttataatg

SEQ ID NO: 116254 - DNA, 160 bp, Heterodera glycines
aagcatttagcttctacgttttcattttgcgtttttcgtccttctaaggatgtttgttttttcgattggtttctcattgtactttaaatatttctaacataattattattgtgccccctttgtgacgtccttcgtaattgtgctaatttccaacaaaatg

SEQ ID NO: 116255 - DNA, 230 bp, Heterodera glycines
cttatcacaccacttttttcggcgcgctttttccagaacttttggggaaaaaggtggtccggcggtgccgataggcgccgccgggggaaattttgaaaatttgagtgagatttgttaacagatttcaacaaaaatggcttctttttgggattattaggctcaatttgtacggattttcatttaaaaaatgataaaatatataccaattaaaaatatgaggcaccaccatg

SEQ ID NO: 116256 - DNA, 1003 bp, Heterodera glycines
ggttttgcttctgtgttagaattctcgggttcttttaatgtctatccgttttttttgaattattttctttccatttaaaaaaattgcattatccaattaattttcggtgttcaacagttgctgttcttttctcacacaatttgcccctttcccgaactaattaataagtaaatgagattgaaaaagtatttgtgattgattgggtgaatgagaccaattttcatcatttattgctgataaaatggttcgattactgcacaaacatttttttaaattgatttatttaaatatttttttggtcatttttatacatataaattatcaatagggtttgtaattatatggatataaaaacgcgaaatatggccataaaatatggacaaaaatcgcgaaatatggacataaatggcaaaaatatggacataaatttttccaattgagggtataatttcacaaaatttatttaattcaccaaatgtaaagtgaaactttcataaatgattaaatatggcattaataaatcattttagaaaaaaacacacgataaagctaaaatttactcattttaacgaaaaccatcccgaataacgaatttttcgcttttttgcttaaatttttgacataaattaaccattttttgagaaatttaaattttcaatattttcgtgaaaatcttactaaaaaattattttttggaaaattttctggtctttagggcgtcaaaaggctaatttagctgctggggccgttctaatagaggttttttggaaaattgccaaaatatggacaaatatggaaatatggacataaatcgcgaaatatggaaaaaatggataagaaatccaccctagaagcttctaatcaagctaaaaacatgtttttcgtgcgtttcagacctcccaaagtccagaaaaaaaggatttccatacaattctattccctaatttacaaataaaattttgtcaaaaatatatatttttttatatgtcagcgaaaaataatg

SEQ ID NO: 116257 - DNA, 255 bp, Heterodera glycines
tttgagttaatctttctctcagatttctccatgatggattaatacgcatgcgtattggttttgacatttattttttttttagttggtcgtggcaccaatttgttaattccccttattaacaagtacagatttagtaattaattagtgattaatttgtggttgacagctattagttggtgcagatttatcggtgattaaatgaaatgtgaatggatttgtgttggttatgtgtgaatagtgactggagtagaaatg

SEQ ID NO: 116258 - DNA, 751 bp, Heterodera glycines
gggagtaattgtaaatttttcaacctgttcgacttttctgatccttaaacttgcaaataacatttgaaaaatggatgaaaaaagagatttgtgggatttagtgttgctgatttatggaaaaaaacattggatctatttgttgttgtatgctattaaaatcatacgatatttttatttatgttgataaaaaattgaatgtaaatgttgacaaaatcattaaaatttttgtttttacgtcatttatctttaaaagtccatcttttaagagatatattttccaaaaaaatgtttttacggacatattcatgccaaatgttgacagttattgatcgctacattgaatattttatgaattagtcataatttaatgaaaatttatgcatttattttctccgcaaatatgtaatgtaatttccgtttttttgattaataaattttcgaaattaagaattgcccatccccccgaatgccgagtctgatttttaattataagtataaattttaaatataattttttccctatataaaaaaaattataaatttagaatattattattggttatttattctgatgaatttaatcattttgttatgttttttttcgctttataccgacggcattctcaactaaattatggacaaataatgaaaatgattcgctaattgactcctctaatcgttctgctgctgatgctaatttggacaatgttttgccaccggaaaaaggaaatcattttgtgccattccaatg

SEQ ID NO: 116259 - DNA, 325 bp, Heterodera glycines
ttagtattttaaatatttcgctttacttcattcactttaatttttattcaaattaaactctgacacagtaacttttattgtcataagaattgtgtacttctaaataaaaagatgatgaaatctgttacattatgaaaatataaaataaagttaataaaaaaaatattattaacaataattaattttaaaaatttatttttcgtaaaatatgattcttaaaaaaataaagataaaaaaatcataaatttttttgattttcgatgtattttaaggataattatttataagtatttaaaaattttagattactttatttaaaaaaatg

SEQ ID NO: 116260 - DNA, 559 bp, Heterodera glycines
tttttttgtttcatccaattttttggacaaaaagcctttcgcaggatttctagggtttttattgcatcaaaaaatagtgacaacgagtcggcccgaaaagcccccctgatactacgtagaaatgaaaaaaaaattggttctagtcggttttatgcgtcccatgtcatataccaagcgaaagacaaaagtctcgagattttataaatgcaagaaaagagcaaatactggcattaaaaaagaaattacaatgaaaaaaacgaaattcagcttttccgagcataatttttttgtctattgcatttagctaaaaataaagttatacaaaagcttctatagaccttaagcttttgtttaataccaagaatataggtattgaccaagtaagaaaaaagttatgcctaagaaactgggtatggtcattcatgggacgcataatctgtcatgtgacgcataaaaccgactagaaccttccattcatcggctttaataacttctgattgatcacataggttatgaattacggcccaaggaggtgcaccattggctgcgaaaaaacatg

SEQ ID NO: 116261 - DNA, 1003 bp, Heterodera glycines
ggaaggaagaaaacggcactttcttgcagccaaaaattagaaataattttttcggtacaattaccgaaaaaatatttatctaataaaataggaaaatgactaaatcaaattaataaattcaattcaacttttaaaaatttttcgccttcggcatcgccggactaaatattgaaattcttttgtttttcatcataatctcaaaatcaaaatttaaagggaagtcaatttcgagtcattattatgtgaaagttcaacgaataaatgagaatttgaaaaagatgttttttacatttttattatttattgcaataaaataatgctctgctttataaaattggtaatttgccaattaatatttaatacatttaattaatcaaataaataaaagaacacccaaatatagattaaaaatggtcgataacttagcatttaataaatgaatttaaattatatttttattttcataatattgatttaaaaatgattttaaaagtttaaatatttgtcgatttaaaaacaatttttatacttataaaatggaatatcgatggcttttcgtcgtcccccccccccccgaaatattgttgtacttttttttaatcataaaatgctggcctgtcatttttatgttatttttgactaatatacaattttattatttgtttgccaatcagtcatatcggagaaaaacatttatttcaccaatttttccactttttaagtatttttcttccatccagaatttttgttactaatgccattttctaaacttttatttgtcaatcagtcacattcgtcgaaacatttacgttgccattttcacgcatattaattatttcacaaattaatgtgttactaatggcatgggtgtgagagcaaaagccaaaacaggcctttaaaaggcgcacaaattgaagcgccaaatcattcattcattccgctcaaaagtgccatcgatttcctccccacaaaaagcatcaaattctcgattctcggaaaaatg

SEQ ID NO: 116262 - DNA, 1003 bp, Heterodera glycines
gcttaattaaataaggaaaaaagcaaaaaatgttataaaaacctccaaagattgttttttaaaattttttatatgttttaatcgatttttaagtgaaccagaaaaattttttggaaaaagtctcgagtctcgactcgagaaaagtctcgggttttttgggtctcggcctcggtatcgagtctcggggtctagtctcggaatcggtctcgagtctcggggtcaagtctcggtctcgagtctcgggaaatttttggtctcgagcatcactacaaaatcggtcatttttatcctccaaggcttattggtcacttcgccaatatggtaatgaaggtttgaatgcaattcacaatttttaaaaacaatcccaaagtcctaaattcagaaaatggccaaattccaaatcgcaactccattttgcttcttttctcacattttttcctcctttctttttttaaattgttatgaagtgtaattaatattttttaataggaaatgtaatgcctcggaataaaccaaaagggaaaagcacaaagaaagaaatttccttctttttaaattaattttgactctattattcttttgtttcgtattgcaatatgtaaatgctctttttatctgacattttgcgacgatctctcctaataggcatttgtaaaattggagtttatttgggtttagcttagcaattattttgttattaatttttcttaagaattagctaatgagttagttgtaattatagtacaaaaataataattcataattacattgtccgttttaaatgaaaaacattgtttgtgattaagtgtatactatttaagtgtaattgcttacatattcataaaatggctcagctcagtttcctttatcaaaaatataaataattctttttttctgttttttaatccatttttgtccgtttctccatcatttattaaagaacccaaacctcattaagccctaatttctgtctttttttttctttttttggattgagaaaatg

SEQ ID NO: 116263 - DNA, 73 bp, Heterodera glycines
ggtaaaaaaaaggaagaaagaaggcgaagtaaccgaaaaacgggttttgcaggagaaggagaagaagtacatg

SEQ ID NO: 116264 - DNA, 94 bp, Heterodera glycines; identical to SEQ ID NO: 97954

SEQ ID NO: 116265 - DNA, 563 bp, Heterodera glycines
caacacacacacaaaaaagaaagaaaaactaactaatttctaaaattcaacaagatgccaaaatatgaagtgtaaaattggcgcgacaatcatgttttatggaaaagagtatttattgttggcaccccctccaagatctacccacccaaaattaatttttccgaaagtttttcttatctattgtatttatttagcgacttccctggtgttgaaccctttggtcatatcatcaaattgctttttgaatttaaattaagctgctgtgacgaatttgtatgacaaaaaatttttgataattttttccccaaaattttgcgcaagtctccgtccccgaatataccataaagaattacaactatctctttggaaagacctaaccatgctattaaaatcaattaaggtcaatacccggttgttttacaaaaaaaatcttttaatttacaaagaaatcagtttaaataagattaatacgtgtccgttcctttcagttaaaggctaaaatcaaaaaaacgcacaatgcggctttggccaaagtgacgcgggcgcagcagcgacgagcgatg

SEQ ID NO: 116266 - DNA, 70 bp, Heterodera glycines
tgtaagaattaaacaatatcagtcattatacactagtattaatcgttgcgatgcttcaccccttacaatg

SEQ ID NO: 116267 - DNA, 968 bp, Heterodera glycines
accccttctttcccaaaagttttttgaaaaagcgctccgaaaaaaagtgatgtgaaaatcaaatctgaatttctattaatattcgatgatttagtccaaaaaatgatttttgaaataattgaagaaaatttgtttgaaaattttcattaatttaatttgctttattttgggttttattaaataaaaaaccaaataattttgtattattttcacttgaaataaattaaaatttgaattttttttaaaatttttaaaatttttttgaatttttaaaatttcccggttggtcccggttcccggtttttcttgcggtcccggtcccgaagaaaaatcgaggtcccggtcccggtcccggcttctcaggtcccggcaagtcccggtcccggttttggcaaaaattcccggtcccgtggcactctagtttcaagcgccatttgtacatttaatttgcttttcttacgtctgttactacaatttttgagaatattttatagtaatttttgttaattgttaattcttaattatgctaaattttgaatgaataaataattatgccgaattaactaacattgtcaaacaattaccaaaataatgtcacttttgcgcaaattattgccttttgacatttattaatgccgtttttacattaattagtgacattgagtgagttaattaattcgttttgtgccattggtaacatttttttttgccgcttttagagtccttattttaaggacgcccttatgcaaatcggatcagcaaaacaagggcttcggttttttgagtatttttatcaagagtggatttaacattagggcttggataaaaattttctttgtctttcttctaaaacttgaacatgacttttctttatataaggacgtccttgaaacaagaatttgtcatattgaacattgaatttaaaataattaattaattaaattatttttgactgcttcttgacaatg

SEQ ID NO: 116268 - DNA, 241 bp, Heterodera glycines
tttccctgtccttcagatggaatacggaactgatcgcttcgatgtatttggttttaagtcggaaacacgggacgagcgcatccaactaagggaaaagccaattttagtgacatgacagaaagcggatctcacgagaagagtcttatcaatgtgaaggtcaaaagggatttgttggccttgcgcgattccgagtttctgaaattcgtaaaatgcgagcagagcgagtttgacgagcgaaatg

SEQ ID NO: 116269 - DNA, 152 bp, Heterodera glycines
cattaattaaagtaattaattataccaatttaatttataaattgatgaacaaacaaatggcaaattaattaataattttaattttgggccaattttaaattttcttccaaaagaaaaacccacggcattcggcggccgtgggcccagcgatg

SEQ ID NO: 116270 - DNA, 357 bp, Heterodera glycines
  unsure (1)..(357): unsure at all n locations
aaactgatcttctgtaccnttttttgatcaaaaatttccttctattgaaagaattaatagaaaatttttgaaaaaaaatagaaaaaagtgtcttcttgcaataagccaacttttgggttttatttttcacaaagctttgggtaattatcaaagaccaaaaatacggagttttgaagccgaagttttgcctgtctctgaaaccaaaattaattattaaattaaaacaacaaaaaatgaaaattcataattcaagacaattaaatttgaaaaagaacctttttaattaaaaaagaatttttaaaacaaaaaaataaaaataaggaaaaaatattcagtaaaaaactcaaaaatcaaatg

SEQ ID NO: 116271 - DNA, 1003 bp, Heterodera glycines
tgataaatatgagctcaattacgaaattctatattcatgcattaaaatgattttttcgacttgacaaattttatgggtttacgaaatttttttaaaatccaaaccaattcccagaaatttattgtccgtattttcgtatttaaagtggttggcggtctcctttgagtctcaccgtcaaacgacccggtccgtgaaagttgtgacaaatttgggatttatcacaggggtggtaattagctaattaggtttatccaccagaaatgtaacgaaatccaactttcccatttttgagtttttaagttaaattaacgaaaacgaaaaaaattattaacttggaaatacttttatttttcaattatgcgcatcttttgcgattttatgttcaaatatgattctagtacagtatactcgtcccataaatttttacgcgttctataaaatttttctgaaacctcagcgtgtcgaatgagaccgtggtgagtcgttccacaaaaaagctcagtgtgggcgttccacaaaaaaagctcagtgtgggcgttccacaaaaaagctcagtgtgggcgttccacaaaaagctcagtgtgggcgttccacaaaaaaagctcagtgtgggcgttccacaaaaaaagctcagtgtgggcgttccacaaaaagctcagtgtgggcgttccacaaaaaatgctcagtgattgataaaataaaataataaggttaaataataattttgaactgtaaatgtaattttgatttaattttattgcatgcttttaaattataatttttattacaaaactaaaaaaggaaaaacaaattaattgaagacaattgataaggtgctaattttctttgcatttcatgtaaagaatttataattttgattcccgaaatagcgaattaattgataacataagaatgtcatagtaaaatctgagtatttaagctaattttattaatctataattcaaaaaatttaattaaataatccctcccaatcgcaacaatg

SEQ ID NO: 116272 - DNA, 55 bp, Heterodera glycines
gtcaacatttagatgatttatcatcagtcacggaagagtcgtcaacatttagatg

SEQ ID NO: 116273 - DNA, 134 bp, Heterodera glycines
aatatatggccatggaaaaaatgatttaatttattgacattttttaacgattgaaataattttttatttttaaaaacctatttttaggtgtgtaaacaagtcgcggtctcgagtctaaaaaatcgaaactaatg

SEQ ID NO: 116274 - DNA, 910 bp, Heterodera glycines
aataaaaaataaaatttaattaaaaaagtaactattatttaaacaattttgttcttgaatgtttaaataaataataaaaaatgtatacaaattaaattcactcaattaagcaaagtttaattaaacatacaaataataatatttttaattttttggagtgaatgaataaataaattttgttaacatttttaaaatgaaaagattaatggacagcataaaaactctctaaatttcgtagcaaacaatcaaagatcaaacagtgttgagctcaacttcaattagaaaaatttatttgcacagtctgctgaagcaaaaaaagaggccgcatttttgtacgtaagaattttttggtgcacatttttcaaaatgattaagaggggataaagcgctatttttagtgcaactttgaagaaattttattataaaatttaattatttatttattcgtaaaaataaaaaagtcatcagaagggcgaaaaccacttactctgacgactgttcagataatgtgtcgtagagtaagtgataaaataaagtgatgatcacaggaattaaaaagacaaaatatgtgaaaataaataactaaataattgaggtcaaagtcaaaattagggccacgcgtaaaaatgccaaatcacttatgagtttatttttgttctagcttttccggttttattaccctagtgaacttctaagtttggttttaaattgatttaaagaatttgttttgattagttctttatcgagttgattccacaattttgttaccctcccagcaaagggaatgaattttttgcccagtttatattttgagttaaatctgtaaaaggggatgttaaagcgcgttgagggattaaaaatagaaaatagtttcagatctgttcggccataaacaattttatgcgccatg

SEQ ID NO: 116275 - DNA, 964 bp, Heterodera glycines
ttttttcctttgactctaatctctatctctaatttttcactcatacccccattcttaccagtgcttgtttttcccggttgccctaccgggaccgggaccgggacctgagcttttcaaaatccgggaaccgggacctcggatgaccgggaattcccggccggtcccggtcccgtggcactctagttaaaatgaaaaattttagtcaaaaggcaacaaattaagccaaaccagattgagcactacataatttttaaaatcaaaaattcttgtcaaaaaaataatagatttttgagaaagtttttcatttcttatgggtatatttttgaaaattttcggtcgatttatatgggtgtattcttcgatttattgcatttttgttaatacattttgagcaaaacgccaagtcaaaatactctttttcaaaagctctatctacccaaaaaatctcattccgagatcccacggacacttggccacctccctttgttagcgaatttaaagcaatttttttaaatgatttttggcggaaaataaaatggagagagagataacacaaaagtgagagggtgttaaagatgaagaataaagaaaaatcaactaaagaaagagtgttataggaagagatttaagacagagaaagaatagagaatatagtgaggaatcggcactatgggttcgccccactgtgcagagaaaagcctagtactatctcgtcgtttctctttttctttataatttctctcactttggcgtactatctctttattttaatgtgtgtaaaaacaacactcacttcatcctgtttaactttttttctgtttgttaaatccacaccaaattttgcaaatcgatagagaaaaaattctgcatcggttaataggtcaagttaatattaaaataggtcgaattagaaagtttttttttgtgctaataaataaaaatatagattctttaagtatttatg

SEQ ID NO: 116276 - DNA, 85 bp, Heterodera glycines
ttttgccaacaaattcgatcattttgtgttccgccccgctgtccttaagccgctcaaaagagacgaatttattcagcaaataatg

SEQ ID NO: 116277 - DNA, 402 bp, Heterodera glycines
cgcctcgtgttcctcccgctgtgtctgttgcaggcgccctttatccgacaaattccgtttactccgtcgctttttccgtcgcaaattcacaagcgggcggcagcagggaacgttcgccctacgcggcccaatttgggtaaaaatttcaacaaaagggaaatttttctgaataattgtatttctgtttcgacattggtgaccgagtaattgtcgacgatggaagggcgggaaaaatcaaattcctcaactatgtcgctgaccaaatttttgccggcattgtgttggaccgaccattgggcgactcggacggaaaatttcaggcacaaatggcatattgaggcatttatataaattcagtgctttttaagggcattcagtacttcaaatgctatcccaaatatg

SEQ ID NO: 116278 - DNA, 513 bp, Heterodera glycines
  unsure (1)..(513): unsure at all n locations
tttaaaatattcctttctggactgacttnggtttctgnatatcgaagctgttttctacgctatttctaaaacggttataccaaaccccagatttttgaatccggttttcagaaaaaatgccttgtggtgaaaacaatatttcacatttcactccataactttgtgagttcggcacggatcgagaccgggataagaccattggaaagagcagctcgagctctacaagaaggtatggaaagaaaaaatagttatttctgggactttttcagaaatctgaattaattctccaatgtggcccaaattttaggcccccagccacagccccttgcttctcccagttttaagtcttggatttgtcaaataaattcaagacttcaaattaataatcaaaaattctcttaaaatttttttgaacccaattcaaaaaaaggaaaaaaatttgcagtcaaaaaattattcgaatttctccaattttgtttccataatttccgaaagttattcggtatcataatg

SEQ ID NO: 116279 - DNA, 717 bp, Heterodera glycines
tgtttaacacttaatattatatattaatcactaaataatccaaaacaataatctttattaattgtgcaattcccggatttattttttctttatattatgtaaagaagtttcgtttttatgcatttttcgtaacaaattttggcaaaacgccaaaatagttgaaaatagtttttttcaaaaatttactattttttagttgctaaaaataaaaaactagaaaatagttgctaataactcgaaaagtagcttaacaacccccctaaaaaacatgtttttcgtgcttttcaggctatagggagctcaggaaaaaaatagtgaaaactataaattgcatccctatttattatataataattttatttttatcttttaaagaccaaaaactaatctttgtgtgaatgtgaaaagcattaatttgaatggctttacgtcttttgctgcttaaaaatcttcaataaaaaaattttaaatgcctttttcgaggttttcgtgccttttcatgcctttttttcaattttttgtgccttttatagtgcctttttcgcgatttttgtaattttaattttattaaaaatgccaaattttagcccaatttgtgccgacgattggctggcggtgttttctttgctgccgccgcgtaaattttagaaatgcattgcgtcatttcatggaagagcaaaaatggttttggcggacgtttaaagtttccaagaaatg

SEQ ID NO: 116280 - DNA, 122 bp, Heterodera glycines
aacaaattcgcctaaattgctcaaatttctcgcaattccccactaaatattcgttcaaggcaaattctatgcaaatgcttactttgtaattcaatttaataaacaacacatattttgtaatg

SEQ ID NO: 116281 - DNA, 141 bp, Heterodera glycines
ggtgaaaaagaacgacaaaaaggcacaactccaacaggaagtgaatttctcgtggaattccgctacaaaccaattctgcttccgatttctgtaatttgcccattcgttccgttttacctctttttcagggccaatcacatg

SEQ ID NO: 116282 - DNA, 200 bp, Heterodera glycines
tagataaaaaaattactctaaaaatgtaattttaaaaattaagactgttgttgtgatcatggtcatgtgttcaatttctaatgatagaaaaaaaaaatttccttttttgctttttcatagaaaataaacaaacttcaaatttatatgctttctttatcgttatattttcagttttcaaattgcattattgtttttaaatg

SEQ ID NO: 116283 - DNA, 145 bp, Heterodera glycines
tgccctcaggcgagaatacaaaatatttttagtcaattatttaattaattaattgaatttttgcaagtgacgcgatggcatttcaattgtatgtatggcatttggtcacgacataaatcgctacattttttttgcgcagaaaatg

SEQ ID NO: 116284 - DNA, 686 bp, Heterodera glycines
agatgtttttattgttatttttataaaaattcatgcttcgcttatcatgcaagaagccaagcataattaaaaaatatttattgaatatttatgaaaaaatcataaaattttaaaaattatagagataacacccaaatggactaaaataaaaaaatatgtataagagggatgagatttttaggctctaaaaccgccaaaataggtaggctttaggtcctaaaaaccccaaaaatagggactaaaatggaaaatttaggggtgtaaaatgacaaaatctattcaaaaaagtaacaaaattcgaccaatcagtatgagataaacaattctttttaaaattgttgtcaacaaataaataaataaattttggagatcaatttttgagaaatttttagccaattcttaggagaatattttgaaaaaatttttaggtcgcttcatatttgttttggtttttattgcatttaaataattttaggcaaaacgccaaaaaggttaaaataggtttttcaaaatttttaaaggtttttaggctttaaaaataaaaatctagaaaataggcactatgcgatcagtataactttatgctttctattttttattaaatattattttatatttttatttattggcacaaatttttccataaaaatctttttataggtattacaaatttcacgcgaaaaatg

SEQ ID NO: 116285 - DNA, 163 bp, Heterodera glycines
catcagaatttgggtgcatgttaatcatgagatagctaaattgattattggtcgcatcatgatatgcatccatgaaataattcagtctttttgggaacagttgtgaccctagagtcctcacttgtaattgtcctgaagggttgcgcattaaaaccagataatg

SEQ ID NO: 116286 - DNA, 110 bp, Heterodera glycines; identical to SEQ ID NO: 98226

SEQ ID NO: 116287 - DNA, 148 bp, Heterodera glycines
tatcgatagagaaaaaatctgcatcgatttctatgtttattatccgcgttgttttaaaaagttataagataaaaaagttaaattattattctttttaaagatttaatggctaaaagaactttattacggaagcgacagaccaaaaatg

SEQ ID NO: 116288 - DNA, 59 bp, Heterodera glycines
ttaagatatattctctcaatcgtcagaatgtgacgttgcgaaatgccagttctgtgatg

SEQ ID NO: 116289 - DNA, 428 bp, Heterodera glycines
gaaaaaacattttaaatgaataatgggagaaaatttttaggtatttatactaaaataaattgaatttatttatattttaactttaactttattataattcatttttaattttaaattctttatttaatcattgactcacagctgaaactcaacaggcaattgagcagctgtctcaagcacagaatatctgatgttgggttttgcataggcacaactgtcacaattaatcattgactcacagcttgacctctatttccagtggtatattaccgacacttccgtgggcattatacagtcaaaatgcatccaagggattattaatgaccattccattggctttggctcggtcagaaatgcaccaaaagaattcccaagggataattaatgaccactagcttcggttggacagacatgttcacaaaagaatg

SEQ ID NO: 116290 - DNA, 52 bp, Heterodera glycines
aaaatttttagccaattattcccatccattttcagttacatcgaccaaaatg

SEQ ID NO: 116291 - DNA, 70 bp, Heterodera glycines
caacaataaattagataaattttcggaaaatcccacttaaaattattatgtcagattcataaaggcaatg

SEQ ID NO: 116292 - DNA, 340 bp, Heterodera glycines
tagagaccggcgcgggacgggatcccgcgcgggattttgcgggatcccagtccgcaatcccgcattttttggaaaatgcgggatttgcgggattgcgggatttgtgggattaatcccgcgggatcccgtcccgcaaagaattttgagttccaatcccgcagcgggatccgcaaatttgactttttgtgcgggattctgcgggatttcattgattttttgaaaattttaaagaatagaatgccaaataaagtgtttaatttgctttataaaatataattaaatattccagtaaaaaaataaagatatatattttttaaatgccataatttaagcaaatatg

SEQ ID NO: 116293 - DNA, 1003 bp, Heterodera glycines
cgtttttggcagagcgagaacaacgtgtgcgggcgagacgacgaagcatctgtgcgtgagctttcagcttctttaaatgacgtggacgcaatggaactcggcccttttagaatgttgagacaaatttctaccaggcataatagttgttcatcggatgcgtctcgaataacaattttcgcctttttggaattagacagtgtctccaaaaaggattcatttcttgcaatcaattgcgaccctttcattttggcatataaacgatttgtttttgttcatatatatttgttctaaggcgaatctcttccgaactctcggggtgcatgtcaaccaaaaggtagccaaaatttttagcgcatgcgtcccggtaggcttccataaagtgggcggtcattgacgggaagaggtgggtggctattgtacggatctgaagagcacccgctgggtttcgcattaataccaaataatgtgaatttgtgcgagcgacgcgcaactctttgttgaacaggtgttgggtcaccaaaattacgctcacgccccaattgtgtgagccgcgtgtgaaaagcgagtccaaatactgttgactcatccccactaccaaatcatccaatattagcaagagtttttcttttttggcgcaatcgcgtacctgttccgcagatgggaccccgctgtgcacagttactggcaatttgccaatttttccagtgcgttgcaaattcaaaacattagtgttcaactctccgtagccataaataacgcgctcaatgggggtagagatcattttctctaaattgcgtagaagactcattacccactctgacttcccactgcatgtactcccagatacaatcattgtgaatggatgacgaaattgcaagtccacgtgttcaaagcttggaaacgaatccatttttttttattgcgcgttgatatttaatatatatatatatatatatatatatatatataaattgatttcattacagattaattttttttaatg

SEQ ID NO: 116294 - DNA, 140 bp, Heterodera glycines
gctgcaattctctcgggttctgttcttgatttttttcaaaattggctctaactttttgcatgggttaggttgaagtgaacaccggcgcactcggtggcgttggagcatgttcacgcgtgtccgagcatcataaacggatg

SEQ ID NO: 116295 - DNA, 98 bp, Heterodera glycines
atgtttcaagccaaccgcataaatatgcagttgattccatacaattgcaaccaaaagcgagatattatcaaatttacgataattttggcgatgaaatg

SEQ ID NO: 116296 - DNA, 125 bp, Heterodera glycines
tattgataattgcaaaaaaaaattcccggcggtgccttcagcaccgcaacggtttgccaagaattgcagaaattttttttttttcgttttctgtctgacatcataaggccaaggagcaaacaatg

SEQ ID NO: 116297 - DNA, 80 bp, Heterodera glycines
gaaaaaaatttgcagtcaaaaattattcgatttctccaattttgtttccatatttccgaaagttattcggtatcataatg

SEQ ID NO: 116298 - DNA, 698 bp, Heterodera glycines
atgcgaaggcgccaaattcgccaaccaatgggccaatgggaaatgaatgtataaaaagggaaacgttggattaaacagaccttagaaaagatttgatttaccagacaaacttcagaactgatctcaccaattttatgctattatttaaatcttcggattccatttttgacatcattttgaatattgtcagtcgcgctcaattcctgtcagttcgcccaccacatcccatcatacaatatcatatttttttattatatcttttattttttgatcgtacaaatttgtgaaagagagtccattgattagatttaaaaagcgactttttgaattgtgaattcttagttcgaaatagttttttttatcgcagtcgtggaatgtacctaattgtgcctttccttgtattcgctagtgtttgtttttctcaattggccgtcaaaataacagaaataaaagatgattttttctactgttattcaattcattcatcaattttgccattgtatttgtcaaaatgacagaaatttaatttacctctcctttaaatgatattttgattaactgataaattgtttagttattttactgccatgcacaacatactcaaaaggttctttgcgaatgtttcgccttcgcttttaaagaagcccctcaacgacccatttccgattgctgcgtggcgctcgcacccggccaacatg

SEQ ID NO: 116299 - DNA, 628 bp, Heterodera glycines
tttttaatctaatgctttattaaaatgataaatcaacaataggaagggcatatttatatgagccgagctcgtaacaaatacaaaatggggaaggaaaagtgatgaaattgagtgaaatttaacacttaaataaaccaatcttggcctgatgagccgcgcactgccatccatgaagcacaagacgacagggcacctaaacagctctgggaattagacaagtcaaaagcattacctcaagatctaaaaaacaaattaacaaaattgctgccaggataaacggtactctgtaggtcgagctaccgccctggttaacagcaaaattggaaatggaaaatttttattaagaatataattaagggtaaggaacaaatgaaaaattctctgtacagtctcgcttttaaagctggtgtctccgcccattaatcgataacttttcggcgaatcaatttgcatttccctctgggaaatgccatatggtaacagatgtttgcaaacaatcgataattttcaaagccaattcaaattttcactgattcccgagggaacggcatcgccttctggtatcatgcatcctaaagccaacctatgcatgcatttattcattcatttcttttttttcactacaatg

SEQ ID NO: 116300 - DNA, 1003 bp, Heterodera glycines
ctctggggtttttgagatcgctgctaatctctaccgaattgccttttgaatgatgggtctacgacttaaacacgcagaacaagagaggttaaaagtctttttcgagaaaatttgaattttgctgttgcactgccttcgtcccaaaacttttgcaatgactgtataaaacagggttcctgtcggccaaactcggtttcaatggacaggtcggggttttgcccgtcccttttgcataggtgtattagccaaaaagcgatgtttgaaaactcagtttaaaaattcgagtttataattccctaaatttagaaaattattccaaattcattataaaaggcattcctaaactaagttaaaatggttaaaacgctgtttaaaaatttagccacaattctctttttttgagtagcgatgtttcggtgccaaaatttaatttaccgtccttcgtttgataaggtattcccccccccccccttacagttgtaacttacatcgctggtcagcaacaatatttccataatgtatccattttttgaattttcgcaatttacttgattcaaatgcccgttttaccgggcctcattctcgagatttttcgcatgattaggaagtcgggattcatgaaaatcctgtagtcaaaatattcatattcgaaattttactttgtcctttttcgtactataatttctctccattaaccgataaaaataaataaatttattttttaacaaaaaactaaatgatgagtcatctcatcacttcattttcatttccatccccaatcccaacccattcgcatcattatgaatgggatagtgtggtggttggtgatcggagcattttatcccattcatttggactgggcgttgggctttcattccatcgtttagcgattcatttacataaatttattagcggaatttgtaaaaatatattttaaaacaaaaataaatggttaacagaaaaacattttgtaattatttctcgccattttgaagccaaaatg

SEQ ID NO: 116301 - DNA, 167 bp, Heterodera glycines
agggggacatcgaacggcgttggggggacagagcgggaggacgcgcaatcggaatactttgccaacagtcaagtagaggcaattaacaaattaatactaattgccgaaacaattagcaaatgtttagagaaatacgaaccgtttcagcagtaataacaacggaaatg

SEQ ID NO: 116302 - DNA, 356 bp, Heterodera glycines
ttttttattattttattgttatttgactcttcgtaaataaattattttatttgttggtctttctcactcggacaaaagacacaacaaatttggcgcagtcagcagtcgtcttcaaccaacaagaagacacccggactgcacaccaacaaaaccaatagtccctagacgggtgaggtctgcaaattctgcagtttttcgccatcgacaaaaccaatagtccctaggcgggtgaggtctgcatatattgcagttaattcgccgaaaaaccaaaagacctgagaaaggttgcggttccgcaatacgcggtttttcaactttggactctcaaattcggcaccggcaaacacttcggcatg

SEQ ID NO: 116303 - DNA, 132 bp, Heterodera glycines
aacaggtgatcaagaaatgattgaatagagaatattttccatataaaagaccctcaaatttgtctgtaatcagtttcaaatcgtattttaattccaaaaatcaacaaattcacctcccatttttacaaaatg

SEQ ID NO: 116304 - DNA, 916 bp, Heterodera glycines
tttggagaccaaaattgtaatttttttatattaataattaattccttaccgtcgtccaagggcgtagccagacccttggctttgggggggggggctgaagtctaaaattcgatttttaggtgtgtatttttcttttttaagtcgatttttaggggtgtatttttggttttttgaaatcctgaattatggggtgtattttacaaaatttttcgccgtttttcgccaaaaaattaatttttttttgccattttggcctccatttttcaaaaattttttattaaaaacaaaaaatcagtgagagaagaaaaaattaagatcgagataaatttctgtaattagcatttgctttcctttcgtcggcttttcctacgtctcgttaaaaagtggtcggctggcatggcaaaaaagcttatataaagatacaattgtgaataaaaataaaagtgcaatccacttaatgggcaaaaaatatattgatggattttattgcctcgaaccaatatggaaaatatttaaaaatacatttaaaataattaaatttatttattaatataattttctgtactgaaatgaccccatccctctaaaagtctctgattttttgtttttaataaaaaatgagaaaactataaatgttagttttattgagatttaaaaatattataaaataaacgcattaattaagtagattattattattatttaaaataattattttgcttttaatttattaataattattttgctttaatttgttcactttgcactttttcgtgcttcgactcagcacgttttagcgcaataagctaaattcactgactactggtttaaaaatagttttaacgattttgaggtcccacaacttttttcaatttaatttttgtcaaaaaattctttcagattcgtgggttacatg

SEQ ID NO: 116305 - DNA, 747 bp, Heterodera glycines
ttgaggatgtgaaggtggcaaaattttggccaatttgagccctttaaagggggggggggataaatttaaaatatatatcccttttttaaatttaaatatattcatttaaatttgtacaaaattccactaaatatatcacattaatatgcactattattattatttttttcttcgattaatagataattaattatagaacaatttagacatatctttatgttcatcattatgcgactggaaaactaatttacaggtactgaaaacaaaaaagccgtacatttcaaattggttagtcatcgttaggatttcgggattaaaattattattattttttttacttggatactgatcatgaattaaaaaggtcttcttttattatcacgagggtgcggattttttgtaaatgaattaaatttaatattaaaaaaaagatttttcataatttttgatgaatttaaatttaattttaagaattccattgggcattggcactgtcagccaatgctatggcgatcgagatgatgtggaggcatttttcagcttcaactcatttttggagccacccacttttttccgtgctgatttttcactcgtcgagaaaacatcaatgcttcaattggaacaggcaaaaccaaaaaaaacagctatttaaattaatttaaatattttatttttggttcaaattcggttacatgttactctgtgcaaaaacagaatgaaatggcttttatataaaatttcaaaatg

SEQ ID NO: 116306 - DNA, 75 bp, Heterodera glycines
ccacatcttttcacacgcttccgtgaaaatgaagacactttagtggctctgcgatctgtccaagcattcgcaatg

SEQ ID NO: 116307 - DNA, 1003 bp, Heterodera glycines
gcttctctcgacataattaaatcgcagaaaaatatgttaaaacataaaaatcccagccctaatagtaatttagcactcttatttaatttatcaaattcactttaaatatagaatttattaaacatgcgaaagtgtgattttttaattcccgttttaaaactgaaaagcggtgtgttttttgggctgtgaaaatggaaaaaaattggccattttgagggcaattttgaagataaatcagaacatttaattaagtaaaatttgggagcgccggatttttcacagcaaagaatattcgagagaaatatttaaaattttaagaggacttttcgatagaggaattttcgacagtatagagtaaatattcacaaatttgggcaaaaggtcaaaataaagtttttaaaaaattctcactagtaataatgattagcaatacagcaatgcacatttatatgtaaatttataagaaatttagaaactggaaaaaatttaatttattttaatataagatttattttcatgtttactgtcgaaattccatcatattttattttctgtaaaaatcctttattgtcgaaatatcctttgaaatccgctgtcgataagtccttatgccgaaaagtccgctgaccaaaagtcgggagccaaattaggagccttaaaatcagaaaatttttgtaaaatcagaatacccgagccctagaaaaaaatgagtgatcatcagatcaagttggggtaaagacttgttgatcagacattttacaccgaaattaggccaatttgtggggacgcacaaagataattcctctttgccatctactttggccatgcctttatacttttccgataatcgacattcctttactaatcatttcatttttcccattatgctttcattataaacgcatttatcttttaacttatcttttaattttagccaagtactataatttttatttaaatatggatcccggattttttctagatgaggccgccaaaaaaaatg

SEQ ID NO: 116308 - DNA, 156 bp, Heterodera glycines
agagaattggcccgagtccatggcattacaattgggaccagacatgtatataataattgtcagtgaaaagattaaggaaagaaatttaagggcgtaattgatgatttactcgcaaaattatcaaacacagtgctgccccaatgttttatgaatatg

SEQ ID NO: 116309 - DNA, 138 bp, Heterodera glycines
tttttgcgtatgaagtaaaaatgtagattttatgaaaaaaaaaattaaattttttggccttttgtcagagcaattattaatttttagaaaatttatcctagaaatagtcaattttcagtaagactaatagagcatatg

SEQ ID NO: 116310 - DNA, 115 bp, Heterodera glycines
acgaatttcagaaattacaattgaaattcacacaccgtttggtgaattcgttaaatttcactggggaagttgtattcttacattacattttaagaaaagtatattttaaaaaatg

SEQ ID NO: 116311 - DNA, 319 bp, Heterodera glycines
ttgttatcgttctaaaattgataaaatcaagcaaaattctttaaaactcattgaaacacgaaagaaaattacattacataaaagtgaattttaacaattttgtttttgactttttgttcgagtccgggattcgaaacaggccaagttgaatgccagatttacgacacgacctcgaaacccccctacaaacatatttcacgattttttaaaacgaaaattttctgccaaaaaagggggagggtatcatcaatcatcaccaactcaacgtttatcctgtcctttttccagcttgctcggctttgtgttcatcgccacgatg

SEQ ID NO: 116312 - DNA, 613 bp, Heterodera glycines
accaattgcctccacctaccaccctacagtatcctgcggcactcattgtgaaccgtgacccccatcacaaagggggctcccattggtgtgccatttatgcccgggacttggacgcgccagtgatttactttgatagccttgcccttcccataccaccaagtattttatcatcctttttaaataaatttcccaaaggtttacacaaaaacattgaagcctaccaatctccattgacatcaacatgtgccccccattgtattgtgtttgtttaccacatgtcccatggaaaatcattcgataaatttatacatattctcaaaacttgttcaaaccctgacatgtattcattaataatattaaataaaatgttgaacagttaaattatattttcaatttcttaattttttcaaaattgtgtcttccacctactaattatgcattattctacctaaaagttacattttccaacgcttaattattttcgtactttatttcccattcattaattatgcatgcaataaaataaaaaggggcggagcttaaccatttgagttggaacaccggtataaaagccgctcgaatttcttcattcagacataaaaaatctgaaatg

SEQ ID NO: 116313 - DNA, 815 bp, Heterodera glycines
cgggtcaatggcaactggtacaaaaaaaaaatttctaagattttcaactaaaacttagaatttttcgataaaaaaaaatctaaatgaattttttatcctagaaaaacttttaaaaaaattctttaaaattttttttactaatttttcagctgattttttttattttcttaaattttttgaaaatttaagtcctttaaaaagtttttctaggctaaaaatccatttagatttttttcatctaaaaattctaagttttagttgaaaattcttagaaatttttttttgtacgagttgccatgacaccaaaaaaccaaaaaaaataaatgtttttaaatgcccagctagctgcataacgttccgtgaaaaactgcgtttcactctcctgtatgaaaacaggcatcgtgaaacagaaaatcgtgtcctacatttaaagcctaggataaacaatccataaaactggaaacccttgaaaaagtgttgttgtaatccccaggatcagagctgagagatttaatttttttaaatttttaatcactttgtttgaaaatgctcattttttttcttcagctcgtagttgtcagaatgactaggattttgcaggaaaacaccttagcattaggggaggcctatctgcctgcaaaattcaaaaaaatttcagacattcaaaacttttgtacagacattaaagttgaaaatttttcacggttttagtataaaaatgcccttgtttctttccctcctcctcattccattcattctctcattcattcattctccctaatatttccgccgatcattttgttgctgcaaaaatg

SEQ ID NO: 116314 - DNA, 157 bp, Heterodera glycines
tcgggcgtttatccaaaaatatttttaaatttaaatccaaaaaaaaattaaaaaattattttacaccaaaaaaggtttgcgtgatcagatgaagaattccatgcaatcagtgccttgtgatgtcaaacaacaggtggtgaatgcttgcaccaacatg

SEQ ID NO: 116315 - DNA, 567 bp, Heterodera glycines
agtgcgtcgtttgcattgcgattttttggaaattttaatttttttttattctgatggagggttataattttaaaaattttaattttatttttcatttcatttttatataaataattgaaattcttacggacaacaaattggtttctttttgacaaattagagttgcaagaataaatttttgcagcaacaagtggaaaattaaattttcattctccaataaatataattatattgaaaattattttttttacatattttggcagtaatatttaatatatatttttttttaaatatttttaatgtaatttaataaattgaagaaagttttctaaattttacactcaatttaatataagaattgctgtaatgttcatatttttgcattatgactttatttcgcgatttaataaccaaaaaattagatgctattttttgcactttttattttccaatttttaattacgttttgtaatattttccaataaatttgaaattttttaaattttacaaaattcacagtttttttttcttggcagaagccatgttgaagccgaactgtggaacatg

SEQ ID NO: 116316 - DNA, 911 bp, Heterodera glycines
aagaattgaataaatttaaaaaatatttttgagaaattttaaatattctataaaaatatttttttgaaatattcaaaaaatctttaataaaaatatgtatatttttgaaatgaatgtaagcatttcgcactcttcgtgactttaatccacataattggcattcttaattaatcatcaacaaagcttattcgaacgttttccatgagatgaaagtgaatattatgcaagaatatggagctcttcttggccttgtgtatttgatgaaaattaaatggaattgtgaatggtttaaattaaaatgtattttcaaagttcgtaattttttttgtttggctttttgagtttatgaaattttgaaatatatttttttctatagcctggcgcaaacgggatcccgcattttttggagatttcaggattaatcccgcggggtcccgtcccgcaaaattttttagtaccaatcccgaagcgggacccgcaaatgtaattttttgtgcgctattcctcgggaatgaattggattttttgaaaattcaaaagacagaatgtcaagtattgtttaaataaaattaataattttaatcaataaaatctaaaatctaaaaatgtaaaaaaagttaaatggttaaatttttatggattgattccattaacaaagttaactttgaagtttttcgagatttcaaagatgatgcaatcctgcgcgggatcccgcaaattttcaatgcggagttttcgggattaatccgcgggatcccatagtgcaaaaatttgtactgaagttatttttatttataaatttaaatggttttagcatcctaaaaatttttttaaataaaactaattaaagctcaaatattgtgctttattgaaatcaaataaatttttaaaatactttagataagaagatg

SEQ ID NO: 116317 - DNA, 516 bp, Heterodera glycines
aactagcgggtgcgtgaaccgtcggctatttagctgggaaaaagcgcttcgcgctttgggagcttcgctacctagataagcattgagtttttttagagatttggaatttattttaaaatcttaaggggttttaaggccgcttcgcggcctcagacgggcgcttcgcgcccgttttttaaattgttgagctcatacgggcgcttcacgcccgttttttaaattgttgagctcatacgggcgcttcgcgcccgtttttaaattttgatgtgcattttcggccgcttcgcggcctcagacgggcgcttcgcgcccgtttttaaaattttgttggaccttttcggccgcttggcgcccttttccaaagtttgttgagcttggacgggcgctacgcgcccgtttttaaatatggtttggaatggacgggtgcttcgggcccgtttttgaaattttgttggactcatacgggcgcttcgcgcccgtttttaaattttggttatcagaagaggtacaaaaatg

SEQ ID NO: 116318 - DNA, 540 bp, Heterodera glycines
gctaaaaaggaaaaagggaggaaacaatgaaaaattgtcaaaatattcattttattgccttccatcgtcgtcatgattatttctcctcccataattttagccgtcggagtgcacgcggtaacaaaatgaatgatacagaaataattaatcgacaatttcatggcaattttatcaaaaaattatccaaatgattttgaatattcagaaatgaccataataccaaagcaattaatgtaaattgatcatcactaattgcaacaaaatgtgtgggatttcctgtctgcaatgagaacagaataatgatggtgtccacttcaaagtgacgactgttcactaatgacccgactaattgtaaacaatacaaacaaaagaaacggtcggagtctcaaaacaagaaaagaagccgcccattctttaattatttaattgtgggcttttgaaagctttcaatttaaaaagcaccttttaaaaagtaatagattaatagaaataattgacatattatgataaaatgaaaatattttaataaaaagaaaaatg

SEQ ID NO: 116319 - DNA, 564 bp, Heterodera glycines
tttttgcaccacaatctcaaaatttacgattttcattatgaataatttttagaaaaaaatttcgcgtttcgtgttcgtatatttgtattttcgtgtttttaggacgtttcgtgttcgtgtttcgtattttattttagtttcgtattattcgtattttatttttcgattcgcaacatccctggtgcgcaggtagtggtcgacgaatcgttcgatataaatgcaaattaatttcgcaaaatttagttaaaaaactgcaaacagaccataaaaataaaaattgtttttaaattttctagggggttttcgggtagatatggcgaaacgggtcagttgcgtctggccaattgcgtctggccagttgcgtcttgaccagttgcgtctggccaattgcgtctggccggttgcgtcttagtacttatggggccggttgcgtctcaatacggggttaactaattcggactgaaattgtgcggggtggaaacatagtgcacccatatcagaaaattgtttttgcatttttatacatttcatttgttttaaatcttttaatatagcccgaaaatg

SEQ ID NO: 116320 - DNA, 70 bp, Heterodera glycines
ttttctaattgttcgccatccaaccacttttttaaggcgcaaaatcagcggttccaagacattgatcatg

SEQ ID NO: 116321 - DNA, 229 bp, Heterodera glycines
  unsure (1)..(229): unsure at all n locations
ataaatttggagtttaagcaacaaaacaaaattcaaaaaaattcaattacgacactaaaaaaactatgaattcaatcttttntgaacagtgccaagaatgttntaatntagttcaaaggaacaaaaattatggtccaaaaactcttcggcaacattttgtcccgcctccgattaaattattatttatttattatcaatttaaattaattaattaaggtaattgtgaatg

SEQ ID NO: 116322 - DNA, 196 bp, Heterodera glycines
ttttggggctgatgctatacacggctgaacatcatttctgaatacgaatgtcacccgtaagcaattaaaattaaatgctgcttttgatgaaaaatttattttggaaattatgatcataactttaactttttcaaatgcacaaatctaaacttatttgtgttattagtagggatgaatttttaattgataaaaaatg

SEQ ID NO: 116323 - DNA, 1003 bp, Heterodera glycines
cccccgaaccgatgcgcccagatttatggggagaccgaatccttcgggaatagcttccctatagcctgtactttaattctgcgttggatttttgctccccataattgtttgagtaccccaaacggacacttgaaaaaatcgatttttttcttttcggggcagtccccccgaaccgatgcgcccagatttatggggagaccgaatccttccggaatagcttccctatagcctgtactttaattctgcgttggatttttgctccccataattgtttgagtaccccaaacggacacttgaaaaaatcgatttttttgttttcggggcagtccccccgaaccgatgcgcccagattaatggggagaccgaatccttccggaatagcttccctatagcctgtactttaattctgcgttggatttttgctccccataattgtttgagtaccccaaacggacacttgaaaaaatcgatttatttttgttttcggggcagtccccccgaaccgatgcgcccagatttatggggagaccgaatccttcgggagtagcttccctatagcctgtactttaattctgcgttggatttttgctccccataattgtttgagtaccccaaacggacacttgaaaaaatcgatttatttttgttttcggggcagtccccccgaaccgatgcgcccagatttatggggagaccgaatccttcgggaatagcttccctatagtctgtactttaattctgcgttggatttttgctccccataaatgtttgagtaccccaaacggacacttgaaaaaatagatttttttgttttcggggcagtccccccgaaccgatgcgcccagatttatggggagaccgaatcttcgggagtagcttccctatagcctgtactttaattctgcgttggatttttgctccccataaatgtttgagtaccccaaacggacacttgaaaaaatcgatttttttgtttcataaatatttttttcagaaagtcatg

SEQ ID NO: 116324 - DNA, 127 bp, Heterodera glycines
gggggggcaccacaatttttagagagtaaaaaacgaaattgtttccaaaaatgtttttggcatttcaattttcctctacttttaggtggtcaaacaaattgaattaggcaagcacccgttcatcatg

SEQ ID NO: 116325 - DNA, 381 bp, Heterodera glycines
aatgtaggagattcaaatgtcttgcaccctttgcccaattaattaattaccccttttctacagcagatgatgatgttgctgacttgcagcagccggtcagccttttctcctttacaatcctttcgcttttcacatggaattgttggcgaaatgcacgcgcagctgaaaaaatgtccaaaaaggcggcataatgtgccaaaaaattcattaattggataaaaaaaaataaatatgtatttattaatatttggatttgcaatttgtttcatggcaattttggatacaatcagccgatgatttattttgttttttgatcccattttatttgtcttttttcgtaatttttaattttgtttgccctccccccaccccaattaaatg

SEQ ID NO: 116326 - DNA, 300 bp, Heterodera glycines
ttattttctcccgctgttctgtctcattcattattattttattatcattttcagttctaaattatttctgttttgctccttccatttttgccttcctctgactccgtcgtcatcattattttatttgttttgttttattatttatttgtttgttatcatttgtcttttctaaaataaatttaattctgttgttccttgcggacacaacattggcgacgcccgtaagtgaaatgccttattttcatcacaggtttgagcgacgcgcacaaagaacttcgacaagagtgtctccgccaaatg

SEQ ID NO: 116327 - DNA, 461 bp, Heterodera glycines
ttattatgaactgaaattgctaattatttaataaattcttacttaattaaattattttttaaaactaaaaatgatatcatttttagttttaaaaaataatttatcattttttaactaaatacatatttaatattactcaaaagttttgccacatatttaatttgcttctccacttcaattattacccatttgatattgtaatccatcaaaatttataacacattactctcattgcgacacccaattaaataattggcttttagttcggcatttttatttttggtgtcaaaaaataataatgaatttgacttttcgcaaataaatttgtttgcaaaatataaaaaaaaagtaatacttaaaaataaatttaattttaattttaattcccttctttaaattaatccttacaaaaagtgaaattttctatttatcctctaaaaattttaattttttaaaagatg

SEQ ID NO: 116328 - DNA, 176 bp, Heterodera glycines
  unsure (1)..(176): unsure at all n locations
aaaactggcatgacaaaaagacaccatataatttttcanccttgtatttctataaaaatgcttttatttnttattcatgaaaattaataattgtttcgatttatcgataaaccccatgttttttttaaattaatttcccaattggtnnttatttctttacaattagtccatcaatg

SEQ ID NO: 116329 - DNA, 346 bp, Heterodera glycines
gccctaataattatcattttagttgcttcttttttaagaaaaggaccctacaaattgctccttaaaaaagaattcgtaaaataggttaacattgactattagttcttacagaatgccaaatttttggggccaagtgccgccgttttcatttgaaatataaagtaacttgaaatttttcaaagcaaaaaaaaaagaaagaaaataaagtacgcacttggaaacaagtaaagtacgagtccggagtaacggtaatttccgattttactgttcttactccttgaacttctccctccccccccgcccctgttccttttagtccgtcgttgattttgggtcggggaaaatg

SEQ ID NO: 116330 - DNA, 436 bp, Heterodera glycines
  unsure (1)..(436): unsure at all n locations
attaaaaaatgtcagaatgaatgaatcataagctgaagctggattctctgttattgaagcaaacaaaaaggagnaagaatgctaaaatcattttttgtgacattttccactggaacatttaaaaaaaaaagattttaattatgcgttaatttttattccgttttcagtgtctgctaattttcgaatttgccgctccaattcgcttctgtttacccttttctgctggtcaatgactaaattttcatggggtttcctgcgccgtggcgacaatgttcgagtaattattgaatatttttaccattttcaattcattttattacatattaagcatttctccaccaatccgttctctgtcctgattttgttcgtccttttcgccgtcttttccaactttgtcaattgctctgatcctccagtcggtctttccgcaaaaatg

SEQ ID NO: 116331 - DNA, 71 bp, Heterodera glycines
ggtaaaagtttcgaaaaatcaaataaataaaatataaaagaactcagacaaaaaataaatataataaaatg

SEQ ID NO: 116332 - DNA, 93 bp, Heterodera glycines
ggtaccggtaccgctcaaccctacttttttcaaataattaaatttaatatatttataaattatgtacaaaaagacacttaaggcgtcgaaatg

SEQ ID NO: 116333 - DNA, 333 bp, Heterodera glycines
ggcagggtctttaattcctttttaaacagtccaaaatgtttaggcttaactttttttttcagaaacttatcagaagcgccccaaacttcgcagggataccgaaaggaaaagaattaacctgttttatcacattagcttgtcatcagtttttataaaaaattttcaaaattctcgagtctcctattattttatttttttttcaaaattttgaagggcgggggggggggcgggtgatctgaatttatgagtgagcgtatacagaagatgttgatgacatactttaaatggcattttacgcggaagtgaaaaggtaaaaatgatcgggctataatg

SEQ ID NO: 116334 - DNA, 430 bp, Heterodera glycines
tgagtccagtggttttgttttttgcaaatgtcacaaaacatttaaaaatttggagaacagagaaatttctattttgaccgcttcgtgtcttagacgagcgctcgcgccagtttctttgggtcggtggtcagtttggcgctgccaacttttaatgttctattcaaactaacgcgaaaaaaaccataatgccaaatatatttttttgtcaatgaaggaagccgctgcccgtcaaaatcccgctgcgtcaaaagtatttgtatgtatattttatattatacatatataaaaatatcagaatagattattctaagcaaaatgggtcgaaaaaattgaaattcttcataaatgttgtaaacacagatttctgaacaacaatgacggcgaaaatgcaaaaaattctgatcattgtgagcaaacgacaacaacaatg

SEQ ID NO: 116335 - DNA, 258 bp, Heterodera glycines
atgcgattttttgtttaatttgcggttcagaaattaatattcatttttgaacaaaagaaaaaaaagaaaaaattgaaccaatgcaacgaaagaaattagtgaattgtcatagaaacaaagaagaatgtttcttacatatcagaatctgtgtataaaaatgaaagctttgaaaaggaattttatttttcaaccgaaacttttaaaatttgccattttaattctttggataaatcttcccatttattcgcttttgaaatg

SEQ ID NO: 116336 - DNA, 1003 bp, Heterodera glycines
aggcttcagcttaggcctaggcttaggcttcagcttaggcctagacttcagcttaggcttagcattcagcttaggcttcagcttaggcttaccttaggcttcagcttaggcttaggcttaggcttcagattaggcttatctttcagcttaggcgtaggcttcagccctaggctttagcttaggcctatatccgtgttcagcaaactcgaaatccctaaaaatatgtcttccttttatttatcaattttgtcattgcttgaatctgcattcggggtttggaatcttgcaaaataaactcatactcgtgatcagctccacgaattatcctagacaacttatccacaatctattgagagaagttagtatagcacggtcgctcgagtcccagacgagttcggctcttcaattacggctctttttcatcctgaaaaagggctagcgcgcccttatttctattattcctatccatttccaccctttttacatcgattctgaccgtttttaagcatttttgagtttgtggcctatgatcaatattttccttattttcatttaaataaataaataattaattgttttctattttaagctgctgaggaacggttcttacaatcgcaaaatgatcagaagaaaattttggaaagaatcttcagtgaaatggagaaagaacagaaacagctgcagacaaaaggcgaggagaaattaaaatgaaaaaatatttaatcgaattaaatgtttccattttaaatttaaaaattaatccgatttttaagctactgcggggcaattgtcaaagattttggaaaaaattggtgaaatggaaaaacagaacgaaaacacggacaaaggcgagggaattttagcgaagaataatttatcacttattaaaaattctttttttttgaataagtttcttatgaattaagaatttcatttaaataaattataaaattttaatttttgaaaattaattttaggaattttggagcaattttcaaagatg

SEQ ID NO: 116337 - DNA, 183 bp, Heterodera glycines
agctatatgtagtattataataaaaagaaaatttaatttgttgactttgctgagggataagattttttatattgtcattttcttacccccgggcggaatttataaaatgtcccaccaatacgtaaaattttttaatttactaattatatacaatttcttattttcctaacttttagaaaaatg

SEQ ID NO: 116338 - DNA, 243 bp, Heterodera glycines
aggagaaatttacttaaaccaatcacacaattaaaccctaaaaaagtacgggcaggaagaatgaataaacaaacgaagcactgcaaaaaatcacacaaaaatcaaaatcatcttttatttaaaaatctttaatatggcgttatgttgtttttccgctctaaagaaagaaaagcgtctctttttgccaaaagcctttaatcttaaattcaaatcccattttaattattcttttagcgatccatg

SEQ ID NO: 116339 - DNA, 55 bp, Heterodera glycines
ggttttaatttgagcttatttttttcagttataaaatttttttagttgtctgatg

SEQ ID NO: 116340 - DNA, 1003 bp, Heterodera glycines
ttagttagtttttgtacagtcttatctcttatctgtttttcagcatgtaaatgattggaaagtagacttcacctgtcttagtgaaaatatggggtttcttacgatgagaaagtttcaacgagcattatcccattacggtaataaaatgtgtaggcttatgttgttgcgctctttaggatataattttacaacaccgtttctgcgaattcttttgcaccatttcgatcgaacacagacaggtaaaggtttaaaattatggtggttaccaatgcttaatcaatcaatatgtaccggaaggttttctatatttcgacgacttcatgcatatgtgcatttttttgcaacgactgacttcacctttccgtcatgtagacttagaccgggacggacgcgttgacattcgtgaacttagcctaacatttataatcgtttcttgggtggtgtttagatttcgaagaatttcttttaatgattatggcaacaaacatctaagtgttattccgctacttatcagctttgaccttatcaagtcattttatctttaggaccgcctccttgctgcccgaaaattcgacataaatagcgagagatgattagctttatttcacaattttcaccgtgcataaacgcgattaatctttaaccgagagcgaaccgctgttgattatttctttctacctttgctaacattacaatcaatcctcgcaccttctcttttctcaacagaaactcaatcaaaatgagcggactgaagcgcttccaaatcatctcatctcctaaaaaaaggacggccgacgactttccagccaaccctaaacagcttcaggatatagttaaatttaattcacctggtctattttatgttcgtgccaaagttgctgaccttcaattttccttatacaaggtattggttttccggtttatattaatagttgaatgagtttaggcgtgccctttaaaaaactttggcaaattatgtaagaaaaagcttgacagtgaaatg

SEQ ID NO: 116341 - DNA, 870 bp, Heterodera glycines
tgtcgtctgaaacaatacctaacctaatgttgtttatttatgattataataccgttattttcaaatttttcgactagcatctcgattaagtcctcgattaattgtgcagttattgctccaccgagggcaccgattgtcgcgcttgttaaaatatgcgcactctttagagtttttagtgttttggcggcttggtaaagggtagcaattgggtggcaattgctcacaacaacaataatgaataataaaaataaaaataataataataaaaataataataataaaaataataataacaataatgaataaaatcaaaaaaataaaatcaaaaaaataaaatcaaaaaaataataaaaataataataacaataatgaataataatacaaaattctgctttagttgtaccgaatcagctattgcaactttataccataaatgttttaattgaaacagctagttttgcaagcgcttacattttaatgcaaaataaggcccaaaatacttacttcagagcttttcaggttttggtgtagaacaaattttgcaaaaaaaactcataaataggctttaaacaatcacattcaaattgcaccacaaaccctcatgttggatttcgaaattggtaatgtaatcaaatgtatttgttttatgcaataataggtgccagaaacgcgtttttgcaagcagttcgcagtcttactgcactctcatttttaagggttgaacaggttcaacctgctttcaaccttttgagagcaagaatgaacctgttacaattccaaaacaacgcggattcaatctttgactattttggcaggtccactgatattaggaaattaaataaaatctaggttaggttggaaaaatgaatg

SEQ ID NO: 116342 - DNA, 65 bp, Heterodera glycines
tgcttcctaattagtggtagtaataaatcctccttttcccccattctcacttttaggatgggatg

SEQ ID NO: 116343 - DNA, 599 bp, Heterodera glycines
cccagcatgttttccactataacattctataactttttctttgtcatccaagtccaataaacttggtatcatttgaaagcttaacatgtttagaaactttttctaagctattgcacaatgaaatattaattagcaaactttatgaaaattataaaattttaacatttttcttaataaaacttttggatgggttttttgcaacaaaattacaaaaatctgtaagacattttgctcaggaataacttgtcaattttccttagaaaactattttagaaaggaacaattcacaaccaacttttcatactttaaaactgaacattaattacaattttaattatttattttttgttgtccttccattttctttcataattagcaatttttaagtttttttttggttgtccttcaattttcttttattaattttaaagagtaaatccgggctgaatcccccacaaaaatccttgttttacaggcttcgggatcatatttagttttgaatattaaatcgtgaatgcttattttgtattttttttaatttttcaaaatcaaattaaattgcatttatatatttagtcaagctaaaatttctaaaaatg

SEQ ID NO: 116344 - DNA, 171 bp, Heterodera glycines
attggacttgcttgaatgatttattttttttttcattcagttgagcattttgaacaatcattcagttatgaagggttagtgcaaccagcgaatttcgatgacatatgttcaacttcaaaaaatcaccatggaagctttggctctgccggatgcactccggtgaagaaaatg

SEQ ID NO: 116345 - DNA, 1003 bp, Heterodera glycines
tcagcatgagagaacaaaattactttatttgacttggacggtcccaggatttcggcgtgaagggcgtaccgcctccgggcgaaaatttatttttcttcatttccatcccttttatgcaatgcacatttctcaaaaaccttttgggaaaggaggagtcagacggaaaatttaaaaaaaaaaaatggaattttgagtgctatttgttaatggaatttattcaaaaagaccaaattttgggattttgagacaattgtgtaagaaaacagaggagttttagggatccgatggtggcgccaccggggaaacattttggcgattttgttaataaatttgcaccaaagattaatactaatttttgaaaaaaacggaaaaattcaaaattcgctatggtcaatttatatggtagggtgaactttattatagaatgcgttaacataaaaataaatgaataattcatgatcagcgcctaaatcacctttcaaaaaaacaattaaaatttcatgggagtcaaaaaacccataaatgaccatttatttttaaaaatttcattctaagaatgaaaaatttaaaccattatattcgaaaagggatgagatttatctttttccatctaaaagtcctatccatgcatatgtacaaatcaacaaattcaaatgaatttgctttgttctcctcatcgtttttcgggtcataattttgccgcaattattttgttattttgtgccctcccgcataaaaaaagtgaagctcatcagcagcagaaaatcctttacattacaaatctttttttacaattatacaatgagtaatgttcatttttaaataatacataaataacttaagctaataataaaatgtaaattatcgtttaaaaattaaaatgttaaacatattttttttctttaaattgacttacgctctgaaaataaaattttctttttaccgattttggcatttgaattgataaaattactagtttggcaattgctttatcattacaatg

SEQ ID NO: 116346 - DNA, 1003 bp, Heterodera glycines
aaaatggagcaaatgaataattttgaaaatttataacatgtttaataaaaaaaaaataataattagatataaaattggataaatcatcccggaacatgatgaacgaacttaaactacaaccggcttcaacgtttgcacgcataattgtcaagtgaaagtatttatattaaatggtgatatgttaaaaaattaaacttgctcatataaataaaaatcaaacattttgattttacaccaagaatgcagtaattatagtaacatagaaataatgatatttgaaccataactatctttaacaatttactcaatttaaaattaatttattttatttgaatcaaaggctgcactttatcttaaaaatatattttattaaaaattttaaaattagtaaaacatattcaaaaaataattgtaaaagaattaaattatttcattataatttcaaaatatttattttactaaaaaagcagttaaagtgataaagaagctactagttataacatatttaacataacaaatttttaaaaatcgactattgcaataacaaaaatttaatttgaatatgcaaataaaagatgcaattgtataaatttgaagtttataacaataatataatatatatttaaaaaatattatttatcgcgaaaagaacattgttttgaaaaaatgagaaagggctcaaaaaccaatagagctctaaatttaaacccaattgttgtagaacaaaaatgcatctgcattaaataaacatctaaacgcataacaaaatcatgtaattgaattaaattcaaagcagtaagaaataaaatttttagtatttattaacaattatcatatatccgtggcccattatttatctaattatgaaaatttagggaatgtgaattaaagaaaggtaaggaaaaatgggaaagttgagtcgatgaaacaatacacgttaattatccctatttttgtggggaaaaaacaacaacacgtaatttaataattatgttttgttatg

SEQ ID NO: 116347 - DNA, 220 bp, Heterodera glycines
aaggattctcacaattgcaaaatgaacagaagaaatttttggaaaaaatcagtgaattggaaaagcagcaaaaagagcagcacgaagaaatcacgaccaaaggcgagtgaattttaagctaagaacaaatttattatatgaattaagaatgttttatttagttaaatcgtccattttttaattttaaaaattaattttagttgaacaatttttaaaaatg

SEQ ID NO: 116348 - DNA, 262 bp, Heterodera glycines
ttttgccgctctggtgacggccggcgggggtgacgcttcgtgtgcagctcgccccggtgttgggacgccttcgatgcgcggtactgttggaggcggaattggcggacttgaggtggcatttttttaaacatttttttcaatgtggaggaaaagaaggtggcaataccaaattttaaaattaaacatttttcgtttaaaggcgctcccgcccagtgtgcgtgaggcggttgcacttgtgcatgcgcggcagatgcagaagatg

SEQ ID NO: 116349 - DNA, 132 bp, Heterodera glycines
aagtcctatttcattttcaactgattgattgcattgtgcctgtgaaaccttaaggtacaaacactaataatgctcgtctcgttcatttgttacatttgttttagagtgagcatacaagttggtgcaaggatg

SEQ ID NO: 116350 - DNA, 261 bp, Heterodera glycines
gctagaaatgaagttgtattacgccaacaaaaaagataagtaagtaagtatccatatggatgtgcaattctcgaaaaatacgtggaagaattttcatggcgtaagcgatttcaaggacgtggtgtttttttaatttttggtctcaagtggctgctatttatgaaatttcgtgaataaatatcagatttatgttttatttatgttaaaaagtgtttaagcaaatgtaaaatgagtgcatttataggcatttaaaaaactatg

SEQ ID NO: 116351 - DNA, 788 bp, Heterodera glycines
tcttaaatgggaagtagttacaagggggccagggtcccacttttggcgctaaatttgaattcaaaaatttgaattcaaatttgggcttgctttttttctctgcctatagggctatttcgtttattggctcgtgcctattgagcggttttgggaggtcagaaggtgtgggacgtgtttggcgccaagtttagaatttaaaattttctttttttctctgtcagaaagactgtttcgtttttcgtcatacacctattgaatggttttgggtgatgtcagtggaaatgaggcgctttggcgccaaatttaaattcaaaattcctgaaagtgttgaaaattgaataatttatgttttaaaccaggccagcgaccgagttgcggcgccggtcgtggcgctaaatttgaattcaaaaattcgaatcaaatttgggcttgctttttctctgcctatagggctatttcgtttattggctcgtgcctattgagcggttttgggaggtcagaaggtgtgggacgtgtttggcgccaagtttagaatttaaaattttctttttttctctgtcagaaagactgtttcgtttttcgtcgtacacctattgaatggttttgggtgatgtcagtggaaatgaggcgctttggcgccaaatttaaattcaaaattcctgaaagtgttgaaaattgaataatttatgttttaaaatattgtactattatttttgtaaataacaaaattttttattctcctagaaacaggaaattttttaattgttttcagcttttgtatcggaatg

SEQ ID NO: 116352 - DNA, 628 bp, Heterodera glycines
gctaaaattgcaatggaattgaaaagcgaatgaattctctcgcctaaattgcatttactgtttttattttaattaacaaaaacccttcattttaagaaaaatttactgttttcctgaaaaattgtttgtaatttatttacataacaatgcaaacctttttacctattttatcgatataatgtttaaaagtaattttttaatgatttttttttggaatcaaaatgtttgggtcgaattcttttcgttattttgataaaaacttacgagctctgataagaaatatgtgctttataggtttttacaagtatgctttttttaaaaaaggacaaaagctgtaattgaagatttcataatttctccagctaaattagttttttcgcagttcattaattactttactgttcgctgttttgaaccagggatggacgaaatttcgtttcgttttcgtttcgtcctacattttcggcactttttgagtttcgttttcgtgtttcgttttcgtctaccaaagttttttcgtttcgtgtttcgttttcggtttttaaattttggattttcgtttcgtgtttcgttttcgtcagagcaaaattggacgaaaaagacgaaaatatttacacccttaagaatg

SEQ ID NO: 116353 - DNA, 147 bp, Heterodera glycines
tattttctcatttcttattcatttcaacattttctgtatccctttccccacattttttttctccttttccatttcacaaatccatttcaattaatttccgtacattttagctataacaaatccaaatttccttttcccaaaaatatg

SEQ ID NO: 116354 - DNA, 358 bp, Heterodera glycines
agtccatgctttggcattttgggggggggggaatttcggaaagaatgtacgtccatacgaaaccttggaaattgttaaaattttgtcatgattttttttttaattttgaattatgaatttttcatatttcgggtatgaattagtattagagaccggacaagtgattcactcgacattttttaaataaaaaaaaattcttaaaatcgattttcggtaaaaatccaaaaattttgtgttaaatttagcatttcccccccccccccccccctcagctgccacccattgtcatgacgcgcgctatttgctgggcaagggtttgtacgccaaatttcgaccgaattgggatgacaagcaaatg

SEQ ID NO: 116355 - DNA, 322 bp, Heterodera glycines
tttaattaataaaaagtgaaattgcaaaatcaaaaattatgtgaatttttagacaaaaaatttttaatttggaatttaacaaaatggaataaacaaaatgaaaattttcttcacaaccttcgtagagtgtgctggctgctctcaaaaattaagtaaatacaagaaaaagtcaaataatcaggtcaattagtgtgccattaattccttattgcaaaataaggacaccaagccaaaagcaaggacttttcaagggctgtcgttcatcaaaaaatgccaatttttgaaatttctaaaacaatttttccgaataattcacgagatg

SEQ ID NO: 116356 - DNA, 119 bp, Heterodera glycines
acaactgtgtttgattagaagaggcacaacagtgatgagaagaggtacaaaagtgattaaaagaggaagaacagtgattaaaagaggaagaacagtgattagaagaggtacaaaaaatg

SEQ ID NO: 116357 - DNA, 214 bp, Heterodera glycines
ttccaccacggtgcccccaacatcaccgctgttatttgagcaaataaagaaagaaaaaaaatatgtgatttattcttcatcattgctgatttcgttgtcaaggacaagcaaaagtgcattattttcggggtcaataacaaatgaacgcatccaaacagcacatctatttcgacgcatcaaccattcccgagcgcgatgttaaatgataaaaatg

SEQ ID NO: 116358 - DNA, 197 bp, Heterodera glycines
atttatttaattgttgataaaatttatttgaaggattgtgtgccgtttttatacaagctttgagagcattggccggaaacgaaaacactgtgacaatttattcgcttattatggaattgctaaaaaagggtgccaaaaaagacgacgaaaaaatcaggaacaaatttaaaaacttggcaaaaacattacgccaaatg

SEQ ID NO: 116359 - DNA, 96 bp, Heterodera glycines
ttgtttgtcggctgttgcaccattctttggatgttttgggaccgattcaaaaaaacaccaaaacctccagcagaccaaatttgcctcgacaaaatg

SEQ ID NO: 116360 - DNA, 116 bp, Heterodera glycines
tttgtttaatagttaagagattattattatttctgtaaagctttattgtgtatatataatattttttaaacatggataatataagataaaccgttttgcaaaaaaaaaaaaaaatg

SEQ ID NO: 116361 - DNA, 247 bp, Heterodera glycines
atcggcaaagtctctccaccacgtcatctaactaaatctaaagccatttatttttgccttaatttctaccctcaaattgcccaattgctatataattataaaatgtaattttaaattatgtataaatttcaatttttcacccataatttgtttttttaatgctttttctatgcagattaattacctttatgtttccattaaattttgattctttatcccccatccaagggataattaattaattatg

SEQ ID NO: 116362 - DNA, 174 bp, Heterodera glycines
taaatgcaaccgctttttttgattttatatttaaaaaattattatttattccttaacacaaaaacccaattatttccaatatttttaaaattaaatatttacattaaactattaattaattaagccgaaataatttcaattgaatttgctactaaatatttcgcagcagagatg

SEQ ID NO: 116363 - DNA, 484 bp, Heterodera glycines
  unsure (1)..(484): unsure at all n locations
agatagctaccaataaaaatggcactaattaaaaagtggcatttttgaatttattaaaaacanggggaaagggacccttttggtttgcaaattatttttgtcataataaatcgtgaaaactttgtttacaggggtttttggtgtcattgataatggatttgacagcaattttgaacaatatctaatccctaacccgaacttaacaaaaaagtcgaaaatttaatttctcgaatttcatttttttttaaattttagttagagattcgggattggatgaaatgtttgtcagattcgtgatcaacaacccggaaaattctcggaaacaattttaacgagtagacatcatcttaaaaaatgaataatattgcaaaccaaaaggttccttccacctttggtttttaataaaatttaaaaaactgacaatttttagaagcgcctataaaaactaaaaattttttttattgttgcagcatcccaaacgatg

SEQ ID NO: 116364 - DNA, 173 bp, Heterodera glycines
atttaatgtttctttttttgaatcacgctgacacctttaaatttaatcatttgtttttgtaattgatgctttattaaaaccaataaaattttaacaaatatcctttaattgactctaataaatttcaataatttttttagtcttactaacataataattttcaggtataaatg

SEQ ID NO: 116365 - DNA, 414 bp, Heterodera glycines
ataataaaattattatttaaactatgcgcataaaaaactaacaataaaaaaaagtgaaatgcatcaaaactttagcatctgtttttgtttttattctttagcatgctctgcaaatttcttgcaaaaaggcgaggagcaaaagcaccaaaatgaccatgccgaaaatgaccaatggggcgaaacgccttctgcgccgctgttgctttttcagcttctcttaacaaatgataataataataataatatattgtaatggcatttttttaattaaatttttaaatagtaatctaacggcacatattctacaatacttacacataatgatgatagtacaaaaaaataaaataaataaatattctttaaactttccccataaataacacaattcgggaacccgtaaatctcttagagatg

SEQ ID NO: 116366 - DNA, 374 bp, Heterodera glycines
aggagtgatctgatcacttggtgttgctaccttttttgatcagcatccaaagttatgcttacctgaatttttttagatttttttaatgctgtgaaaaaaaatatgggtagtgttgttaaacatatgaccaccccaaaaagggagtgcagttggtaaaatggtttgtaactaataaggatagtgaatggtatcattataaagcccacaaaaaatgctacaagaaatataaaacatatatacacaatatagtcatattgagattttataatcaatttaaatcaaatttggtagaaaattttgagtgttgttaaacatatgaccatgactgtatgtcattttaatttacttcttcttctgtttacttcccgcagatg

SEQ ID NO: 116367 - DNA, 617 bp, Heterodera glycines
tttttgatattttaccccctaataaatttttaattttgttttttttcaatgcacagatccgaactcattgagcgtcgcgttggcattcgcttcttcggcgatcggtcgctgttgcccgacaaaatttgcaaattggtggaggaaattgaggagatcagtgggacgacgagcacagagggcgaaagtgctacgaaaatgaggtgacaacaacggcccacagaacaatttgcaaaattacgctcaataaaattatttgcaaaaaatgaacattttttgaaagttaatatttttaaataatttctccattaaagttaaattatgttttcacttaaaaatatttttaaaaatttatttacatattttacaatttttcatattcattgatatttaatagtacgcattttctgagtcacagttctttcgcgaaactcttccaggcaaaccaaaattaactcttaacttaattcaaaaaatttttttctcaccaaaatgctattcgtctggtgtatgatttaccccaacttggggtatgaaagcgttcgaaaaatggcctagaaatcccttttttgtttgcaggactttcctgaacatttgcctctcttacacctcacaaaatg

SEQ ID NO: 116368 - DNA, 1003 bp, Heterodera glycines
tgctgaaaatgtgggagagagtggcggtcgccttaatcgatttccaccgccgacgtccgcgtggcccgtcgaataataaataaataaatgggtggtcatttgaccgtggtcatttatttgtttgaccctggtcagtcgggaaaggaccgtttgggcgccgccgtttcgacgcgatcccaagtctttgactatattttttttaagtttcaacaaaatctaactatcttagtatcatttgaaagcccttcatctgatctattagccttacaaaaagcaaaaaagcttttctaacctataaaaagttaaactaatcgcaaaacaataacttattgttagaaacagcttccaaacattataagcgctcgaatgataccaattttgttagatttggttgacaatgaaaaaaaattataggccaaaaacttgggctgtcgacgaaacgagcctactctggtcaattgaacggtcagcagaaatttcaacccatgaaaaattttattagttttttgaaaaaaatattttttggaattctttccttatattttcacctttaatttaacaaaaattttaacaaaattggttatatttatttctttgaataatttaattttcaaaatttcgaaacttctcgcaatcccgcgcggaattccgcaaaccaaatttttatgaataaattacaacatgtacacatttatacatttttggtgcttacctataacaccgttaaaaagtgttgagaatagacaaatataaaagtccttggagaaataaaaatgatatgtgtagcaaaaattgttatttaattaccgtaaatccgttatttgaaggcccgggccttctattgttcaacccctctataagtcaaatgtgaattgcctattttttgtacgtctacctatttattcattataaccatttttacattcaaatttcatggtaaatttgtaattttgaataaatttagtttaacaaattttgcttatatcaatttctcaataagatg

SEQ ID NO: 116369 - DNA, 371 bp, Heterodera glycines
acaagcggggagatttctctcccgagggatgcacgacggagtggcgggcgcgcactccggaggaagtgcggcaatgccgtcccgggcccagcggcacgagcgggagccggtccgggacggtcggagcgggtccgagccgacccagccgaggagaagggaacgggcgaaaagtggaagccgagggtacgaggggagcagccgagagcaagcggcgggtgtggacacccgagccggtgcgcgatgaggtcgctgaactgctcgagcagacccgggcactgaaggaggcagaagcaaaagcaaaggaggacgtccttcgctgggagcggcgagccaaggaagcgaaagagaaggcagaagaggcagaagcgatg

SEQ ID NO: 116370 - DNA, 283 bp, Heterodera glycines
tgactttaattttcatcactaatttttcactcagactcccattcttaccagtgcttgtttttcccggttccggttgccctaccgggaccgggacctgagcttttcaaaatccggggccgggaattcccggcccggtcccgcttcactctattaaaaagttaaatctgattttaagataggtaccatccaaaaataaaataccttcatacataaatcattcttttattcttttttgttatctgtttttcctttgcatttattaactctttttcagccagccatg

SEQ ID NO: 116371 - DNA, 389 bp, Heterodera glycines
tttcctgctgctgcggttccgtcctccgattactccgtccctccgtggtccattcaaattattcgcctctgtttggcatttcgaagtgccccttggcaattattcgctcattcttccgacagcccccgcggcgtttcttcccttccccggcactgtttggctgagtttcgtctttggcccccgcttcttccgcgcatccgtccaccctttgcgcatgcctctgccccgtgcggccccgtccccgtcgttctcatccgctgaatctgtcaactctggccccacagcgcctccgtccgtccgcttcccccgcttttcgggcgttcgtccttctccttccgcttctcctccgcagttttgtccctatctcagcgcatccttcgggccaaatg

SEQ ID NO: 116372 - DNA, 262 bp, Heterodera glycines
tgactctgatcgtattacactaaccattcacattgaccaactgtctgtcaatgggtggcgggtgtaatttacgttccattccctcgctaattatttaatggtctcttttcgttgtgtttgtccgtttttccacttttttttattttttgtataagtaaaatgttttcattaatattattttttatgtcgattatcaattttcatacctttgtcaatttttgttaattctaaaaccttcaaaaagatttaaacagcaaaaatg

SEQ ID NO: 116373 - DNA, 329 bp, Heterodera glycines
agaagaagatgaggaggagggaggaagaagaggaagaagtaaaaggaggggaaaataggatatatggaaaaataaagaggcaaaaatgaaaaaccaaaaaaataatttttttaaatttgtgaggatgaacagatgaagaatggcaaagataatgatgccgatgatgaagaagagcggatgttagcaaagctgaaggaggcggcggaaatggcacggcggcgccaaaaagaggcaaaaaatgaaaattagaagcaattaaaaatagaaaaaattgttaccaggaagccaaattgaaggcacgaaaagaagcaaaaaagcgccaaagaatg

SEQ ID NO: 116374 - DNA, 125 bp, Heterodera glycines
aagggtgcacaatttcggtgcacaaagtgcgcaaatttagcaagagatcatcgggggacgaggcggaggaactgatgttgcgcactttgaccagcccggactcggccgcctgaggggacaaaatg

SEQ ID NO: 116375 - DNA, 422 bp, Heterodera glycines
tgtagcttttccggatccaggcccagaattttttgaaatccctttttcttattatgatttcatgtgcatttagataaccgcgctgaaagtgtccgccactgtgctcgtgttcgtcatgcctttcctggtccgaaaatgctattcaatcatcgccaaacagttcaatttcaaacgtaatacgcagtccaacaaaaaccgcatttactgaatttgagccccctctcccccctaaaataaaactctcattttgaggggagaagggttgaaaaataaaagcccccggggggctctgatccaacaaatgtcaaaattacatatttctattaaaaaaattcacattttttttgttgttgtcagtgttccaaaatggctccaaaaaagtgtgggcccttctcttcgcctatttcttcgcttctctgatg

SEQ ID NO: 116376 - DNA, 64 bp, Heterodera glycines
tctaaaaattggacaattaaagcaattagaaagaaaataaacgaatgaaaatgaaaaataaatg

SEQ ID NO: 116377 - DNA, 166 bp, Heterodera glycines
  unsure (1)..(166): unsure at all n locations
actcaatgaccaaccaacntgttggagaagcagcaggagttgtccctgctccgtgtgcagaaccactcgttgggcgaacagttggcgctgtcccaaagccgtgaacagcaggcgaggaaggaactggaaattttgcgcgccgcgcgctacaacaacgaacgccatg

SEQ ID NO: 116378 - DNA, 81 bp, Heterodera glycines
aattgaaaggaaaaggaaaaagaaaatgaataggaaaacgatttgaaattgaaattgatattgtaaaggaaaaggaaaatg

SEQ ID NO: 116379 - DNA, 101 bp, Heterodera glycines
ttgttataggccattcatccaatctccatacttaaaagggggaattaatttgagggttctcgccaaaaaacctttttaagaaagaggaagtgcagccgatg

SEQ ID NO: 116380 - DNA, 270 bp, Heterodera glycines
agaaaacgaaaaggggaactcatcccccaactgtacacaatgtacggtagaaaaacgaaaggggaactcatcccccaactgtacacaatgtacggtagaaaaacgaaaggggaactcatcccccaactgtacacaatgtacggtagaaaaacgaaaggggaactcatcccccaactgtacacaatgtacagtagaaaaacgcatcccccaactgtacccaatgtacggtagaaaacgaaaggggaactcatcccccaactgtacacaatg

SEQ ID NO: 116381 - DNA, 1003 bp, Heterodera glycines
ccaaaattttccctctttgtttgcttttttccactaaaaaatcgttaataaaaatttttatttacctattttggtacctattttggaatttttgtacctatttaatacctattttgagattttttttttaactttttaagtacctattctgcgattttttttacctaaaaatcgaagccctataaattaattgttagaataaattatttctttaataaatgaacaaatatttattgggctcaataattcattattttcccgttttcaatggatggtgatgattcattttgcttcagaacattaatcaaaaatttaatgtttaaaaaagaaaagaaaattaattgactattcataattgatatgatcgtatgaatggatgggtggtctaaatgaaattatcggataaattaaaaagacatttttcgaatggtttttcagtccaatgctttattagtttattgttgcgaattgctcatttcaagcattagtcactgttgttgagataatataataaatttaaaattcgaatttattatttctattttttagttcgatggatatatcaaattaattgataatctgcataaaatgggtcactggtcacccatttggcctataaattagtttgccaggaatgttcgcatgggtctccgttttgttcaacagttcgttaattttggtcacttttacgaaaatgtaagattttttaaaattcaaatttaatttattttcggtttaatgaaaggatcacaaggtgtggtattggctttcaattcgttttgccaactgtttttcgcttgtcctttccttgccaattttttggccctcattttacagtataatacagtccattaccgtatctgtactggtactcttatggcatcaactttgacatcgtatgcctcatttttgacactttttttgatatctgccgaacgattattgattgttctgtttccaattaagaaaataaattttaattatttaatcattttttagaatg

SEQ ID NO: 116382 - DNA, 548 bp, Heterodera glycines
tacactttttgtatcagttgaaggtttaaagtctcagcaatttatgcgtaaaagaaaaaagcaaatattgaaaagatttacaatagaaaatccgaaatttagctgttttttcgagtatattcaagataaatgtttgatttgtttttgtaagcgcaggttttggttgcaaactttcgattgataccaaaaatgtacgatttggcaaagtaagaaaaagtctgaactcgtagaattcgattggacattaaactgcaatacaaggcagtttcttcataaagttcattttgtttttaaccctatttaggtaagtatttggaatgctttatctgtgcctgtgatactttcccgataaaccgtcattttgtggccagttgctatcagctttaacctttcatttaaaacatgttctctttgttttgtcttgcataattgccaaagtataaatggtggaaagaaacattttaattttattcaaaagtttgtcctgacgctgcttttgtatttcgtgatttggtgattgcaaatgtttttttcttttttaatggatg

SEQ ID NO: 116383 - DNA, 639 bp, Heterodera glycines
tgctttaaggttttgtctttgactttgcttttttgtcctcacccatggatcgaccacgttaattcattctctatacatttcttttcttatttcatgaaattatatataatttaattttaaataaagaggcaaatttttacagaaaataaatagacgctgactaattagctaacatttataaagaaagtagaaatttgattaaatgcatatacaaaatattacttttttaaaatttgtataaagttcctagtcgtatgtgctttgcgttggttggttggcgtgggtgactgtggtggttgggccgtttttgcgatattatggctggaaaaaagatgcgatttcgctatggggagcgcggccgtctgggttcaagtgcttgcttgcgcttgtgctcggcattgaacggtgatggctgctgctggggtgccacctttgtcgtggcctcagtttctccagcgattggcagctgtcgaaatgaataaacatgcagctcgtctgtgtgttaaagaaatttggcgagttaattgacttgtgtaaatgtggcctaaggcacaaatgctgtggggaactcagcactggggatgctgaacctaaagttggtggtggtgttggtatacgagtgagtggcgtattgccatg

SEQ ID NO: 116384 - DNA, 1003 bp, Heterodera glycines
ttcagtttggccggattttggtccatctttttcttcaaattattattgaaacaattattttcttattattttttttttgtgcttatgtgaggatagttaataatgtatataattaatttaagtttttactttctaaattatatttgtaaataataatgaatgcacctttttaattcttatttttatattgctcatacattattaatagggttgtaaattatatagattaacatattttttctgcgcatatgctatgaagaaaggggcttaaaaatagcatttctgcgttaaaattttttgatttggtgaaggtttttagtccatataaatccatattttgggggttttcgggaataaatccatatttcgccatttttgcctttttagtccatattttggccattttttggaaattttcacaagaaaaatgaaaaaaaaacgaaaaatacacccctaaagattgattttttggaaatttttaaaaattacaccccacaaaacacgaaaaatttgagttttcatcgtcattttggcattttcaataaatattttcgtcatttttttgcgaacatttcttttttttaatgagaattttttcgaaatttggcaaacttggaggtgtttttgatacaacgaacaataataaaaaatatgcatttttaagttttaaaccccattttttggttgtttattgtactttttaggtttatttaagcaaatattaaatatgcacaccttttttgggatttttgggggtttacaacatatattttggcattttttatccatattttggtccatatttggccatttttggcctggagaaacaattcagtgaggaggtccttccgttgtcaaattctcctatttctaaaaagccgaagggattgcttgatttttttgatcatacgctgtcagcatcgtcagtagtcgagacaaactcacgtaaaaaaaccaatttttttcatttaaattttgagttatagaagagcgaaatgcaatg

SEQ ID NO: 116385 - DNA, 57 bp, Heterodera glycines
  unsure (1)..(57): unsure at all n locations
cgatgctctaaaattgcataattttaaaattattattntagttccctaattagcatg

SEQ ID NO: 116386 - DNA, 322 bp, Heterodera glycines
tctcgtgaattattcggaaaaattgttttagaaatttcaaaaattggcattttttgatgaacgacagcccttgaaaagtccttgcttttggcttggtgtccttattttgcaataaggaattaatggcacactaattgacctgattatttgactttttcttgtatttacttaatttttgagagcagccagcacactctacgaaggttgtgaagaaaattttcattttgtttattccattttgttaaattccaaattaaaaattttttgtctaaaaattcacataatttttgattttgcaatttcactttttattaattaaatg

SEQ ID NO: 116387 - DNA, 830 bp, Heterodera glycines
ttttggggggggggggggggagtttttttacttggggccattaatagaatgaatgaatgaacgaacaaacgaatgagtgagtttgaaatctgaattattatattatatttttctattaaaaaaaatttttttttacaagccctcctacaaaaatgtcctaacagtaatactcataattagtcagcggggtgcaaattaatgcacctactgcctcgaatcctgtgccagcacaggatcgggattatgccattttttttattgatgaaatttataaatttctataaaatttgccaaatccgctttttgtaagaaattggagtaaattatgatgtaattaaaagattaaagaaagaatttggcatttcgtggtaatgaaatagccgaaaatggaaaaaatgtaaaaataatggcaaataaaaagagaaaatccaaaaaaagaatcaaaggggaattgcaaaatgatgaaaattgatagaaagagcatttcaaaatggaaaaaacaatttggaaaagagattttggagggtttaatgagggattttaagaaaaattgaagaaattttccttaaaaaatatctgaaaaactatgaataataattttgaaaataatttgcattagataatctgaattagccgaataatttcctgacttttaaattaatccatatttataatcaatacaaagcaataaattctcatttgtaacgtttaaatacattcataaataattcataaagcagcataattacctaaattcaatcattaaattgaataaattaatttacaaaattgctaatttaaaagtttttaccaaagaattataaagaatg

SEQ ID NO: 116388 - DNA, 299 bp, Heterodera glycines
ataatcccgacaaatttaaaaaataaataaataacattatttccggtgaattaaatcgagaaaggatataattttctaatttccaatatttagcaagcttaatgaaccgaaagaaaatagaaattattcaaaagtcgcgtaaacgcgggtttatgtgcaacaacaacagtgaaaacgaagcaaattctgaacaccgtgaacaaaactactacaagagtggactttgtctcatttcaccgacaattctactgatctcaatcagttgagttcaatcgattcatttggtctgttgccctatg

SEQ ID NO: 116389 - DNA, 80 bp, Heterodera glycines
aggggaattttcagccattttttaattttagaattctcatttttggccgactttctttcggaaattgggcttccgaaatg

SEQ ID NO: 116390 - DNA, 103 bp, Heterodera glycines
aggaagaaacgccatagaagtgatcattttgcttttttcagcaaagacggcatcgttgttgtatgtcttaaaatgaaaaattctattggaaaatacaaaaatg

SEQ ID NO: 116391 - DNA, 1003 bp, Heterodera glycines
cataaataaaaaataatattatttcaaggattattaacataagttttaataaaaatattttttaaacaggaaataaaatagttaaataaattctgaaaattttgatcttattttcacaatatcaaaaatttttagaaaaaattaacaatgttttaaaatatacagataaatttggtcgaacagaaaatatgatgatagcataaaagaaaataattaaaataaaaacaataaaatataattaatggattgattaaagtgaaattatttttaaaatatttatagcaaaaaaactcatttatttttttaaaaaaatcatcttctttcattgttaaatgaatgctaatcatttcataatttcccagtaaaagtttaaatttttaaattatttaacaaataaacaaataaaatggagggaataaatttcaagcggactaaaaattgaaaaagcaattgataatttatcagaaaatgaatataaagataaattaaaacttttaaaacgcattaattctttagaacaagggaatttcaaataatgttatattttctgtgatcggacattaatttggacattaagaaagtgagtgaattatttcaatattataaatggatttaacaatgaataaatattttcttaggatatttggcaatttcttcgctcaaaattttaaagcatcatcttacagctaatgattgagaactatgagagcggcatgagttgaagaaaaagtacaatttaattatacaggacaaatacgtcattaacattaattacacaaataacaatattcaatccataaaataattaataaattaaattaatccaaattttatctttaaatatataattactctcttttataatattttaatttattaaaatttggatgaaaaggtaaagataaaaaagagttgattgttgaattatgaaaaaaaaaaaattcaaagagatttattggcgggtcctgtttttcattttaagggcctttgtgctccaataatg

SEQ ID NO: 116392 - DNA, 455 bp, Heterodera glycines
ttttgaaaacataaaaaatttttcgaaaaagctttgggggggacaaactgcactattaccaaattttcagttaggacccatggttctatatatttttcgcgctagtaaagcgcagagcttaatttttttaattacccaaaagggtggggagataaatttagattagcgcttcgtaattggtttaaatggattgtctgattccgatcaccgacacaatatcaacgggaacaagttaacaattaataatcatcgtacaacaaaaagcataccaaaatgattctccctgtattttaataaaattcgaacccttttcaaatagcgccgcttttcctaatttccctgaagatatttaaaaaaggattatgcgcataaataaaaattcatagtcaaatttaagggcggatgaggaaattttattcgattccgacgacgagccggaatatctctccaaaatg

SEQ ID NO: 116393 - DNA, 280 bp, Heterodera glycines
ggatgcaattcccgcccaaatgttgtacagtatgccaccagtcgatgaaatgtcattctgttggagttctgtatgaatacgcggacaaatttgttccaaatttcaacaaatacaagcaaatatttttgcttgttttctttttctgtactcgttgtaataaaattgaaaattttcgtaaaaattgccataattttggcaaaatacaaacgaattgacagccgattctcagcatcggacgaaacggttggatttgtgcaaaacaatatggcgtaatccaatg

SEQ ID NO: 116394 - DNA, 433 bp, Heterodera glycines
  unsure (1)..(433): unsure at all n locations
ccacgcgaaaacgaccccgaccgctactcatgagttgaaatagcgaggactgagttggcgacatttggcgttttgttttttctgtctaattctttgctggcttgtgtattcttttgttcactatttctctcgcatttaagctctgtgcttaagcttttctgtttgttgctgcttttccatntcatttatntagtagtcaatcaaaaaaaaaaatcactaaattacgcgtgtcccttttttaatgatccattattttttattttttggtttgcttcattgattttgcataaaatttattaatttttttttgatttttaaaggatgtgccgtaactcttctccgcttgtaaattccgaattgtttcggacaattttttcgctcagccttctcacttttgtcaattttttggggctttcatcggcccaacaagatg

SEQ ID NO: 116395 - DNA, 1003 bp, Heterodera glycines
attttttcgaattttccaaaatcccgcaatcccgcacgggatcccgcaaattttaaatgcgggatttgcgggattaatcccgcgggatcccgtcccgcaaaaaattttgagttccagtcccgcagcgggatccgcaaatttgaaatttccggtctctagtaaaaacaattaaaatcaaaaattaattgatatataatattgatttgtaagcatattttctgtttccgatagatagcaccccccccccccccatgggtcggggagcaaccctagtttataagaagaatcaggaagctaacaaacgttttttggctacctttttcaattattttcccaacttttacaccattgatagagcttcaatagctctacaattttactcagaggtgatctttcgctttttctattgataaaaatggtttaggtattgtttttttttgggaaaagataaaaaaattcaaaaaaaccgaaacggtataccgaaaatttttcttcggttttttcggtttcggtttttttcggtttttataccgaaaccgaccgaccgaaaatgaaaaatttgtcgccgctgggacaaattcaatgagatttgttaatagatttttaactcaaagtttctttgaaacaaagcgtggaatggggggggcgagaagccctgcattaattaaatggagtccctaataagtatttgtccaaattttcacgattaaaaaattctcataaaatgccatatttaagaactttttatccaaactggcaaatttcaataaatacttttaatgatggcttcgcctccatgttgcttaaaaatatgtttgaaaaaaagaagatatttttactcactgcttgtcatcttttgttttttaagcaatggattcaaatggacaaaaaagcaccgataaattccgtcgaaaaggccaatttttcgaacgcacttcgaacccacaaatttgaggctgttcaggcataaaatgttaatgtttggttatcatcccataaaatg

SEQ ID NO: 116396 - DNA, 435 bp, Heterodera glycines
aaaacagacctaaaaaacgaaaaaagaatattatttttctaatatgtgtaatatagaagttagtgaaaaacagtttaaaaacctttcatttaaaaaaaatatattaaaattattataaaatttcttttcccaaaatttttagaattaggaaaatattttagaacatatgcaattaaaatgaatattttgggcatgaacagcaattatttttattattatcttttttggaatctcattaaattattttaggaaactatgctaataaaatgattatttttggtcaagaacattaaatatttttagtttttatagatttttttttcatttgagtattccaacagccaatttttgccgtttgaagcgtaaaatctattgattgcaaataaaagtatttgccaattttaatttgggcaaacattctcaaagatttttatg

SEQ ID NO: 116397 - DNA, 87 bp, Heterodera glycines
  unsure (1)..(87): unsure at all n locations
tttgtgaatatttgaaggaaaaagaagcgaaactgaataanctgattgcaacaacaaaatnntatggcggagcaattngaaaaaatg

SEQ ID NO: 116398 - DNA, 633 bp, Heterodera glycines
atttaatcgccactcatagagtatcatgcgaaattgacgttatgtaaatttacttttggcgcaagcatgttgactcggtttaaatttaagattccgccatttttggctttccataaaaatggcgttctgtaaatttatttgtttaactttttgtaccagttagaatttaatcgccactcatggaatatcattgcgaaactaattttatatgagtttttgactttaaaatttagcgcaaaattcgaattgaattttagcgccaaaaaccctgttattgaaacgaatttggcgttgtgtatggcgtattgttagacaatttgagtaatttgattgaattttagtaccaaaaactatgttattgaaacgaaattggcgttgtgtatagcgtattgtaagacaatttatagtaatttgaatttaattttggcaccaaaataagctggcgttgcgtgttaaacaaattattgttcggctatggtcttaatttgaatttaatttttagcgccaaaagtatgtattgaaacgaaagtttgtcacaattaatataaatagccgtcatttcttcacctagtaaaattagccattcatttgataaattttacaaaaaaaaaaaaaaatcaattattcgtaatg

SEQ ID NO: 116399 - DNA, 164 bp, Heterodera glycines
tctgaaggccgattgttttggcaaaatgtaaatgtgaccgtactgtttcggatagtattcaacatctacaaatcctaacgaactgaaatttttaagatttaaaatatttcaattaagaaaagtcgagtggatcgagttttttcccatcaaccgacaaaaaaatg

SEQ ID NO: 116400 - DNA, 161 bp, Heterodera glycines
cctcccccaatatttcaattacccctccccccccccccccggcattcttttgcacattgaattgcccacaaatggtttattatgaaatttgcaaaaaagccaagtgcaaaagtgctaaggttcgaacgatccgttaaatgccaacacaaaattccaaaatg

SEQ ID NO: 116401 - DNA, 497 bp, Heterodera glycines
ttttgactgaaaattaaagaaaaatatgaaaaaaataatacataattctgatggacagagagagacattaatagaatacttttttatcatccgttcacaaactctttagtagcagcattttaaataattttaacttatctacttctctacatcaggatttttaccgcttccctcacaaaatttcggaaatcggctaacacctatccctaagctaagaatcaaactaaattaaaacctatatttttttaattttcaaattttaatctcttgtttagaaattaattttgtttttgtcaaatttctgataagcataaaaccatgagaccaatttgtaattctgcatataggtaatacaaatgtatgaatatctttttgagatgctttcatcacttatatttatttatttagaattgctaattaggtacctaattacaatttgttatgacctattttaatttacatattaagcataataagccgacctaattaaaccgatg

SEQ ID NO: 116402 - DNA, 59 bp, Heterodera glycines
agtaatcattttttgggttttttataataattttaaatttttttaaatttaaagaaatg

SEQ ID NO: 116403 - DNA, 81 bp, Heterodera glycines
actgatcagagggacaaaaagcaataaaccaaaaaaggaaatggacgtcaaatagaagagacggaaaacgagcggaaaatg

SEQ ID NO: 116404 - DNA, 186 bp, Heterodera glycines
tgcccgtcactgtgacagtcactggtgacctacacagaccaagtcgttcacccgaggaacacgcgcattcaaattcaactcgattcgcttgctaacggcccgcgcgctttgtgtaataagcgagtagcactgaaggtcaacggactctcaagcgaagtgtgtttgtctcgaatcagctcccaaatg

SEQ ID NO: 116405 - DNA, 123 bp, Heterodera glycines
gggccatttgatgagggttttggcttgaaatttactaacccgacatacgccattcaaaggatgctgcttccgccgattttaccagttattacgcggcgcatatgcaagcgatgggcgccaatg

SEQ ID NO: 116406 - DNA, 298 bp, Heterodera glycines
aaatttatttccaaagctcttccattcacttgttatgaacattgataaagctaatgacatcatttgtggtaataaattatttcaaaataattttgattttttcgacaaaaataaaggtaattagaggcatatgattttttgccaaattttataaaaaaaagtcattgttgacctaattgctaaatttttattggttgatcatttgaatttcatttctaaaatataataattcaaattaaaataattttaaggatttatttatttcaaaattaaaatattttgttggcggcactgaatg

SEQ ID NO: 116407 - DNA, 271 bp, Heterodera glycines
aaaaaattatgaagatttttcaattatacgtgccatatgttaattttttaaaaattcaaaatcggaatcgtaatcgtaatcagaatcgctattaatcggattttgggccataatcggaatcggataatcgtaatcggattttgccttgaaattcgattattacacccctaagaattgaccttttgaaggaatttttttagcgagaataccaatgaattttgaaaaaaaatgttttctgaaacgaatgttttaatctaattttaacataatg

SEQ ID NO: 116408 - DNA, 563 bp, Heterodera glycines
ttaatctcggaagttgtaacgaagaatgtgcagaggttggcaaaccgttaattaaattagaaaatgcttaaatctaaataaatatttgcaattgaattttttaataaattgatagaaattttcaaaatggacccaatcctaacccacccgccctttcattcaccactaactacgggcttggatgtatgtatgtaaatgaccacattaaacgaaatcaaaagttatttgattgatgaatcgatctttagttcttgttggttaggttgatctaaatgccaattatccaaaaacataatgccacgaaaaataattcaaatctttttaattacctaactttaatctgtacgtgtttgggctaacaataagctgacacttatgtacagcgagtaaagaaaggattaacagaaataattaatttatatacaaaataaaatttaggtgaaaacttaatgtattctccatttgatttgtttttggtttcttcgggtcgtcaattatcttcattcgctcatctctttgtgccaattaattgccggatttttgcgccgaatattcgaaccatg

SEQ ID NO: 116409 - DNA, 334 bp, Heterodera glycines
tacaaaaacaccaaatttctaaaatgcaaaaatacactcaattaaataatattaaataaaaatatcgcgtaaacatatatatatatgcccatgtattacagttaaaatttaagatttattaatttcaggaaacgaattttcacatttttttttggcattttataaaatttgggtaggatttaatgttttatttacatttttgctatgaaattcttttaatatagaaaagatgatcaaaaatgcagaataacgatcagacaaaaattataaaattaatcccattaataaattgatgaattcattaaatttttcttttcaagaattaaattaaatg

SEQ ID NO: 116410 - DNA, 578 bp, Heterodera glycines
ggtgggaacgggattcctcgggaaaacctggtcatcttttttcagtgaccggatttttcggcaacgggaaaaaaggatgggaatcctctcccgcttttttcctttttaatttctctcaaaaatgactataaaaatacaaattttccccggcaaacgcctaccggcaccgctggacacccccctggtcccgaaaagattttggtagagacacgccgcaaaaaagcgattaaacccaaaaaaaggattttggcaattaattgaaaacgtagaaattctctaagttttttcggcattgaatctttttggattttaaatagataataaacaattttaacgaaaattatttaattattaaaaaaaaatctagaaacttcaaattcagaaaattaccagtttttgccagtactgtggaaatgttcgtacttgtttatttataataattaattccgaaaattcaatttttattaaaaaaattttgtcattaataaatagtaatcttttaaattattaaattatattttgtcatttgaaaaaagcaaaaacattctgaagaatcataatttttcagaaaaaaaatg

SEQ ID NO: 116411 - DNA, 1003 bp, Heterodera glycines
atggttactaaaattacctgggtctttaaaggatctgccctttgatttttcaggtttttttgttttctccaattgtccacttttctttattattttctccgatcttttgagcacttcttaaattatatgtgatatgtatttttatggttttaacgccgcaaagttttttaattagcagttaataaattcccaaaaaatacaaattatgagaattttttcaaaattcatatttcctcaaataaataaaagtaataaaataaagaattctcgaatgaaaattaaaagatttgattcgaaagtatttttattagtcggtcgaaatctctgggtctaaaacattttcgttttaagaatttttatgggaaatttaagagtttttgcctcaaatcttccatgtccccaagaatccggcaacattccattccgttatcaaaaagcaataaaatttacgtgataaagtaatgccggccaattgcgtcaaatccatctcttcagctgattcattctcacatttttccttggagcttaaacagcctccgaatatttcataattgaacaaagcaaaaataagaagcaatacaatttttatattcatttaattttattcagcgcaatttgtaattggattaaaatgaaaaataataaaaaatgtttccccaactgaattttatgctaaaaagcgtcaatattaatcaatatcaaaaaccacttacgtataagcatttaatgtttagctcatccctatgggctgatactcgaatatattcgagacctaaataaaccccaaaagttaaatttttctcgagtcgttagttgggctgagattatcgcagtgttaaataggcacaaaacgccataaaaatcaactaaataggcttagaatcacttttaaatatttaaaaaataatttttaatatctattttttttgcaaaaaaaattattttttagagtacatttcagaaaattttttttaatttttcagaagaaattttataaaaaatg

SEQ ID NO: 116412 - DNA, 361 bp, Heterodera glycines
gcctggcagggtcaatggattttctgatcaaaaaataataaatcgatcatcaaagcgaaacaaaatattcaaaaagaattttttaaatttttagaaaaaaatttaaaaattttacaattaaaaaagcataacaaaatccgttcgaaattaaaaaaactttataaaacaaattttaattaaataataaaattatatttgaaatttttttttagttaaccgtcaattttttcttgaatcgacaatatggagtctacatatttcaaatcgtatttccccgtccaaaccgtaaatttaaaataaaatatttaaatttaaaagtatcataatttttaaatcatttttattacaggccgtggcgatg

SEQ ID NO: 116413 - DNA, 54 bp, Heterodera glycines
aaatggttgacagccgaaaaggacaaatgggtgacactcgcaaaaggacaaatg

SEQ ID NO: 116414 - DNA, 206 bp, Heterodera glycines
caacgaccctcccgtgccgattaaaaacggcatttccaagtgtcagacggactgcgacggcaacaacagcccccggtaaaaggcgaaggtcttcctcggagagcttacttcgaccgtgccgttccgtgcacgctccgtccgccgtcgttctgttagcttttgttttgttactaataattggcacaaaggacgggaccaacgcaatg

SEQ ID NO: 116415 - DNA, 201 bp, Heterodera glycines
ggtgagtatttattatttattaataaaaattaaaataaattaatttttaatgctttttaaggaaatgttagcgaagaaaaacattttgtaaaggataatttaagagtaaaattttttcacaatttgggagattattggatattttatgcaagcaatttttggaaaagagaaaaaattgtacgcaaagtaacgcatcaaatg

SEQ ID NO: 116416 - DNA, 154 bp, Heterodera glycines
ttcgttattcaattcgtttactaaagaaactgaaaacttagttaaaatagcgcgcccagaaacgaattcaaaatagcatcgcttttaggaaaaaagaataaccagcaaaacattatcacagattgtcactgcccaattccaattgaaaagaatg

SEQ ID NO: 116417 - DNA, 1003 bp, Heterodera glycines
aaaatgagtgacaaaatcatggacatgagaacagtgacttttgtaaaaagtgccaattgcaactttgacgggcgcaaagaaaaattgtgatttcttaattgggctttgattttaggcaacagcaaatatttgagttcatatttagtcgaaataatcaaaaaatggcattttagatcaatttaattatgtcctattttttctatttcgcatttttggtacttttttttgatattttaacaaattcatttcttaaagaagtaataaaaagaaaaccggccgtcggaaaatttttagaagaacaaatccataaaatgtgaaatctcttcaaaaacttttaatgtaaaaagcgttaatttaaaaaaaaattttttgcctttttgtgtatatttcgggttttgcagcttatgaatttactgcttaaaatcgaagcccaatttaattctgtgcggtcccaacgaataataaacataaaaatttattttgtttttcctgcggtgaaaaatgtgctgattacgaatctgagcttagaaaatgtctatttttgagtcggtttaaaatggttcgattaaaaagatacatattatgatttataaaaatagttcaattattatcaattattattctaattcacaatcagcatatacagtggtggaaagaagtcttgactcaaagtgataaaattagtaaaaattaaaattttcctcgtttaagttggcctattatctttctttttgtataattattagtgatgctcgagaccaaaaatttcccgagactcgagaccgagaccgagaccagaccgaggctcttatgcaattttggccttattgtactacaatgcttaaaatgctacaaaccttattttagaaatgctgtattattgacgcttttttccactgacgaatttttcatcaaaaggcaaccctatatatcccctattaattttaagtgatcgaattattaatttagaaaaattaaataaaaaattaatatttaaaaaatg

SEQ ID NO: 116418 - DNA, 84 bp, Heterodera glycines
aatttttatttaataaatttaatttaataataaaatcaattcatttttaataaattattcttttaagttgatcatccgaatatg

SEQ ID NO: 116419 - DNA, 61 bp, Heterodera glycines
cgtgagaagaaaaagttgctgggatttctcaattatcgtggcgtcttctcctcctggaatg

SEQ ID NO: 116420 - DNA, 52 bp, Heterodera glycines
taaacaaaaaaaaaattttgaccaaaaaaaagtgcaaaaaaaattcaaaatg

SEQ ID NO: 116421 - DNA, 583 bp, Heterodera glycines
ggttggccgacgctttgaccgttttgcaccgtaaggcgggacggacgcgaagtgcaacagtgacaatttgttatttgatgcacaaatttgactattcggttgacgaggcttttgatgctctgtccaaggtgtttacgaccagcactgttccaacatttgtattggcaaatccattttcagaaacgtccccaaattttgctccacgatgcccatttacagtccgtgggcaacttcagaaaagcgcttgacgaccgaaaagagaagcgaagagagggagaaacaaagaattgaaaattttaacaatcagaaattatattttaatcaactgatatgtaattgtaataaaatgattttatggttccttttatttttccattgttcatggtcatacagttattgccgtgccgttgctatttcatcatttattttccgattatcatttgttttccgttttgctacggatggagtgagttccgctgctcattttttgtttatgctcgagtcggctgttctgttccttttgaatttgttctacgcttttgctaatttctgcttggatttgttgcccaattcgtcccccatg

SEQ ID NO: 116422 - DNA, 61 bp, Heterodera glycines
ttggcttggcattatcaccatcggaagagatcgaccaattttgaacaaagacttggacatg

SEQ ID NO: 116423 - DNA, 959 bp, Heterodera glycines
  unsure (1)..(959): unsure at all n locations
aaattaattntttagtagaaaaagaaataaaaaaatcgaaatttatttattatttaatttaaaatatttcaatttaatatatatactaaaattcaaattgggcactgaatttttgtcataagaaatttcatacgaagtaaaaattttgattataaaatagttttttctgatacctaaaaattatttaaaattcaataaggtcaattatttttttttataaattaatttctaataaaaaagaaatataaaaatcgaattgaaattatatatataacatgtattatatattttttaaatttattatttaattaaaaatactctattttaatatatttactaaatacgcccaaattaacactgaatttttgccaaaagaaatttcataaaagtaaaatttagattataaaatatgtaaaagctaagcaaatattttaattgaaggaaacgcaaaagagaaattattttgtcgttttgtgcttagtctgcttcacctttcttttttgtgttgtgtgttaatccttctgtttttgttttgctattcgaaaaatgcgaatgaatgagcgaatggatggaaatgccaaggacaaatttgcccaatttgtacaatggcaccgcgttaagcgcagcacacaaagaaatggataaaataatgggctcttgaggtggggggggggggggacaatggcacagcaaaatcggacgggggcacacgcacggcacggcacagaacggcggtggtggcaaatttgccgcgatgaagcggcctaagcgtgggacaattcagtgccgccagcagacggacgggtgggaaaaactcaggcgaatgacgggagacagaaaaagtgttaattgaagaaaagaatagaatttttcaaagcattgatggtcccagccaacaatgaaataatattaattaatttatttttttaatatttaagcctttttgcaacccaaaaatg

SEQ ID NO: 116424 - DNA, 131 bp, Heterodera glycines
aattagcatttattgattgccaattatgtatatctttgtcccctttaaagttcactctgtttcgtgacggtgcagcggtggaggaacgcgtttttgaagcagtacaggcgccagctgctgatgaaccgatg

SEQ ID NO: 116425 - DNA, 104 bp, Heterodera glycines
tctggaaggaatcaatagtttttcctcttttcaaaaaaggggacaaatttaatcctgaaaattataggcctatttctataacctgctcactttgcagggttatg

SEQ ID NO: 116426 - DNA, 1003 bp, Heterodera glycines
ttttttttgcatttttcttatgaaaatttgctaaaaatgaccaaaatatgctttaaaaacgcaaaaatgtcgaaatatgcacttattctcgaaatccccaaaaatgcttttatatgcattatacgcactaaaaactttcaccaaaacaaaaaattttaacgcagaaatgctatttttgagcccctttcttcatagcatatgcttagaaaaaatatgcaaaatcatacaaattataaccctactgattagagaggggatttttatatgctaaaaatcctaaaaaaatgtgccaaaatatgctcgaaataggtattaaaattgaaaaaattcggtgtctttatgcataaaaatctagaaaaatttctttcattatcattttctccccattattgtaaatcaatatatttatcgatttcattaccatttgctggattcaaattcgggattcgaatcgctttaaatatgtgttttatgctaagcgcatgaaaggctatggaatggttttcgaaataatttttggataagttgacaaatcatcgcttttttgctgagatgtcggatcattgcgcgccaaaatgccagttttttaatgctgaaatattattatattctgctagatcccggtgggaaaaattaataaagtgattcgaaaatataaagttaataaattttgttcgaataaattaaaaaaataatttatttgaagtaatttgaaaaaattttctgtttttcgaccctaaatctgttttttattccaacttttctgcttgctaaatttttcaacatttaataaaaggattgcccttcaaatttgtaattaaaaatatttttgttgagtttttaattgaattttcgaattccctctcccgcagggattcccgtaaaatttctgcgggatttttacggaagcggtatttttacgggattccctttcgcgactcccgtccaggaaaatgtgaactctcgctctcgaaagtttttcccaaaaacgggagtaaaaatg

SEQ ID NO: 116427 - DNA, 68 bp, Heterodera glycines
atttttagaaattctatccgtcaaatcggcttttggacttttaatgagtaaatcagtaaccgtaaatg

SEQ ID NO: 116428 - DNA, 60 bp, Heterodera glycines
ggtcaattatgagtgtaaaaataatatataaatgtttcataaaattgatttaagcaaatg

SEQ ID NO: 116429 - DNA, 230 bp, Heterodera glycines
ttatttccacaactttggatggcgtttaatttgaaaaaattattcatttgttttatgcgattaaagattttacaaatttaatatttaattctttaattttttacttatattcaaataaaaattaaatcccgaatcccgtaataaaaattaggaattattttctctcatgtgaggctttttttcattttattctaaaattatttaattttttaattaagcattcacaaatg

SEQ ID NO: 116430 - DNA, 552 bp, Heterodera glycines
tttttaattgaaacagaaaacggtcagcagaaatgaaagtgaattccgagtgggtgattgaagaatgaaaaaaacaaaaaaagaggagatcaggagcaaagaggacaaagttttaattgtcacccacccattaatttacactaattgatgtccataaataatgtgattaaaagcaatttaatttgttgaattaaactaaatttttatgggaatgcagacaattgagaatagtcaaagttcaatttttgggtgtggggaaccacccgaattatatatattcccatccgatttttttttctgtttatggcttgtcagtgcaaacccctgctgcatgtcgaaatgcaaagttcgttcatttctaagtattttgataataataataataattgttattattattttcgtttcaccatttcctggccaattttcttactttagaaatttatattttatttttgtttcttcgtcattgaataaactgtgtcctcctcctcctccccaacagcaggatgtgacgcttgaacagaaataatgttcctaataaacagaatg

SEQ ID NO: 116431 - DNA, 60 bp, Heterodera glycines
aaatttaaaccgtatagtgtacgaaattcattaaaaagagccttgacaaccacagccatg

SEQ ID NO: 116432 - DNA, 131 bp, Heterodera glycines
tagaaaaaattaagaaatttagaaaatcgaaaaatttgcgtggacgaagcgtagagtttgcccactaaggtccccaattcccccattcattcatttttgcaatgccttttctctgccctaaaccaaatatg

SEQ ID NO: 116433 - DNA, 559 bp, Heterodera glycines
ttcttatcaatgcacatcagttccccaatataattcaagacagtgtttggccttacgcatatttcaatgggacaaattaggcggaattaaaaaacaaatgatagtggtgactctaatgatgagaagcatgctctagaagatttctataaaattattatttttttaataagtgaaatgggtaatcactgagtaaaccgtgagtaaaaaagaaactatagatttattattctctaaaagaatgaaactaaaaattttcataaagcaattttcgaaaatatttaaaaaaattttttgaagtttatctttcttaggttttcgaaaaaacattcaaagatgtttgattgcatggagcattcttttggaattgtttaatataaacacaaattttagacattttaatttccaattggtaaatttcttgcgaaatgccccccctcccctctcgcacttcgcccaacacccaagccaacaccaccaccacgcacacacacacctacagcaacagtcatgtcatgaatgagcatggggacgaaagtgaaacgaactgcctgacggtatg

SEQ ID NO: 116434 - DNA, 560 bp, Heterodera glycines
attattgagaacattttgactggcagcagaattaatacaatcagaaaaatcttaaaactcgaccgattctgcgaaaaaatgccaaaaccataggaataattattaaatttattttattttcatttaaataaataaataattaattgttttctattttaagcattcttacaatcgcaaaatgatcagaagaaaattttggaaaaaatcagtgaattggagaagcagcaacaacagcagacaaaaggcgaggagaaattaaaatgaaaaaatatttaatcgaattaaatgtttccattttaaatttaaaaattaatccgatttttaagctactgcggggcaattgtcaaagattttggaaaaaattggtgaaatggaaaaacagaacgaaaacacggacaaaggcgagggaattttagcgaagaataaattatcacttattaaaaattcttttttttttgaataagtttcttatatgaattaagaatttcatttaaataaattataacatttttaatttttgaaaattaattttaggaacttcggagcaattttcaaagatg

SEQ ID NO: 116435 - DNA, 617 bp, Heterodera glycines
tatttttatctaaagagaaaaatgcataaaaagccatatgacaattaagtgtaaaaacgtcaaaattgaatagattatgcgaagtgacgaacaacattttgattaattaatgttttatcaaggtcaagtattaattaaacaagtcaaaacacaaataaaagtgaaagggacgtgaaaagcgacgcgtgaacgtttgttctttttcttcaacgattgctcattcccagaccaaacactacgattgcgtaaatgtaaacccaagccaaaagtacagtaatagcgcgtaaataatttatggcattttatttatttaaaatttaaaattcttcgctttaataaaacagaaaagaaacggaaaagtagtaaattgtccttccacgcttttccttgttttgtttgccctttccctttgcttttggccagtggccattgcctttagctttggcccattagcttccgcttcttctgctcccattgaaccgcttctcctttcttctctttttgttttcaatccattgtcattcattcttcattcgtccttctttgccctttctcttccatttgttttgcctttcattagcataattttactcgcggctaagaatggctatttaatg

SEQ ID NO: 116436 - DNA, 823 bp, Heterodera glycines
ttctcttccccctgggttagctcgggagattatggagaaaaggcgaggcgagcggttgtttctctatgtcagctgagcgacggtcgaaaggggagggatggcacgggggggggggggggggggaaaatcaagcccagaaaaacataaatcaactctcaaacacaacaaatatgtatgtagcaatatttgatgattattttattgtttgattttaattttaacaaaattaaaatgggtccaaagacattgtaaacgcttcaaattttgcttaaaattattttttcggcttttgcccgcactgacaaagaatttgaaaatcagctcaaaaacgtaggggaaaacgggggtaaatttatattcaaagaaaggtttttcgataaaaagtaaactttttttttttggctgctggtggttcagtggtgagtgtcgcagtttgattcaacctaattatctctaattattattggttcgcttcctttctcttcaccagttttttcatttatttcctcttctaatctatttttaacaataaaattaaatatttttattaatagtttcggcacttgattgagcccggtaatttcagttcattatttgactcgatttatatttaaatttaaatgaattttcagaattaaattgttttccaaaaaagaaaatagcaattaaaaattttatttttattaattaaaatctaagaatacaaaaattactattattaccagcaaaaactacgtaaaagactaggctttgtactataaaactaacaataagctaagttagcgaaatagctaaaagaaagatcgatagaaaagggaatatg

SEQ ID NO: 116437 - DNA, 70 bp, Heterodera glycines
tgttaatttaaattgaatttcaattacctatttataatccactcacattttcagagaacatcgcaaaatg

SEQ ID NO: 116438 - DNA, 685 bp, Heterodera glycines
gatcccgtccggtctctaatgaacacccaccctaacagtgtaaacaatttttcggtttcttggactaaaaacgcgagaccgacgagaaatttcaatgaatcgagaacagaggctctcgcatatctctagtaacgatccagcctcggctgatattatggaaaataaaatatcataattttagcaatgatgccaaaatctcccaaatttcgccggcggtgctctgttaataccttttcctaaacattctttttaatttgttaaagatcaaatattattaaaacatttacaattaataaagataaatattattaatgaataatctagacaattgttctcttcaattattaaatatataaaattgccttatttaaatttaaatttaattattatttttaatttttatacattaacttattaaacaatattaacaaaaaacaaatttttttttatcatttggttattttatgtgcataaatatattatgctttcccactgattcatctcacatcacccaaatcacaatttacatattcaattggtaattacccaaatggacaaaattatataataaaaattccaaaccaggaaagtggttaaaataaacaaaaactaaaaataatattattaaaattcaaagttttttactattttagcaagcttaaagattaagaaatattccaaaatg

SEQ ID NO: 116439 - DNA, 258 bp, Heterodera glycines
acttcagatttttgttgtttttttaatatgggttcaatcccatatgcccacactttattttaccgtttttttcatttaatttactattttaattactaaatctgttaacaaattacactaaaattttcaaaattttccccagcggcgcctatcggcaccgccgggcccacccaagttccccaagttttctgaaaaaatgcgccgcaaaaaaattgtttaaaatctgatttatttaaccctataaatgatgggagaatg

SEQ ID NO: 116440 - DNA, 78 bp, Heterodera glycines
ttttttttttgtaatatgctcataaacggatttaaataagtcaaaaaataaatttggtctctttttagaggacagatg

SEQ ID NO: 116441 - DNA, 258 bp, Heterodera glycines
aattgttaagtgccaaattccctaaattaatatttttaattaaaattgtgcagaaaatgagtttccgtgttttcatccgtgccttaatcatgtgcaatttgcaatggatgaataaaattttatctgcaatgattcatttattaacataacaatgtttgagcgggagcgagcctaagaaatcctggccaagcaattatttctaaacaatttttgccaattataaataaaaaaaattttaaaggaaaattttaaaaaatg

SEQ ID NO: 116442 - DNA, 434 bp, Heterodera glycines
cctgaaacaaagagagggcaaattggacgcaggagtcgagagcgaaattaaagaccaaaagccgagactgagaatggccccaaatgagagagaactgaccacacagactcaaggtcgagaatgaacttagagagtcaagaaaacccaaaattggacaagaaattccggatcaaacttaaccccgtattgggaaacaaaatgtgagatcaattaaagcaactgacgaatccacgagcagcctcttcagcagtcgtcccccgttgaacacggtttggtagagggccgagaagcgacacggtcccaccggtgggtactcaaatgggcggtgttgtcgttgttccccggcttgtcatcgttgagtttgttgttgagttcgctgttgctactggccgttgttgttgctgttgtcgtcgttgttcttgtcgtatccgatg

SEQ ID NO: 116443 - DNA, 131 bp, Heterodera glycines
aatggtaccactactaaaaaaaaaaattttttttatgaattatttgggattttttcagttacactgaggtggacccggtgatcatcgcagcgaatggggtggacaaattcaaaaatgacggcttcgaaatg

SEQ ID NO: 116444 - DNA, 123 bp, Heterodera glycines
ccaaataaattgggtgccccccccccggcaaaataacccctttaacaccattgcaatgcggctggcagtaatgataacccccgacggaatggagaaaaaacggtggtggaccatctgaggatg

SEQ ID NO: 116445 - DNA, 252 bp, Heterodera glycines
atcagttgatcaaatgggtgaatattccaatcagaatgttatcaaaagtgatcaaaacacgagaggagaaccaaatgatcaacagaaaagagaaataattcggaaatttgacgcaattaaatataaactgaagcaaaaaggaaaatatgaacaaaaaaaattgtcaaaattgagaggaaaattggaaaattattaggcgcaaatcgcgaaaaaatatacaaatggaaaaaacaattaaatttaaataaaatg

SEQ ID NO: 116446 - DNA, 415 bp, Heterodera glycines
aacgaaaaaaacttgccgaaaaaatggctttctttttttctcctggggatttgcccgcaaacttgttcccacattttcccttctttagtcgggctcttccaaacactcacacgatatttgaaatgctaacgaaaaaaattctgcccgaaaaattgcctatctcttttttctcctggggatttgcccgcaaacttggtaccaacattttccttctctagtctggctctaccaaacactcacacgatatttgaaatgctaacgaaaaaaattcttgcccaaaaaatggctatctcttttttctcctggggatttgaccgcaaacttggtaccaacattttccttctctagtctggctctaccaaacactcacacgatatttgaaatgctaacgaaaaaaattcttgcccaaaaaatg

SEQ ID NO: 116447 - DNA, 117 bp, Heterodera glycines
ccccccccccccccccctctaattgcaactgaagttgtcaacagcagcagacaacaagcaggagcaggaaggagttcctcatttgaacttgaaatatgtggataatttgcagaaatg

SEQ ID NO: 116448 - DNA, 388 bp, Heterodera glycines
ccttttgttttgcaaaattttttttgtgatagtcataaaaatttattctctggggtttttggggtccccgatcacgaatccttcaattattttgatcaattccgatttcctaatctaaatttgaacaaaaaatcataattttaaaaattcaaaatttcgatttttattcgagttcgggttagggattagaaattagtcaaaatacatgtcagattcgtgattagcgaccttttaaaccccggataaaaaattatcatggttttttatcttaaaaaaattttgcaaaacaaaagggtccccccttttgtttcaaaaaggccaacttttacagtagcgccgttttatttgttgcttataaaattaggcttatttaatggtcatgcatatg

SEQ ID NO: 116449 - DNA, 410 bp, Heterodera glycines
ttttttttatcagtttttgggatgggctgacaaatgagcaattaattagcgaattaattatgtgagggaatttggctcttcctccaattatatagcagcaacacatcactcgccaatttggcctgtgtttcacattttttatcgaacaaatttgatagggaatggagcggacgaaaagtcaaaaaatttgttgatttgtgcaaaagccaattttatttgttttataaattagatgagtaatttaattttctttttaatcgcattcaatacacaatgaattttaagcgtcccatctttgccataattctgcacagagagaaatttcttctgcaaattattaacaaaaagataataaaatataacgggaatgctaattcagttttaaaataattaatttataattaaagatg

SEQ ID NO: 116450 - DNA, 335 bp, Heterodera glycines
aatttgttaaaaggaatgcttaaagttttcagcgatgcttcattcgttgctgattatgaaaacgcgtcagaaaatagcattagagggaaagtcgtagcgcaattccctctatgttgatcaagacaataatttgcgtcacatttttgctggaatttatacagaaagcagcagcagaaaatccccatcgaaaggataacactcaatttcatgatctgcgatatctcagtgacgaaacgatcagtgacgaaatgataggtaaccaaaagaaatgccactttatgacgcgttaatttatttactttagggacttaaaaataacaattcaaaaatatatg

SEQ ID NO: 116451 - DNA, 427 bp, Heterodera glycines
atgatggtcgaaaaggatgaattttggcttggaaatcttataaagccgccccctccccctccaattttcctaaaatatgttatttatttttgttgaatcctctctttacccctatttttctctctctttttttgacggctcatcattatcatttattttgtcaaataatcaatcaatcaatcgcacgtcacactatttccattttttggtttgacaaaatttccaaaatttcatttgatttgtttttaccatcataaaaatcaatgataaaaaatatttggcgccgtttgttttgttccgttgcttgcttaattctgtttcattaaacaacatttacttcatttgtttgtttctttgtttacttgttttgttttttcatttttgttgttgtttaaaacaattgtctgcaatttttgtgcgtaaaatg

SEQ ID NO: 116452 - DNA, 504 bp, Heterodera glycines
cctataaacgggaaaggggggattatagagtgcatcccatataagttactctctggatcgttccccctcccggaaaacttcataaaagttgaaaaatcactgaaaaatttttcaaaatttattttcttggaattttcttataaaaaaactcttttaatttatcggcggggggggggggggcacgacctgctccgaagattataacatgacaaaaataaaaatgcaaacaacaataggcgggaggggcaaactaacttcaaaatgagaggaatttcactggcacaatttttacaaaacggcgcagcctcctccgccgtcccctgctcatccgtatccatgtcgtcctcctctgctccctgctgttggtcaccactactgtcatcctccaagaccaccacgtccccatcgtcctgctgtcgtcccacggttgtcacggtggttggaccagcagcaatttgctgcagttgatttgctccattttttgttgttgaacaaccaacaatg

SEQ ID NO: 116453 - DNA, 136 bp, Heterodera glycines
atctgcaccaaattttgcgtatcgattgagaaaaaaatctgcatcgatttctatctttattatcatcgcttaaatgttgttttaaaaagttataagataaaaaagttaaattattattctttttaaagatttaatg

SEQ ID NO: 116454 - DNA, 437 bp, Heterodera glycines
tccactatttagtgagataaataaataaaccaattattctcccacaggcactgtgatcactggtctatcggtagtgccttcattaatgtttatagattagaggttcaagtcattcgcatgccaactgatttctacttttttaaaatttatgtttcttataaaattaagtcagaaatataaaaatattttttacaagtataaaaatataaccattttaaaatgataatttacttaaattagtgtttgaccacaaggagagcttgacaataataattatcatctcaaaaattaaatgggctaattataagaaacttgatcatattattaaaaaatattttttatgggtaaaaattttggcagtaaatattttaacaattggtactctataaatttaaaactagtccagggtaaatttcccaacaagaaaaaaaagtatg

SEQ ID NO: 116455 - DNA, 129 bp, Heterodera glycines
taatattttattcatattctacaataaaatctcatagaatatatatcttttattaaataaaataaagttttagcaaaaataaattgattaaaaattggtaacaatttttttagataatttacaaaaatg

SEQ ID NO: 116456 - DNA, 192 bp, Heterodera glycines
aaatacagtaaaacacattttttcctgtttttccaggctctgaatagttggaaaaacattttattttttggtttgctacgggttttttgtccaattctttttttcttacatataatttgaatccctaataatatttgatgtgaatttttttattattattttaatagaccacaaaagcgtacaatcaaaatg

SEQ ID NO: 116457 - DNA, 687 bp, Heterodera glycines
atgatcagtagggatgggaatttaagtcaaatgactttttttttttgctgactctaaatgaccttaaaattacttcaaaaatgttctaaactttgttcgaagcttctaacatgcattttttggtgactttttttgctttttacactttttgggatttttatgacttttttgcgtttttgtgacttttttcatgactttttacactttttaaagcaaaatttgactttttgtgatgaaaatgccgaaaaatacaaagaaaattcagaaaaataagtcaatattcgaggcggaactgaaatttcttataccataaggactcaaatgacgggaactgaaaaaataaaaaataaaataaaaatttggcggtgtaacacttttgaatattttttccgctaaaattagtcgttttaaattactttcttcgaagaatgtttaaaacgcttttgggtttaattacatttgtcttattttcacgacttttttggatttatttagtgcttttttggcatttttctgtgactttttggttatttttcatgactttacattttttatgactttttcgtgactttttggcgatttttaatgactttttaagtcgccttttttgagaattttcgtgacttaaattcccatccctaatgatcagcaacaattaagaaaaaatgaaaaacttcctgaaaaatg

SEQ ID NO: 116458 - DNA, 94 bp, Heterodera glycines
aaaaaccacaaatgggtataaaagcaatttaaaagcaacagaaatttggtttcctcggcacgtctctgagctggacaaaagcacgcatgtaatg

SEQ ID NO: 116459 - DNA, 1003 bp, Heterodera glycines
aattttacaacaattatatgcgtggtgagaccaagcaaattatttaaaatttatttatttaaataacaaataatagaataattttgcgctaaaataaatattcattgctcatcgttttgcaaaacaaacattagttttctttgaattttaaaataattaatcttgctttaattggatctcttgagcttttcttagtcatagcatcgaatgaatgatgaatctggtttggaattttattgcactttaataatattattagggatgcaaaaaatatgcacgaaaagtagccaaaatatgcgcataaatatgcaaataaagtcgtgaaatatgcaccaaatatgcacaaaaatcgcaaaatatgcacaaaaaaacttaaaaattaggggtgcaaattcaataaaaaaattttttttttttactagtgacttgccaatgagctgctacatttcttttataaaattctctttagcaaatattgacattttttaaatcaaaaattttctcatgaaaaaaaatttgggggaagaatttttgagaaaatttccaattcttagtggtgtgtttttaaaaattttcggtcgattcctaggggtgtattttccgtttttattgcatttttgttaacaaattttccaaaaatggcgaaatatgcataaatatgcacaaaaagccaaaatatgcaaatatgcacaaaaaatctcgaaatatgcaaaaatatgcaaataaaagtcccgacttttatacgcaaacacaaaaaagaaagtgtttttcctattatttagagcatggagaaaccaggaaaaaaaatgcatttgcataaaatttgcaccctaattattatttttactaatattaacaaaaaaaatattttaaataaataaattaattattcgaataatttttctgggactgaaacggcccttcccccaaaactcaaacacacatacttttgtcactccggctcaccacggttttattactttttcgtctccatcagcagatg

SEQ ID NO: 116460 - DNA, 93 bp, Heterodera glycines
tctgacacgagcaaaatttggataaatttgggaatacggatcccgacaaacggcaaatatccctttgaagcccaattgaaaatctccaaaatg

SEQ ID NO: 116461 - DNA, 703 bp, Heterodera glycines
tagagctcgcaaaaaaaaaggcaccaaaaatcgcgaaaaaggcattataataggcacaaaaaattaaaaaaaggcttgaaaaggcacgaaaaaaggtatttaaattttttattaaagatttttagggagaaaacacgtaaaacttgaccaaaaaatacttaattcaggtcatttcttagaggtgtattttcccgattttaatggattttttcggaaaaaaagccaaaaaggcaccaaaatgccaaaaaaggcatttaaggcacgaaaatcccaaaaaaggcataataaaagtcaacgtagaagcctcgaaccaagtgaaaattgcgttttttatgcttaatatatcgaaactaatacgcagaaaaaaaggcatatgcctcaaaatgcgcgctctagttattaaaaataaaaaatcgacacaaaatgcaaaattttgcataaatttcaaaatttcccccagcggtgcttagacttaccatactttaattttaccaaaaaaacaacaacaacatagagaatttttaaagcagaagagcaaaaaattcattttaattcattctaaattcaaaaagagaaaaaaagtgattccctaaaattgaaaaaatttttattttatctaaaaataaaataccatttgcttttaaatattatttaataaaactttaaaataaaactcatttagaaacctgataatgataaaatg

SEQ ID NO: 116462 - DNA, 176 bp, Heterodera glycines
ctctagagtctaattaggctatggagaatccatgaaaaaatatgtatttacataaaattagcatccctagaaatgaatattaaatgaaaaaaatcaaaattaaaaagaaaatttcattttaaattgaaaagtatatgattttatttatttatccacttttagcatttgagaaaatg

SEQ ID NO: 116463 - DNA, 193 bp, Heterodera glycines
aaaaaaaaaattgaaaaatttgccataaatagtaaaataaacataaaaaattatctaaaaaatacttactcacaaataaaagttgaatttttttgaccaaatttaagattgtaaaaacggaatttcttgctatttactaatcatttgatttttaatttacaattaagatgaacaatttgcacgagctctaatg

SEQ ID NO: 116464 - DNA, 586 bp, Heterodera glycines
tcaaacgcttttttcgtaatgtttgcatttgttaatagttttttataataattttttttaattttttgaaatctccttatccccccccccatgtgagcttagattagcaggtcacgcaaaaacatttaccaatctccaaaggaaatttggtttttccgtctttagctcagaatctcatcctctttactaattttttagtgattgtccattcaacgaaaactcatataattctacgaattttatggttaataggcaaacaatggagaaattcaatccgataaaagcaaaaaacatttataaatgggaaataaatgggtttttggtcaaattttatgccatggaaatgtaaatttgtccgacattcttttggtaacaaatgagggttatataccataaaaatttgctccctttcttcttctcttttcaatcgttcctctcataattctgccattttcggcttccgttttgtttgctcaatttgtcctaccgtactctcttgctaatgagtcatcagtgtcgccattactgtcttctgtcccttctgcttcccaattgatcggactttctgtcgtagtggtcacaaatg

SEQ ID NO: 116465 - DNA, 57 bp, Heterodera glycines
aattcgtttcgacaaaactgtgttttctggccaaggagagcgaatgcagaccagatg

SEQ ID NO: 116466 - DNA, 209 bp, Heterodera glycines
atgacaatttcattaaatacatcgcatttttattaaacccaaatgcacaacaacagtgggccatttgttttttgtttgcttgatacaaaagtctagcctaatccctggcgagatattcaaaaaatatatatacctaggtagttaagataatactaaaatggtgcttgaactcaattttatataaaaatagagccctaattatcaccatg

SEQ ID NO: 116467 - DNA, 948 bp, Heterodera glycines
tagggcagcaacttttagtgacgaaaaatcccaaaatagttaactaaaatagtgagtaaaaatgccaaaatagtgaagaaatagtgacaaaaagtctgaaatagtgacgaatagtgacataattttcagccaaaaattgagcaaaactaatttttattcactatttgcagttgcaaatgagtgggactgggatttttaagaccaaaaaacccaaaatagttacctaaaaaaatttttaaaataaaaatttttgccaagaatgtaaatttttgagaaattttttttttcatttcataggagtatattttgaagctttattcttaggggtgtatttttttgaaatttttttaggtcgattcttaggggtgtatttttttgaaatttttttaggtcgattcttaggggtgtattttttggttttattacatttttgttaaggaattttccaaaaaatgtcgaaatagtgaaaaaatagtgacaaaacgccaaaatagtgatttttaactattttagtgacaaaaccccaaaatagtgatttctagtgacgaaaagtgacgtccaaatgaaaaaattttaatgcagaaatgcgttttttgagctcctttcttcaaaacaattgagcaaaaaaaaagtttttttcactaaaagttgctgccctattaattaaatatcaacgtcaatgttgatatttattaaaacaatgttcgctaagagaaaaatgttgatttgcctttctctaatcaggtgccaaaaatgcgttcattaacacaccgagtcaattttaggctccaagttcaaaaaggaaatgaatgtgtggcgaagtggtttttgtaaaatagtaaagggaaagagggcggaggttcgagtcccttgtgcaacatgaacatttttacttatttttttgaacaaaatttttaacccttattttccaaagcacaatcacaaatg

SEQ ID NO: 116468 - DNA, 183 bp, Heterodera glycines
tcactgaattataggccaaatatcagtttgaaatcgaatttattaatgaaagaatgtgtatatatgtacataaatttatctatttataatccaatgtttctcaattagtgaaaaacgcagaatttccggtgcggaaaaaccatttcattttttctataaaaggcgctgaatgacgccgaaatg

SEQ ID NO: 116469 - DNA, 66 bp, Heterodera glycines
tttttcagctaacatccccccccccgcagcggaaaatcaaaaattctttccttttttgtaacaatg

SEQ ID NO: 116470 - DNA, 599 bp, Heterodera glycines
tttgttttatgaaaaacttgtattgcgataaattaatttagaagagcacataaataattataatgaattaaacagttaaaaataaaattaaataaaaatcaaaatttataaaaaaaaaattcacaaaggctccaatgaaattaaatttttgctttgttcaactatttctgcaaggtgtactcgcccccgttggttgatgaacttcgcaacttaaaatgaatttttttctattaaaaataacttaatttcttttcacccggcggtgccatatcgacaccgtactagccaaatcaccatttttaaaattcatataaacccgtaaattggttatttttaaataaaattcattaacgaatttcaattctaaattttcaaattaggcggaaccgcaattgtcctttaatttaaaaatggattcaaaaaagtttctaaatttgacataaaataggattttttggtgaatatctgctaaaaaatattcaaaatttcatagttcccctcactcgaaacttagttctctcaactgaaatcacaaaattttgtcgtatgttaggcaaaatctgttagtaattgcatccaaattgtaaaaattttcaatg

SEQ ID NO: 116471 - DNA, 727 bp, Heterodera glycines
tatttaattgctttaaaattttatttttctatttatttaaaaatataaattttatatttttatttatttagcgtcaaaattaggaccgcccaatatttttattattttcagaatttttttttaattgagaacgaaatttttttccaagtaaatgctaagtaatttgattaaagatttgggcgttcgaaattccatgccatccctgctggtgtgtaatatgaatggttttccttaaaaaccagatcagggtcattttggcacggcattttacacgtccaatgagtttatacgggttccgtttttttggcgaaaatatttacaaaaatcgccattttattgggtttttgaaaattagggtttgacctcctcccctgaattagaaccccccccccccccctctcagaattctttcaaaaaaattttgctaaatgattggatatagggcgacaaattggattgaataattaatttaatttgaataatagactgatcggaattgggggaaaatggtttaactgatcgacggggattcgaatttccattatttcacttcttcttctcccattctttcgacatcccacttaaataatgctcttccttccttaaaactcgttcacttcaatcacggtttaagccgatccaaaatggcgccacggaaaagcggcaaaatgccttaaaaatgcaaattaaaaattttttttttgtttccaaaaaatgatcaccgatg

SEQ ID NO: 116472 - DNA, 499 bp, Heterodera glycines
atccctatttgtatttattattctaatattaataaaataataagaagcaactgattaattgaactaccgtattttctaagccaaattccaatgagaggaaaaatttggaattgtttagctaggtctaggtctaagggcttaggcttaggcctagcttttggcttaagcctatgttttaagcaaagcctagggcttaatcttaggctttgttttgtcaaacatacgagttgccaatgaccccaaaaattgctcacggaaatacggtagcaataaaacaatgaatttaataattaaaaaattcccaaaatttatcgtatcattcaaccaaaaatttgttttaatttattttttggctgtttgaattttccataatttcacagccacggaaagtttcaccttttgggggtgtgccttggacaaagattgcgagacgctcaacaaatacctggcatttggccacaaatgccagtgccgaattgcgcgcaaggggcgcgacatg

SEQ ID NO: 116473 - DNA, 345 bp, Heterodera glycines
atttgagttttacaatttctcattcatagtgacttttgatttttcagtgtatgtgcctttatttttatttaattcgcaaaaagtggcggcatttgattttgtttcatattcaattattaatgttttgatatatataactgtccgtctctttttaagtgcagttatttcacgttttactttgtttatttcattaattggtactatataaacagtaaattggcaattttttctcatttatttgccacaagttttcattaggcatttttcaattgacgatgtagagtgccttgattttatccattaattaatgtttgagattaaccgataacagaagaagtcaatatg

SEQ ID NO: 116474 - DNA, 262 bp, Heterodera glycines
ttttataaaataatagtccaaaagggtgtaaatgatgtcaatcagtgtcgaatcctctgaccccaaaaccttaactgttttagctcaaaaaattgaaaattatttttttttgcttaagagtgttcaccatcgacagtcttaccaaatttttcaacaatttttacttaattctgctcccaatgaattgtaaaaaaaagattagatataaaaagaccaattatttttccccatcttttaaagttgactaaaattcaacaaaatg

SEQ ID NO: 116475 - DNA, 52 bp, Heterodera glycines
gtcattttgttacaaataatttttttaaaatcaatttagcaaattacatatg

SEQ ID NO: 116476 - DNA, 169 bp, Heterodera glycines
  unsure (1)..(169): unsure at all n locations
aaaatattttaaaatttttctgaattnatcggaattgggtggatgcatttttctaaaagcgcaaccacattttgcaaattttaaggaacgtgccaaaacacgtccgaaattgactattttcaaactgtttttcaaaaaaaagatcttgtattattctagcatttaaatg

SEQ ID NO: 116477 - DNA, 140 bp, Heterodera glycines
cctgcaaaattaaaaaaaattccgttgggtttcaaaaaattaatggccaaaaatgtttagaaaaccaactttttgaaattttctggtcataaatttttaaaaacaaacggaattttttgaaatttttaggcgggcctatg

SEQ ID NO: 116478 - DNA, 650 bp, Heterodera glycines
ccccccccccccatgttcccaaaaagttttttagaaaaagcgcgcgcaaacaaaaaaaaaacatttttaaaagcaaaacaattcgtcgtttgccttaaaatcgcaaaaatttggcaatttttggttgaattctgaattatttagaaaaaaatttaagccttgaagattttttcatgggttgcatgctaaattctccttttaccaaaaatctaattttagaataacgatgcttttcaaaatgttctgtaatatgttcaatttttcgtagtcttcgcttatttgttagccaatttttttgaaatcttcaaaaaaatttcccggcggcgcctatcggtacagccggaccccttttttaccttagtttttgaaattttaggtcgaaaattgcaaaaattgacattttttggcgtaaaattgccacaaattcctgttcttttgctctccggcgctgaaatttttaaaataatattaggagaaaaaaaattttgatccgaaaagcaaaaaaaggccttcggattctctcatccgaactttttttctggttgcatcaaccaactccttaagcggcaccaaaaatttattttttgcataatttcgtgacattcaattccttttgttcgtttgttattacaaattgcagttcaaagatg

SEQ ID NO: 116479 - DNA, 207 bp, Heterodera glycines
ggtgcgctacgctcgatccgcttcttcccttggcattccgccgtcaatgtgagttttttcgccgcgccgccctcccattgcattggcacttatcgcgtccaactttggctaatgaacgcacttcacaacgaaacgagcgtaacatcggtgaagcatttgcattaagcggtaaatgatttccttttgcagcaacagttgagccgaatg

SEQ ID NO: 116480 - DNA, 59 bp, Heterodera glycines
attgttgcgttaggaattagtcggttgtccgctgttaaggaatggtccatcctggcatg

SEQ ID NO: 116481 - DNA, 266 bp, Heterodera glycines
actttaaatatttaaatcaaattttaataattgtttctttttcggtaaaatttggaattattatgaatgttttttaactcaaattatttgcattattatcatttaagtagcgaattagtcattaaaataaatgctaatgtttttcttaattccgccaatgaaacgaaaatgaaaaatttcgttggaaatacaaacccttatagcagctatagaagtgattgatttataatcataaaaaacaactcattttcaggaaatttataatg

SEQ ID NO: 116482 - DNA, 555 bp, Heterodera glycines
aataattaagaattgttaataatttacattttctggttttgtaaatgaatttttattaggaaatgaataaatcggtggcggcagccgatcagcaggaagtaattaaattaaacaatatgacaaagaccgaattttttttcttttttgccttaacttgtgtcccatacaaaattgtaaaatatttgacctcataaatttaacaaaaatacaaattatttttattgtatttcaaactttctatatttgataaaaaatcaaaaaagtttaatcatctgtagtatcttcacaattataaatttggcaaaaatgtgatgtaaatcactataaaacaaaaaaatcgggtcagttcaaaaattttaaaaatttctacggattttcaaatcttgaataattcttgaaaatgtgttaaattttgatccttgatataatgaaattttttcctcggcggcgcttattgtttattgtttattcataaaaaataaaaaagtcatcagaagggcgagaaccacttactctgacgactaaattcatttttctgttcatgtgccgtcaatg

SEQ ID NO: 116483 - DNA, 734 bp, Heterodera glycines
  unsure (1)..(734): unsure at all n locations
cataaagtatatgaatttcaccaagaaaaactttttcgagtttcgggnccgctgatcacgaatatgccatcaaattcgacatctgccataatctaatctatgattttccataaaaaataaaagaaattagtaaaaaatatagaccagatgtagaagtcaaatttgatgccatattagtgatcagtgaacccaaaaccccgaaaacttatttttaagctatataaaaaaaatttcaaaatacttttttttaattgcaccctcaagtgtgtaattttgagacccatttttaggggcctatttttttgtatttttctaaggaattccgaagtcccgaaaagtggaccaaaaaaggcgaaatgcacaaacataagcatttagccattaagcctaaaaaattcaaaataggcaaaaataacattagaaggcagttataaattatatttcacattaaatagtgacctctctgacatatttctaaaattttgatcaaattgatctgatcgattttgcaaatttttgcccttaatccacttttatgttaattttgacggattgccttcactgacggattgaccgctgacggattttctactgacagattgtccactgacgaattttccggacctcaatctttaacgtttttattgttttttagtctgaattatatgtgtatttaatccatattagtttttcataatttatgataatttgtgtttttagatcaatatattatg

SEQ ID NO: 116484 - DNA, 151 bp, Heterodera glycines
tttgcgcttcttccgccccttccggcactccgttcgttcctccgccaccgtccccttccgtccccagaagcaaagagtcgaaatgttcggccgaatctgcgtaattatcacgggcgaactgttcagcagaagacaaaaacttggacgaatg

SEQ ID NO: 116485 - DNA, 155 bp, Heterodera glycines
tgtacacgttctcgcacttttgcccaatcgcaaaacgccgtgaaaactttgctgtcccaggcctacaaggcgcaggagcccttgagaaaaacaaaagttcaaatttagtgggtgtaaatttttggcgttatgtatagcataaaaaattaaaaatg

SEQ ID NO: 116486 - DNA, 1003 bp, Heterodera glycines
acccagcggaacttacaccacccaggtgatcagtttttgtcgatgagaaaccgcacccagcggaacttacaccacccaggtgatcagtttttgtcgctgtccgttgaaagccacccaggcttttgaagtgccaaaattaggcttgcagaattatgccttgatttggcttgaagattgtgcaaatatgccttaaattggctagattttgcagaattagccttgatttggcttaatgatgtgcagaatttatctgctgctgctgactgcgccaaaattgttgtgtaccaacaatttattaataatcaaataaaaataaatgcacaaaaatggtgaggtcggaggagtgcagcggcggaggagaacaaaataataagtgtccaatgcgaatgaatagagcggagagccatgagtgagggaatgggcacccttataaagacgcggggtcagagaaatgtggaggagatggcagagagggagacaatggaaataatgtaagacagagaaagggggaggggaaaagtcaataacagtgatgaggtgtaagtgatctttgatcctatccaacaaaattcatgtttttttcattggttaaagttttgaaaatagtgcaccaaaaggagaaaaaaggaatatgaaaattttaaattagtttactaaaaaacaggacagaaagttattaattccttatagaatattcggtgcaaaatttttttctctagcgagtgagtgctttttagaaaaaaaaatgacaagatagtatgccgaagtgatgagagaaattagaaagaaaaagagaaacaacgaaatagtattgtaaatttttcgtggatgaaaataaaaattttatgacatcattatagtgttggatgccaacacttcatttttataggtatgcatacactaagacatttaatttttcttttacatagctaaatccaaacaaaaaattttatcttttatatagctttatccaaaattttttttttaattttacattaaaatg

SEQ ID NO: 116487 - DNA, 1003 bp, Heterodera glycines
taatataaaacaaacttctaaatataatgtaaaacaaattatgttaaaaatccaattaaatcagtaactaaagtatttttatttctcaatgaataaaagtaattcttttaaatagaaatatttcgaaaattcctttataaaaacccgaaattaaaaaataaaattacctgatttaattaaaacttgtttttaaacagatttgaattaaattatttaaatatgttttttgagtgggttagcaagtgaatgatttttgatgatggatacattaaattccgaaatgacgatgatgattcatcgacacagcttttatttaaatattttactttttattagtaatgagcaaaaaattttaaaaataaaacttgaaaattttaagcatataatattgactaaagaaaaaatcaatgatttattatttgtggtttccagcagaaagtgacaatcaaaaatattgaaactgtcaactaaattaaagttaatgaaaataacataacacttctaattaattatatacattataaaaaatattcaaaatataaaatcaattctttattagtaaatttaatatattgttttacaaaatagatgaggttgtcaattaagcaactactatcgttttcaagaaattggctaaataacgacacaatttttatagaagactaatacaattgtaaaacttatttttcctatttgttcttgtaaaaaaaggaataaaaatattaattaaaaaaatatcaagtaagaataagattaaaaacaaaaataaatgtagatgatagtcacgaatattttctgattaatagtagtatttatttattacatgtttttcatattgttctttctcaatgaaatatttccaaatatatgaaaaaaggctaacacatgccctgttccaaaaattccgaatccaataaatccaattgactctcggtttccagaattttagaagaaataacaacaaatctaagaaacttagttggaaaattttttttaccaaatg

SEQ ID NO: 116488 - DNA, 398 bp, Heterodera glycines
tgcttaaaattcttttttgacatgtattagcattctgtttttatatattaaaaagtagtttttgacgaactctatcagttgggccccagcacgtttttggccataactttctttcattcttaaccaaatacaatcttgttggtatcattcgattgcactaagtgtcctctattagactgcaaagtttcaaaaatttttgtcaatttctaacaaatttatggccaaaagaacatcagaaatcaggatttcacttatttttggctataagtttgttcaaaattgacaattttttttggaattttgcagactaatagaggacacttagggcgatcgaatgatacaaccgatttttatattcattcttctgtttttaagtgcataaacgaaaccgcaaaatg

SEQ ID NO: 116489 - DNA, 960 bp, Heterodera glycines
agtgcctattcgatgggtgggttttttttgtggcctttttaggtgcctatttcgctatttttgaaattattcctttttcttgcattgattttgaatattaatattttccatattaagaaatcagatgctgagaatgtttccgggaatgaaaaagaaatgagttattttgaccgagatcttatgcggggaatggagaaccaatctttgttccgaccattttttgaccgaaaacccaccagacaaatgattgccgagtcaagttacagtaatcctgttcagaaccaggtacagtacggagatgtaattaatttttgcacctgtttaagttaattttagtgcataatttaatgattttattattacatttttttaacaataatttcccaacagttcaattgagatcacaaaagaatgccaataaaagtcgtcaaaaatataattaaaatatttttcagattaagaaatcgaaaaaaaattgcgaatttttttagtatattttttttacaaaaataccttccaagaaagagtgatatttttagaaaaacgaatttttcaaaatttaaggaataactatcgttttgaagatagatatttcatataaagtacatcccacatatttttttcaatttttaattttaaacactaaaaataacacgctttatagtgaattatgaattttcaacttaaatttatgagccaaaaaatggaaaaacaatttttaattccagaagtacaggttaaaatttaatattgtaaataccttaatttacatacatagagaggcaaatttgtacctttatcaaatatggagaaaaatttgaatttttttttttggggggggggggggggtgattaaaattgaggaaatacggtataattaaaataattttcattttaagaaatcagattctgacaatgattcggggaatgaaaacgatttaaatggttttgaaaaggatg

SEQ ID NO: 116490 - DNA, 1003 bp, Heterodera glycines
cggctcatatgtcgattttgctgtgcggtgcaaaagtcgaaacacggcgcttaaaacgcactaaaaatccctcaaatatgtcctaaatccaaaaaatgcccaaataccgtatgcactaaagtatatcttaaaaacggccaaaatggcttttaacatttgaaaaaataccaaaaattgtgtaaaataattcaaaattgattgaaataatgtcagactcgtaatcatcgacccggaccccctccctgggaataatttttggttctagtcggttttacgcgttccatggcattttacgcgtcccaacaacagtttacgcgtcccatggcattttacgcgtcccaaaaacagtttacgcgtcccatggcatttgtgtccatggcagggatgtcattccgaggctcaaaatttttcggaaaccagaattaagtgctatccctggtctatggtacatattttagccgtcctaataactatgatgaaacctatttttttgtccggtattcagtaattttttaactaaaacttcgttgttaaacataaagtataataactcatacacaggcaactcgaacaatggcttagactaggcctaagcttttggcttaaacctaggcttaggcttttttgtaaaaattttttatattagtaactttctgttgacatcattaacacaccgtttcaaaaaacgagacatgaaccaaagagagtgcagagaaaaaaacatctctctttttggcgtactatttctttatctctgttaatagagaaaaaccgaatttactttgccacatataactttttttctactcatacaatttacaccaaattttgcatgtcgatagagaaaaaaattctgcatcgaacgtatcaaatgttttccaataatggcgaagatactatgtatgtatgtatgtatgtatggtcattgaaaatggataagtaattcaatttttggcattactgatttttaggttttttccaatttttccccatttcaaaaatg

SEQ ID NO: 116491 - DNA, 92 bp, Heterodera glycines
cgcgttcaagcagtacaacaacggaaacaattaattcaagtagtacaagaagcggaaaactgccaggaacaccgcaacgaaattggaaaatg

SEQ ID NO: 116492 - DNA, 152 bp, Heterodera glycines
tgtcagtggccatttacttattgatcgtctttctatgcctctctcaaatactatttcactcctttctttctcggtcctctctcctttctttgctctctctctaccattaacgtcattatctcttctaattaaactccccgccctaggcaatg

SEQ ID NO: 116493 - DNA, 120 bp, Heterodera glycines
tggagatgcataaaaatcagacaaacacaaaaatacaggactgatttatttgggtacaaaattgaagaaactcctgatcaaattcttttaccaaccactttgaaagactgtcatcaaatg

SEQ ID NO: 116494 - DNA, 408 bp, Heterodera glycines
gtagtccagttggccaagtggactatttcccaataacaaaaggaatttcaagtcgattcctcctggcggtgtgattaattattcagaattctacaatgccgccacggaaacagttaatgccgataaacaccagagtagtgtgtaaaggggggcaagtagatgcgtaacctcataggcactaaaagtcgaacctactacgtaggtaacctatcctgaagacacatcaaaatatggataaatccgatttatttaagggttatcttttttgattagccaattgtttgaaaatgtctgcctttttgattagttttcccggtttgttctgataaaggcgatcgtttgtcaagtcgccgtcggcgcaaaaaacgccaatttcccttgacgattgtcggagtgctcgtcgcaatg

SEQ ID NO: 116495 - DNA, 426 bp, Heterodera glycines
tgtccgtggaggctggccgtggcgaagaaggaagaaacgatcagttgaatcatatcttaaagaaaatgttttaatttgtcattttattttatgtattaaagttctacacaatgtttcatctcctaactctgctgacatcattttgagtggtcaatgatgtttgtttttttgagattctgatttttgagaaaaatctctcaaaatggccattttatgtaaaaattctacaaaaactcccaaattttcaattttatgggtgataacattaatttttctgtgtgtgactttttattcctttgaaattttatgcttatcttgtttattaactatgtgattaggtttctgtgcccgcccctaaatttcacctaaaattaacaaaattagaactataaattgccaattttcagtgaaaatcggtttaaaatg

SEQ ID NO: 116496 - DNA, 88 bp, Heterodera glycines
aggacagaaaaggggacaaatgcaaatcagtgaaaattaccaaatcctttaattggaaaggacggcactttgtgtgttgggagaaatg

SEQ ID NO: 116497 - DNA, 397 bp, Heterodera glycines
ggccaaaaacccaaaaaataaaatttaaatttcaaaattttaaatttcatttgtaattttttcttctaaattgttttttttaatataattcacccatcctttcgtgatttttaacgtaacttttttcagtcattttgtcttattttgaagaaaaaaaaatgcgaactctggtttaaaagagtttgagaagacttaatcatttgttcatatataatgttctcttttttacattttttaaaaatggaaagtccattttatggaaaattttaattattttattgaatttttgctaaaattttgagagaaaaatatctttaaaaaacatttttgtttactaatccgctccctagtgataagcgtagctttttgctgattcgttgtccaatttcgcgagatg

SEQ ID NO: 116498 - DNA, 139 bp, Heterodera glycines
taatgaaatatagtggggtcgaccccttatttctctgcttttattgagcctttatgggggatttgtccaacacttttccttttttggcattacttcccttccccttcttctgatgtgattttttgttcccttagaaatg

SEQ ID NO: 116499 - DNA, 367 bp, Heterodera glycines
ggtgaaaaaattgttttgcttattgtctatatgcccccacggaggagatgattagaaaattgaagctaattagtatgatcagtcgagaatagaacttttccgaggctcgaaaaccgagaccgttagtcaagagcagccccaacccgcctaattagttctcgggattctgttcgttcgttttttttggcattaccacagtactgacaataattaaaatcgccgcccatttaaggacgcgttcgacgtcattctcgacgagaatcagctggaggacgcgtgcgaacacctcgcggactatttggagtcctattggcgtgccactcatccgcccgtccgctcgccgccgcgcataaaacgcggcccaatg

SEQ ID NO: 116500 - DNA, 937 bp, Heterodera glycines
atatttggaggaaaagtgcaaaggaccggaaaaggtgaggaaaagccaaaaggcgaaccctccagggcaaaagtggcttcatttattctttgtcaacagccgaagcggcggggtgggaaatgttggccaattttgagggtcgatgcgtaacggcagcgggaaaggaaaagataaaagggagcgattaggtaaattaggggattagagagggagggggacgaagaaaaagcaccaaacgaaacaaaatggacgaatattttattttttgaatcgacaaaaactaacaaaggtatacggtagtggggggagtggggtacggtaaacaaataaatgggctgtgtgtggctcgacactttacacttgcgaatgaatgtggtcaaaaatgaacaaacaaagcccgctgccccccttttatctccctagtgaaagtttcgtccgcagtttggcaatttgatccgaaatttgtgccatttcttccctcattttcgcgttgtccgtctccaaatgccaaatttcatccctttcctgctccaaaacgttcgactttcgacttcggtagcgttgtgctgctgctctgttctgttcctttttgcgctcggccaattcctcgtgagaaagcgaaaggagcgaattctttttggcacgttttgcctgaggcagagtgttttgggaaaagcaaagaaacggacggggggatcccgaagaattggaggaggacgaagaagaattggaggggaagtcaatctgaagaagggggaggggaggtgagaaaaaaagcgatgggaagggaaagcaccgcggaggaagcggaggaggagaagccgggcgaaccggacggaacgaacgcttccgaggcatttggaagttgggacagtcgaagcgaagtgcctgaacagagaaaagggaattggcaaatccaaccacactcggcggaatg

SEQ ID NO: 116501 - DNA, 54 bp, Heterodera glycines
ttgcgccaatgccgcggggcggagagtagtgcggacgaaacaacggacaacatg

SEQ ID NO: 116502 - DNA, 1003 bp, Heterodera glycines
  unsure (1)..(1003): unsure at all n locations
gctgacgcttaaccgtcatcacctccccgccccctcctcatctgctgctntccgtacccgccgatttggcacccgttttttggcacaaattggcccaactcatcctctcctctctgccatcatcatcattggcacacacatactcnagagtggcggtgtggtgtttttgtttggcccatgggagccaaggctgccttcccatttagttggttcaattcttttgtgtagctctttaaaaatagggaaaatctggcaatttttaaatgctatactccgagacttagttgagtgtcgagactgggctgtaactctcggttttgactgttttgtaattagttgattagcaataataatcgcaagaatcgaaaaccataattagatgattaggcttagattaaacttataaatttcatacacccgaatattttttctaaagattatacaatttaatttatctttgaacttcttctttcttatcgtatatttcttcttttaatatcgtattttctaaattacagtctccatccccctaaattaaagcccttaaagcccactatcgcccaatataaaatttgaatcctttctccatgagatttccatcctattccctctggcatcattaattatgccacaaatttcggcacaatgagcatttttcaaacaaaaaaaaaatgtatccaataatgtttttttacggacaaaattcggatgaacaccccacccccgtgccataccaaaaaatgacgacgacgatggattttcccatccccggaaatcgatcctccacccgccccgaggggacaaacttccgtaaaacttgacgttgttccttctccccatgctgctcatttttggcattgtcttgttccctggggaacatcatgtgaaaagggaaaattggcccccaatagtcaaatttttgtgccattttaacccgtgaaaatcgttttaaaatcgtttttttttggatttaaaatagaaattctactgtacttaaaatatg

SEQ ID NO: 116503 - DNA, 707 bp, Heterodera glycines
tatagccaaataaactaataaaatataatatttacttaaagaagaattttaaaatattaattcaaaagttaatttatttacgtgaaatcgcaataaaaataagcagtgcgacgacgagagtcagcaaaatgacaatgaatggcgcatggcttttgtccaccataaaaataaatgtaaaataaaaaaaactaaaaatataaaataaaataaaagcacagtgaataaaatgatggctttcttctcaatttttggctatcatcatcagctgatggatgtttcactgaatatttcgcccgggccgcggctttttgtgctttggacaaagagactaaaaatagctaaagcattcatttcacagaagagggattgttgttgacttatttttagaggcagggaaagaaaggatttaaatattttattgtttcgactaatatttttttcgtttcgtaaaataaatgaaaattaaaatttcattaaaaataaaattaattcggacgattgatttttttacaccttgccttaaccatatcagatcagaccaatcagagaaaatcaaatcaccgataagtttcggagggggggggggggggggcagaaccgaaaggcaccaaaagaatgaatataatttgctgaccacttataaaattctatcatttacctattgtctttattgtcactgttttaggtttattaaaaacaaaaaaatg

SEQ ID NO: 116504 - DNA, 326 bp, Heterodera glycines
  unsure (1)..(326): unsure at all n locations
ttacgcatcggcaacacncaacggcccttaatggcgcgagtcgatgtcacgaggggaatcacttacgaccttttgaaggccatttcctcttcatgcaacaacaacaaacggggcgatagtaataaataattgtttttgctcaatttccatttgcctttttgtgttttaaaattttacttaatatcgttttgccaattttctcattcatttttcggttgtttttgtttcaatgccattgttctccaatggttacctgcatagttttgatttgagcatttccatatttccattcaattttttgctttttacgaatttattgaaaaatg

SEQ ID NO: 116505 - DNA, 587 bp, Heterodera glycines
tttatcctctatgctcgttaaccaaaattttcagatttttccggtcaaaaaatcttcatttttagattttttttaaaatgagcgtgaggagccaacgacttaattttctaccccccccccttccagatttttcacctttctctctctttttacataaattttccacaaaaattacccgatttttttcaaattttcctccccccgccctcttgccctttgctagcgttttcattttttccaaatttccatttttttaatttttccttatttagattccattcattttgtcgtatttttcatttcccccagactcccatcacttttccattttttaaaattttcccttttaggctcccttcactttgccatagtttttccaaaatttctattttttccaatattttttccccttaaactcatttcgcttttaccatagttttccaaattttctcaaattttccattttttttttatttccccctttggctcccttcactttggcattgttttttccataattttcatattttttttcattgtttttccattttagactctctccgttcccttcacttcttctcccaatg

SEQ ID NO: 116506 - DNA, 495 bp, Heterodera glycines
tgccggtcaacagcgggtccaagtcgccctgaacgccgatgtaacgggcgacacggccaggcaccaggaaaccaaagtcgctgaatgatggatgtagtatgtacctgaaaagcaaaaaaataaccgatttttttttgtttctaaacaagaaaatatgtataccgtatttcctcgattataagccccggggcttctattgttcaacccccctccaaagggggcttatattcgagggggggcttttattgttcaacccctttccctatataaattcttaaaattttttgctttctgcataatggtacaatttaaatcttaatctgaaatttttgaattgaaaagatttttcattttttggcccttggaaatttaggcgaatgtttgaaaattcataattcacttctaaatgaatcaattaaagtgcaaaaaagcattaaaaatagagaaaaatctggagcattttatacttttttagaattttctatcttcaaaatg

SEQ ID NO: 116507 - DNA, 155 bp, Heterodera glycines
tgttagggatgaagcgattttttttttctgaacatggcacgggtatgggataggccgatgtatccccggccgaaacgtcgccggatgttttcggaccattactttttttttgttgttaatcaaattacgctttgttgatgctttcgatagctatg

SEQ ID NO: 116508 - DNA, 445 bp, Heterodera glycines
aatattagctaattcaatttgaaatatgtattattatcgtgctatttcattgattgttttaatatttcatttaacgtcaaagactcgttttacacaacaattagaataaaaaataaacaaattcataaataaaagaaaatttataatcattaaaacgcatagaaacagatttgttaaacagaaaaataaagataaaaaaattatttagataaaataaaaggcaaaaactacactaactaaaaaaaataattaatgaattattcattgtagtaaattaatcaaatttttaattaaaagaaaagataaagtttgaaaaaatgcatacaaatgcatattatgaacaattctctgcattctattataaattattagcaaaataaattaaagtttaacaatttccattggcatttgtccacaaaataatttttttaaataaatgaaaatg

SEQ ID NO: 116509 - DNA, 224 bp, Heterodera glycines
tttcgaggaatatttttgtgtgttaagatgaaaatgagaagggaaaagtgtgggggtactgtatgtgacgtagcggagaggggggtgtcacgtgggaataggccacgcccactcaagtgagagcacgcagggacctccagacgggaggatttcgaaatccatccacagtatgccctcctatgccacgccccttatcattcacttccctgtcagtcatttagatg

SEQ ID NO: 116510 - DNA, 907 bp, Heterodera glycines
caaatttaagcaacgacatttgaccctcgccggggggccaaaatgtgtaaagttagaggggtggagggaggttggctgtgtttatgttgttttatgcttttggacggattaagaagcgggcaaaatcctcgtcttaaattccaaaagctttgagcagcggatatgcccgggccaaagtttaaaaacggagacaattcttatttaaattttgggaatttagttaataaaaattttacaaattaaaactcaaaaaataaagtaaaaaaagaatatttaaaattaaccaaatttttaattattaacccgaaaattttcttaaatttaattgcatcttatagataatccagcagtgtttttgcggataaagaaattttaaacatttttctttgattgttttgcggcataatggactgttataataattaattcgaaattaaaataggtatattaaataaaaaagcatcggtgatttttttttaatatattttcccacctgggactggaaattttacgatgctcattacatctggcagcgacaggagcagcacggaattgcgctaaaacaaattcaaaaataattatttaaataaaaaggtgcttttaaaaatatttattttaattttaattaaccttttttgaactaaaaaatttaaaaaaaaaagatcaaagattcttaaaataaaattcattaacaatcaatttcaacactaatttggatattattctcaaattaaaggaaatttaaaatagaatttatttagaaaaaaatgcttttcaaaaatgtttatttttatttaattttacttattttaaattaaacaatgaaaaacatatttaattatttaggcgaaaataaatgcattaacaatcaatttcatactttaatttggatattattaaccaaatg

SEQ ID NO: 116511 - DNA, 470 bp, Heterodera glycines
agtaaagtgccaattgtcggtattgctttcacaaaaagggcattttgaggggcgagtgaatcaattgggcggagtgtttatcaatggacggccattgccacacgaaaagcgcgttcaaattgtggagatggcacgcaggggcataaagttggccaattgacggaatccattcttaattttgtgccttacagaccctgcaaaatcagtcgcgaactcaaagtttcccatggagcagtgtcgaaaattctcaatcggtgccaaaaaaacaacaattagtgattgtgaatgaatttctttttttaggtttcatgagacgggctcaatttctccaggacaggtaaaaggggagacaaagctatgagaacgagagattaagattttgctattatttggaaaaagtgacagttattttttgaatatatacagtattcctttttgacacacacttacagtagtaccacaatgcgatg

SEQ ID NO: 116512 - DNA, 55 bp, Heterodera glycines
gcagcagttccatcgccgcgacaacacctcgcgatcgcagtggttccgctacatg

SEQ ID NO: 116513 - DNA, 181 bp, Heterodera glycines; identical to SEQ ID NO: 104902

SEQ ID NO: 116514 - DNA, 1003 bp, Heterodera glycines
aaaaaatttcaggatgaaatacaattaaaataattaaaaagaaaaaaaataaatttatttttctaaataaataaaaaacattgtcagaggcagtgcctgcctaaaaaatagacaaaattttttcaaaaaagccaaaaaaaattgaaaatttaaataaatttaaaagtgaaaaaagtaaaaaagcttagaacaccttcgattcccaggacgtctccgttccaagtactaagaaggcccaacgttgcttaacttgccagatcggacgggatggcgtgctttcaacgtggtatggtcgtaagcgaaaggacagcaattaaagtcatttaaataggcatatttaaaagagcctatttttttgccttttcacaatagaatttattaaaaaaggcaaaattcgccttaaattaataaggtgaaagtttgaaaatgtttattaaaaaatttcaggatgaaatacaattaaaataatcaaaaagaaaaaaaataaatttatttttctaaataaataaaaaacattgtcagaggcagtgcctgccgaaaaaatacacaaaattttttcaaaaaagccaaaaaaaattgaaaatttaaataaatttaaaagtgaaaaaaattaaagtaatttaaataggcatattttaaaaaagcctatttttttgccttttcacaagagaatttattaaaaaaggcaaaattcgccttaaattaatgaggtgaaagtttgaaaatgtttattaaaaaatttcaggatgaaatacaattaaaataatcaaaaagaaaaaaaataaattaatttttctaaataaataaaaaacattgtcagaggcagtgcctgccgaaaaaaaagacaaaaattttttgaaaaaagccaaaaaaattgaaaatttaaataaatttaaaagtgaaaaaaggaaaaaagcttacaacaccttcgattcccaggacgtctccgttccaagtactaagaaggcccaacgttgcttaacttgccagatcggacgggatg

SEQ ID NO: 116515 - DNA, 617 bp, Heterodera glycines
  unsure (1)..(617): unsure at all n locations
cgaagcgcatgtctggtaaagaagagcaaatttggccaaatattagccaattagtgtccaaattatntaatcaattggatgtagcataattcggtggacagagatntaaaaagtctcgactagccgaatataattcccggtcagttatcgattgactgatcatttgccacacctgagtcagttcgactttgaattcccacacggcttgcgcacattgtgcctccaaactctcagtttcactaaagccggcatcttgcagacagtccaatgcgtccttaatggccacaaattatgggctaattacctatataaacttccgattttgcatataattaatgcaattaattaattaaagaacacgaaaaattggaattaggagaactaatatcaattattctatccttcttaattatcggataggtaggtgtatacacaaaaacataatcatttcaaattagtccattatttagcttaattagcctaattttggtgtgcaattttcacaaataaattgctgaagagaccgttaatttaattgactactgtgacattttaattccaaaacagtacattatttcaaaaatagtttgcacataatttgtttaacgaataatatg

SEQ ID NO: 116516 - DNA, 357 bp, Heterodera glycines
tctttatttatttatttatttttataaatgaataattaattttccaaggccggaaatgcgttgggattaatttccggcccgtcagtatccagcagatatcatttaaaagaggaggaaaatcgtcgtaaaaacagttaaattgttggggcgaatattttttctgcataaatcattaccaaataaaaattttacaaatttttaaagagttcaaaaaatgtttaaattgccatgcattttacttccattttttgcactttttctcagtgattttattgtgggacaaccgatgaagagtaaacaatttgattttttaataaattaaagcgaaatttattattatttttaaatttgcagatg

SEQ ID NO: 116517 - DNA, 686 bp, Heterodera glycines
tagcaattggctaaattaaaatgaaatcttagctaagtacgagaaagaaaaactaagtatttaaagtgagaaaaatttcaatttttgaaaaacagtgcaaattatacacagatgaatgacttatgcacttaagcgaccgattttatatatcaactttaatttgcctttggacgaaaatcgattagaaaaaggaaaaggcaatcgaaagtgaaaaaggcaaaatgatttaaggcaaattttttatttaataattggcttttgagtacggaggtgaaaagtcgtaaattttaagttttctaaaaaccattcaaattcggccccttttctaagcaattggtggttcgctgggggatatcctcccattaattaatcaatgtttgtgttagtgtggtgtctcccgccgcgcaactcaaatctgccaaaggaattgtttgggactgagaagactgcacgaaataaaacattttgccacaaataaatttttaacattttttaaatttttcaatttattgcgtcttttacgaccgatgagtcacgctaaaattagaaatgttcagcgggtttactattgttagttccttatcaaacctattttaattataaaaacaccggagaattttttcaacaaggcatatcttcacttttattttaattttgtttttatttgctgtatattttacaaaatg

SEQ ID NO: 116518 - DNA, 63 bp, Heterodera glycines
aaaagctacaaatcaaaaactgatgaacaaaaatttgatattgttcaacgctttattgaaatg

SEQ ID NO: 116519 - DNA, 1003 bp, Heterodera glycines
caaatgtcaaaatcgaggcacaatcgatgaaattagccttttttgaatttggtttaacttaggaagcaatgcttttgaagttggttagcacatttttgttgtattttgtctgtttcaattaatttcgaaaattttttttttcgtatttttaattgttttcttttgttttcgtaaaattggagtcataattcgcgaaacatagtgttcatgtcatattaaaataaaaaatttcatcaaaaaagaggttgagagaaactcagaaatttcaatacataaatttgtcaattaaaactataaaaccacaaaaaccaaataaaaagcattcctaagttatagcttataggtcaaagaatatttaatttggtcgattcgactcaaaaagcgagtttgcccaaggcaagttggttttgccatttattcttctgatcattagatcccgcgttttgaggcaaatgctttttttttttttgctaacttgatatggccaaatacgcacgaaaaactagtttttagcgtgtttgaagcctttaacttgaaattggtgccatttttgctttttttgcaattttggtgtcgaattccggacacgtaatttttctgccttttttgacttttcatgccttttttaaatacggatctattcagtaaaccccccaagatattgatttatatagatagactaagaaccttcaccaaatcaaaaaagattaacgcacaaatgctaagtttaagcagccctttcttcatagcataagcacagaaatatgcaaatccacataaatttataactctattcctaaatgaatgttttttgcggttaaaagagcgtaaaaaccgagaagacccattctcgcttctataaaaaatttcttctttatttatcaattccatctcacagcaatttttattttaaaatacgcattttaatgtataaatctgtgccttccgcttcatttttgattaatgagttcaatttttattaagattttgccgataatcaatg

SEQ ID NO: 116520 - DNA, 486 bp, Heterodera glycines
atttattttccatttaattatcttaaattttggttaccatatattttatcaaaaattcctttttgtttttcacttttacaaaatcataccatttaatttggccatcttttgatggacccaattaatattaaattacattttctttctcctaaaatttttgtttaatcaattcaatttactaacgcatttattcaaaaataaatgcgtaaaaatgataaatgtaaaaactttaaatcagtattttaatgtattttaaaaattaattttaaaagttaaatttttattttctcttaaatcctactcataaatttaaatatatttttccaattcaaactatttattttattaaattttgaacatttaatcttcaaaatgtataaattcttaatgaataaaatctattttttctccattaaaaaaaattattaaatcttttactcaaaataaataatttccaatttaggcgcactttcaaaagtttaaatg

SEQ ID NO: 116521 - DNA, 999 bp, Heterodera glycines
ttgttttgttttggtcacagcgccaataaatgaattcccttcgtgcttcttttttttggtacatatggccttcgaaaacgagtttgtagccgcccatttgtgaaggaaaaaacgtagccattatatttaatgaattttgtaaatttagttcagcttttatagcacctattcaggttattcgggcaaatccattggcaaaatttaattctaatcagttcagattagtggtttttggtcatatagaattttctcattaataggaataatgatttttggtcatatagcatttggtcatgtaacatttttctcattaagattagtgatttttggtcatatagcatttttctcagtccaatttgaataaatttagtaactggcatttctctcacagcttattttaaatcttttaatatatttgaattaattattattttgtgggtcctctgtctgtgggtcctttgagaggacaccgtgcacgtcacatagtccatttatcgattcccttttgacccgggcattcttctgtcttaagcagagcccattctctcatcagtcgttcttctcttcatttcgctttgtttgtcttcgtttaaatttcttattgataatatttatttcggcttttagttattttcttgtttagatttattcgtttcgtttttgacctgtatttccatcacaatcaactgaaaaacggcaatggatgattcggttggttttcttagcataataaatcttgcatttgggtggtcttccaccccttacgacagtaaaattagtctgttccgttcgtttacagttatcctctcgacggctcccttccgacttctccttctaaaaatttcatccaatcttctgtataatttttctatttccgtatgcttaacagctgtaaattcccaaaaatcatcctccaagtttgtgggaggggaattcaaaaattgatatggatgttgaaactgaaacacagggtagaacattttggccgacgacccaatg

SEQ ID NO: 116522 - DNA, 952 bp, Heterodera glycines
aagtcgttatgccgtctctttctttctttaaattttcttcattgtaattaaacaaatgtttgatcttttgattagttttaaattgatttatttgaaatattttccaaaatttaatagaattaatcacaaaacgaaaaatttgataatttacaaataaaaaatatatttagtaatatgtattttaattttataatttttaattttaattataatataaattataattatgctctcataaatttgatatttgagtttttattttatagaaatattatattgatcgattagtaatatataatattctcttatgcgatatttattcaaaaatctggttaataaaacattttatctatatatatttttcataaaattttttttactaataaaagacttttaatcagaattaaatatatatggcccgatattatagtatttttatttttgataaatcttcgtcccataacataaaaaccatattaaattccaatcccaaagtggataaaaatacataaataccataatgttaaatattttggttttctttaaatctttaatcaataaattttgtatcgaatgtatatttttataaattgtttagcctttattaataaaaatcaataaattaacttatatctaaaaattaattattccgaatattatttatttttattaaaatttttttatttatatttatttaatctttaatttcctatcagaaaataataagaacttctcggacatgatttatttactcgcaaaatatatttataaaatcaaaaaggaaaataaaaaataatgatatatttacttgatcttcaaataaattaatagtccttattctattaaattcatgaattaagaactttgtgcaaaaattttgaagcagccaaagcccaaaataaacgcaattcaacatggcaaatcatcgccaaatcacaaaatcgcggaaatg

SEQ ID NO: 116523 - DNA, 283 bp, Heterodera glycines
attagctaattaaattaccataccccattactcattaaggaattgtttgaagactgtcgccgaggtcaaacacattcagtgcaactttggattgcgcagaaaagcaagaagcatcggtctccattaaagtgagaggaaaacttagttaccgtaaccttatttatatgtatgtaacaaaaacagtaatgccatgaatgggaaagagttaccgtaacagtatttgtatgtcttaccttaatcaatcttaccgtcttacgcctttaacaaaaacattccagggatg

SEQ ID NO: 116524 - DNA, 103 bp, Heterodera glycines
tgtttaatcaatcaaaatcaatattcactacctaattaagaaacaattaaaattattacaaaatgccaaaaaaacgaaatgcgctaaaaatcataaaaaaatg

SEQ ID NO: 116525 - DNA, 426 bp, Heterodera glycines
cgaaagatttttaaacgaaatttcttttaaaaaaatgaaaaattttcctaattgaacttccgcaactttttagtcaaaatagttgtaaaactttgtgattcgtcaaaaaatttaaaacatcgctcaaaaattaaaaaattttttttttaattttacaaaaacggggcgcggggaacacctcttgacattagcactctctgaatgtgatttctatctttctgtacggacttacaacttcatgttttaaatttttttcttttgtaaattgtgaaccaaccacaaaaaggtgccgtcacaaaaaaaattttgtgccgtaaaataccaaggggtctatgcccaattttcattagtcgtttatttcgcccaattttcacatattttttacactcactaactctgccatttgacaggaatggacaattcatg

SEQ ID NO: 116526 - DNA, 952 bp, Heterodera glycines
ggtgaggacgattttggcgttatatttgaacatacacaaaaaagcgaataaatgactaagaatgttttttgcaaaacaaactgaaaaatcaaaatcaaacatttccatttttcaaatcattttttaacgcaaaaaaaacaaacattttcatttttcaaatgcttttttaacgcaaaacaaaaccaaacattttcatttttcaaactcatttttaacgcaaaaacaaaacataacgccacacaaattcaaacaatggcagaaacatacagacactcaactttattatataggattcggatccgggattcgaatttgttcaaagtcgatttttaacgaaacgtccctcagcgagcaaattttgtgctctttgcatccgtcatacttgttttacatgaaaaatttggctctagtgcactttataagtccaatcagagtatatgagtacaataaaatatttatagtcatatgaccatttatgagtccactcattttttttatgagtccaatgatttttaataagttttgagtccaatttttattttccaaactgtcagccaaaattgcaaatacacaaagtaaagtcacggggaaaaaatagatttaagaaaatttttcgcttcatttttaacatgcccataaatttttgtgaagaaacgaaagtgccaagttgtaactagtctattgagtagaaaagtcggacaaccctaaagaatgggggtccctaaattggctttttcaatttttgttcgaattcggtctggggttcggaattgggtaaatccgagttcagattcgtaccctcgaaaagcacttaaaacttgttttgagcccaaaattaaaaaagaagttaaattagggaccacaattctttaccattgccatcaattcgacttctgttataatttggtgctataagctttttttggccagtaccaaaagataaacaaaaatg

SEQ ID NO: 116527 - DNA, 627 bp, Heterodera glycines
  unsure (1)..(627): unsure at all n locations
aattctaattacncaactttaatattatttgtcaatttaaggccgaacttgccaaatatggccatggtccgatgggaaaacgtgcggctatccgacttttgaaccgaatttatgaggcaacacacncnaggtttagcaaaatttaaaaaatgtgctacaatttttttagaattcctaagagccattggcatttatacaatttttttttataaaaaagtataaattccataaaaatcgaaaattttttgaaatatttggaaaattttgtaatttttcgaaaatcactttaaatttctatcagaaattgggatatacttcatttcttcgttttctccaccgaaattttttaaaaactttaaaattttcaaagatttttttaaacaattatctaaaaaattgttagaaaattgggagaaattggattttccaattatttttttagttttcgtttgtaggcctaccctctccctaaaaaaaatttttaattggtttccagtgatttcaagcgacacgccaatcccgcggaaagtgcggcgcgcattggcaacggacgacggcggcggcgacaaaaatggggcggctgaacggcaacgggaacggaggaccaagcagaaaattggccaaatg

SEQ ID NO: 116528 - DNA, 1003 bp, Heterodera glycines
tggctctgttgaaaatgcttcgtcgtgccgatggagaaaactggagggaaattaattataaaacgaagaatgggatgccattgttcgcatttggcctacttgaactgacaaaacatgtccgtgtactccttgggaacgttgagcaattcgacgacagtcaaacggaaaatgaattcactgcctttggcaatgtgtggggggaactgaacgtcaaggtcagtgccggaagaatgatctgcaaagtcaaagctcaaaaaaagaaggaaaagtatgggaatggaaattaagcattgaaagccctcttctcaataaaaattggttctattttcgttttgatgctctattaaaaacccaaattattaaataattgtcaaacattatgccaatttatcaaaatttaaaaagattctgaggattttcctcaaaagcctcaaaaatcctcaaatcctcatattccaaaaaaatcctcattgacctatcaaaaagccacaaaatgaggataaatcctcagatctgggagccctggatatcatagtgattcaaatatgtttcacattgcaaaactttatcttctcaatattttactcagatccccattcttaccggtgcatatttttttgcctatgcctcgggttgagaaaaatttcgggttgagaaaaacctcgggtttcgggttggcatcactgccgcctacctacttgcaaaattaaagaaacttttagagtgccacgggaccgggaattttgggcaaacccgggaccgggacctttttgggttgaaaacccgggaatttttggctgggaaaaccgggaccttggtactcagttgtccgctaccaggtcccggtcccgtggcactctagaaaaaatacatacataggtatgtaaaatgaatgtagaaaaactttgttaactgataatatttgtttttacagttttttccactgataatatttgtttttacagttttttccacttttctgcaatacaataaacaacaaatg

SEQ ID NO: 116529 - DNA, 886 bp, Heterodera glycines
tccctcccggagaatgagatggagatacgcgtggagaaaaagagaatggaatgaggtgcgcaccgctccttcgggagtcttgtcaaggaccggtccatatttgaatggccaaaacatttttgaaaagccaaattgcagcccaaattattatttttttttttatcaaatgccgccactcgctcatattgccaaattaatgacgaacatttaagggcgggccattcgagccatcaactgaaggccattgttgattttcgcagacctattagttttgtttggcagatatttgagggccaagatttttaaactctttctgtataaaagtcttagccctaattacacaaattatttttgtttttggcgaaatttgccccggcgaaagaattttttttttctctctctctccactttctcagcgctctcgccgattcaccggaagcgcattactgctggccgcttgagaataagagaccatcggccgagaattgtgattaatacgagtcatgagacactgcgccgctgtcaacaattttcacaatcgctccgactgatcgggaattaaatattgtagaagtactgtaatttataaggagatgatcatcaataaacataaccattcattctccccttttcgataagagcactcattctcggaaaacatttatccaaacatttctttctacgaaatagctcacttattgcctaatccaaattattttaattgccaactaacttaacggtcactattcaattaaattttatttagctcataaaaacctgaaccaaatttcaatattccttgacatatttcacgctttcgctcctttacattactgaatattcgggtttgaattgcgtcggctcttgggccttctgtcaagatatg

SEQ ID NO: 116530 - DNA, 344 bp, Heterodera glycines
aatagtgataaaagccaaaaaagtgaattttcactattttaagtgacgaaacgctaaaatagtgatttctagtgacgaaaagtgacgtccaaatgaaaaaattttaacgcagaaatgcgtttttgagctcctttcttcaaaacaattgagcaaaaaaaaaagttttttcactaaaagttgcttccctagttattatgtttttgtgttattttgctctcttatttttcctaattgttgttctctctgttttaagttaacacaattttttttttttttgctttttgtgacgcaccaattaatcaattggaaaaagggaaaattgtgctaattgaactacaaaaatg

SEQ ID NO: 116531 - DNA, 96 bp, Heterodera glycines
ttaattagataaataataaattaattatctcgcgttttcgtaggcgtccagcagaatgtcgcgcacattgcactgcgggtcaatgtgtccaacatg

SEQ ID NO: 116532 - DNA, 54 bp, Heterodera glycines
ggtaatcgcgctcaatgatgaacatcatgatttgcgacaaaaagcattgaaatg

SEQ ID NO: 116533 - DNA, 168 bp, Heterodera glycines
gctgatgatgatgaggaaaagcctcctgttcctcctcccgcccctccggcgctgccgcccattcgcttcggtggccctcctccctccaccatcatcaccacctccatagccgttgataattgaaggctgatgataatgttgttgctgctgattttggtggtggtgatg

SEQ ID NO: 116534 - DNA, 635 bp, Heterodera glycines
ctgattcttttattcttcaatttgcaacatccctggcctcctttgggccccagcatatttttccactataacttttttctgtcacccaaatccaataaacttggtattcgaaagcttaacatgtttagaagctttttctaaggtattgcttcgcgattagacaattaccaaaaaagttatacatgaaaattgcaaaaagttgaaatttttgaagtttttttaataaaattttttccaggcttgaaaatcttttcgcttttggtaaggctaatagagcatgttaagagctttcgaatgataccaagaatgttcgatttggatgccaaagaaaacagctatcgtggaaaaacatgctggggcccaaacgtgtgggcccaatcgtgagggcccaactgacgggttccgacatctttgtaccctgaaaccccaattcttacaaatgccaaaactgttcatcttcaagttacgtgccgatcaaaatacctaacaaaaaagtagagttggtcgggaccgggacgggaattcccggttttttcaggtcccgtcccgatcccggtttttcgaaaaacagaaatcccggtcccggttttgccagtcccggtcccggcgggactaaataagcactggtaagaatg

SEQ ID NO: 116535 - DNA, 81 bp, Heterodera glycines
tacttttttcaccaaaacaagaaggttttgaacagaacaatgataataaatacaatcgtttttaagacgatcaattaaatg

SEQ ID NO: 116536 - DNA, 418 bp, Heterodera glycines
atattagactttttcaagacatggaaccgggactcggacggacccgacttttaagaatcaaaacctgaaagcgaatcgccagggtttagcctcgtccccgccctccccggccgcccctccgaccatcgggggatagaaatactggagatcagggatattccttttagcacgattttacgatttgaagagaatcagacaaaaaatttacaatgaaaaagtcacccaaaaattcccaacaaaaatatagcaaaatcagttcaactcagtctataaaattcggaagatttttgatagagttgtacggaaccgggaattttgagaaaaaccgggacagggacttttcgggttgaaaaaccgggactttttggctgggaaaaccgggaaaaaaccgggacttttcccggtcccggtcaaaatg

SEQ ID NO: 116537 - DNA, 815 bp, Heterodera glycines
agagaagctcgacttttgaccgctttctcggaaaaaccgattaaaaaacgcgataaatggacttaactaattaaactaattaatgatattgatactgaaaaatcacattttccgaacattacacataattatttctttccttttcattgcttttcttcactatatccatccatatctgtaaatttgttttgattatttatttatttttttaaataataaaataatttattcatttccaatcagttgggtaaatgtgcataatcggacattacaaaaaatgattacaccaatttgcttaatcaccgttcattgcctacccaatgatcggagagagagagagagagagctgtcagaatattcaattgagagaaaagaatcaatcattcaacaaatgattatttaacaccattttattattattaggattagggcttccaattatatgttcaccaagtttaaaaaaaactgatgtaaaattcgtataatcaaaacattattacaaaccctcaattttttaaaaacttgaaaattttgcgttaaaaatttacgtaaaattttcacttttaacaaaaaaatggggatttaaaaaaattctttgttttaatattagactttttaatttatatgggtgtatgcaattagaagccctaattgttattattatcaaaaatcatttatgtaccagaaattattttataaatatattttataaaatttttaaaaaataatttgatcatttcttcatctcattttatgttgttctgatttcagtctgtattttttccacaaattttaaacattttctaatcaaaatg

SEQ ID NO: 116538 - DNA, 173 bp, Heterodera glycines
  unsure (1)..(173): unsure at all n locations
aaattattttgaaatttatggcaaaaattttctcaaaagaaaaagtaggaaaaaaccagtgattatctgattaaaataaatcggtttttctcanataattcatttcttttctgctgaccaattggctgcccgtgttcattantagcaatcaattaagtgcaatttgacgaatg

SEQ ID NO: 116539 - DNA, 1003 bp, Heterodera glycines
gatagctaacaaataagagcattttttaatcatgaacaaatttatgagcaaataaacattcgaatttattaatttatttgtattttcagccgaaaaatgttttattattatgtgccataattaaatttgcgagaacaaagttttggcacaaaaggattcatcgctttgttttgttcttttcgccccggcgccttcaaaaacaatgggcgtaaaggaaaaagaaaataaaagaaagtcaataatttaaaacaaaaaactaaaatatttttgcttatgccaacacaaaatcattaaaaaaatttcgatttcaattttatttttaaaataaaacaaaacaaaattgctttgtcaattttccgtgacaattccttctcaatttaatctctatttgacttttttttgttcgatttaatttattttaaaagtaaatgtttttttctcaaattttactcgactaaataaattttcttttcaaatggcaagtgcatttcgtctgtttttttttctctgaaagatccaacaaaaaaaatcccatgggacggacatcccacagaattacgagcacacaacaaaaataaaagcaatgtttttcaaagtttgggctttcaaatgccatcaaaatttctctccggggagaaattcaaaaaattcgggcaaaaatgcaaaaatggaataaataaactgaagcattcggacgaaacggcacgaataaaaaaaagtttttttaaaaactttaaaaaattattatttttttagcaaaaaatattttatttaattaaataatattttgtattatttgttcacatttgtttttcttcattctctcatgcaattgcctccttatgcttttctgttcattttattcgaacatttggctttatggtacctttttaatagattaattaattcgttttaaatttttaatttagcactttttctttgggccgttcattgcgcgaaagactgcagcgaaatccgaaattgccgccttcgttgggaaatg

SEQ ID NO: 116540 - DNA, 497 bp, Heterodera glycines
aactcacatgatgtcctgcgggtctcacttctctccttttcttcaatcagcacggtatgtctttcggtcatattttttttattattaattagttaggtaattttcatttttggcccctatcacttaagcactttatttcctttcatttttctgcactcacaagtttttttttcatttcatccctccctagcttccggtgttcgcaccgtttacgctgtgatataatcagtggggacactttcccaccgcattacggttttaatagatttccgctatttttttttctcaaagcgattttcttttacactagttccgataacaaaattattgtaacactggaacgctagccacgcccattatcaagggcctttaatctaagcatttcacattcattcattcattcttccattctttcgttttactatcctctattttagatactcttgcacaattccactgctaattctcatctcacattcccattccctctcattatg

SEQ ID NO: 116541 - DNA, 517 bp, Heterodera glycines
tggttacatggttaggtaaccataaaccatgttcttttactgtgcgttcacaaaccaccaacatcatggtcaaatgaccaggttaaatgaccatgaacccgtggttgctcatttgctacgggtaaaccatgatggttgtggttatttaaccataacctccttcttttactcggccccagggctctaataatgcgtagctccaatcatgatttaaaatttgtacttgtgtttgtaaataaattataaaaaaattgaaaaatatattttaaaaaatatgtacaaaagcaaagaaacaattatcgtaaagaaaaaagcggtcaaaaaaacaaattttatctcattaattcagttctccttaattacttctccaaattgtttcttccatctgcaaatggtcccttgattaattttcaatatttttctgtccatattattctttttaattgttcaaattgaaattggagcagaaaagaaaaatttgaccaaaaagcatttgaagaaatatttggagaaaatg

SEQ ID NO: 116542 - DNA, 361 bp, Heterodera glycines
cccccccccccctcgggggaaaggttcaccccccccccccattttcccagcccccagcagcagcagcaattcttgtcacccaacaacaaatgcacacacacacacaaaaatatattaaattgtgatacatatgtaatcacttatgattagtttctgatgaattattaatgatgatgatgaggttgggaattgcattttttgttgtttttgtgcggcggtgtgttgttaagtttgtgaaacggtgaaggaatggattaaagtgtgaaactgacttgactgatgtatttgtatagatagagagaagagagagagagtttcggtggatcaaagaacaacaacaaattgtgattggttgataatg

SEQ ID NO: 116543 - DNA, 140 bp, Heterodera glycines
ggtaagcgcaaacaaatggggagcaaaatccacccataattttaggctcacgttacgaccacatcctaatcttcggtgaaatgttgcgcatgggtgttcggccaaaattggttcgacagggaaaccatctgctagagatg

SEQ ID NO: 116544 - DNA, 231 bp, Heterodera glycines
aagcgggagacatgagggtaagtgggagaagaaagaaaagaaaaggaagaagagggaaaagaagggaaggaaagtggaaaaagaagagagaaagaggaaaaagaaaggaggaggaaagagtaaaagatgagagaaagaggaaaaaggaagaagagtggaaagaggagaagatgaggcaaagaggagaagagagaaagatgaaaaaagaggaggaggaaagagtaaaagatg

SEQ ID NO: 116545 - DNA, 62 bp, Heterodera glycines
ttaatagtgtctcgcctgcgggccagaaacaaataaaagtggcagtggtcaacccaaccatg

SEQ ID NO: 116546 - DNA, 841 bp, Heterodera glycines
catgattccggattcattatacatacattttcagatattcttttaaaaatgtcatagggaaagattgcgacgacaaaaaaaggatcaccgggaacaccaattctttcactcaaaaattcaaaatataataaacgttttgaaaattttgttttgctcccatggtagaccaagtaagcataatttacagctttataaaaaaaaattcggtgccaacacattcccagtttttcggtggggagggacaaatgggcgacagcccagcggttttttgggggaataattcctttgatagttatccaattttgaatagaaaattaaaaaaaaaaattaccaagagtctgagttttttccaaaaaactgttccgacgcgttcatccgccggaaggattgtcaacgaggcggaacaggtcgacgaagaagttggtcaacagtggacagtctcgatcagcaaatagcgattcttaatggttgacaaagttttggtcggacaaattggcactggaaaattgtgagagattttagaaaaaaaaaaccggtggcaaaatttaaaaaaaatgaaaatcaaaaaaaaaacaacaaatattcgaaagtctaatgaatcaggaagatttactatattagtttttttaaaccaaaaacaaaatattaggaaaccggaggtactattcccgaatttccagtcagaattttgccagaaatttcaaaatcaatgattatgtcaaatctttcttctttttcttacccataaatttttttaacctttaactatttaaatttaaaaggatttggtcggtcctacaatatttatgacatacggacccattaaatcggggaaaaaatg

SEQ ID NO: 116547 - DNA, 385 bp, Heterodera glycines
tttgtgatggggcatcctgcggaaagaaagtgcgcgagaattggatgatttacagagggcgcgggggcggcggaaacgattcaaagagtgggcccaattaggtaaagctcattaattaacgtttaaatgataggtctaattaagtaaaacactcattaatgaactataagtgatcattttttccgtggcaatctcccaatttgcgttgtgatttctcgcctgcttcgccaccccttttgggctggtcgttgagcttctgggggttgacggttttttgtgccgagtgccgaatgctgctgaagaggcggcacccattgatgagggaactgtcgcggtggataaaccggcgaccattgccgaggatttgcgacggtgggccaacatg

SEQ ID NO: 116548 - DNA, 327 bp, Heterodera glycines
acaaaatactggcgaaaattttacattttctctctcaacacaaatgcgatttttcactgatttttgcagaaatttttttaatttaataaaaacataattaatacgttttgttaattgagtcgaaaaacaaaaaagaaatttttaagtatttttttcgaaaattaagttaagttgaaaaataaatgtaaaaaaatccgacaatattttagcaaatgcaaaagaactagaaaaaacatctttaaattctaataaaataattaattttaatttgataaaaaaaatattctaaaaatattttaaaggaaaatttttttttctaaatatatg

SEQ ID NO: 116549 - DNA, 59 bp, Heterodera glycines
ctcttcgatgccgaatttgtgctcacacccgaaatccgaggtctaacgagccaccaatg

SEQ ID NO: 116550 - DNA, 895 bp, Heterodera glycines
tctcggttctcgtatcgtttctcggggtcatttcccggttctcgtatcgtttcccggggtcatttctcggttctcgtatcgtttcccgggtcatttctcggttctcgtttcgtttcccggggtcatttctcggttctcgtatcgtttcccgggtcatttctcggttctcgtatcgtttctcggggtcatttcccggttctcgtatcgtttcccggggtcatttctcggttctcgtatcgtttctcggggtcatttctcggttctcgtatcgtttcccggggtcatttttcggttctcgtatcgtttcccggggtcatttctcggttttcgtatcgtttcccggggtcatttttcggttctcgtatcgtttcccggggtcatttctcggttttcgtatcgtttcccggggtcatttctcggttttcgtatcgtttcccggggtcatttctcggttttcgtatcgtttcccggggtcatttctcggttttcgtatcgtttcccggggtcatttctcggttttcgtatcgtttcccggggtcatttctcggttctcgtatcgtttctcggggtcatttctcggttctcgtatcgtttcccggggtcatttttcggttcggttgccggtaaaaatcacttctcgcacagccctaatcaacagccacaaaaagagcagaaggtattttaaaactaattgcttttaccactcgaaataagtcaaataaaattgtgttcgattttagactaatttctactttaatttgtcactatagagtagggttgacactaacccaagggtgcaaaaatattgaaaaaattgcagaaaaagtttcaaaaatgtttttgaaatatttttaaaatttgtgtacccgagtccttcacaaaatggcgcaaaatg

SEQ ID NO: 116551 - DNA, 115 bp, Heterodera glycines
cgacggaatgccaaaatgaaaatgtcgtcaaagagacccccccgggcatcgggcgcagaagaaacgcactatttttgacattataataacagctgtaaaaaaggaggaagtgatg

SEQ ID NO: 116552 - DNA, 515 bp, Heterodera glycines
tgttatcaacatgaacatctcaattagaagtctttaactcatttgtcagtaaagcctttaggcaactttaaaattaaaaattttggcgctttgtatttaaaatttaatgtacaataaaaagcctaaaaaatcttttttttcaaactcaaccgtaacatgggaagtgggaaaagacaaaggattgagtgggatctatattttggtacagattatatgccttttctttcaatgggtttgttttctttcaaatgcatgcgaattggaatttaggttattattcatacaatgtctaccttttattcgttaaatgtttcttcgaattggctgaaatatttatctcttgggacggctttggtcgttggctatgcagtttacattgaccgtaaacgtcgccttgacccggaatacaaacaaaaaattcgtcaaagtaaatgggttttatctgatagtttgagccttctgtcttacaattagacaggaaacagaaacaagccaactttttctacgcaaaaatg

SEQ ID NO: 116553 - DNA, 409 bp, Heterodera glycines
agtagggcgcggattttttagtggcaaaaaaatgccaaaataattaaataaatagtgacaaaaaatgccaaaatagtggcgaaaagtccgaaataaggacgaatggtggcataattttcagccaaaaattaagcaaaagtaattttttattcactagttgcagttgtaaatgaggtacatttcctttgactattttcttagcaaatattggacatttttaaatcaaaatttgtcaagaaaaaaatgaaggggaagaatttttaagaaaattatgattatggtattgagaaaagggataaacaatagaaaatataaaatttgtgaatacggtattaaaatataaatttcgtattgaaattaaaattaaaataaatataataaaataaaaatgctaatattttcagaaatg

SEQ ID NO: 116554 - DNA, 93 bp, Heterodera glycines
attaacactaattaataattagtaaaatattttttaaaaaattttcatttttattttgttttaaattaaaatttgttttaaaaataggaaatg

SEQ ID NO: 116555 - DNA, 107 bp, Heterodera glycines
actgtaataatattattaccaaattattaaattttaattgttttaaaaaacatttaatttcctccctttgtaagtggcaattttcgccgccgcctgcgacaccaatg

SEQ ID NO: 116556 - DNA, 268 bp, Heterodera glycines
tttttttattttccttttcacataaatattttccaattatgatatcacctatttttgacaattcttctgtccataaggtaaggaaaggggcggaaatgtttttgtgccgttttggcactttgtccacgttaatttggcattcatgtcactcttatgtttttattgccaaatttaatgatgccatattatccaaattgggttatttaagtcggcatttttcaaacattccaatcccaattttccattcatctcactcactcataaaatg

SEQ ID NO: 116557 - DNA, 919 bp, Heterodera glycines
aatttttcatcggaaatttttaatttttgaaattctgcctcccagagaatggaatttacaaattcattaacccatggaattttaaaatttcgatacccttcaactcaaattcgaaaaatcgaagaatagcaagatttcccaagttgtgacgatcaatttatttcgaaacaaaaaatatttttgccgttacagtatatataacggtaatttgtcccaattgtactgctacagtagtttcataatttaaagtcaattattaatttcatttatttgaattcaaaattcatcatttttctcatccatgacataatgaaattggcaaaacaaagcacaccgcccattgatcggcggcgcttatgattgtgggttttgcctggggcggctattagtggcaagctccgcccatccgtcggatatttgcttggccccccgggggatatcggcggcggattcactccgcccccaattctgtcccctttattcgacggctttctgtgctgccggagggatgggcgccccggcaggcccaattaacaagcgttcacgcaaaaaattttcaattttcaaaaaattttaagattcaaaaattgctgtgctaaatttcaactttttaactaatttttgaaaaatttactggggtacctgccatttttgattgttgatcctagcaattcagggttacaaaagtcgagtttggtccctgtaccattggcactgaatttggccaactgtttcaactttctcatggcccatctaatgcctctgaactttgtgccgaaccccgaacttttcaaaatatgatcacttttaaaatttcgtcatttacctggaaattttgatagaaattaagggcacgtttgaatatttaagaatgtttgcaatttttactcgtctgagcgtgtttaattttagaaaaatg

SEQ ID NO: 116558 - DNA, 116 bp, Heterodera glycines; identical to SEQ ID NO: 105272

SEQ ID NO: 116559 - DNA, 1003 bp, Heterodera glycines
  unsure (1)..(1003): unsure at all n locations
aaaaacnagaaaccagaatggggagcaaatcacaaaataaataaaaaactttttaatgtccgtttttgggcggagggattttcaacggatggaaagaaaatgaaattggcacgccaattgaggccaaatttgcaatgaattgagaagcaaaaagaatgaaaaaacgaaattaaacaaaccaaaagagaagaagagagaaaggaaaggaatgagtgattcatccgccaatttctctcttttttattgtctttttttggcattttcggattaaagaaagtttgggcaattggcggagggggggggggagaatgggggggggaacttttgcgagtttttaatacattttcagaaagttttgagctactgagtggtggatttttcttatttattgcatttttcttaataattttggtcgaaacgccaaaataggcagaaatatgatttttcaaaattttttacttttttagctcttaataaaaacctacatacaacataggccctgataactcgaaaagtaccttttttatttcaaattttattattcatacgtccaattcgatttatcatgatgaaaaaaggagcaaaatgaatgattattatgaaatgaataagtaaatccttctttaaaatgacaaaaaaattgcccggattattgaaaattggaattaccactttagaaatatgggaaaaagaaataattcttaaatttttcgtttttcttatttgtgtattgctgttcaactgctgacttttgtctaaattttttagtataatttaattttattcactatattatttgtttcatgtgaaattatgatgaaattcatggcttacaattatttaatcttatttactattgatcgcctttttggcaatgcttctccacattcattaaaatttaaatatatttttcgataaattagcttaattttaatacaaatatatatattaaaaatattaaaaacttattaattaattatttattatactttttttagtgatg

SEQ ID NO: 116560 - DNA, 1003 bp, Heterodera glycines
attcacattttattttgtggcctttggccggattttcctcccccatttgtccgcccattgtccactttttcggtttaattacccaagtttgagataaaatttggtgtgaattttcctctgcacttgcccccgtttgacccccggcacatttcccgtcccactttttgcttcctctcctggcaatttcaacgcccgaactcctcgggccttgtcgacaccaccgcggcgacctgcaccgcactcaacgtcaagcgcacacggccaactccaagcagctcaacggagctcaactcaatcaatcaatcaatcaacgggtggtgatcggacaagtggcgacctgggcagggacaaaccctcgacagcaccagcacaactgagcgacttcaagcagtattggaactgcaactggtgggaaatttttgagaaaaaattccaaaaaagtatcaagtttgagctctccgtagccaaacttgaatacatcaaaaaggggggagcaaaagtggaaattgtggaatactgcttggtctccgtgccagcagtagtttcacaggggaaacagtgacttactactttggtcttcgtgccattagtatttcactttcaaatcacttattggtctttgtgccataagtaatcggtaaaattactgatcggtctctgtgccgtcagtaattcaagtactgctcgctcttcgtggtagcagtacccaatccaagccaacacaagggggatcggtgtgaactgtttgctctccgtggcaacagttgcacaatcaacacaaacaaacaagtcaaacgacgggaaccccaaggtgtactgcttgacctccgtgtcagcagtacaaccacgcaagtgcagcaagcgcagcaaagcaacaaaaggcaaagcggcaaacgagaagcacaacaagcggcaaaaacaaaagcagcaagcaacgacaaacaagcagcagccgcacacgagctgatcaagcagtacagcaacagcaaaccaacaatcaatg

SEQ ID NO: 116561 - DNA, 344 bp, Heterodera glycines
ttgacaaataaggaaaaaaggcaaactaacagtcctccgaggctttagtttagccataaggcaaaaggcaaactaacagtcctccgaggctttagtttagccataaggcaaaaggcaaactaacagtcctccgaggctttagtttagccataaggcaaaaggcaaactaacagtcctccgaggctttagtttagccataaggcaaaaggcaaacaccttgtcctccgaggcaggtgtttagtcacaaaaggtccaggaccaaggccagactgatcccggaaaaagacacaaaacaacaagtgcaccacaacacacacacacgcacaaccaaactgcacgcaatg

SEQ ID NO: 116562 - DNA, 221 bp, Heterodera glycines
caaggaaggtcacatacgatgaaaactactctcatcataaactgaagggtatcagctcgaaattttgactcatatatgagttatttgtcattttactgatttcccatgcattccctttttatctctctttccgctcagatgagacgatggtttgcgtggtcgacttccgaagggaagtgggcctttggttcgctgtgattggtgccattctccatggaatg

SEQ ID NO: 116563 - DNA, 354 bp, Heterodera glycines
tcttatgtttttgataaaaaatagtgtttgttctgtcattttagtgtgaccaataatgtgtcttatgtttttgataactttagagtttgttctatgacttcattatgaaatttctttgcaatatgttaaaattaaccaaatataattatttaagcaatgaagtgtgtactgactgggctgaccattggatctcttcaaaagaataatgattttgttattggttaactgatcgtaaatagtaaaattttaaataaataataaattttatgttatgaattttattcatctgattttcatttcaaatatcttcaactttttttattttaaattaatttttaggtatttattattatg

SEQ ID NO: 116564 - DNA, 742 bp, Heterodera glycines
attaatatgattttgtttgtaattgatttgatgaactcagcccattcttttttgattctcatttttttaaataaagattcaattaattggcattaattaaatttatttactcattttctggtattttgtgaaaatataattaattcacaaattttatttaaaaaacacgcgttcatataataataatatcttccgtttttctgttacacaaaaattttgattagattgtaaaaaaataaataattatttattagttaatttgtcgtcaaacggggaaaagtgtaaaaatggtcaaaattccaacccgcaagtcgctgtaatatttaaaaaacggggaagcaattaattcaaatgataaaccaatgaaaaaacaacaacaattgcatttagtagaatagttatttaatttaaaatgaacgaaaatttctcgatgtttacgaaagttatgaaattttattcaaaatttttaatttgatataatttctcgttagttagctaaactatcggttagatgccatcgctattaatatttagaagttttttcacaccaacgaaaaaacgacaacaattgtattttgtgaactatttaattgatttaaaatggaaaaaattcaatatttagaaaagctataaaattataaaatatttttagacttttttattcatttttttggctcgtcagctaaacataatttatcggttagatgtaatctgtattaatttttaggtgccttttcgaatg

SEQ ID NO: 116565 - DNA, 459 bp, Heterodera glycines
ggattgtatgggatgaaaaaagatgttagaattttctttaatttttgaaaatttctaaaaaatggtaaaacgaccattttggtaatttgacttatttaggtagttaaaagaatttgcacaattcttatataattttattgaatgtgttttatttagcaaatttcttttcaaattttgaaaaagtttataaaaatgtgtttttatttaggtcgctgattaatttatgctaataccccattctttcaagttcttattttcaatcccgatccaacaagaattgcaaagtcgggatcatgacttgagtttttgaaaaaccaggactggaacctaaaaatcttgattcggggccaatcccggtcggtatctcgatccaatgtggctctttttttaaacaaaaaatggattacagtatttagacttaaaaaggaagcactcagaaacttcatagtgaaaataatg

SEQ ID NO: 116566 - DNA, 149 bp, Heterodera glycines
atcggaacatttacaattcaatgagtgaatcgggggaaaagtgcgtaaaataaacagaatattttatttaaataataatgtaattaaaatattttaaaaacagaaaaaacgaaatgggtgacaatcgcagcgaacgacgcgacaaaatg

SEQ ID NO: 116567 - DNA, 936 bp, Heterodera glycines
ggggacttacgaaaggaggtgcatttctataaatttgaattatctcatgtaaaaacgagggattaggtttcgcagagaggaaaggggctttaaaagagggaagggtaaggggttcactatgaggaaaagaagaacattttgaaaatttggtgaattttcttataaagattttttaaaaatccaaagtttttccccggctgcgccaattttttgttgaaaaaaggaataaggtacaatatgtagtaacaaaatgaggcttaattagtcaattaatttcaattaattagatagcctcaaacggttgcagccaattcagccgaatccacaagactacgcacgttcgttttaaaaacactaacaaaattctttattttgcatatacgaaaatcgtctctaagattttatttattcaagataaattaaaaacaaactcaatttgcctcctttattactctaagtatatgttcctatgatgattataatgaatttagtcaaaaaaatgaggtttttgcctttctacaaattttcattgtatagagaaaatgaataaaacttcaatcccccttaaattttatctttacaaaaattgattccataaaatatattttttcttggtaaaattttgtggtttaaaaatttgtccttattcgaaaaaaacttaaaatatttaatatatcattataattgaaaaacattaattttttgattaaatttaacgagtttgctacctaaaaagcgttattaatttttttttgtttttctattttaatgcctatttggggatttttatgcctattaatgcctattttatgatttttttctgcctttttaggtgcctatttcccgattttttgcctaaaaaacgaatccttagtgattgtaaaattaatttagtcaaaaatatctttattcaaaatgtaattttatattaaaatg

SEQ ID NO: 116568 - DNA, 669 bp, Heterodera glycines
atgagaaattaatttatttaggactcgaaatttccggggaattttcgtattgttgctttttctagggatgttgggcttcgtccgatttttaaggggaatggcccccgaaaatataatgtgtgtatttttcatgacaaaaatcattgggatggtgggtttgtatagttttttcgtaataaaaaatgttttaaggaataaaaagtatagggcaatttttccccattaaacataaatattgtattagctgtgaaactacctatcatattgaggaaaaacatagtttggattgtgaagagaggtgcaaaaaatgctgcagaataggtaacaataaaaaaataatcttttactggaaaatttaaggctttggtttcccctgcccccccgagagaaaaactttaaattgcgaaaattgtaacagaaccttttttaacgagaattgttttgagcaccataaaaacaaaatatgcagaatttataaaaaatgtaaaaaatgtcaaacagaatacacaacagatacaaaaaatcaacatgaatgcggtaaatttaaacataaaaagagtagtgtttaatatttaaaactatttagaccaaaaacattgcaaaaaatgtcacttatttcatgacccaaaaaaattgtgttttatgcaaaaattgaaaatcaaaaaaatg

SEQ ID NO: 116569 - DNA, 71 bp, Heterodera glycines
tttttactattgtcatattttttaagcttcgccgcaaagattattttcggagaaatgtaattcccaaaatg

SEQ ID NO: 116570 - DNA, 417 bp, Heterodera glycines
ccataactttgttcatattcaaacaagtcctaattttttattacgtatcattcaaaagcacaaagtcttaaagtctcagcgtttagacaattgccaaaaaagatatgattatttaagtattaccttattctgaatttgtgcttttgaatgatattacaaaattaggacttgttcgaatatgaacaaagttatggtcgagaaattcatgattgctagttgattggactcataaagtgcaatagaacccgggattttgcctaatccgggccaaaatccaatctcaaaaaacctggattgattgaaagctttcaataatccgaaaaatccctaattcttcctttttagcctttctttttgactttccattgactgtgctttttgtccacctttcgtcttcaattttgttcatccaaaatg

SEQ ID NO: 116571 - DNA, 58 bp, Heterodera glycines
tctgaattgaaaaaacaaatgggaaaattcagaaagaaaatgccaaaagaaaccaatg

SEQ ID NO: 116572 - DNA, 263 bp, Heterodera glycines
ttcccgcaaattttattgtgtgtcagtaaattaaaaaatcttaaaaatgaaatatattgtttaattttaagcattcataatatttgataagctaattagaatatgccatttaatggaaattagcaaagaaaaactgactttaaaaattaatttctttgaaaataaaaattggtttattatatgataaagtgcacatttgttatgccaaaacacgtgtgctttgccataatggccaaaaataaatttaaaaatgtgaataaatg

SEQ ID NO: 116573 - DNA, 233 bp, Heterodera glycines
tcccatcgcccgtaggtgctgctgccccggcgccgtttctgttcctttgccccaacaattcgcgcagcatcaactgatcatggccaatgagttcggtggaattgcgccagcgccgttcgcagtgggaggcgaaagggccgcgcaatttccaatcggaccgatggaagcgcagcatcaagttcagccaatcatttatgtgatcgaaagtgagttcgtacgaaagaaaaaaaatg

SEQ ID NO: 116574 - DNA, 425 bp, Heterodera glycines
ggaaatttctggcttcagctagcgtctaggttggtcccaatcagataaactcggaattcaaaaccgttgaaagtacccattgagaggatggttagagtgccggacggagtcccggacataagcacgcttccgaaaggcaaaaacccgtataaaaatcagcttaatgcgcttctgtgcattgtctgtctgatttacaacgaaaaacttgaaaatgagacggattataacctgcttaaaggcaaggaccatcctcaaaatatcagcaaaaatacttctttccagggagatagaatggattctcaaaaaagtccgaaagtaaacggaaaaaatttgatgggaacggaaattaaggattttttgggaaaattcgcggaattgtggcacaattgaggacaattgtttttcaagggaccgaggaggtaatg

SEQ ID NO: 116575 - DNA, 162 bp, Heterodera glycines
ggtgattagggaagaccattcgaaagtctcatttctcgggttgataaattcccggctttttggctgtccaatcaaaagaccgatcatcgcttactaatgagatgatagtcaatttgatctttaataattgatttcttgccctctcaaaaggtgcttctgatg

SEQ ID NO: 116576 - DNA, 62 bp, Heterodera glycines
aaaaaaacgattgaaaaagggcatttggcctttcccttcagaaggcacttcaaagtgagatg

SEQ ID NO: 116577 - DNA, 470 bp, Heterodera glycines
  unsure (1)..(470): unsure at all n locations
ttaaattntcggtgatctaatcctcattcgtaacgaagatctaaagccgagaggaaaaattattgtcaaattgttgaacggctcaccgaaatgtctcaatgattgttaagtgttgtcaaatattatttaattttatattgtaagtaagtctctcacattatttctatgcatgaaattccgttttttattgggatgtcatatatttaaaaaaaatttcataatttttttaaaatttttcaccggatgcccctgtcagcatcacgccaccaccaaaatttaagggtatttaaacaaaacaaaacaaaaattctttcgtgacaaatcgtagttatattatttatataatgggtttttcactttatttaaaaaaataaaataaaacatgaagccttattaaaaaacaaatattattattctttatttaaattaaaaatatttgtaaattttaagattatgttattgcacaaatg

SEQ ID NO: 116578 - DNA, 108 bp, Heterodera glycines
aaatgtgtataaaaggagttgtttttcaccatttttcacattcttcctacaattcacgcattcattttcttattctacgaattccttattgtcttcaatacaaaaatg

SEQ ID NO: 116579 - DNA, 324 bp, Heterodera glycines
taattaatttaaaagggtctgccaaatgtcaaagccaaacgaatcgtttgtcaaaatgatcattcttcaaccatggaatggaccattttgagaagaatttccgaaggcattgttgacacactgttcaagtacaaattcagtaattggccaaacaattcgaggagaaggaaaagcctttcgtaatttgagagaattgaaacaaaattaaaatttgaattttgaagacaaaggccaaagagtgtttcgtccgttccgtgtgaggccaaaagcatagcaaaaattagcagtgaaaaagcgctgatcagagaaacggcagcgaaaatg

SEQ ID NO: 116580 - DNA, 85 bp, Heterodera glycines
attagacaaatttttaaccgggtttttaaaaaaaatttagacgaagcctaaagtgcggtgtcaacggcaaacagacaccaaaatg

SEQ ID NO: 116581 - DNA, 470 bp, Heterodera glycines
aattagttggcatgcttgtgagagagagagagagactatagaagctacttaaaaagtgccatataaaaatatatttttttattacattttttctttttccgattttttattgctgcacaaaatgcatggccttctaaaatagtttaaatatcttttttaattcttaattttttgcttttttttaaccttttttccgttcaattgtcccaaaatgccaatttttgtagtctttttttggttttccacgattgggtctttgcttgactcaacacgtctcgtccaactccatcacatcattgagaccgaaaagcattaaactatttcaaaggtgccaaaataagattaaagaatgtgtaaataaaaaataatactttttttgacgcgacacttgcttttcaacaaaattacggagtgaccaagcacctgaataaattttaatttccataaaagctttggtttcaaaattaatg

SEQ ID NO: 116582 - DNA, 67 bp, Heterodera glycines
ggcagagaaagagagggaggggggagacacagatcagtgctcggatttaggacagctggagaagatg

SEQ ID NO: 116583 - DNA, 527 bp, Heterodera glycines
ttgttgcgtcagcgtggtgcaagcagggacgaagagcgtgaatgcaggggaaagtcagttttttaacaaattaattttaattttttcaataaaatagtgttttttataaatatttgtttaatatttccaattttttgttaactaataatcacaaatgcctcaaatcaagaccataatttatgtgaatttttataggctaactaacggcttaaaattcaaataaaaatgcactaaaaatgatcattttgatgcgaaatcttttttctatcggtattaaaaaaaatttttatttggtttccctttttgctgttttttccatgatactctttcaatttgtttttaccataaattattaatgccaatcttccatataaattaattaaagcgcaacaatttaaatcttttttttttgtggtaaattccaattaaattttaacagtgacattgccgcaaatgccagccaattttcggcggcaattttggcacaaaatgccgacacgctgctggaggcaggcaacaaccgcatg

SEQ ID NO: 116584 - DNA, 109 bp, Heterodera glycines
atcatttcctaattacttttatattaatacaaataaaagtgttttttagttatttaacatcataatcacaaattacgacaataattgagctgttaattgccgcaaaatg

SEQ ID NO: 116585 - DNA, 1003 bp, Heterodera glycines
  unsure (1)..(1003): unsure at all n locations
aaattttgtgattttcgagccaatttttaggaaaaatttggagttttggggggccggcggtgccgataggcgccgccgaaaagtttttcgaaatttttaattaattttattaagaaaattgttcaaaatttcaaaaattttcaagagtccccaatcccccgaattagtgtcgggggggnnggggggggtcggagggcgggcaaaaagtcgggagccggggacctcggggggcgacatgtcgggggtcgggaataggtccaaaaaacgtctagggtcggggcggggggctcggggtcggggagcaaccctacttttaacattaaaaaaaaaattttttttttaataaaaatatttattaaaaaatgaaaaatttgccgaaattctggatttttttttgaaaatttccaaaaatttacgtaaaaaatcctcaaaatatgtaaaaaaaaatgaaaataagtaagaaaaagttcaaaatatgtaccaaatatgtataaaatcccgaaatatgtaaaatatgtataaaccccgaaatatgtaaataaaagtcccaacttttgttcacaaacacaaaaaggaaagtgtttttcctactatttagagcatggagaagtgtttaaatatgaacacaaatatttttaacgcttagtttaattattagggatgggttttttattttttaaaatattttttctgcagcttatttgttagttatggcgagcgaagcccaaaaatagcattttctccgaataatttttgattcttattaaaacataaaaacacatattttggcgttttggcacataaaaacatgtcgcaaatatttagaggtttggcacatactttggcattttttagaaaaatctgtaagaaaaaatgcaagaaaactgaaaaatacacccctaaaatgtaactttcttgccactgcttataacatttttcaaaatttatttctttatttcgaatgccaaaagtaatttgttcttcaggaaatgacagataaatg

SEQ ID NO: 116586 - DNA, 174 bp, Heterodera glycines
  unsure (1)..(174): unsure at all n locations
atcattcgagagcccttccgatgctctattattttgcataattccaaaaaatttgatcaattttgaacaaagttatggccaaaagtacacatgtggcctggttttttgaattcttctagtcataatntaatatcgctttctattttgtttctttctttaaattataaaacgatg

SEQ ID NO: 116587 - DNA, 361 bp, Heterodera glycines
aaaattaaaagaaaaaattccaaaaaaattggggaccaaatcaaattaaaattttccaaatggaaaaagagaatttggaaggaagaaggacaaaaaatttttcagttgaagaaaaaagaataatggtaaaagcaatttgatcaaatatatggcaaattaaaaatgaaattcaatgaaaaattggagggaaaaagagaaaaatgcaaaaaaataatagcaaaacatttggacacaaatatttgaacaattttttaattgaaagaaacaataaaaagttgggaaaatggtgaaaaagcaaaaaaactgatgatgaaaaaagagaaattgttgaaaaatatttaaattaaaaaatgaatttatg

SEQ ID NO: 116588 - DNA, 258 bp, Heterodera glycines
attaaatgatttctttattcaattaaaaaccctaattaaggtcatcagatggtaccaaaactggttcaaacttgaaggtaaaatggcattaattatttatacaaaataaaacaattaacattaattttgggttaaaaagtgaataaattatatattgaattttaaaaacggcataattttaattttactaaatttactttcttttaaatatattttaaattcaattactgttttttagccgatgaattccccgaaatg

SEQ ID NO: 116589 - DNA, 421 bp, Heterodera glycines
aaagtgaaattagtttaattcgacgtgagttagaattgttgtgtaaaaattgtttagaaaataaacagatttttgtaccttcgccagcagcggaggctgatgccacgtgaaggaatggctatcgatgacaaataggcaagaaggggccttcatcctccttttcctcatcatcattttcatttttatgtacaaaaaatatttaaaaaagatatttctaaataaggaagtttacaaaaaatgagtgaaaattactgattaaagtcagtgctaatgataatgataaaacgaattgatacacaaaagcaaaattgtaatttgagggagtcgggagcggcaatttttcggtaacggtaaaacattaattacccagtaattatatattctacgatatataataatataatttaaggtgaagaaaatg

SEQ ID NO: 116590 - DNA, 599 bp, Heterodera glycines
attcttatgaaattttgtcttaaaaatttcttaggctactacttgtcctgaaagaagaggaaagaattgcgcaagaccgactacgatcttatcatcttgacccaacattgggtttaagtatgcgtccaagaagcaaaacgtacaaaaataacgatgcggctattcgggctttagtagtgcaatttgatttagtacctaacccaacgccagagcaagtgattaatcacttaagggccctacaataccgattagcatctaatgggtttgatcagtggaattagctcatgccaattattttgtagaattgtaaaaataggctgttgttggggccttcagcaagcctaataaaaaatttaaataattacgaattaatttgttttggcttttaaaaaaatattttggcttgtattttttaatttgttgatgtgtgcttctttagttttgtgtgtctgcggtagggccgaaacacactttttttcttattttttgttttcttttggaagagcaccgcactgacgaggcccactcttccattagaaatttttataacaaaaaaaatttttttcatttaattttttctcaggaattgtccgcaaatg

SEQ ID NO: 116591 - DNA, 102 bp, Heterodera glycines
agtggtttgaaatgagttaaattgtttagcattcacttagaaaaattctccattttaaaatctttttttgtataccaaatttattcagtttagttgggtatg

SEQ ID NO: 116592 - DNA, 493 bp, Heterodera glycines
cgtttttttcccggaaccaaaaatttaggaaaattacacttgacaaactatttttgggatggaagagcaaaaataaaaagctctttgggtgcgcacctcccgaaaattttctggttacgggcctgtacagtattccctaattgattaccatacaaataaattaaaattttcttcaatttttgttgatgtaatattctacaaagagaagttcaactttagaatttacaacctaataattattaccagcctgttataatttttttgaatcatataatggcacttttaaaatttaaaaaaaaaaaaactaaaaaaaccatttttttcacatttcatagtgaaaaagatgatgattaaaaaaacgaaaatttatctatttaatttaaaaatattgtccattttttattcaaatttttgccttttttaatcaaaactttagtacgaagaaatttcttctttgacttcgggcagcagatgcttttcccaatccgatatg

SEQ ID NO: 116593 - DNA, 308 bp, Heterodera glycines
  unsure (1)..(308): unsure at all n locations
cgaaaattagtgatggantggaattaattcaaattaactatgtaaatcccgaaaaaatctgattaccaatctttataccagggatggcattctgaggcccaaaaattttcggaaatcgaaacccaaaaaatantcggaattccgtgccatcctagttctataccctaattatattgttgcctaatttttagcgccaggaatgtccgttaaaaaattgtaataattccacgaacgctattctaaatttacattattttgtttaattgagcaaagcactcaaattcaataaacaattgcagactaaaatg

SEQ ID NO: 116594 - DNA, 482 bp, Heterodera glycines
ttttgtgaaaaatatgtaagttttcaaaaaaattatttattcaaaaaagacaatcgttcaaaattttcattataaaaaaaaatcctcggcgcccgcatatttttttttacatattttgtaaatttttttagataaaaatttcatcctatcgatcagaaatgaaacgtttgaccgtttaattcattcgcgcaaaaaaagcattttattaattgcaatttttctatgcatgcatataatgtatcacaagcatccagcgcattagaaagagaagaaatacaaaactctcccattttgtataataaaaaatatggtaatagtgccggtggtacacacccccggtttttaaaaaaaaattcaattcaaaaaatttttttatcaattcgtaattggacctcgatgtgcattaattattttaatttacactatgccttttttaattttattatttgagtcaaatttgaaacaatttagcaacatcaatg

SEQ ID NO: 116595 - DNA, 840 bp, Heterodera glycines
ttcgcccctaaaataagcttttatccctattttggcgtttcgcccctattttcgccttcatttcgcgatttttattttttttaatataaaattcacaatttttttaacaaaaatgtaattaaaacaaatatttttttaacgcgatcacattttttggctactttttcaaaaatttttattttgaaaaaatattcaaaaatttcgaatataaataattatttgcaattataatcaataaacaaattgttttgctttaggctttaattattatatacaaaaacaatcattttaataatttcacccctacatttgaaactttttcacccctatttcgcgaattttttgcccctatttaggtccctattttggactttttcgcccctaaaaatccgcgccctaattataaccatgaattggggctctaaataacaatttccaaagaggagttgaaatttcgcgttccggattttggtacaatttgttattttttgagttaaaatcccggcgaataaatttgggcaccaaacttttctggtaaattgcaaaataagaaaaataaaattaccaaaagtaacgaaaagtttgcatagagattcaagatttttttttattttgcataacttcaataacgttaaagtttaaattttggttacaatttttttagattttatacaagttttcaaattttcaggcaaatagaggccctagtgaaatcgagcaaaatatattcgtgaaaattaaactcttcaattgatattttaaaatggcgttaatgaaatgttgttaaagaaaaaccgaaaaatttaaaaataatttaatataaaggaataaataaaaatg

SEQ ID NO: 116596 - DNA, 397 bp, Heterodera glycines
aaaaagtgaaagattttgaattttatcaaaaaaacaaagggaattttttgaaatcaaaaatcgtaaatatacttttattcgccaaattatgctcaatgcttaatgagttcattctatatcaaaactagagtgccacgggaccgggacctggaagcggacaaccgagtacaactgagtaccaaggtcccggttttgaccgggaccgggactagtcccgggtttttcccgattttcccagccaaaaattcccggatgtgaattaattttttttcggaacggatgctggtctttcattcctttttcaacctgacctccaattttttcatacaattttacattgaaaaaatttttagcaaagtgaaatacctatttaactgaactaaaccgcatcacaatg

SEQ ID NO: 116597 - DNA, 555 bp, Heterodera glycines
ttatagacaaattaaaaaaaataaattgcctgaaaccactttacacaataaaaaaacaaacaaaaaccactgccaaaaacctttaatttaaaattttatataaagtaaaaattatgaaagctcttaagaaaacttcctttcataggaactcgatttttttttgttgaagattttaggttcattgaggtcatttttaatttgaatgtattttttcaaatttaaaaaatataccaaatgggtaaataattttctgagagtaagaaaattcaaaaaattttatgttaattttatttttgtttatttttaaaaatgatagactgtgcgtaaattgtatccctgaaaataataaataaatgcaagaatcaataaagatacataattcgctaatgaaaaaaacattatatacgtcagaggatgtttttaataaatagcaaacaactaaggacttataatattaataatcacaaatgtttaaatttattaaatggataataattgttcattacaaatgaaaaagtattatattataataacaaattcaattttagaaaaatg

SEQ ID NO: 116598 - DNA, 267 bp, Heterodera glycines
gctgaaatttggcacattgcttcggggcggcttttactttgtgttggtatggtaacagcaacagcagctgcaccaattcaacataattaacaacatagtgccgtgccccgtcggcgtgccgttccgttttttgggcccattctcttggctaattgttttaaaaaattgtgttttatgtgggcgtttcgccaacaccaccaccgcattaattcgtctcgggtttcccatttaatttcaattttcccaagctttccgttgattgaaatg

SEQ ID NO: 116599 - DNA, 993 bp, Heterodera glycines
  unsure (1)..(993): unsure at all n locations
gggggaagggtaaaggncatttccggtcccggccttacacctccggccctccaaaagaccgtccctggtcgttaaaatttaaataatttccaaatttgaatgaagtcctcagactttttctttcttttcatttgttttacgatgagaaatttgttttgattttaagccaaaactgaaaataaaataaaataatttaaatatttgtttagttactcaaaataaaaatggaaaatgccgagcctcgatgggaatgaactcattccttcaaccaatccacagaagctctgccaatgaaccaaaataaatccgcgttttttttttttttttaattaattttttttttgaaattctgattcattggatttgaattaaattggcattgcttttcaaattataagccaagagaaaatctgacgaaatttttaacttttaaaattatataaatttaataattattttattttatttccaatctactaaaatttagatttttgatatagcccggtgtgactgtatgactatacctccccttcatatctaaggatcgtccctgatccaaaaacttaaatcccacgggattcatataccaatactccattcatttattttattttaatattattattatttttttttttttaaatttatgtattgaacttttccctttaattatcatttctcacttgttgtgtttttgttttttgtgtttatttaatttaatcagctccgcagagcttagacaaatttgtgtgaatatatatgtagagtagctccgcagagcttattttaaaatatcaaatataaatgcgagaaataacaaatgaaccattgggacgaatgatgtcagggtgccatcggaaaggtgaatttccgggcaaaataaaggaagggtgaattttaattccggaggaaagttgaacacatttgagaacaacattgacttgatgatctcttctgaagtgttcaagcggaaaatttgcttgacgtcgtatg

SEQ ID NO: 116600 - DNA, 91 bp, Heterodera glycines
  unsure (1)..(91): unsure at all n locations
attgatcagcaattgacaattgctaatcaatcatcctactagataatcagtgcttgatcagnttgtattctttctctattatttgttgatg

SEQ ID NO: 116601 - DNA, 1003 bp, Heterodera glycines
cgtgtaaatagtcactccttttcccaaaaatgttctaaaataatgaaaaatgacaaaaaagattttgataaataattgaataatttttcaagcgaatatactaaaaacatttgtgaaataccttttacttggttaagaattaaaaaatttagcctattaaaatatttagaaattttttttattatattgtatattttttgaaaaatttccgatttccgacgtttttggggtcggaaatccgatttccgacacttccgaaaatttttggggcctcggaatgccatccctgataaggaccgccggaccccctgtttctagtttttgaaaaattgcaccgcaaaaaagtggttttgaaaagaaaaaaatagtcaaatttatgaaccgttaataatttgatttccgatcaactttttaccgtcggatccaatcggaaaatcttagtcgaccaatcagccccttttaatgcatcccgccagcccttaaaaatttatttttcagcatttttttatttttggaaattctttgaatttaattgaaattttttcgattttccaaaatcccgcaatcccgcacgggatcccgcaaattttaattgcgggatttgcgggattaatcccgcgggatcccgtcccgcaaaaaattttgagttccagtcccgcagcgggatccgcaaatttgaaatttccggtctctatgtactacctgagttttcaatgaatttttaaaaatttagaggacagagttttcatttatgttttgggacacgggactgaatttgcgtgatttagttggaacatttcgccattttttttgtatcataaaatttgaattttcaagatcacggtaggggggtccactgcgtttcggcgctcgcgtttcggcgccagctcgtttcggcgctcgcgtttcggcgccaaaaaaaaattataaaaattcagatacttggttaaaatctacaaacaaaaaaaaaactttttttagttaatcaatttcatcgaatatg

SEQ ID NO: 116602 - DNA, 1003 bp, Heterodera glycines
ctaaaaaattatttttttggaaaattttccggtttttgaggtcaaaaaggccaatttgtctgttgggggccgttctattagaggtttttttgaaaaatgcccaaatatgcacataaaatatgcacgaaatgccaaaatatgcacaaatatgcaaaacatgcatatggaaagtcatcctagaagcttcaaaacacgctaaaaacatgtttttcgtgcgtttcaggcctcccacagtccaggaaaaaaatatgcatgtgcatataattggactccctagtgatgggtgctgaaaatgatatacattgggatacgacgtaaagccgatttacgattgccgatatttcagggttggaaattcagatttccaaaatttttgggcagtcggacttccgcttgccaaaaatttcgatgaacaagggaaaacttcgacaatttattgggatttggcatgcttccaattgtatttatttgttagatttgtactaatttagagtatccgaatcttagaaaataattttattttttaaagataaaatttttagagagcaaataaacaaggcatacacagcaaagattaactaagtaacttaaatagtaaaaaatttttgaatgatgtaatttgagattttattttgtcattgtctcttttattttcgagagacttaattggcctgggacgagaatggcggaacacattgacttaatagcccttctcggccataactttctccgctgtctctcccccaccctcgctccgctgccgccgccgccagcgattggctgtgtcgctgacgtggaccaatgggcttgtgccccggcagagtaacgccggcgtgcgtttccgcggtgtgcacttcgcgacgctgcaccacatccaagccacacttttcgttctgattgctcaaatcactttgtgtgattgcgattggaaaagactcgctcttgacaaccaaaaaaacattacaatattatcaattttcagatttacaatctcttagggatg

SEQ ID NO: 116603 - DNA, 62 bp, Heterodera glycines
ggaatacgcaaattggacgggagtgccgcggcgcggagagagtgcggccggcgaaggaaatg

SEQ ID NO: 116604 - DNA, 56 bp, Heterodera glycines
tgtttgggtttccacaaatatcttgtctgatttttttcattttagggcggcagatg

SEQ ID NO: 116605 - DNA, 265 bp, Heterodera glycines
aattattgttttaccaattttttacggatatctcaaaaaaatttatttaaattttaaaaattctattatccgaaattgaaaaacggcaatatctggtggaaaaaaaaaatttaattttctccgtcgatgccgaccatttttaaggaatttttagtactttttttaacacgtataggcctttctaatggttatgcattgattgtatgcattatgaagcattaaaaattatttaattattattttttctcaaaaatcacaaaaaatg

SEQ ID NO: 116606 - DNA, 243 bp, Heterodera glycines
ttaaaaatttggttttatttaattccccattactttttttttcggcttttttccctgtgtgatgaccgaccttttaccaaggggaaagtggccttggaactgttcagaaactgcatggtcttcacgggactgaccattctttgctatgccatcatttggccaatgctccgtttcaaaaccaacaaatttaacatggcaaaatgtaaaaaataataaatgaattcttcaaattttggcaaaatg

SEQ ID NO: 116607 - DNA, 101 bp, Heterodera glycines
ggtcgcccgaactgctcgactctggtggtgttctttacgcgcacgaccagcagcagcacccggcactgctggcaccctccggggggccgctgctcgccatg

SEQ ID NO: 116608 - DNA, 71 bp, Heterodera glycines
tgtaaattaacgcgaaatcgcaaagttgattatttaaacgtaaattcagtgccaactccgaacagaaaatg

SEQ ID NO: 116609 - DNA, 265 bp, Heterodera glycines
aaaggtgtatcatgttttgattacctacgaaaataaaaaaagtgggtaataaaactattcagaaatgatgatatagccggggcgttaagtactctccaccgacacggatagtcttgttttctcacatctacgcgatgctttttagctgaataagatcgacactataagcagttaattgatggaaatcgtagaattctgcactgctggtgcaaaatagtatgcgttggctttaagacaaataaatgttctacatgatgcggaaatg

SEQ ID NO: 116610 - DNA, 1003 bp, Heterodera glycines
aatgaaaagtcgaaaaataaattttcaaaattcaaatttattctcagatacttaattttaaatgctcgaaattacagttaataggcgctgtttagcattgtcattttcaatgatgttgctataattaaaaaccaaaaaaaattatcgttgtaagatttttttaaaattgctttttgaacgatattaaataattaacgctaaatgtcttaaattttgcattagaacgaattgtacaagacaatatttatcgtgtattattatgctgatgaagatcgtgattcagagctttgttcataaaatcaaatcaattttgttcaatgaaatgtgtgaattgcgcgattttccgacaacagcagcaagagccgtgccatctcgtaaattattaaacgatttgatcaattaaataatggcgatttatttaattattatttttttctgtttgatcaggacacacaaaatttgtgtttaacgacaacaaaaataacaaagaaaaggtgaatgtttgtcatctttgaattttaataacgtgtttttttttgttattcatacttttttaattttgattgtatgtatttaactcatccggacaattatccaaaattgtcaaattattcattttaaatatttttctaaatataatttttataatattttgctttatttaaataaatattatacaacaaaagcatgaaaattgaaattactacaacacatgattataattcgagaacaaagaatgtcaattaataaagtcaacacggaaagagcggacggcggcggaggcggcgaaagaatggcggggaaagtggaaatttaaatgggcaaattaacaaattaatgagtgtaattagtaaaacaaatgaatgacattgaagcattttgtcctgagcagttcctgctgataaatggaaaagataagaaaaagctaaggcaactgataagttcactgattccttgaaattaaataaaatatttccaaaatatttaaaattatttaaaaatg

SEQ ID NO: 116611 - DNA, 420 bp, Heterodera glycines
aggcatttaattaagattttcataaaaaattttgctaaaaagattcttaatatgtgcaaaagatgtataaaaagtaaataaaagttacaacccttctgcttcacatagtcctcaaattatgtttttatcgaaaaataaaattctatgcaggttagttgggtttcactacagcactcacaacaaacacaggccttacgctgaataatttgtattatttttctcaacaaaaatttttgctttttagaatatattaatttgttcttgagaattctttcgcttcatttgtagttttgtacacagtaaacacactttctaattgtcattaatggaacttaattattcaaaactgggccaagaagatgcctatttaagctgcaattatcaaaaataaaataattttctttggttttcccaaaaatg

SEQ ID NO: 116612 - DNA, 814 bp, Heterodera glycines
tatttttaggggttatttgatgcgctgagtacgaatttggtcttcctttggccttgtttcgaaccccgaacccgaattcgaacaatttatttatttttttattaaaaataaaatttttttaaagtcatgtaaataaaaatctttcctggggttttcgggttcgctgatcacgaataagatatccatttcgaccaatttcgaacccgggaccagatttcgaacaaagacgaaaatttaaattttttgaattttagttctatgtttgaatctgcatagaatggctcatttgctgttaaaattacctgtgatttattttctgctagttttaatcaattttagaataagtgctaaatcgaaatttgaattttcgactttttgttcgaattcgggtcctggtttgaaattggccaaaatggatgtcatattcgtgctcagctcatcaaataacccctaaaaatatgtttttttgttttttttctctttttatgggaccaataatctgcacaattgcctcccaattgtttaacaattgcttagtttctctctatgagccttcgaatgaaaccaagaatgaacattgaacgcctaaaagttcattggatgcctaaagtgcacttagagccgcaaaaacactaaaataatttttgaaaagctattttttcggaaaattagtgtcactgaacagattcgaacctccgtgctttgttaattggttatcttaataaaacaactgccacacatgcaataattgcttttattttggttccaatacgtatatacctaattgacttcaaaggtttacaacattaaaatg

SEQ ID NO: 116613 - DNA, 389 bp, Heterodera glycines
tttctaccctaattatttgctctcttcattcaataattttataatcttgcgataaatttatatttatctggttgggcttggtcgcgtacttcgtaaatccggcaccttgggcgtttcgtaaaatccgccattttagttttttcgacaatacatgccataattttgcttaaaggcaatcaaattctacattctttttaccattcgatagtacagctttttctctattagcttgcaaaagtaacttcaaataaaattaccaaatttaacataagttatagcataaatggcacttaaaaaaattctcgaaaagttgaagttttcatgaacttaacttaattttgtgtattaattaatattgaaacttcccaaaaagtgtgtctactaaaatg

SEQ ID NO: 116614 - DNA, 69 bp, Heterodera glycines
tttaattccctagaaattcattggtctgtctttattaggatgatttttcaggttgttgtcctcctcatg

SEQ ID NO: 116615 - DNA, 524 bp, Heterodera glycines
ccaccccgtccaccatttgttgttggtattttctgctcctcattttgagcgtcgtcgttggcggtggaatggagaagtgagagggggaggtgggtggggggattgttcggcaccgttctgccccctccggggatgtgttgttgcggtggtgccaattgctgtactgctgctgattgatgatgaagacgcacaaatgcagtggaaaaaggtacaaaaaaatcgtggggaaaatgggatgacggggttggggtgaggagatgagaaaacggttggctgacttgaatttgaataaaggtcgtggctggaaggagagattaggaaacggataagaaattcttagacacccccgccccctcaaccccgttctgttccatctttcaccccctctgatcattcattcattttccttcaatttttgtgcactttattaataaatgttcaattatttatttcccacattttaagcagttcacttcaacgcaatttgttcatcaacagcaaaaagtgtgtcgacaacaaatatg

SEQ ID NO: 116616 - DNA, 72 bp, Heterodera glycines
tttaccattgctatttgcaaatagttatccaaattttttttagaatcaaatcacaataattttcaataaatg

SEQ ID NO: 116617 - DNA, 401 bp, Heterodera glycines
ttttggagaaaaaggattaaattctctcgtgaaatcctctgctcgtttctaactacatttttttacattagtcaaaattgccgcggagtcccaaattccgcgggtcgcgcatcgcgggtttaaaatcccgcggtcgcggattcaatttctcgcgttcgcggatcgcgcaaaaaaaaaaacgctgcgaatcgcggtcgcgctacacccctatttgcatcaaaagatttcattttttagtttatcaaaatttttggaatttctatttgtctatccaaaaataggtagattgcttcaactacacattaatcgcttctcaaaggtttttatttagaatggtttcttctttaaacaatttgctacccagcattgatttccccttcatttacttgcataatgaaatg

SEQ ID NO: 116618 - DNA, 398 bp, Heterodera glycines
ccccccccccccccccgtcgcccgcaaagtgccccaaaatgggggaccccttcgcatcgagggggccggtgtaaaagaggtggggggggggtcgccggcgaagtggaaaagaggaaaaattctgaaaaatttggctattttcttaacaaaactcattaaaaattctgaaaatttttcctggcggcgcctaccggcaccgctggccccctttttgcaaaattttcttgaaaaaagcgtgccgcaaaaaaaagtgcttttgaaaaaaaaaaaggtcgtcgatttacaggccgggaccattttgcaaaagcaaaattgaccgctgaccccctctcgacccccccccccccctccaaaccccttcgcaaaaattccggttgaccccccctttttcatgtatg

SEQ ID NO: 116619 - DNA, 401 bp, Heterodera glycines
atcatggaattttttctttcaatttctttttttactgtgctaaaaatgactaaaccctcaagaaactgcgcggctaagcatttaaaccgctttttgggaaggtttaaaactcgaaaaatggacaaaacaccaaaattaattggaaatcctaaaaaaaaaaaaaataaattttctggcggcaaaaaaacattttattgttttctttcacttgaaataaatttttcaaaaatgctgattttttgtcggccaaatgttgattttgacaattttcagttgggcgtcctgcattttatccttttttttttttgtttgaaaatggtcgtcaatatgttattgttttggtactttttgttaaggcatttctctgtgccaccacttcagtcagttacaaaattcaaatg

SEQ ID NO: 116620 - DNA, 1003 bp, Heterodera glycines
ggggggttgtttttttttttattttatttttttttttgtttttctcttctcctctccctttttttttttttttgacaaaaaaaaaaaaaaaaaaaaaaaaaacaagaaaaaaaatattttttttttttttttttttcccccccccccccgccggcaaaaataaccaaccaaaaaaaaaaaaaaaaaaaaaaaaaaaaaaaaaaaaaaaaaaaaaaaaaaaagagggggttttttttttttttggggtttggggggaaagggagggggggggggaaaaaaaaaaaaaaaaaaaaaaaaaaaaaaaaaaaaaattcgggcaaaaccccggaaaaaagggggggggaaaaaaatttttttttttttttttcccccctttttttccccagaggaatttttgaatttgtgggggccccttttggggagagggttttttttttttttttttttttaaaaaaaattgggaggggggggggttttccccccaaaaaaaattttaaaaaaagggcgccaaaaaaaaatttttttttttttcccccccccaaaatccctaaaaaaaaaaaataagtttaaaaattttttccaattttttttttaaaaaaaaaaaaatttaatttttttttaaaaaaatccaaaaaaaaagtttagattggatttggggggggccgggattttttaaaaataaaaaatttccctttttgggggggttaaaaacccaaagggaatttatttccttttggaaacccaaacccatttaaaggaaaaaaaccccttttttaaaaatgaagggtccaatggggaataaattaatttaaaatttttatgtaatttgttaattttgaagaaccggggaaaattaggtgatggggttaaatgttgaaaaaattatgcaaaaaatcggccaatgataataggcaaatgtgaaaaagaaataaataagtacgaaattgaaattccatacagagcggatcttttatatagaaaaaaggaaatttctaagaaaatg

SEQ ID NO: 116621 - DNA, 1003 bp, Heterodera glycines
cttttttaataaaatcccttcttttttatgatttatttggaatagagaaaatgcttgccgaaaataaggaaatgctttttttttatggacccagtcaccaaaaaggacaaatgggcaacaagcgccatcgtatcggacaaatatagtacggtacagcgtagtccgtcctctgtggtgtgccattttaattcactgaaaaccatccgccgatgccgacgagaatggccacaactctcattagcaattaattatacccaaagacaaattcaaattattgaggcacaaagggcgtagaaagaaagaagatgacatatgttttcaataacaatgctcacgaaaacaccacccttatagggggagatgaattcattaataatttcattattttttttttttgtttgccgcgcactttacgcgaaaccatcgcttttttcggaataaaatagtcaaaaaaatttaggaagtaaatttaattttcaacattttttaaattagaaatgagaatttttaaaatgtgtaggggtgttttggcgcccacgtttcagcgccaaccctagtttttggactataactttttttttgtcaaccaaatctaacaatcttggtatcattcgaaagcttttcatgtttggaagctctttctaagctattgctctgcgattagacaattaacaaagaagttgtaacatgaaagttgcaaaaaagtcgaaattttagaagtttttttcttaataacttttttttacaggctagaaaatttttttcattttttgtaaggctaatagagcatgtgaaggggctttcgtatgatgctaagaatgctcgattggttgacaaagaaaacagttatagtccaaaaatttggcctggcgccgaaacgtgggcgccgaaacgaccctttcccctaatgatatatttttggtatttttatttttatttaatatttcaaatggcttagagagaagcaaaagtcaatagttttgcgttacattacacaaaaatg

SEQ ID NO: 116622 - DNA, 746 bp, Heterodera glycines
ataaacaacaatcacttccttccttccttctctgtgaccgtcacataaaataatatttaaatacaatgaaataattgaaacatataaatatgtattttaaacatttaaaaaaattttaaatacagaaatactttaaacatttgcaaaatagagaaatgcgaaaaattattggtttttcgcgggcccttgcctcgaaataattctatccacgacgatcgtgtggtcaaagcaagaagcagaattttttaaatcccatatatttattttttaatttaggacaaatcgttttattataatttgctaaaacccaatcgtacacttttttttattattgttattattttcaacgagcactgactggaaaagcgatgaaatttttgttcattaatttgatgcaaaaatatggacagtatgaatcacgcagcatcaatccgagttatcactggaaaaaacaggaatttgtctttaacaaaatgagcgatataatcagatgggattggatggggcaattggtgggtgattttataaatcaaaaaaagtgggtgggcaaaacagacagaatgattcatattcatcaaaaaattccaccaactgagaattccagagtcattttattgtgatcggtggcaatgggtcattaaaattctaatcatttttatttttatggaaaaataataattccgccaattcatttttccgttatatatttaaaatcattaacataattaattttagcattataaatg

SEQ ID NO: 116623 - DNA, 718 bp, Heterodera glycines
cttaaaaatcataaaaaaatgcaaaatatgtacgaaaaagtgcgaaaaagtccaaaaatatattttccaaaaaatgtcgaaatagtgataaaatgtgacaatactccataatagtgaattttaactttttttagtgacgaagcgccaaaataatgatttctagtgacgataaatgacgttcaaatgaaaaattaaaacgcagaaatgcgtttttgagctcttttcttcaaaacaattgagcaaacaaaatagttaaacttaaaaatcgcctccctattgattactatgaaaaggtagggggataaaattaagaaattcaaagaaaaattcccattaaaattgcaaaaattgcagtttaattattattattagggttgcaaccccgaccccgccccgaccccgaaccccgacattttaggccatttttcggggttaaccccgaccccaaccccgacgcttccaaccccgacgaaccccgaccccgacccttaaccccgactcggggtcggggttaaatatacacccctaagaatggcattttcgtgggggaaaaggcaaaaaagttataagaaatttgaatgttgtctttgaaatgacaaaaaattttgaaattagaacattttgccaatattaataaaattatctaaaaataaatagaaaatttttctcctttctgcatttttcaggttaatatattgtacctaatttagataacatg

SEQ ID NO: 116624 - DNA, 868 bp, Heterodera glycines
attagggcttctttttttaggcaaatgcctaaaattttgcgcacttgatacgcaaagataagcacgaaaaacgcgttttccgcttggtttggggtgtctacgatgacttttataatgcctatttttgtggtttttgtgcctaaagtgcctattttaggctttttgaaaaaatccataagaaaaatgcaataaaaacgaaaaacacacccctaagaaatgacccaaaaaaaattcagaaaatagacccttaagaattgaaaaaattttcaaaaaaatgatcccaaaatttaatatatttttttcttaataaaaatttttggtttaaaattttgtccttatttaataatttcatttgcacttgaaatatttaagtttttacttgttttaataccaaaaaagcgttaataaaaaaatgtttgcctatttttgtgcctatttaatgtctattttgcgatttttgtatgcctttttatgtgcctatttcgtgattttttgtgcctaaaaaaggaagccctagtaatgattgtttttaggcattcaaaaatgcacccccaatatctgaaactttgaaacataaaaaacggttttggcattttgaccgaaaccggtcaataattaattttctcggcacttttgaaggttggccaaaaaatttttaatgccacatgtagaggaccgatgaggctagtaaaatgacacgaaccagattttccaatatttatgcgacgtggcacccagtaatgtctttgggcttttcaaatttttaaaatttaattttagataattggaaattttcaaaatttcgtaacaaaactttaaataaaattttttaaataattattattcagatgatattatggaagaaatg

SEQ ID NO: 116625 - DNA, 295 bp, Heterodera glycines
aacggcccaataagcttgacccgtcaaagcgtcgaaggctaaattttgaaaaaaaatttttgcaggatcgatcatttttaataggctaaattctcaaacattcaaagaaatataaaataaaatacaatacaatataaaaatcaatttacaaacttttctccctaaaattcatcaaaaatttcgaaaaaaacgctagaaaaatttacaaaatctttttcttgtaattttcttataaaaaaatttctgagattttttgttgaaatttccaagtttgaagaaaaatcggcgggaaatg

SEQ ID NO: 116626 - DNA, 398 bp, Heterodera glycines
caccatttgccagcagttggcccatttcttcgccggtcttttccttggcgcccgcgtaaaccttggacaaagtgacggcggcagaagtagttagtcgccggtacccgttgccgtttaaggtgtgaaatttcacaccttaaacggtccccggttttttgcccttttttaccgcaaaaacccaagggtattggctgttttttcgcgcatttttggggaaggggagggaggtcgacggtccctggttttcacacctcgacggtccccggttttaccgcaaaaacccaagggtactggttttttcggtaataaaatttaaatatttttgggtttgatttaagatttataaattttttcaactttaattttggtaatacaaaaaaaaagtctaattttgaatg

SEQ ID NO: 116627 - DNA, 96 bp, Heterodera glycines
  unsure (1)..(96): unsure at all n locations
atgtaaaattctgtgtttacgagtacatttaaatattttttagttttccttttccatttatatttgttntaatataaattcctggtttcggcaatg

SEQ ID NO: 116628 - DNA, 469 bp, Heterodera glycines
atccattttttaaattttatttaaatttcgaatttgatccgcaaaaaaacccacgctttattagcgattatccgacattagcgccaattataacgggttaaaatacatgtttttttttgtttatcaattaaagtttatatttattcaagaaaaaataggcgatgtttatggaatttgggattgaaaaaaaacagaaaaattttgagtccaattttggacattgacgcaaataaatgtatctcctccctctttttttccacccttagatttcaaaaaaaaaaaatttcgcagaaaattacaattttttactatcatttattacatatttccaaaaatgaacagcaaatctttaataaaaaaagaaaaccaaaaatgggtttgattttggtttaaaaacacacatttaatttcccatttttttgccaggatttatttgttgcaaaatttgccttcgctgagccaagaaatg

SEQ ID NO: 116629 - DNA, 57 bp, Heterodera glycines
gaaatatttttagaaaataataaaataaatgaaaaatattttagaaaaaaataaatg

SEQ ID NO: 116630 - DNA, 134 bp, Heterodera glycines
cgtccaaattattcgacaaagtcgtcgaggacttaaatacacagctaaaaacggaggcggaagcaaaaatttttgagtagccaaagcccaaaatcaacgcaattcagcatggcaaatcatcgccaacggaaatg

SEQ ID NO: 116631 - DNA, 153 bp, Heterodera glycines
actgaagtggtcaagaaaataacatttattatttaatttgtatcagttttctaacaaattgcaatgcaaatttggcttttcctgtggtgcctattagcaccccgcccgagctcacaattcgcgctctaattcccaaataaagattacataatg

SEQ ID NO: 116632 - DNA, 276 bp, Heterodera glycines
gctaaatgcattaaaacaaatattatcactgataaacaacaaaattggacaaaaatattttgttttcaatataacccaaaaatttacttaaaaaaattaatataaattttgaaaaataaataaaataaaattaaattggaaagaaaacgtggaaaatattcaaacattagaaaaattttaaattgagaaaaagtgggtagccaattttgtaattagtgagtttattgtcttttacttttctaattaatgtttcaattttgcatccccggcaaaatg

SEQ ID NO: 116633 - DNA, 1003 bp, Heterodera glycines
ttttcgttattttccaaaatataattttcccctttttacaacaacagcggagtttgtgctgctaaattagctgattatctgtcttcctcccaaatgcttctctgtccaaattaggctgctccgaagtctctgccgttttgccaaatttgccgatgccctcgggcaaagaattaatccttcggcatttcggtcgtcttacatctcgccaaagggcatttcacttctcccccgcttcgcttccattgctcccgtcgttgtgacaattcgacccaacgcatttttggccataactccgggggaaaaaggggaggcaaaggaaggggagaaaagttcagaaattaaaaaaggaattgccggagggagagaaagaagggcaagccaaaaacactcattcattcattcgaatatcacaaaatatgcttattgttatgagatcaactttttgtttttcattgtttttttctcattatttaaaataattttgctgtgtaaaagcataaattccctaattattcgctaattctgtcttttgttcctttgccaatgaatttgcgctccctttgcttcgttggcattctttcgcttctttttccgttgtgccgtccctttttgaccgagcttcgccattggtcgtacgatggcgttggcacttttttgccaatttgtcgcgtttgtttgtgcacgcgacaaaacggcgtggagtgtgtgccgcgccgggagggcgaaaagtttcagcttagggaagtgagtcgcccattcattttggcataatatttgtctttttcccccattttttttgtcattttcggtgcttttgccacgttgggccgattctctgtcttttgtcaatctttcgttctccgcctttccgcttttcgccactgcgcctcgcattcgtcaacttcagctccgccactgtgccatcgatgctccaatctctccgtcggcatttttgccgtttcactccttggaaagtttccatttgacgcattgtcgtctaatg

SEQ ID NO: 116634 - DNA, 491 bp, Heterodera glycines
tttttttaattttttggattttcacaggctcaaccaacacgcgctgaacatgacattcagctttctgtgtaacactgcaatgtttcctggagttcatgagcgtttcatttgtgcgtcattttaaaaatttagaaaattttaaaaatttataataatttatttaaaaattcaatttttttttttaaattgccccccccccccaattttaagtcgtcactttggacgacaaagcgcgcgatgcgctgcacgagcattggccaaatgtgcgcgtttttcattggccaacaccgagcctttacgtaaagccacaaaaaaatttaaaaattttaaaaaattttttttctaaaattcagaagcagttcagttttgccgagggagcctatcagacggtaaaaatttaattgttttttttaaaattaattctgaacagcattgataggcggaaatttttttttttaaattaaaaaaatgattttttccgactaaaaatg

SEQ ID NO: 116635 - DNA, 215 bp, Heterodera glycines
tgtgaggcgccgcaaattcttttggcatttttgtcacatttctaattgtgttttcaacggcacaggtgagcattgggaccatttgtcaactgtgcgaggaagccagccatgtgctgcgggaacagggatcacttgtcgagacgaaaccaccgctggtcatgtgcggcgacatccatggccaatttgaggacttgaagaggattttcaacaagatg

SEQ ID NO: 116636 - DNA, 553 bp, Heterodera glycines
atgaatggacattttttaaataattaattgtttgtatattttttgatctcttttcaattattcattcattttattattaatttgataatttactttaattattattgtttttatcactttaaacgacttttgtcactttaaataaatttaattcattttttcatttaaagataaaaaactaacttttgaaagatcttatttaagttaaacacccaaaaaaatttatgcgtggataaagcgccttttcatcgcggcattttgtatgcttatggcagctgaatacaaacgtacatacaatattattctcatttattataggattttctctatattttttgtggaaaattggccatccaatggcattttcgaagcgtcgtcagccttttgtgaagcgcgtgccgggccaacaaataatcggcgaatgtttggccaagtcggcctctgtttccacactcattcatttactcattcattctgccatttctttctccgattttatttcatttaatcgattcaattttattttttttttttttgctctttttgcgcgatg

SEQ ID NO: 116637 - DNA, 246 bp, Heterodera glycines
ggtctgatcattgccaagcaccaagacggagtgatcagctacgaatcgaggcaaatttcaaatgaaaaatattttaaaatttggatttaattaattaagccatggattcgacgacattttcggcaccgaacaaacgaaacaaacggaaaaatatttggaaattaatttgaccaaaagtaaagccaaattaataataatattttaatagtaattaccattttacagatgctgaaccacttggaaatg

SEQ ID NO: 116638 - DNA, 1003 bp, Heterodera glycines
actaaaaatcagttttacagtcaaaacataatatccaaataaataaattaatatttttgctagcaatacgtcatggcaaaaccaaatttgttggtggaccggatgaagctgttgttgagcaccggcaacggggcggatgttcaatttgcatttggggaaggagatcagcaacagcagaaagaggctcgcgcaaaaatgcttatttattttatttattgttaaattcattaagaattttttttattgactgtcctacttgaatagggtaattaggtactcacttgtgtgctctattccagtttatgcttccaataaatgaccatcctcagccataactttgctctttattggctaaagcatacattcttggtatcaaatgaaagcttaaagtctcgagaattgtaaatgcagaaaagtgcaaatactgtcattaagaaaaaaaaattacaatgagaaaatacaaaagtaagctttgtttcgagaatatttaagaattattttttgtttagtcctaaatccccgagagtttaagctttaagaaaaaaaagttatggccaagaaatggggatggtcttttcattggacacgttaactggaacagagccatcatttgtggcctattttggcttgctttttcagagttgtttttttaccattctaagcggcccaaatcgctttaggcatttttaaaaatgaggaggcgggaggaccaattttctttaattagcaccggaatgggaggaaattggttagttactctgccggctagaatttccggaaccagattttatttcaaccaaaaaatttctcggaattttcaaaataataaaatccatgtgggtgctaaaaaaatatccttgatcggcggcactctgtgccggccaaatgccgatcagcgccatgcattaaattttagttactttttttttgtttgctgaaatgaatcaaaaatttagaccccctttaatttaagcttctgccagcccataaaacaattctgatg

SEQ ID NO: 116639 - DNA, 74 bp, Heterodera glycines
tctattttagcgtaaacctgttaacaaagcgcatacttttgaagattgttgacaccatacacctcgcaattatg

SEQ ID NO: 116640 - DNA, 77 bp, Heterodera glycines
agcgctcctcctcctcatcagagtttgatgatgctgatcagtacagcaaaagcagcgcaaaagtcgaccattgtatg

SEQ ID NO: 116641 - DNA, 89 bp, Heterodera glycines
ggtcgacgaacatttctaaaaaaatatctcgaaaatattatttgaattgtcagaatcccgtctattctcggcttacattggcactaatg

SEQ ID NO: 116642 - DNA, 126 bp, Heterodera glycines
ttgctttgaatgtttaatttgatcgattttgacaaaagttatggcgatttttttgtcgtcgaattaccaaaatcgtcaacctttaaatttataaatatttcgaatttttaaaatccaattaaaatg

SEQ ID NO: 116643 - DNA, 199 bp, Heterodera glycines
attgtctgttggaattttcccccgtttgcgacaaatcgccccgtcaattctcaacgactgtccatcgcttcgctttgtcttttttggctattgcgatctcttcaccgaattccctgccgatgacagtgccgcggcatccgatggacaagcattggccaaatggcttttcactccccatcccgacaatgtgccgaaaatg

SEQ ID NO: 116644 - DNA, 458 bp, Heterodera glycines
ataataatatgcgtttgtaagtttaagcaaaattccaaaaccggaaaaaaaaccccaaacgttaattaaaaataaacaaaaattttgcttatcggcaaattaattttaaattttagcgagaaattcaagatttcaaaaattttaacagaaaagttactttgatttagaattcgtaaaaatcaaatttttggatggaatttgaaaaatccattcttagtggtataaatcttttaaaaaaaacaaggcgcacattatcatatttcaaaataaattaaaaatccttgaccatccccaaacattctttttcccatttcagctgacaacaaaaataaaaggaagaggcgcaagaagcgttatttcatggacgttgtctctattggaattctagccttagttttatgcattattttgatatttgcttgtctacttggctatataatggataaaatccacacatg

SEQ ID NO: 116645 - DNA, 498 bp, Heterodera glycines
tctcattgtttgtgtttgcatatgtatttacgtctatcctgcctttttgattgtttttggtgcacttcataaataaagagaatcagagcctaccattcactttgacgggcaaaacagaatatctaattttctaaaggaatcacccaaactttgagtattgtcaaggggtagtgtttatcttccgggtatttaactcgacttattcattcagcacatgtacattggtttaccaatcgagtagtgtgtagtaaaattaacgaaggggtagagagaaatgaagtcacatagaaatttttcattccgtcttcaaatccgctcatttatttgttgctcattaacattttcgcgatctcgcagcctaatacacttacaactggatggacaacttgacttcgtataaattcataacgttttacattcctctcccgcactttatcagttatttttttcaattagacattaatatacatcttctaggtagcgctaattgcaggtatg

SEQ ID NO: 116646 - DNA, 558 bp, Heterodera glycines
actctccgccaacgctttgcgttgttgcggacggacaaatgcgtgacaatgaactcttggaatgcttttagtcgtctaaattgcctttaattgtttagtgttttgtgactcaattagccgtaatctcttggggcatttaagtttaattttggtccaaatcattatcttcgttcggcacattcccggctgatcaattaaacatccaatgctaacatcccacgctttgattgtaaattatttgtttaattttcagttcgattcgttcgccgaaggacatccgcagccgcgcgcggtcgtccaatgcgccagcgaagcgtccgcgcggttttcttccgtttgtgcgcttttgcacgcgttcgctgtcaggtgcggatacaaaattagagaggggattttttttgtaaattgccctctaatgatccaaaatgcctcaaaactttttgccattcaaatggtcgctgtggcattccgcctccctttttatcgaagtattggcatttgtaaaaaaataattaattaatgacagtatccttctttaacagttaccgtctgaacatg

SEQ ID NO: 116647 - DNA, 76 bp, Heterodera glycines
gcgatcaaaaagccatgcaaagtgcgaaaaagggatgtaataagtcaaaaaaaatcaaaaaaacatttacagaatg

SEQ ID NO: 116648 - DNA, 676 bp, Heterodera glycines
  unsure (1)..(676): unsure at all n locations
caaaatnttagaaactgggcgcaaagcgcccataagagtccgcttagtcgctaaattatcccctattattttcgatcaattcgaatcgcttcacagcctaggtagcgaagctcaagaagcgcgcagcgctttatccccactaaatacccaacggttcacgcacccactagttatctcattatatcattcagcacactattggctaaaaacgtcctcattttttgaaaattgtttataacttggagaaatcactggccgatcaattttttggctctgccgccattagctgactccgaccgatcaatttgtcggtcctgtcttctttagcgatcactttttggctctttcttcgagtgtcaatcactttttggccatatcttctattgcgatcactttttggcccagacgctgatcaattcgccccatttaaaaaataacaccccaaaaaaggataatttttttcgaaattttggaattttaggtattttgttcgcttccaaaaattttcaaattcaaatagaatgagcgatcaaagatcttttaatttccattttcttttataatttaagtcttagtgccattttcattccaaataattggctcaaatttcatttctttaggcccaaagacggccaaatttctcagctttttggagcagttcacactgtgcacaatg

SEQ ID NO: 116649 - DNA, 495 bp, Heterodera glycines
gcattttccgattgaattttacctataattgtaacttcatttccggaaaatgcatattttcagatagaattttacaattgtaacttcattccggaaaatgctataattgtatttcatttccggtaaatgcgtattttccagtagaattttacaattgtagcctcattccggaaaatgctataattgtaacttcatttccggaaaatgcatattttcagatagaattttacaattgtaacttcattccggaaaatgctataattgtatttcatttccggtaaatgcgtattttccagtagaattttacaattgtagcctcattccggaaaatgctataattgtaacttcatttccggaaaatgcgcattttccaatagaattttacaattgtaacctcattccgggaaatgcgcattttccgattgatttttacaaatgtattgtaaaattcatttcatgaaaatgctataattgtaacttcatttcaggaaaatg

SEQ ID NO: 116650 - DNA, 266 bp, Heterodera glycines
gtattttttcacttttattgcatttttcttatgaaaatttgccaatgaccgaaatatgctttaaaaacgcaaaaaatgctttatagccctaatcataaggtacagcggggaaaattttttttattggaaattattttctaacgaatctcttcaaaaataaaatgagtattgggggttttcgagggcgctaatcacgaatccgaactgggatttgcccaattccgaatcccggacccgaataaaaatgaaatatttttccagggatg

SEQ ID NO: 116651 - DNA, 128 bp, Heterodera glycines
ttcaacaaaacgcagaacggcgtgaaaattctcagtcgagacatgaaaataccggggatagagctgcacgcggggaacaacaaaaccgtggaaggaaccgagaacagcccaattttacagaaagaatg

SEQ ID NO: 116652 - DNA, 1003 bp, Heterodera glycines
  unsure (1)..(1003): unsure at all n locations
aagcagcttcaaaataaacaaattaaatttgtttaatttattgcttttaataaattgaaatgtttctctttaattacctaattaaaacaaaaagtgaaaaaattgagtgtcttttggtcgaagaaaatcacagggaattaatgatcggacgacgacggaccaattggtcccattttcttcttgnggattttcgtcatccatttaatctgtttattctcccggaagaggaagtaaaaaaaatgtcataaatgttgtttaatatgtaactcagttaatgttttttatatttaatcaaaaaaaaattggatatttaaataaaattgagttaattttaataattcattaaataataattataaaaagatttattgcataaaaatattcaaataaaaaattaaatgaatgattatttcaagctgaaaattctgtagtattacataagaatttcataatgagtgcacagattatcacatgatttaaccccaactcgcagaagtaattataattaattaatggatgattgattggtcaatcttttactataatataaaaaaatgatcaattggtcaaaaagtgatcaaaccttaacaatttggaaattgcaaaaatcaattaaaaagttactgacaaaagaaaattgcaaattttatgaaattcatttatgtatattttgatttaaagaattgaaaaatttgcaggtaaattaaaaacaattcaattcaataattcatcatgagtgattttttgtataaattcgaaattagactatttgaaagtggcatgcaaaataatcaatatgacttttgatcaatcaaattaaaaaaaaagttaattaatgctttctttatcattttgcattattccgatcgcttagatcaattttaaacaattttaaaaaagattttgctcattttccaatttgggaatagcggaacctaatcaattccgctgatcactcaatcaatcaccatcaattgccaatgatcaggacacacttagaatg

SEQ ID NO: 116653 - DNA, 1003 bp, Heterodera glycines
gtctctacagaaagaatttaagaagatggaggaaaaaattcggcaccaaatcgaacaattaggtttcgatcatttatcaattcggaggctcaatattttaacttttttttctgttactttattttgctgagaaattcaaaataatgtttcactattaaaaataagtactattttgattcagaaatatttctgtaattttatgtattttttaaattttttcagaaaaattcataacaaacgaaattcacccctatggattgccgccttcagacaattttcaaaaattataaggctaagaaaaaattataattagctttgtgactatttatactcaggtgcaaaagcacggaatcatgtaaatgaaagcaaaaaacgaattttatttttcttgtttaattggcatttatgttttaaaaaagatagggctttagcatgctaattactagggataggacgaacatttatatttcaatattttgggggttttgtcaatgttttgtaaatatttggcatttttcggatttttcatgtgaaattcagaaattctaacaaaaatgcaattaaaaattattatttttttgacacacaatatataagctttgaaactgtaaagaaaactgaaaatggttttacattcacttaatttgctgatttagaacaagaaaaacccagtgagtttttttgtgtatttttaaaaatatttttcaaaaaaaaattcactacaaacggaaatcacccctatggatcgacctgaaaaagaatgttaatgatttttatgttttttatgtaaaaagggctaattattgttttttaatttaattagtgaatctatatttgtgtcccgattgctctggtcgggtgcacaagtcagccggtggcactgtggttggggcaggcagggacgagaccaaatatacacaaagaattacaataattaaaaaataattccggggaggacctctaatttgggtaattaaaccgaacaaattaaaattacaaaatg

SEQ ID NO: 116654 - DNA, 1003 bp, Heterodera glycines
caaaattgttgttcaaatacgtgtgtattattcgtcatcgaattcgtctctttgttagcatcactataatttcatattgatatccacattaaatttcgaaaatatagaggaatcattcgttctgcaatttttgcttcctttgttgactttcaatttgaagcatattaaattggagagaaactttgatgaaatataacttattaaacacggcgattcaattttgggctcccagtgcaaataagtttattatttatttagtaatcagaacgccaaaactttgcaaaacttgaatttttttggggattttcccttgtaaaattagaagagccgatctcgagttaaaaactagacagctaaaaaataaactgtgattcgatagagggggtcaaactatgggcctatgcaaaatttgaagaaaattggtcaataggaaaaaatttttttcaaggacaaacatttcaataattttaatccttttttagccaagtccacaatttaaggccaaaccaaataaaatttacaatattctccagaattttcccttcaaaatgagcataaaatggttctatttgctctagtattcaccaagttataagctaagaaaatttcataaaattgtcgatgttgtacgtaaccaacactttttgaatataattttttattgacacgaaaactttattaataaaaaaataattctgccttcttctgtaaaagaagaaattgaaattaacatacaacataaggaggactcgaacctgagacccccttttggtgactaacgcacagaccactaagacgaaaaaaccaacttaattgtacaaggagcccaaaattgaatcgccgtgtgtaacgatgtggtgggacacaaaccgacgcgaatgccgtaaatgaaccttacaataattacttaattccagttccctcgggagtactgtcgttgccttcttccactcctttaaactcgtttatcaagaacggtaaaaaaaagtttgaaactaatatg

SEQ ID NO: 116655 - DNA, 533 bp, Heterodera glycines
tgactgccctcagcgtcaaaatttctcgaaatacgcagcgtctttttgctgaaacaatcaggaaaatttgctcaagtttacaatttttggcggatcaaacaattgcactcgctgatgcaaacccgacccttttggcacgtttttatttggcaaatccctatttatcagcaagattagtgacaaaagagaccctggaaataaagccgtgttttccattacttgaacgtgacatgcattttagctggcaaaaagggcattgttttgagcagctccccattacttttacattatatgggagacaaaaacacggatttttggacaccaaaactatgataattcgctcgagggcgagcgaaacggattgccagaaatatcgttttttatatatggcaacaaaggaaaatattttgcaatttgaccaattaaatggtgatataaatcatatcccctctgattctctccatcagctcacacggcatgggaaaattgattttcctgaatttccggttcagctttttaagaataaagtaatg

SEQ ID NO: 116656 - DNA, 181 bp, Heterodera glycines
tcatcacaatgcaaaacacagtcagttgaaaaatgagggtttacggatggattaaattaacgaataaaagagcactaaatttcaaatggggtacttttccgttttgggaccaattctacgcgcttgtctgttgatttaaaaaatatatattcaacctttggccccaaaacggaaaagtatg

SEQ ID NO: 116657 - DNA, 1003 bp, Heterodera glycines
tatttttttaaaaattttccccaaaaacttcctttttttttgggatttaaacccttccacgcttttttttttttaaagttggggggcctttttaaaatttttttggggatggggggtccgggaaaaatttgtaatttttaatcgagattttttccaagtttttttcaaaaagaccaaaacttgggattttggttaatttttaagaaaaatatgactatgacttaatacataaaatttcaaaaatctcaaaaatacatttttaaatgacataataatgccataatttatcaaaaatattgttgagaattacatagatttctcaaatttcttgattttttttaaacatatccaaatgctcattttcaaggacgtccttgcatacaaggacattttttattttcaagaaagaggatcattttcaaggacgtccttgccattcaaggacggatggcaaccctgatataaaaagattctgttaaaagcagaaaaaaaattttcaagcaaaaaaccgaaaacatttttaattttatgtttctaaccccgtagcccgtgcccatgtgtgcggaaaatgccaatctctactaaacagtcaaaaaaggcagtgacaactttttttgaattagcgcaaaaaatttacaataaatttattggcgttatgaaaaagcacattgagcggtgagtcattttttaaaaatctgttaagaacaccgttaagaaatgatcaaaaaaagttcctggcaacgtttatcggcaccgccggacaccgtcctcttcccaaaaatttttgaaaaatgcttcgtaaaaaattgatttgaaaagcaactctaaacatactttttggcatttttattacccaaaattatggctcacaatcaaatcagcaggtgcctaagaaagtgaaagtccaagccctaccgaaatcctttcatccccttatacatgacacaattcaaattacctaattttagataaaattcaaaacttagtacaattaattcgaatg

SEQ ID NO: 116658 - DNA, 999 bp, Heterodera glycines
taaaggttgcatccaaatgtaatttttttttacattgaagcatttggatggcttgctgtttacagttggctaagtcttctttgcaagaagtagcacaacttttgtttgggccaacgaccccaaaccattcgaatagcaatcgattgggctgactagactgcatatttgcatgaatagcaatggcaggtctatcttaaaggcctgacgagttatttttcgacaaacatcctgtacaccataaatcgatttgcaaatttagtcgaactatataatttttcaaaaaatgattcatcttttttatggttagcgcatatgtctctagctttatagaaacggtccccgaatctgcgaggaactactttttagagaatttctatagattattattttgcatgaatccttcgcttaaattcccatttatctcagattaaattaattaccccgatttgttttagaattggtccaaacacgcttgctaatagcttttcttttcgaaaagagaggtaaaatgggtgcgcgcatgaatccgttgggccctgggccaatgccaggggcattggcccaaagcgcggattccccaattgaaggctgttatcaattaacaattggtttattttgcgttgaatgaaaatgtgaggaaaaagttaagaaggcaacaattgatcagatccccgatcgcaaatcccaacagactgatcactccgatctctcccctcaaattttatacgggtaacaggtgggcgggtcgggtgccaagacagaaaaaggccaacaaacagaaattgggatgactggcgacagagaaaaagaaattgtgagagacataggggaaaagaagtcaagacaaaagggaagacataacattcccccacacctgggaaagccgtgccctcacggcttaagctatgccagggcagaagggaggggaacgaaagagaacatcaaatagagagaagatgagataaagagggagagaaagaaaaagattgtttgaaaatg

SEQ ID NO: 116659 - DNA, 197 bp, Heterodera glycines
ggtcattataatattaatttattaattatattaatcgcatggcacttttagtctcggggtgaggccgtacttttggagatcggctcgtttatgctcggcgcaaatactgccaattcggacgtcgacgtcattttcttagtgcccgaaaaggcgacaaaaaaagaggaaattggcaaattttttggcacgacaaaatg

SEQ ID NO: 116660 - DNA, 91 bp, Heterodera glycines
ttggtataattcttatggtaatttgaatctaaaattattgaatgagcaaaaattgaattataatttaaaattggaaattgaacaaaaaatg

SEQ ID NO: 116661 - DNA, 295 bp, Heterodera glycines
aagcacgaaaaacgcattttgatcctggtttggattgtctacgatgacttttataatgcccttttttgcctatttcgccatttttgacgtcttttttaggttttcgaaaaaatcctttacaaaaatgcaataaaaaagaaaaatataacctaagaaatgacccaaaaacatttcacataatacactttaagaaatgcctgtttggcggttttttgtgcctaaaagtggcagcactgttaattattaaatgtcctggtactcatttatccaattatcccctcattattttaagatg

SEQ ID NO: 116662 - DNA, 289 bp, Heterodera glycines
aaaaatattttttgtaaataatttaataatttttaataaaaattccaattttaaaaaagaattccaactcaaattcatcaaattttgaaacatttattcgctgtcgcatgaaacgaatcgccaaattatacgccgaatttgagcgacaacagaaggaatatttcgaatatgtgcaaaatgtttggatgcgaccggacgaattaatcgtaaaaagtgcgaaaaatttaaatggaaaataataaattccgaaaataaatttcaatttttaaaggcgtttttttcaaaaatg

SEQ ID NO: 116663 - DNA, 457 bp, Heterodera glycines
tgcatgggaatagaaaaacaaaaatacatttttatttaaatataaaaaatttagcaaatatttgaatttaataaatttgtgtttgaagctttagttttttaattgatacaaattttgaaatttttaaggaaaaattttttcatgaaatgtttacagtgactaaattatcattcaccaaatcattcatgatctaacgagaaatcttctatattagctgtaatattttaatttttttttttgcaaagttaaagaaattataacaagaaattatttttttatttcagttattttattattaaattagaaaacttaagcttttgagcaaatacaaaaaatagaaaattgttttttttgccgaaattgtaattttattttttcattttcttccacttggcgcatttaagaatttttaaattaaattaaaaagatttaaattttataattaatcagcgctatg

SEQ ID NO: 116664 - DNA, 175 bp, Heterodera glycines
aaaatgcttcagcaagtggatacccagcaccgtgcagagatgtcggcattgacgaagaggagcgtgagcgtcgacagcaggactacatcaataagccgtgggagggcaacaaagtgtgcctcgatgcgaacaaaattatgccgaatcccggcctacgttatctgtcgaagctatg

SEQ ID NO: 116665 - DNA, 313 bp, Heterodera glycines
aacacgcggggacagaacgaacggcacagtgtcgtgagtggcacaaaagcgcattttcacattcaacgcagtttttcaagctgtactttatcccccggttgtttccccccgcaaaattaaaagaaaattccatagacattttttcatgaaaaatttaattttgttaggagtgcaattctttgtttttccttcgtcgaaataatagttttgtaacgtcaatctacgcatttccacttttaaaaatatgctaaccatgaaatttctgttttattaatacacaaatcgaacatttgtcagtgaactgcaaaacatg

SEQ ID NO: 116666 - DNA, 1003 bp, Heterodera glycines
aaaaggaaatttttatgaaattattcttgaatgctgaaattaataattatttttgctgccattttaaagtaatatttttgtgaattgttgtgaagaaatgtgcttgtcagtaatcaccagtcacaacagtcacctgttttaaagattgaatgtcagtcaacctatgtaaaattattttgaatctttcatatttttatgaggaactgttcctcatatgaccatgctttgctgagtaatacatggttttatcatgttaaagcaattttaatttaaatataaattttttttactatggttaagaaatttttcatttcgaaaaattaattaccgacattttgccaattggaaactgttagtgagtttattggcagattgccaactgtccaaatgtctatagatacgcctttttttcattgatattttattattaaaaatttatgtcgactgccattttttaaaaatgatattaatttcattgttcactcatacaaatattttaaatcgtgctgaacctttctgtcatttttctatatcaccgtttaacgcacatggtgtcggtttttatgatacatatttttaagattaaggattaggaaataaatcagttttaattgatcaaataaaaaatggttttgctataataaagcaattttgtttttcaaaaaattaaactaccgacatttactctagtatcaaataaaattaaagaacaaagtaataaaaatagaacacagatgggacaaataaataaattggttgacaaaatgatttaaatattttaagattatcaaagacgagtttaaatccattccaacacattaaaaatatgcaaatggaacgcggcgacgcttctcacaattaattcccataacagactatttcctcttgaaatattcttccgaaaaatgatattcatacatgtattcgtaagattcagaaggcatcgaatgggcaccaaaagagggctaaaatgttggctggttgccggaaattgatggaaatg

SEQ ID NO: 116667 - DNA, 874 bp, Heterodera glycines
tgttattgtgttgggtggagctgtttttgaaaaaagttctgctgccggtctcaaaacactaataaaataccgtctaaaagcagtgccaaatccctgaaaatgcccaagacattttcggtaattaattaataatccatttgttaattcgtttgtttttgtccttcgcaacacattaatctttatttgatcagctaatgctgcttgcttcaccttttgcctttaatgaatgtaattttaattaaaatttccttttcttgaatttcattttcgttaatttccgtttaaaatttcgccaaataaaattggtggcactgcttttcttcttcgatccgcgcggtgatgtggtgggtagtgccacgatgtgctcatcgacagcaaaatttgggctcttttttgtctatgttttgtttgccatttttattggcccggcaattttcggcgattcgcaacaacggaaacggactttccgagtgcatttctaccgaaaaccaggcaaatgcaaaggccttttgatagtgtttaattgatcgggttaatgttatggtggtggaatggcatttttatttggaatttatcggaagtaaaagaattcggatgaactcatttatttggcatttcttttcatcattgcaattttgaaaaaaacaatcgaattaaatatttaatggtgtccaataaaaataacttaatgtttaatggagattaattaactgcaatttaaaccatgcaaataagcacaaagaagccacattaggtaatcatttcaaaattggcaatttaattgaaattaattatttcagatgggccatggctttcacttcttaattttcgggttgtccaacaaaattttgaccacgatttggaagatgagatg

SEQ ID NO: 116668 - DNA, 70 bp, Heterodera glycines; identical to SEQ ID NO: 110053

SEQ ID NO: 116669 - DNA, 193 bp, Heterodera glycines
ttctgttccatgtgcgctctttcatttgttgtccatcctcttcactgttttggcatatttttaccctggtaagtgaatgttttagtgtaatcattggttactgtattttctacagtatcaatttcgcttttcttccctttagttatctcactttacacttggccttatctgatcgtttcttcctcattttatg

SEQ ID NO: 116670 - DNA, 752 bp, Heterodera glycines
ttttgaacgttttgttgttgaactgttgacggacgatgttgacgatgatgattggttgacagatggcaaaatgtgtgaacgctaaatgaaatgtgtgacacaattagaagacaaattgatggttaaaaattaaaatgagaaaaaactggagggaatgatttttgactcgaaaagtggccatatttatacactttttgagtgtgattttcacagaaaaaggaaaattaatgatcgaaaaatttataaaatcattgtcgtaaaaaaacgccaatgcattcaaatggaaaacaagtatatttatgtttgataaaattcctaatcataggaaatccagttaattaactaatgccgggtttgaatgccaagattgggttcaaacttacattttttctatcttcaatggactaaacagctttaaataagcgattgaaagtgattttatgtgatagttttatcgtcagcaaatttttgaaaaaataattaatctttcaaacaacataattattgttcctaataacccaaaagaacgaattttcttaaattcaatgctgtttaagacctctaagattgaaaaaatgtaagtttgacccgattttggacatagtcgcaaatatcaggtcgcaaatgtctggacacgatattttcccttgcaatttaattagattcaaattgaaaatggaaatggaacagaccaagatggacgtcattctgatccagttttggatttagcgtcatcaaatccaacacatatg

SEQ ID NO: 116671 - DNA, 248 bp, Heterodera glycines
ttcacggccatttagtgcatttgaatcgattttggccaatacatgtgaatgttggtgaaaaaataattttctacttttgttcgaattcggaatgcgaaataggtcgaaattgatgtcatattcttgatcagcgcccacgaaaacccccgagcactactcagaattgcataaaaacccctttttaatctcttttttttatgggaccaataaaatacaggattacccgattatgcgctaccttgacaatg

SEQ ID NO: 116672 - DNA, 798 bp, Heterodera glycines
aaacgattttatttttaattaattatagttttatgtataaaaaaacatttttaaagctaacaacaaaaaaaaaattaattttttactatattattttttattaaatttaatttaagaattatgatttaatattaatattaaatatatctctcattattctttctatatataagtgatacaaaaatttattttattttttttatataataaaataatttattaaacttttgaattttttaaatattttattttataattacatttttagaatcatttaaatggttcaccaaagaagcaaaattctccaaaaaacaacaccgttttagtgcaacataataaaaacaaaatttcaccaccacaaaatccgaagacgcctagcccagttccaaatcaacgtccaataattgtaattaaacaaatttattttaatttatatattttaatttaatttttatccattttttccatttcaaaaacttcccatagtccaattagtaaattcgggaaaattttggggaaaattcatttttcaacccattcaaatttatgtaaatgtaaaatcatacaccaaaaaatcattgtaaaattcttttttttaaactttctgtaaccaattgcatttttttcgacttttctgagatcattaaataggatttttgtatttagactataagccctgatttgccgtcaaaaaacagtacgccaaattcaccaaagaaaggcggcaaaattagtgcacagccagcccattcaactgttccggggccaaaaaatgccgaaaaaattgtgcccacaatg

SEQ ID NO: 116673 - DNA, 284 bp, Heterodera glycines
tgattttccgagtgtttggccaaatttggcaccaaacaatgtttttggaatggaatttccgccgaatctatcccaattaaatctgagattgggtcatcatcattcaatcccattaattattgttaagcacaaaatgaagaaaatgccgaggaggaggatgagccggaacagaaacatcagcagaaggacagccaacaaaatggagcgaaaaatgggaatttaattgcataattaagctgaaatgattttaaatttatttctcttaatctacaggtcagaagatg

SEQ ID NO: 116674 - DNA, 74 bp, Heterodera glycines
agctcggcattcaattaggcgcattgcgacattgtgccaaaggggtgatcagtgcgattgaccaacaccaaatg

SEQ ID NO: 116675 - DNA, 166 bp, Heterodera glycines
aattattaagctatacattgggagcaggaaaacggctttctctgcttttcgactggaataaactgtttaagccattctctcgcttttctttggaggaaaatggtgataatttaattatttatgttttaatatttcaaatttggcattctccacaattctcaaaatg

SEQ ID NO: 116676 - DNA, 65 bp, Heterodera glycines
ttttccgatggtttaccccgtcttttcaggtgttggacttgttggacagacgaaaggggtccatg

SEQ ID NO: 116677 - DNA, 175 bp, Heterodera glycines
aaaaactggcatgacaaaaagacacatataatttttcaaccttttatttctataaaaattgctttattttttattccattgaattaataattgttttcattatcaataaacccatgtttttttttaaattaattttccaatttggttttatttctttacaattagtccatcaatg

SEQ ID NO: 116678 - DNA, 117 bp, Heterodera glycines
atgatgatatatgtttcacgatttagcctttattttcggcaactaaggtcatttaaagtcaccaaaaaagtcttaacttaaatttacagtcctaataatcatgtttttagcaaaatg

SEQ ID NO: 116679 - DNA, 461 bp, Heterodera glycines
ggtagggaatatgtattcaaattattgtcgggattttgatggtcttgattcctccgtcgtaccccttccggcgaggaaattttaaaaaaatttaccaaaaccaaaacctagactaaaaaaatttaataaacttttgaaaagcctcataaatttggtaagtttttaaaaattttcttgtcttaacaatttttatttgttttcaaaattttttggattttttggcgcagatagaaaaaatttcgttgataaaaatctagttcccctccccccaaaaaaaaagtcttaagttttggtaaattttaaaagtaagaaatttctcagcaatgactttttttccgtatcattactcaccttgtccaaaaaaattaaatttactttttgcttttatgatagaatttcactagaaattctcgcaaaaaattttaaaatatgttgtgactgaatgtattttcagttacatg

SEQ ID NO: 116680 - DNA, 346 bp, Heterodera glycines
tatttagtttttgataaataatgaatttccaaaaatgaactataatttatttgcaatgcagataggtattcaattaatgtttaaataggtaacaattctccgaaaacaaaccacatataacgtgaatgtgaatttcaatataaaaatttaattccttgttttaaattttgtttccaggtacaaatactatatataatgttctgtttctagaaattctttgcctaagagatctttgtcccatatgaattcgtttttagacaattaatttttgtggcatttaaattttcaattctttggcatttgaggaacaatttcattaaaattattggctcagtttttgagaatg

SEQ ID NO: 116681 - DNA, 171 bp, Heterodera glycines
aatagtcaattttctttttttaacttttaattgtttccttggcttggcttaggacccaacggacgtcggagtggccaaaacggcacacaatcggcggccgcacccgcggggacgaggcggtgccgaagcggagaaaatggcagagggaatcggcaccggcgcgaacaaatg

SEQ ID NO: 116682 - DNA, 725 bp, Heterodera glycines
caaagtggatacaaaacttaaaaaatttttctgccggccctaaaaaattggctcaaaatgcaaaatttgttcatttttggacaaaatctattaacaaatcatacaaaaaagtaaattttcctcggcggcgcctatcacacagccggaccctctagttctccaaattttttttctgaaaaaagcgcgcagtaaaaaagtattttgtaaaacaaaaaaagtcttcacatgggcttgacttaatcccaacccgggccgcccgtttaagcggggtttttttgaccgggcggccagggcccggccaattgtcgaagcccgagcccgggcccggcattttcaaaattccgttctctaataaggacaccatcgaaataaggacaaggcggcccactcgaacgaatacaaatctcagttattattaccattgaaaattataattcattcttaatgttttaatcaaattttgaacctttacacatttttaattgttaacaagggcacataatttttatgatggcattttatgttcttcaccgcacaacaaaattggcggaaaatttaacaaaaataaaaatcatctaattctttattttaactgttctaccactcaaaatattttgtataattaattaattgctcacaccccatccataccctacggctgaccttttgtgcgtgaaatttggcccattttttcgacaaacattcgccatttacgctttaacatg

SEQ ID NO: 116683 - DNA, 920 bp, Heterodera glycines
  unsure (1)..(920): unsure at all n locations
ataaaaaaatcatttaataatgggattcaacagaaacggaaatattagcactnttgtggaaaatattttacttacagatttgaaggtttcagacgcggtgtagaatcttaaaaaattaatattatttaaatcttttataagatttacgcgataaaaattaagtaaatagtgaagttcatgtgatcttaatagaaaatggataatgaaaaggtggtttattgaaaaaaatggtgttaattcgagtgcaggatctataaataaattaatattattttaatcattaaaaatattttagttatataaatgataaatcgaaatttattaatgctctgataaaaaaatcatttgataatggattcaacagaaacggaaaaattagcactttgtggaaaatattttacttacagatttgaaggtttcagacgcggtgtagaatcttaaaaaattaatattatttaaatcttttataagatttacgcgatacaaattaaggaatgtcgtggcgacaagaaatttgcgtcgaactctgcggggtgaaggggacgggaaggggatgaaatgggcgaggcgcgcagagtagccgttcgggggaatgtagggggtcgggaccgatcggagagcgatgagtcgtgccggttttcgtccaggcaaatagaccaagttgggcacaattttaataagagtatgtttattgtgtcgacctcaaacttgggtaattaaaccgtcccaatcgggacggtgagggaaacgaaaaatgggggacaaacatgataatgtgaacggggaaaagggggcacaaaaacggtgacagtaaataaatcacaaatggaaaaatgtggcaaaatcaaaaggggtcagaacggcgttgggaaaaggaagggcattcgggcaacggctggtccaaaaggggccacacaatg

SEQ ID NO: 116684 - DNA, 151 bp, Heterodera glycines
tttttgtgccgtttgctaaacagttaaaaccaaatcatccatggtaaaactcacaaaataggtgttcgtgtaagcattttccgatcgctctgatcacttttttgggggcgggggaggaaatgacagagaaaggacggcccttttgaaaatg

SEQ ID NO: 116685 - DNA, 557 bp, Heterodera glycines
gcaaatttttgatgtttgtcgcagtgtcacttcatcaagtaacggaaaagagagaagcggacgaaacggcagcggagagggaattccttttttggcattttaccgcaatggcatttcggccatttgccctctaatttgggttcattaacactctttaatcgttcctcttttacactttcaattttattttcttttcattcatttcatttacctaatacattttctattaatgaatattatttttgttcgtttatttttataaaattaatttattcattcgcttttttatctctttttccatcagtggaatttgcacagtttttacaatttgtcatcgctaacacttttccgcttctatcaaaaaaccatccggcaaaaatcggctctgattttgctaatgagtcatttttcgtccattataatgaacaaaataatggatgcaaaaaaataattatgctaattcaatactaaattatcgaaaatattgataaataaataaataatattggaattgaaaaatgaagaatttaaaaaatatacagtaatcacgataaatg

SEQ ID NO: 116686 - DNA, 568 bp, Heterodera glycines
agttaataaacgaatccaaaaaaaggaaagagcccaaaattgccggggcgccataatttgtaactctaatgattgccacaccatttatctcatcatgataattccatttattgtcatattatattgtccattgtcggatttatcagtgtccaattgtcatttgccgaattgtccggaaacgttcggggtcgagctattaaggtttgaaccaatccattgaaataaatcggtgattcaattccactcaaccagttaatttaaattttttgccggatctatttttttgattattccaaaccgctagcctacccccatcaatggtaagagatttataaaatggtagcctcaagtgattgtcgatcccatgacttcggtgcagcgaccgcctttcacccaaaccagaccagtgctcagcctttctcgggcacttagtatttggtttttggcacctatttatgtgcctaatttgagatattgagcaccgaaaaacaaagccgttacaattataggcttttcctccctttttgccttgcaaatgttccgctgcttacgtctttttccgccaatg

SEQ ID NO: 116687 - DNA, 813 bp, Heterodera glycines
  unsure (1)..(813): unsure at all n locations
gataaatcttcatatgttagccgaaaaaatggatttttttgtcaagcttaaaaagtttctntaaggcattttttaaattttctcacgaaaaaaacaaaataattttttgggattttctgaaaattttaagtcaataaaattaaatatatgcaaacaagtctaaaaacccggagtttgtgttcaaaaagaattaaaaatcatgtatcaaatgattgtatttgtcaattttttaaaaccacttttttattttctaaatcggttacaatttgtttgataatcaaaaatatttcttataaaattttgttaaaattattcatcaagaattaatgtcaaaaaagtccaaagaatgaataaattgccttttccgtcgatgattaagctggataatgctcaataaataccaaagcataatttacaaattaataatcgaacgtgtaaaatttaagcagcatgttaatttattcacaaattctaaattcaagagcataaaaatgttcaaatataatttgtacattctattaatttttattttgtgtgagaacatattaaaaaatgaggcgattcgttataatgaggtttattacttagtatttattcattaaaataaactcgtaaatcattaaaaaagaaggatgtttaaaataaacccattcattgttttttggattaattagcatattttatttaccttcaggtgagatcccaggctttaaaggtatgctttaaaattcgaaatattttttcgattttatgaataaattgcaattataattttgataaatgaatgacattccaacctcattttaatcaatg

SEQ ID NO: 116688 - DNA, 60 bp, Heterodera glycines
aatattcgtgactttcgcgcaaattcaaataaaaccaatgggtccaaattggctgaaatg

SEQ ID NO: 116689 - DNA, 187 bp, Heterodera glycines
tcgctttgctgtgttgatttttggctcgttgggacagtataagccactctacaagtacattgacaacacctacgacacaccattgctgctatatttcaatgaggaccatttcgatggtgtgcagaagcagggcggtctgttcggtcaaccgtactgtttggagtgtgaacggccatacgacaaaatg

SEQ ID NO: 116690 - DNA, 92 bp, Heterodera glycines
attcttttactgtttagaactgaatcaatatggcgaaaaacaatatcaacattaaccgtggcgttcaagaccctttttatcgttacaaaatg

SEQ ID NO: 116691 - DNA, 388 bp, Heterodera glycines
ttaagcggcaattattcggtttttacaaaattaaactaatccaagcaataaacaaatgggggttggaagtttttttttctggtttatttgtcgaacatcgccctaatcaattcggcaaaagaagttcacaaatattcttactttggttgtgctgtacttttacaatatatggttctgttttagtgggtgatatggagaaactcaaaaaaagtcaaacttttttatttgcagaagtataataatgaaacctaacaatttcattgaatcaacagaatttccgtgagcgcagaggggaggatttctctaccgatgtgagtgctgaacgcccgtacggtttgtcgaattacaccaacttcgacgccaacagcggtcccacggcgtacgcatg

SEQ ID NO: 116692 - DNA, 840 bp, Heterodera glycines
attattattattagaggatttgttgacttttagttttgtttccctataaataagccattttaagaccaaaaatgagaaattcgaaatttgaattttcgactttttgctcgaatccggattcggggttctacataggtcgaaattaatatcagattcggattctccgacccttaaaacccctaatataatcttttctcgaaaaaactaaaaaatttgttttttgaaaaaagggggcctaccatcggtactattaccgacagcaaataaagcctatatggaaaaaataaaatgccaataaatcacattattgtcggaggtcatcttttcgatattgaaataaatggtcaccgtttgaaacgctttaccttgttactgatctaaaaatttgaaactttcatttacgtaaatcagagtataaatggggcggggattgtcaggtctttttttgttccaaggaatttttgcatatacgagtttagaaaaagtaaatttaaaaaatttcaataaatcattaaaattaaaaattttttggtttctgtgacaaaagttagacctttcaaggaatgagagttgaaccaatagggacgacacactaaaaccagaatgacgttttagacgataatcttcttcaaattttatatatcgatagcaaaaaattttcattaggtttcattttgaaaaatattaatctcgttggggacttaaacacgactccataactatgcacaattaaaaaaacaatttccgagcaatttttcccacccaattttacatagaaatcacgaaattaaagattgcggaatttttaaaaacataaattatattttcagaatcaaaatg

SEQ ID NO: 116693 - DNA, 241 bp, Heterodera glycines
ttgtgagcaggtcgctcctagggttttttgtgacccaaggcgcctcccgcttacacggtcggacccgacgagtttttcgtaactcgtagcgtccttcttcatacactgtaagactcttggtgggtctgaagtcaaactcactttgtccactgtttgtccaacttactgctattttgtgaccccgaaccccacacaatttgttcggaagtcgggtagcagaacccaaaagtgagcaaaaatg

SEQ ID NO: 116694 - DNA, 403 bp, Heterodera glycines
acatttattttttatttaaagtatatattaaatatacgaagcaatcaattcacgtattgtattaaaaaaacgtaaacgacacaagagataaaaaagagccaaaacctaaaaccgaaaaaaattgtttaaaacataaatgaaaaaaaaattaccaatttttaaacatatcaaaatatatattatcaggagttttatcataaaaatttaagatttaaacgctgatatgtattaaaataaaaagtgaaatttatttttagagtattttattcgaattcaagaggaattattgatatttatgcaataaaacttcgaatttttagcaaaattatttttcatttaaatcagaacttttttgaaaaaatcaaaatatttttattttgttaaatttgaccctccaataatg

SEQ ID NO: 116695 - DNA, 145 bp, Heterodera glycines
cgtgagtttggagattaaaaagaaaataaaatataaaaacgcaaaaatattttaaataatttaatattttttctgtcacagtgccaaacaattggccacaaaaagtgatcagaagcggcgtcggttggcactattggcagaaatg

SEQ ID NO: 116696 - DNA, 467 bp, Heterodera glycines
agctgttttctacgctatttctaaaacggttatacccatccccagatttttgaatccggttttcagaaaaaatgccttgtggtgaaaacaatatttcacatttcactccataactttgtgagttcggcacggatcgagaccgggataagaccattggaaagagcagctcgagctctacaagaacgtatggaaagaaaaaatagttatttctgggactttttcagaaatcagaattaattctccaatgtggcccaaattttaggcccccagccacagccccttgcttctcccagttttaagtcttggatttgtcaaataaattcaagacttcaaaataataatcaaaaattctcttaaaatttttttgaacccaattcaaaaaaggaaaaaaatttgcagtcaaaaaattattcgaatttctccaattttgtttccataatttccgaaagttattcggtatcataatg

SEQ ID NO: 116697 - DNA, 929 bp, Heterodera glycines
cacaaattaataggttaattcttatttagaactcatttgtttttaattaaataataaatgaattgaagaacttctctgcattgaaaatttcttttattttttcctttttattaaaatttcatcccctctgactttcttggcatttattcggtattctttctgactataataaaacagtaattttcctgctctaatttaggatttaaaaaaactatagagttcgattaaagtttacaaaaagttacagatagataagcaagccaaattaaaaaatacttttctagaaaaaaactgggggttaaccgggcgatgtcaaatctgtgaaatggtgtcacagattatgtatggcacgcacctttctctgttaccgaaaccaatgaaaaaatatacaaaaatttattgagaacaaaaaactaagcattcatatgtcccgcgacagtaattggaaaacccggaccaggacaaggatttttgatcggactctttttactccgtacaaaaagtactgtcttaacaagactccggtcctgttgcattttcctaaaccttaaccggactacatatttggcatcctcaatcagttgtccatctccgtcagaaaaaagtaaatttaatttttaacatttgaaaaccaccctattataaaatcggtattaatcataaattgagcaatttgtttattagctgtattattttattttaagttttttcttctttccatcacttttcctccattgtttttttgtccatcttttttatccattaccttggaaaaaacttccagtcggtgaatcaatcatttcttccattccaattggccacttttggccaatccttcgtttttcattttcattgattcattttatcatccgcataaattgttgcataatattaaatgacatttttcagaaccaaagtcatcaaaaatg

SEQ ID NO: 116698 - DNA, 1003 bp, Heterodera glycines
ttaaatttgagaaaatctgttcatttctgaatttcgccaatctctgtcgaccaatataacaaattgagccattgaatgccgggacgcgtttttgcaattcgagaaaaagtgcgcagaaatccaatgagaccagctcaaatcgtctgaagtgactatcgttaagccattttatttgaacaaacattgacgataaattgctaaataaaaaaggaaaatattcctttttctgctgatgcatttgaaacatttcgccataattgtttaattttttcaaaattatgccgatttcgatctttttttggttgattgatgccacataattggagatgcctgtcctttaattttcaagtaaaaagcagtaaagccatctaaaaaaggaatttgtatttcgtttcaaagacttcaagacctttctttgaatttccccgtaaaatgttcctcgtgtgttaatggatgtaatgagttttgtgccgcctctttcgtgggcttcaacttcagtcgatggaaacaacatttttcaacacgtgcagtgcgaatttgccatggttaaatttattggcattttgtttgaattccccccaatttctcgaagaaaatgaactcaacaatttgcttgccattttgcatcgcgtgctaaactctctgctcgatgactcaatgcgttccaatcgcgtgcttttggagggagtggaaacgcgagaaatcagcgactttttcgtgatgttcgagaaagtgatttggcacggttttcggactttttgtaaaattaaaatttgaaactgaggcaaaaatgtaacatttatgcattgcagcttctttgttggccaaaaagaggcccgaggcgcaactttggaatttaattgggcagacaaacgaaggaaagggcgaaattggcaatttatacgaaagcgtaaatgagatgagcaatttgaggtgtgattggaagaaatggtttttattggctattgagataacaaaattcagttctccgctcgccaaaatg

SEQ ID NO: 116699 - DNA, 228 bp, Heterodera glycines
tcggcggcgccgcacaagcacacagaacgacactccgcttcaacactacgcgcgtggagataaaagaagacatggcctgaagttgtgaatgagtcttaaagtctctttgcttttttcatatgcctttttgatcgtctagttttcttattttgtaccacttgtcgtctttatcagtaatgtatagctattacaaaggctccgctcttctcgagacaatcctcgattatg

SEQ ID NO: 116700 - DNA, 72 bp, Heterodera glycines
atgtcattttaaatgtaatttattttagtcggtgcgactgtgttggaattaaattttattcttggccacatg

SEQ ID NO: 116701 - DNA, 154 bp, Heterodera glycines
atcggctgagggatttggagcgagaaagggacattttgagggcaagacttgccgaaaaagaggactccgtccggacaaggtgacgacaattgggggaattggccaattaacccaaattgggatgttaattagtcatgagcaattggtggacatg

SEQ ID NO: 116702 - DNA, 798 bp, Heterodera glycines
tgtagccgttgccgaaatctatcagtcagggctcacctatcttattttgccaaaaaggacattgagtgcagctatggaaagtgtaaagattgaccaatacttaaagaggccagtctgagtgcccaaaatcccatgagggtaggcaggctgtattggccacagacaaaccatttccattatgagagttattcataataaaaaagcaaataatagcgttggttagtagtataataaagaatccacaatctccaatatgagtagattctttaaaaaacacaagcacatataaagcatgggttaaaaacaaacaaagaaaacactatctccggtaggagcaggttctttataagattataaagcaaaaatacaataagcgttggttagtaatgcaataaagaacacacaatctccagtatgagcaggttcttgaaaaagcacaaagcacatataaagcactggttacaaataaacaaagaaaacactatctccgataggagcaggttctttataaaactataaagcaaaaatacaataagcgttggttagtaatgtaataaagaacacacaatctccagtatgagcaggttctttaaaaatcaaaagcaaatataaagcgtttgttagtttaatgctgatagcatagctcggttatgagcaggttctttcagttgatcctacgttaactctcaccagtccactggtcttggcaaagtgcgggaccagcttcgcaccggatgttggccgttaacgataaggaattattgtaaacctttcggactacaatcgcccgataaaatg

SEQ ID NO: 116703 - DNA, 163 bp, Heterodera glycines
  unsure (1)..(163): unsure at all n locations
tgtagagctcaggaatttnaactaagccaagtgcgaaagtgataacgtaaaacattgaaaatgaataaaaaatggaaaagaaaaacaatttattcacaaaaaatatttgtccaaaatattaattaaaatttggcattttgccaattaataaagtgaagaaatg

SEQ ID NO: 116704 - DNA, 350 bp, Heterodera glycines
ctcggataaattataaataaataaataaaaatattattaattaatgttcaaaaatgaataacaccaacacaacaaaacccgacatacaaattttgaattcctcagaagagcctaatgaaactcttttgcatgtactacttttttctcattatcttcttgcatttcccgtgtttttgcttttttggttcgttttaattaggtggcttaaaagtctcggtcacttatcgcccagcgaggccgagtcagtaatggaagaaatgcaaaatatcccccgacatccaccaatatttttcgcaacaaaatgacgcagaggttaaagaaaacagacactgaactctctctttagtatg

SEQ ID NO: 116705 - DNA, 540 bp, Heterodera glycines
aagaaaaaagttaaagtccagaaacttggctggggcccaactgacatagacccaacagtgattgaattgaaaagttacaagaggatcgagaccaagaaatgacatcataaaacagcaagaaatttcttgttctgaaaattctcgctcagcaggtcccctaattgattggccctaattgaagccataattttgattttcactttttttttttgcttctagctatgagatgaaatcatttttttaacaaaggaaatgaaaaaagcaatataaaaaacagcaacaatttttatttcaattgaaaacaatgtttacggaggttttcgaaagaaaatggcttttgttgtgcttttttaattaaaaaatggaaggctttaaacatagaaacatttgaacggtaacaaatcattataaatttttgaaaaaaaaattatttctcacttttgctctacagtgaaaaagcaaaaataacaaaaaaatttcattttaaatttcctctttttaattttgtttttattctagtgtttttaaaaatttaaaatg

SEQ ID NO: 116706 - DNA, 116 bp, Heterodera glycines
taaaatgttattttaagcctatttaggtcattttggcccttcttttactcctttctactaattttttgtcccaaaaaattcatacaattttttaaatttaatatacccatttcatg

SEQ ID NO: 116707 - DNA, 618 bp, Heterodera glycines
ttttgaagggaaaattctggagaatattgtaaattttatttggtttggccttaaattgtggacttggctaaaaaagaattaaaattattgaaatgttcgtcgctttcaaaaaaattttctagcttttaaaatttcttcaaattttgtataggcccatatttcgaccccctctatcgaattctattttgttttttgaaagtatattttctaactcgagatcggctcttccatttttacaagggaaaatccccggaaaattttaagttttgcaaagttttggcgttctgattactaaataaaaatccagcataattgtacttggagcccaaaattgggccgctgtgtaatgaagcaaacgaaatcagaaatacggatgtttttattttcgacgaagcacctatggcacctaaatatgttcttgaaataatagacaaaaagttacgagaattgcataatagtacattggtttttggaggaaaatttttaattttaagtggtgactttcggcaatgtttgcctattaaaaataaagcaacgaaaagtgaaatattagatttaactttacaaaaaagcgaattgtggactcattttaaaatttttaatttacaccaaaacatg

SEQ ID NO: 116708 - DNA, 287 bp, Heterodera glycines
agaaaagtgtttttattttctgcgaaatgagtctgagtgccgagttatgacgtgccaaacttttttttattgcaataaattaaataaacatttgcactgttttgtgttgttcggtggtgcggaggttgtgctcctgccttccctttttgccctcgcaggttcgaatccctcatatgttaatttattttccccgttttatttttgattttatgcaaattaatggccattgaaatcaattccatcgggtcaaaaatttttattcctcctccaagtcattcctaaatatg

SEQ ID NO: 116709 - DNA, 90 bp, Heterodera glycines
agatgacggtcgggaggtggcaccgatcaggagaaggagacgaagttgacggccggaagtggcatcgacccggagaaggagaagaagatg

SEQ ID NO: 116710 - DNA, 1003 bp, Heterodera glycines
taatccaatagccataaatcactcacacttttccgccacatattatttgtatgtatttgtatgcaaaaagtatgggtttggaagggatatttcacttacatttctaaatattcgcctcttatcatattcgtattttttcggattacaaaagataattatcctctgctcatcattttacaattttcatttctatatttgttttgttatttttcatttttacatatattttatttccccttggcttttggccgtgaaaatgttactaatacaaacacaagtcatgtaccaaaatatattcttcttattgcaacttttttgggtttttaaacttaccatatttacagtaaattgagaatacaaataaatgaaagttgaagtttgaaatgatcgattgttggagcatgacggagacggactgaattttgaccttgcaaaatttgcaatttttgctgcggagtttgggtggtgcaatgacgggttaagaaaaagggcgggtgaaaagggagaggtaactgaacgaaagtgccctcaaatgtgcaatttatggagatgaatgggttggcgggtggcccttctctgggtggtctttgcgagttaacatttctgccttttcctggtcccctgcggggtcattttccgccattccgtccaatccgtcgcattcattcggtggcagccgttttattggcgtagtctttggtctccgccccttccattgggtggccctgccatccatccgactgaataaacaacaaaacgtcgtccaattgataggccgcctccactctttctttagccaggcgctgataactttttattatcatttaaaatatgtatcaaacattttgtcatctcataaatttttcacaaaatacataaaaaaaataattaattaaccgatttgttttatttttgtaattatatttatgcgttgccttggagttgtaaatatttaggtaatatttccacaattttccatttctcccttcctgcaaaagaaatg

SEQ ID NO: 116711 - DNA, 117 bp, Heterodera glycines
attaattaatgatattaatttagttaaataaataaattaagtaattataattgatataattaataattaacataattattaattaatataattaatccaatgtaatgctttagcatg

SEQ ID NO: 116712 - DNA, 1003 bp, Heterodera glycines
gcataaatttcctatttcccctggactatgtgaggtttgaaacacacgaaaaacatgtttagcttgtttttaaggtttagcatggatttgctatatccgcattttccaaatttaaaattcttcgcagttacattaaagacaaccttaagcccaaaagtgaaaaatttcgccttttaggtcgtttattttattaattgattatgtgttttccaacatatttagccattttcgaaagttttaacttccattttttaatatgaagaggttttggaaaatttgcctacaatttggtaaatttatttccatttttttgcaattttgcgtccttatttcggaagttttagcaattttatggatatttttcgcgattttattgcaccattcgctttctctgatcgagagaatccaatataacaaatcaaagttgggaatattcttcaattattatttccaataatcctttcactgctctaatgaatatttaaaataattacattaagtcaaatgcccaaagacaatgcaacggtttatttgaatttgatatttttcatcggcgaagaacatgaaaaacaaaggaaaaagtttttggtggaaccaaaaggttcaaatgggttcatctgctgctctgtcacagccgttaattgctttgttttatgcctaaggaacatttttctgctggtgaaaagcgacggacgcggtctcacccaaacgcaaagggttaatagcgcaattagtggggagaggggggggggggggtataaaagaggctaatgacactcactcgcgaacccaaactaaattaggcgttaattagcttttggttatgattatatacattcctatatatatgataacaacttgctaataaaaaataaaaatatttaattttaaaacatgggataatcagtgatcgcaaatgctcttaactcatttgaaaactcattaatttatagctgcgtaataattattcaaaattaactgccttggtaattttagcctcatg

SEQ ID NO: 116713 - DNA, 425 bp, Heterodera glycines
tctttagaaacccgagagtgaattttgaaaataatttctattttagcgaaagtttaattaatgaatttgtgttgaagtttcaaaaaccaactaaaattaaatcatttaataaatcgattaaataattatatcaataggaaatcgagtaaaattttatgcttcgtttaaaattaatttttcactattaaaatttgttttattttcattttaatttttttcgccccgcccattaaaatcatttaattattacgggtgtgtattgctgtgcgttaatttgtgatgccgagttttggtaaatggttgccaaatttggcacattggccaatgccaataagttggccatgtcggccactgtgtaggcagtgccttgaatagtaaccagtgttgtgccggattgaaaggccaaccaattgggcaaaagaatg

SEQ ID NO: 116714 - DNA, 377 bp, Heterodera glycines
aattgtcaaaagatcaatctaatacaaattaaatagataccaaattaattaaatgtccaaagagtattcatgcccacgtgaaatggtatttggcatgcatatgtgtttttagagatgggcacggtcgattttatcggtaaatcgagttttcgatttatattttttgatatttaatcgtaaaaaacggtcgataaattttcttgtttttcgattgccagttttgaataattacggtattttcattctgaatgatgacgcaaccctgatgttaatctgtttttaattaatcagtaataattaatatcgttttggattttctaaaaattttaaatttgtccgattatttgcatataaaaaaaactaatcatttcagtatg

SEQ ID NO: 116715 - DNA, 216 bp, Heterodera glycines
aaaggcgccgatttagtgtatttctctcacatttgttacattcactgttaaccaaaaataaaaatgtattttaaaagcgctactgctattttattctttttgattgtttttattggtatcgaaaaatgtgcatcggctaatgcaaacaaaaccaaacccaagggggcagtaagcaccaccaccgccatcaccaccattaccacaaccactgttatg

SEQ ID NO: 116716 - DNA, 306 bp, Heterodera glycines
  unsure (1)..(306): unsure at all n locations
aatttcgccaaattaacaatttttatacataaatgcgaaaaatcgaaatttntagtttnttcttaatacatttttataggcttggaaatcttttgatttttttttgattaatagcattttacaaaacattaatttggctaattaaagtcataaatcctaatttcaataaataaataaaccgttcaaattatttacataaaagccactctgaatactgctgttccggctgctgcttctgtccatggcttttcgccacatttactgctttcaaaaggatattttgaaattagtctgacccgtgccatg

SEQ ID NO: 116717 - DNA, 467 bp, Heterodera glycines
ggtcaaatttgtgatcaaattcgaattttaaatgacaaacaaaagaggaaaattgtggaaaaattccataaaaaataaaattaataaaatgggaaagaaatactcgagaaaagaatggaataaaattgaaacgaaaattgctcaaaaatcgggtgttagttataggaaaatctacgaatggtaaagagaatttggaatgatgatcataaatagttattcatatgagcaaaaacttcaaatagtaaaacaatttgatcaaataaatggcaaaataaaaaaaaataaatgaaaaattggagagaaaaagagaaaaatgtcaaaaaataataacaaaatcagaagtattaatagatggaagaaagaaataaaaaacggaaagttggagaaaaaccaaagaatttttgagcaaaaaattgaaattgtgaaaaaataattcaaaataaaaaacgaatttatacaaaaaaatg

SEQ ID NO: 116718 - DNA, 132 bp, Heterodera glycines
actaacaagggaacctcgcgagctgttagtcggaaaatgcatatgtgtgatataccactggatataggagggtcgatttctattgtgaatttttaattttacgggacgatagcgaaaaacaaaaaagttatg

SEQ ID NO: 116719 - DNA, 349 bp, Heterodera glycines
gtgaaatgtatgattttttaagcgggggcaggggtctggtcccccgcccccggggccttatactactggccccgttggtagatttttcattggcattccgtttttttccaaaaaggggggggggggggacaaactacagaattaccatttttcttagtccgttttttccgtgttataagttccgttttactacacatcaaagtcttttttaggcctattaatgtcttccaaaagcaaatatctccagtattttaattgcgacataattccaagcggcaatttatggttttgccgttctgaaaattgcagctacaaatttgaatcaaaaaaattgtctgggtatccaatg

SEQ ID NO: 116720 - DNA, 1003 bp, Heterodera glycines
ttttttgtttccaaatggttaaaggcgctgaaaagttgttggaattggtcggcccggtcggtcggtgtccatccaaccgacccatccgtccccgttaaattgacaccccggggcatgcaaaagcggcacaactgacaaatcccctgtggcatttgcccccggcgggcgtcaaaaacattcggcgccgccaaaagtggacggacaagcacacaaaaagctcatccattttttgtttgaaaccggtcagaagaagcgatattaacacagctaaacacagccgagaaaagaggggggaaagtgtaataagagtaatttaaaaatggaaagctacatttaaattggatttcaggactaggaaaagtggataaccgaaagggataccggagataacaaaaactaatttttgatcgaaaaaccggcaaatccggcctaattgaaagctgaaaaccacgtcctaaaacaaaagagttaagtaaaaatgtcaaattgagaaaaatgccaaaaacattgaaagaaggcggaaagtcggaaaagaataattattaatggattttcattgaaaaagtcacgagcagcagaaaatggcggcactatcaaaagttggggaggaaagaaaatgaatggcaatgaataaaaaaggagggggaatagggaaaatggggaaagaaaagcaaaatggaaaaaagaaaaacaatgcaattttaatgtgaattaaagcattaaacagctagttgaatttaagaccatttaaattttattttcattttcatgccatttttctaaataattccaagagaattttaattaattttaatccggaaattcgaattgcgacactttcgccttttgctgaagaattcattttgtgcacattaatttcctgctgagcgccataaaatgaggaaattgaaatttgaggagagaaagtgaaaaaggcaccgaaaaggaatttaaaaaataatttaatttataaaaaaaacttattatataatagattaaaatg

SEQ ID NO: 116721 - DNA, 344 bp, Heterodera glycines
aatttttaggaacatttgaccatattgacaaaatttcgaaaatctatgattttcaaaatcgatgatagaatcaatgctttttgcaagtctgatatcatattcgtgatcagaagacccgaaaaccaggggttagtctttttataacaaaaaaaaaaaaaaaaattatttgggtggagcccagattctccagtattaccaaatttccatactaattcctatgtaaaaaaagtccaaaacttaggttggtcggttaattgttaattggcttcataatattgaaaacccgtttccgattatatttaaaaggctttatgagtttagatctataagtgcaatcaacaatg

SEQ ID NO: 116722 - DNA, 1003 bp, Heterodera glycines
caacaaaaaatttctctctttgggctttccgttaaatttctccacatttttcccctgatcacttctgaggcctttctaatttttggtgctttgtccaccctttgaccattgtgaattagccagtggcaatttaggcgtttcagcggaaggaacagcacaatcataaggcaaccaactcagcccctgctaatggcttgctcttagttaatttggtaatatttggcccatggacaaaaaaaaaatccattttcccataatttcccattgttttttatgtacctcaatcctcgagggactgggaaattgttgatgatcccttagccaaagaagggtcaccgaggaggagtttcatgggtataaaacggttggtcagtcagcaatctgctcggatttttgaatccattgtcgttttttacgccaaacattaattcttcaactggtttttaatcaaaacaacataattgagaatttcacacttcctttgtaaaaatttatgtcatatttctggactttttcccatattttatgcggaacccgtcagttgggcgccgacacgtttgggcgccagcaccttttcagttataacttttttctttgtcaaccaaattaaacattgttggtaccattcaaaagcctaagtgtcctctattagcctgcaaaattttgaaaaatttcattaaggttcaaaaaagttatggccagaagaattcaaaaaaccagatttccaacctttttggtcaaaaatgtgttcaaaattgacgaaattttttaaaattttgcatgctaatagagcatattaagagctttcgaatgataccaacaatgttggatttggttgacaaagaaaaaacttatagtccaaaaacctgctggcgcccaactgacgttgacccattttatggccctaaatcgctttttccgttcatacctacctatgctaattttcagccttgaaacctctttttttctttgccaaccatcgcttctctcacttctctaaatg

SEQ ID NO: 116723 - DNA, 318 bp, Heterodera glycines
ttgtttggaatgagttgcgcaacatcactcaaatttttaacatagattatcaacattaattaaaaatacctaataaataattaatgaaaaataacattttttgaaactgtataattaaataataaataattaccattttttgaaattgccctttcatttaaacaaacaatttttataaataaatgcttattctttttgttttcatttttaacctaattccagtttttaattattttaatatcaaaatttatttttatcccaatttcgactttgttaagcccctttttttagctgatcgactccgacggttgcagcatg

SEQ ID NO: 116724 - DNA, 329 bp, Heterodera glycines
ttatgtcactcactattccccacaacccctagacgcccctcactcgcacaaaaactgacgctttctgtcttgcgcgatcaccgcgcgcgtcaggccgggggtattccaatgatgtagttacattttggtatagagcgcctgagttactcttgggcagctacaaatatgcctttggcatagacatatggagcgtgggctgtatattttatgaaatgatacagcgtaagccacttttccgaaaggagcaagtggaaatacagctgcgaaaaatttataggtttaaaaaaataaataaaatcattaaacttttttcttattttagcataatg

SEQ ID NO: 116725 - DNA, 209 bp, Heterodera glycines
ttataaaatcagaaaagagttgaatataaaggtcatcaaggtctatcgactccttccttcacttggcagtgagttatttgattagtgcgaattgttaccatcggcaaggtatgataatgccgaaacgtctcacaatcagcctatttaggtggagaataaaaaattaaatcagaatttagatcacatcacgcaacaaatattttaacatg

SEQ ID NO: 116726 - DNA, 572 bp, Heterodera glycines
ctttttgcacttggagacgggcgacagcgcgtcgcccctttaacggacggtcacttccttcatgggcttcacctacgagtgagaaaaattttaaaaaatggcattttaattttccatatataaaatatccattttttgaagcctatgaatgtgtgaaataatcatattttgagtttccaacaaacaaacaaatgcacatttccttctgattgtatgccaaattttttggccataactttttttaaacatgccaaattggcattattcgaaagcatttcaaaaagtctattaatcaattaaaaaatcaggtatttgaaccaaccttataactttttagagttatttaatggctttccactcgcttaaaaatagcttctatttatatatggagctttaaaattatgccacttaattaaaatttatgtaattttttgtaaaaagttttggcccggaaaccttgcttttccctcctaaatgtactccctctaattgcatttgtcatcagtgaatacgcaactgaacattatcttccggccgaggccaccggggagaagcagtacgagcagccaatg

SEQ ID NO: 116727 - DNA, 1003 bp, Heterodera glycines
gacgacgggataaaacctgtgaaatgaatggaattggtgcaaaatgttgggtttttttgcaatcgcaggtgtcagaaatgaatgggggaaaagaggggacaaattagcgacgcgaacgaataaattttgtgcttttcaccgccaattgtgagagcaaattgaaaaaatggtgatgaaatgaacacggctttcattggctttctgttttgttagccaattgaatcgtttttttttcatcaaaaattcaaaacatttttccaccattgtgccattttatgaaaaatgtcactgatctttggcttaagagatcggttgggtcggtgacaagttgtggtaacacttttgtggttttgaatttttgatcacagatacagaaaatttcaaaaaaaaaaattaaaatttcccataaaaattttgaaattttgtatggtcatatccaggggaaacggaaaagggggggcacgacgtgtccccccccccccccttaaaattaaaaatttttgcaaaatttgtccgaaaaatggctaaatttggcgaaaatgcctaaaaattccctattttttccaacgacttacaaaatttttttttttaatttattggaaaaaaattttgggccaaaagaaaaaaagagtcttcgtgtgcccctcctgaaatttttttctggatatgggcctgaatttcatttcgcgagggatggtgatttctgaccatgaaatggaatgttttcttttcttccatggcctatccatcccgatagcccgattagagtcaacagattatgttaatatcgactcttactgatccgaatcttttgggcattcctggtcctggtccaaaatttcagcattttaccgatggtgatccgctttttggtcacacaagtcttgattagagttatggcataatcctcccaactattcccacgatcccgacatatttgaacaaacaatccccacttccaatcgaaaaatatcatctggtcaatcactgatctcatctaatg

SEQ ID NO: 116728 - DNA, 119 bp, Heterodera glycines
agtgagcacaaatacggggcggaaccgctctttgaagagcattgcttgagtgaatttgcacgcaaaccgaattggaacgacagagagtggcgcaagaaaatgaacgtcggggggaaatg

SEQ ID NO: 116729 - DNA, 526 bp, Heterodera glycines
agcaaaaaggaagaaaatattcagccaaagaatggagtaaaattaactcaaaaatagcaaaaaaattggggacaaatcgacaatatattcaaaaatggattaaagaatttggtcttcaaaaatacaaatcaaaaactgatgaagaaaaactcacaattgtacaaaaagatgtaaaagaataacggatgatgaaaaaatgggaaaaatgcaaatttattggaaaataaaaagagaaaagtcacggaacattcgccatggccacgctgaccgataattgggcgaactgtatataagagaattggaaatcatggtcgcaacagaacaagcaccgcaaaacaatttgaaaataaataaaacattttacagttgatcataatcaaagataactttaaataaaatattttacagttaaaaataatttccatgaataatttatttgttcagaataatttaattcaaataaaactacaacaaaaaattttagaaaaatttaataataaatagataacttatgttttaatacatg

SEQ ID NO: 116730 - DNA, 350 bp, Heterodera glycines
  unsure (1)..(350): unsure at all n locations
ttttacgggaatcactgtgatagacccaaatatnaatatgatagactaaaaggtctttttacataaatgacatgatagacacaaattaaaaagatattttaaataaataatttttcgtgaaactatcagccaataattgattaaaaattatttattaaaattatatataaaattcctttattttttattgtatccaattaaacgggccataaaattcaaattggcagagaatatattaatgagtatttaaaatacaaatattttttttatatccttatttagcatttcataaacttaaagtataatcaataaacgaggagatgcacaatttccgcaccgacttcaacatg

SEQ ID NO: 116731 - DNA, 141 bp, Heterodera glycines
ttctctttgacatcgattaggagaggagattttatgcttcttggagcggcggcctttggtgccggcctcgtgagttgtcctaccatcggtagtattacctaaatttgttccaatttttagttatgcggtcgctcgctcatg

SEQ ID NO: 116732 - DNA, 86 bp, Heterodera glycines
tcttggaaatttctgcttcagcagcgtctgttgtcccaatcgataaactgaattcaaaaccgttgaaagtacccattgagaggatg

SEQ ID NO: 116733 - DNA, 208 bp, Heterodera glycines
  unsure (1)..(208): unsure at all n locations
ttatttttgcgtctcctttctcccagagcagcagatcaaacagnacagnnaggacagaccccttgtgggaacaacgctacgaaacgnacaaaaacaatgcggnaagaaatttctactttttaaaagtcattgcacataatgcatttttgaccgacagacaatcgaccaggacaaaaggagcaacattgagcatttgtacaagcaaatg

SEQ ID NO: 116734 - DNA, 195 bp, Heterodera glycines
ggtgagtgaagaggcaaaacgaattcactcttttttccatggcacattcaatctattcgtttgggtcaatttatggatttgacgatttggtatacaatcaaacaatgctttcagttgattagcaatggtgcatacggcgccgtttatttggtcaaacatcggcggagtcggctgagatacgcactgaagaaaatg

SEQ ID NO: 116735 - DNA, 538 bp, Heterodera glycines
atttacaggaaacgcggaagaaaattggaaaatttcttaaaatttaaataaaattcttaacttaaagagtgtgacaataaaaggggcgaggggttaacatttggaaaattctaaaatttttaaagctggaaacctttacgagaaaataagctaaaaaactatttatttttgttggccctgtaaatttttagttttctcaaaaaaaatttgccaagtttttttaaattttagcacattatgttgtttaattatgtttgaaaattttaatttaaaaaatgataaatgaaattttaagcttgtaaataattaaaaaaaatattttcctttcaaattataataataataaaaataattattctatttaagtttaaaaatgtaataattaaaaattcttttatttctaaattctataaaaaaataataattatttaagtttaaaattgtaataataaaaaaataaattcaaaccaaatagcaatggtggccaaatttgttccaatttggtccacataaattgtagcttgtcggttctgaaatg

SEQ ID NO: 116736 - DNA, 837 bp, Heterodera glycines
gtatgaaaagtttattgggggaaaaaaagactttacacttcacacccgcatgggagaagggagtgggaaacatgatttcaacttttcaatgttttctagtctaatctactcaaaacggttcagaattcaataaaaataacattcacggtgcgaaaaatggggtttgaaaagtttattttgaaaaaaagactttacaaaataatacccctgggagaagggagtgggaaacatgatttcaaaattttcaattttttatagtctaatctactcaaaacggttcagaattcaataaaaataacattcacggtgcgaaaaatggggtatgaaaagtttattgggggatgttggatagtgaataatttgaatttatggcgatctgacttattgactttatttgttatttctatgtccatccgccccctccctcgtccataaaagtggacacctcctcccactttttgttcttccctttcatcattcatttatttatatttccaatttgccctccgaccgaatcaataaaattatttatttatttctttttctttgtgtgttctaagtggaagaacacaacaaattggcgcagtcagcagccattcttcatcactgaggacaaggacagctgcaaattcaacaaaaaccaatagcatccaggtggtgtgaggtctgctaagaagcagtttaactcaacaaaaaaaaaccaatagacctaagaagggtgaggttccgcaagaagcgggttttcaacaaattcgtcagcttagcaccaaacggtgtaagcatccaccaggtgtggattttgtggactttttcaacaatttcaattgacggacaatg

SEQ ID NO: 116737 - DNA, 957 bp, Heterodera glycines
ttgctattacattcaattagttatcttatccgcaagtcctttcgcattggcgatgcaaatgtgcatcggattagaccgattgccggtgttacgtttccaatttggtaatttctttaaaatagttaaaaataattatgataaaaatagttttggggtataacccttcaatgggggcgtgctgacgcgtttcctaaacagtgccacccatgcgcgtttcctaaatgagccaaaatggctgtcagcgcgtttcctaaaagtgccattttaatataatatcaatattattatacaaactattccattgcatatattttttgttatccgtgaaaggaagtgtctgtctagactgtcatttgccttgaaaaaaacaaacaaaattttaaggttcagaaatcattttgtatacataaattatgcattagaaatgtaaacatttcaaatgcataaatttagcccctttaattttaatattttgtttctttttcacttccataatgtttatgtaaatattggtgaacctatttaactagtttccgttctattttcactttcaaatatttgtatagcaaatttagggaccaaaaaacggggaaagtaaactaagtcatgctaatgggctgctaatttgttccgtctgtcggaagcgcatttcgcttcatcattcgccgcgcattccgaacaacttttaattagaaatatattaacaattttgttaataagggaagtaaatgtattataaaaacagagggataatattcggcctattagcgatatcattacgttttgcactcataataataaatgtggtaataaattaaatgaataaaaaagtcaagtcaattaattagataaattaagaaaattggaaattcatttttattctgcagcaggtcagtttatttattttttatttataattttcaaaatattttttacgacttttattaagcaaaaatg

SEQ ID NO: 116738 - DNA, 81 bp, Heterodera glycines
ttgaatatgtgtgcgttgattttatgaaaatttaaaaatatttttacttaattaaataatattttagcaacgaatattatg

SEQ ID NO: 116739 - DNA, 62 bp, Heterodera glycines
aatatcccactattactttgtctttaataatttattaccgaattgataatgagtatagaatg

SEQ ID NO: 116740 - DNA, 302 bp, Heterodera glycines
  unsure (1)..(302): unsure at all n locations
ataaaatntcgagattatatgaaaaatatttttttttacttatattttccaatatatataggttttcccgggtctaactacattttttgttgaaaaagttattaacaattgagctcaaagaaataaataaatgatgtcgtcctgaacttttaaaaaaatacaaagcattctttttaggaagacttaatcagtgaaaaatttttttataaaatatttattctcccaagtctaaaaatttcctgtttcatgggtcaattctcgctctcggactctaagtttactatttttgttcatcttgaatg

SEQ ID NO: 116741 - DNA, 681 bp, Heterodera glycines
gcgacgcaaaagccctcgttctcggaggcaatgattgaccgcagcgcgtggagtgaaagcaaaagttagggtagagagagaggaagagtgagagtgagagagagagagagtgagagagtgagagagagagagagagtgagtgagagagagagagagagtgagtgagagagagagtgagagtgagagagtgagagagagagagagagtgagtgagagagagagagagagagagagagagtgagtgagagagagagagtgagagtgagagagagagagagattagttgatcggagagaggcgacagagaaagaagggtaactccaaaatcactttgaaaatgctttatttcttcgggttgcggcaattggtcgaaaagtttaaatgagaaaacaaacaatagaaaacatattacttatctaaataaataacttctgtcgtcgtttctatggcaacaaaacaaacaaaaaatctttccgcgtgggccattaaattgccgcgggtgccgtcgtttggccaaatgctctcctcggctcacaatcaatggaagtgtccatcgtttgtcgtccgtttctttttcgattggatcggttgcgcagcgattgcattgaattgggtcatttgctggaagagaaattgacagaacgaagtcgaaaagaacggcacgagcagaacaaaacgatg

SEQ ID NO: 116742 - DNA, 424 bp, Heterodera glycines
ttttaatgtgctggaggcaaaaaaaaagcgttatcgaagacaattgagataataatgattgtttgctaatgctccgattccatttttaagcgattactgtaattttgtgacttttttagatttttcctacgggcaattaaattgtttaatttattttcattttattttctgatcagatgttgaacaccggcatttaggagagtggtgtggtgaaggcgattggatgagtgggcgtgacgaaatgccgccatattcgtttttcaaataattattttaagttgccaagggaaatgatacaatatctttcttgtactgtaatcaattctgcagtttaaggtgataaaaatttccaaattgcttaaattaatcaaattaattcggtcaaaatgcaaaacatgtttttcgcgtcgtcccattattgatg

SEQ ID NO: 116743 - DNA, 893 bp, Heterodera glycines
tgaaattttttttttaatttatgaaagaaaaaaatttccctcacaaggtcatatactcgaaacaattttgaatttctaccctttgacaattagaaaaacaagttatggcctatgaaactttgaacgcgtaaactggaaaaaagccaatgaactttaagtaaaaaaattttcaataaaatattttaagtgacaaaaaaaggaaattttaatcaattaaatgaaaatcaacgaattactagtttttttttaaatggatctgtataattaaaaatttaatttattaaaatacatattaagtcatacctccgcaatgactcaccattctcttttactttttttattcggtcaaattttgcaaattttgttcggccaagcaaatgccaatgccatcgccagtgttgggccacgttttgggccaacccaattgcaatgtgtggcgggttcgaccaaaaaattgacacaacactggaacattcagaattgttccgcaggacaaagttgtgtggcatacgtttgtgcccatggtatgaaaaattgtgtcatttcaaatcatgattagcaattataaaatgcctaaatgatttttatcattttaatgctaattatattacacgtctcatgcttttattaatagttttatttcaaatattccctcgatttaaacaaaatttatataccgaatttcctagatagagccagccccctggggctttatttttcaacctcctcaaaaggggctttattttaggagggcattaattatggggggggggcgctctatttaggaggaactattttaggaattacggtaaattacttcactaattggtcttttacaatagaggaggctatatttagattatgccggagagccggttgaggtcgtcacaatg

SEQ ID NO: 116744 - DNA, 768 bp, Heterodera glycines
gccccccccccccccccccctcgtcgtccccccccgcgggggcctgtgcttttgtttacgatttaagcgttttgtgtggggccctaatagcctaaaatttatgtatgaaaattgttgttttcgggtttagttgacgtaatattttgctttcttttttagtgtttggtgctgagacacatttttgctaatatttattctgatcgatcgaactttgctttttgacaaaaaaaaattgacttaaaaatgtttcgaaatgcactttttggtggtaatgatgttttttaatattctcttttactccactcacactaatcaatcacttcattaaatcttaattgcttttgatttattttttttgctcaaaaatcttttcgtctcataaatttttgcatgccttcttttgtaatctgtgcattgtctttttccatttgtattgccttaatcagttttattccaaccggaactctgatcaattgatcatcagacactgtcctaatttgctgatcacactgcctaaaaaggtgctttgctgattaaaagtaattgatcagactttctgatcagatcactgatattgattacttgatgcttaatcgttatggtccttctcatttccattattattatgcatatatctcactcttgacacacaacaattagtgacattcatacacacattgattagtagtgatcaggcctgatcgaatcagcgcaggtcgcttccgtcgctttagcatatccctctttctatacgactgctgcgacatg

SEQ ID NO: 116745 - DNA, 350 bp, Heterodera glycines
taatctgtaaaaaatcaataaattggcttgggtttcactgtgtgtttgaattggcgcccttttgtatctttctctaaccactacactctcgtctatgtgtttgtggatgggcgtggcctatcgattaaaagggacagcccgtctggaggtcgctgcgcgctaacacccctctcactatcaatcaataattacgtgttttttcgcaggttcattttatgcttttaacaattataatcataaactatttcttaatcgtaatggcccgagaaaaatcaatgatcaattggtgtttgagaacaaaagtaatcattttttgggttttttataataattttaaatttaaagaaatg

SEQ ID NO: 116746 - DNA, 1003 bp, Heterodera glycines
aattgtcaatttgttttaattgtgataattatttaatactttaaagagaaaagttttggttcgtttttattttcaaatttaagttcggatgatcaacgacccgaaaaaacaagttttctgtctattcatcatctttcaaaaaatttttgctaggcaaaagggttccgcccttatggtttttaataaaatttaaattgggccatttggccgcactttttccatccagcaaaatccatacaataaaagcatttttcatttatgtccccccccccccccgtattagacaacccaacaatcaatcactaggccaaaaaagggcaaaaagtgacaattttttggcaaaatgccttataaatttttgtggccatataaaacacgtggtaatcagaggaaatacaaatgcttttgtgaattctatgaatttatttataataatcattcattttatattataaataatatttcagaagtaaaaaagaatcttttagcgtataatttcattttttcctactaatgcttcttttttcttctgctctgctacggttttttgtaattttggcccatttctgcgcgattcattcgggtttttaactaattgaatttaattttaaaaatatatttttataaagctaaattgcaaaccaatgaaaattaaaaaagcccgaccccattttgaccttttccgaatcccgaatttaaatttgaacaaaatcgaaaccccaaatttatttttttaccatttttttggaattggtcaattggatttatctgcgatgacgaaaaccgttaaaaggattttcacgtctttttgttaaaaaataattttacaaagcaaagggtccttttggtttttaataattttcaaaattaatgaattatgaaaaagcgtcgttttccattaaattcaataattaattaaaaatgaaaaaattattcttcagcacccgttaaacaaagtgtggaattggtattcacacaaatctcagaaatagtgataaaaatg

SEQ ID NO: 116747 - DNA, 373 bp, Heterodera glycines
ttgaattcatatattttttttcaatttattttttttttacaaaaatttcacattattccatggtggctcaatcggatttgtattaatagttgaatttaaggaatacacctatttcctggcatatgacccattttttacatatattttttttgcaatttaattataatgatcaataattcctatatatttttttaaattaatctttttgttcaagtctgttttggtatgcgaaacggccatggctcgtatacaccggtatacttaaataatcatatattatcatatttaagttaaaaaaaacagtttaatgcatacataattaactaaattaaacaaattaagctattattttgctggccccaaaaaagggatg

SEQ ID NO: 116748 - DNA, 1003 bp, Heterodera glycines
aaagaataaaaaaaatagacaataattattttaaaaaaataccaagtatttaaataaaaagccgaattcgaataataatattttaatttaataacaaaattgaacacatcttttgagcctaatcgataatgtattggccaatttaatggccatttcatcgctgttccatcgcatcgccttttactgagatgcaaaaaaaaaggggggaggggggggggggcggaaaatccgacactggaaaatccgacacaagcagaaaatccgacattggaaaaaccaaccccaactttaaattttaaaaataatttttgattgtttgagttagtaaatatttaaaatacatataataaaagttaaatacttaagttatttaaaataaatattttattgctataaaatagattaaaggtaggtatataataatcatattatttcaatgttctttttgatcatctcaaaaaattgtaacaatccggcaaatggaatcagatgaaagggcatgaagcataagaatgtacttggtgcaagacatgaatctcacagagatttatgcgactcgcaacaatcgacaacccttttattatttgccatcaatatcccatcgaatggcagaatcaattaatttttttaaatccaaatcgaaaacttgataaacttagccagatattaactcaaacaatcaaaaatattttttaaatttaaagttggggtcggtttttccaatgtcggatttactgcttgtgtcggattttccaccggtgtcggattttctgcttgtgtcggattttccagtgtcggattttccggtgtcggattttcctagagccggattttcctagagccatttttatgggggggggggggtagcaaacctacaagtaccccacaatttttacaagccaactgtcaaatcagagctaatttgttgagcgcgtactgtttgaacttgaacctcttcccccttaattgtagaataacggtaattattataattataaaaatg

SEQ ID NO: 116749 - DNA, 82 bp, Heterodera glycines
aaaaaagaaaatttgcagctgctgtcaagcccgcgttttggacgcttttttccgcttccgagtgacgcgcgcacaattgatg

SEQ ID NO: 116750 - DNA, 279 bp, Heterodera glycines
ttctacttaaaattttttaaatttaacagaaatctctagtgaaaggacatctttttttctgaaacaagttgtcaccagaaatttaattttgtttttaaaaatatgctgtattcttggaaagcttaatattttcaaattacctgtaaattgtttggtacaaatgttgattatgcttggcaatgcaaatgtccgtgcctgcggcgcaaataatgcgcgaaaaattaaaaaaagctgtctcattaagtattttaaattgaatgcatagtgaattttcagatg

SEQ ID NO: 116751 - DNA, 424 bp, Heterodera glycines
tttgaagtgcaaaattaaaaaaaagaaaataattattataattttgagaaaaatattgaatgaataattatgtaataaaataaaattaaatttcgatttaaaagatttgcaagaaaacatttgaattggccgcggattccgcgagtgtccgtccggctgctcgggcagcgcttacacaggcaattttctgtatctgtccgaagcgaattggcacttttcagatgctcaattcgtacgttctgaataaaattgccatcgaggtaaaagcgttttggagggaaatgcaaaagtaccaaaaaacaaatgaaacaaaaaatgggagaaaaaaatagcagaaaaaactgaacaggaaaacagcgaatcggaggaaaatggagcttccaaggacgtggcggcacttttgggcgagttgatcaacagaatg

SEQ ID NO: 116752 - DNA, 147 bp, Heterodera glycines
aattttaagcgaagaataaattatcacttattaaatagttatttttgttgaggatatttttatatgagctaagaaattttatttaattaaaaattttcttttgaaaattgtttagatggccaacagagggaattttatgccaaaatg

SEQ ID NO: 116753 - DNA, 338 bp, Heterodera glycines
ccccccccccttttgcctccccccttggttacgggcctgggtgcattatgtttccgtcgtccatatttttgcatcccaccccaaaaatttttcaaaaaaatcttgtccattttttataggaaaatttcaagtaagaaatttcgaaaaaattttctaatttaacagctgggggtgggggggggttggatgacgagctgctccctcatgtttagcgctcaaaaaacaatgaactaattgccctaaggcattgtttcaaattgccttaggcacccaagaagagggttttcaatgttttgaaaacattttgacaggtttctgtccatgccggaaacattatg

SEQ ID NO: 116754 - DNA, 63 bp, Heterodera glycines
aacaaatactaactgttcttttagaatttgcccaactttcttactcaatcgacctcacaaatg

SEQ ID NO: 116755 - DNA, 148 bp, Heterodera glycines
aatatagtaataaagtaatcactgcaaaaagctatgtaacagggaattgcactttggttattaattgttcgtattcaaaagaaaatgattagagtaactatttgtactgaaggaatttggtgccgaggcggtgactgacgatgggatg

SEQ ID NO: 116756 - DNA, 489 bp, Heterodera glycines
ttcattcacttcatttcacatttcattaaatttataatatttagttgaatggagaataatgcaaattttatgatgatcatttgttaaaattaataaaatataacataaatacctatgttaaaaagcaaaaaaaggactaaatatttttgaaaaatcaaaaaattgataagcctaggtagcgaaactctaaaagttgtacagcgtttgcattaaacttaaatgagttgttttacgaatttattttatttttctgcggccacaataacaaaatgtaattaatggaaaattaaatttaatcaatattttacttattattgccactaatttgttcagtaaaataacaaataataaaatcttatatttattttcaaataaataggtttttttctgatttctaacaattatttcatttataaaatttaatttatgtttaaattatagtaaaaataataattgcttgttaatttttaagaatttttaaataaaatg

SEQ ID NO: 116757 - DNA, 51 bp, Heterodera glycines
ggtatctttgctcattggtttcattttgttatttgcccttttcagatgatg

SEQ ID NO: 116758 - DNA, 906 bp, Heterodera glycines
tttttcacatttttcgctaataatttttacctccaaaaactaaaaacgataaatttaattaatataaaataatttttgttttaatttttaaaataatttattattttgcttttaatttgatcacttccactttttcgcacttcgcctattttgcaccttttcgtatttttcgcccaatcttgcacttttcgtacttagtcattgcgcctttaatttaattcgacatatttataaaaattcttaatttatttgttagctcatcatctaggctatgtgtaatcattattgtttttttgaccttatatcaaataatttcattaattcgttttttaaatctcttttaaaattaattaatttttcctaattattttattagtttattaattcattaattactcattttgagataggggagagttacgtcgagaatatttgctcacctaacttgtttttttcaattattttttcctattttttgggttgaacaattttgttttttagtccattcgctatacatttgcactgctgcgcacaatttacacttttcaaatttttcctaattgcaaaatgacttcctccgcaaaacttgattgaaattaattggtcgttaattagtagcgttatgatgctttgattaactaatgagtgattagcgttattgagtttacaaactaattgcagaaaagaaatgcatttaaagaaatgaacaattcaaatgaattcactcatttatttaaactcaaaataacctttatatataaaaaatatttcttaattgaaattatactcaatttaaataaaatgataattttcaatttcaaagtctttcactcatcagatgatagggaacattttgaattgggcaattaaaataaattgtccataatttaagaaaattgaaaaatg

SEQ ID NO: 116759 - DNA, 250 bp, Heterodera glycines
  unsure (1)..(250): unsure at all n locations
tgattataagaggtacancagtgattagaagaggtacaatggtgattagaagaggtacaaaagtgatataaagaggtacaacagtgattagaagaggtacaatggtgattagaagaggtacaaaagtgattataagaggtacaacagtgataaaagaagtataaaagtgattagaagaggtaaaaaagtgattagaagaggtacaatgtgatttagaagaggtacaaaagtgattagaagaggtacaatg

SEQ ID NO: 116760 - DNA, 629 bp, Heterodera glycines
tttttttttcttctaaaatggtttttaataccatatttagccatttttaaagttttactttttatttagcgaattagaaaaaattttacgaaatttagacctcaatttgaaaaatttatgtccacatttttcgccattttatccatattttgtggtttttggtccatgttttatggccatatttcgcgattttatttatacccatatttttttatgccctagttataacagtttctttcttggtcaattgcctacattcttggtatcaatcgaaagcttaaagccccgggaattcataaacacaagaaaataacaaatactgacattaaaaaaaaattacaacgagaaaacacatcgagtacattcaagaataattttttgtattgctcttagcccagaattttgggttcgaaaaaaaaattctacaaactataagccttcgtttgataccaagaatgtaggcactgaccaattaagaaaaaaatgatgaccaaagaaaaaatatggattattccaaaatccctaccgattatccccccccccccccaaaaaatggatttatcattcatatatactaatctacctatttccttttttcgtatagtggccttgtgataactcaaataatg

SEQ ID NO: 116761 - DNA, 175 bp, Heterodera glycines
aacaaataaactcataataagggaggaggatcgagtaaatacttctcacgaatcaattagccagtcaattgatatgaaattttgataagttggataatttaatttctaccgcacttttgttgacctttttatattaaatcaaatcaaattccattttctcacctcaactctaatg

SEQ ID NO: 116762 - DNA, 165 bp, Heterodera glycines
tttggacaccagcagcagaaattcaaaagtcaaaagaaaattcatcgttgatgctaaaatggtggtaaattttggggtacataattaaaaattaattaattacatgtttaactccccagggaaattcgattgaaaaggaatgtttggaaaagatgccaaaggatg

SEQ ID NO: 116763 - DNA, 296 bp, Heterodera glycines
aaaacagttggatgaaaggtttttctttgtttttacagaaaataaaattaaaaaaaaattcttggcttctttaaaagttgttttatcatttcacatatatttatttgctttaaaaacctcaaaatacagctataacatgcattggattcgaacctgagaccccccttttggtgactaaaaaacatgctggcgcccaaacacgcgcgcccaaacacgtggctcccctgattggactcacatttccgtttaaattaaaagtgaaaaataatgttggcatagtgttttacccgaaaatg

SEQ ID NO: 116764 - DNA, 207 bp, Heterodera glycines
acaaaaaatttcaaaaaatttactttctcataattcaccgttttatgttaaataaaataattttagaaattttgccaaaaaaatagttgaaaatttcttctctgttcaacctgcaatggcatcgccgccggactcgcgtttctgtccaccaccgttctcgacctctgtgccgatgctgctgctggtgcgggtgatcttgacgtgatg

SEQ ID NO: 116765 - DNA, 194 bp, Heterodera glycines
gccactacgtctaaggatggcagcaggcgcgcaaattacccactctcaacgcgaggaggtagtgacgagaaataacgagaccgatctcttatgaggccggtcatcggaatgggtacaatttaaaccctttaacgagtatctatgagagggcaagtctggtgccagcagccgcggtaattccagctctcaaaatg

SEQ ID NO: 116766 - DNA, 491 bp, Heterodera glycines
ttttaaaagaaaaaaaacataaaagctaaaatttattaatttttaagaaaatttaaatttattttctttctctctcttcgctttctctgtcctctctcttctctctctctcacgtcctctcacctctctctctctctctctctcacgactctaattttttctcactttctcttttactctctcttctctctctctgctttctctttttatctctttatctctctgctttctctctcttcgctttctctgccctctctcttctctctctctctgctctttatctctctctttccttctctttcccttctctctctcacgtcctctcacctctgtctctctctcacggttctctaatttcttctcagaatttcttcattctgtcccctctcttgcttcttttttcatctctctatagttttcctcttattctcattcctgcacccatcataaatagggcatccaaaaatatggatataaaatcgcgaaatatg

SEQ ID NO: 116767 - DNA, 71 bp, Heterodera glycines
tctttttaatttttataaatgatctgccgtcctttattgctaatgaagcatcatcagttggcataaaaatg

SEQ ID NO: 116768 - DNA, 1003 bp, Heterodera glycines
cccaaaaattagattttttctaaaaaagaaagataaaaaaaattaacaaataagcctaattagtttccttttactgtatttttttcttattcaattttttctatgaattttttctataaaaagtttattaaaaaaaatggtaaatatttgggggtttttgtacaaatttcttacacatattttggagttttttttaaattttttttttgaaataatttctaggcctgcagtgtttttgggagtctaattaaattttttaattttgcataacagaaccgtggcaaaaggaacggaacaaaggctatttccatcgagaactccttcaggtatttgaatttgtttaaacaaataaattaattataaattcaaatgatttacatgatttaattaaaaatattcgacatactgtagataccgtatttcaaaaatttgcgcccctgaaaataaagtcacccctaaattttgttaacaaagtgtcgcttgttataaaatgcccgtttttaattttcttttttttcaaattattttcttttgtatttcatttttattttggtaaaaactcaactcgtttttttggtagaattcgaaaatcgaggtacaatcgatgattccaaatattttgggataaatttcagcttaggaatgcttattcaccattttaactgtgttttggtcaattgtggaaaagcctaaatttctaaaaaaaaaattttttccgttattatcaataaaaatgaaaaaagttttaatgtaactaatatttaaataatataattactattaaattttaattcaaataaatatttgaattttaatttgatcaattgcatttatttttcgttcttcgtcatagcaaccatttgcaactagtgccacaatcattcagatagagccgttgcattttgacaaccaaggcattcttttggtcgactttatcgagcatcagtgggccaatttccctttggatggcgttttgggcttagcgtggccctacgacccaatg

SEQ ID NO: 116769 - DNA, 701 bp, Heterodera glycines
tcgtctcatgttaaaggcgtgttccttcttcgtcggtctttcggtgtggtggcctcgttggctgggcggccgtgttgtccgcaagttgctctcttccttcggtgcacgggtcaccggtattccgaccgattcgctgctcgatcaattagaaacagaaagcggtgaccacccgcggcgacagtcggtgaaagagtgcatggaatgctccgtctgctgggagacgaccaccgtggacgaactgtgcttttgtgacgggacgacaatgacagcgacaagcagcagctcaggtggtggtttaattaatgaaataatagcaaaaataaattcaacaatggagcaactgctagcaaaaattggtaatactatcgatgaaattgttattttatacaggtacgaacataaaaatgaatttttaaaattttgaattttcgacttttgttcgaatttgggtccaggattcgaaataagtgaaaattaatgtcagattcctgatcagcgaccctgaaaacccccgtaaacatgtttccacaacgttttagaacaaaaaattttcttccaaaaaagggggcaccatcgatagtattacccaaaaattaaccattcgttcaaattaataattgatagctaaactgaccaccgaaactcacgctttttgtcgtcaatgtttggaacgccacgcgcgcgccgctgttgaggaaatg

SEQ ID NO: 116770 - DNA, 189 bp, Heterodera glycines
ccttaatttttgttttttttacaaagaaaaattattaattattaatttgggcattttaattattaattgcgccggtggcgatgggcacgaaaatttttttggcaacactaattaagaaaggcggtaacggatgaaagccaaatgtcaattcttaaaatgcaaaataattctgaaatcaatttccagatg

SEQ ID NO: 116771 - DNA, 77 bp, Heterodera glycines
tccatgaacacatcactcagttttgccaattcgtggagcgcaaaattcgcttaaaaattgcgaatttcgacgaaatg

SEQ ID NO: 116772 - DNA, 83 bp, Heterodera glycines
  unsure (1)..(83): unsure at all n locations
ctgtattttgaggtggaaattttggaagaaatntgntaataaaaatgatttgtattttccatatttatttctttttcagaatg

SEQ ID NO: 116773 - DNA, 145 bp, Heterodera glycines
actgaagggaataaaaagcaattagaaaagggtttttcattttaataatggtaataaattttgatagatctaacactcgcaaatgttgattaatttataggtaattaaatctgttttttgactataactgcccaatttcaacatg

SEQ ID NO: 116774 - DNA, 62 bp, Heterodera glycines
  unsure (1)..(62): unsure at all n locations
cgtaaacatttaaaaacattttttatttattattattatttntaaatttgaggcttttgatg

SEQ ID NO: 116775 - DNA, 450 bp, Heterodera glycines
aatgattcagggataaagggtcaaagagtgcaaataaaaattgggatatataagggaacgatggaagacaataaggcacattcaaaccaatcatattcccaaatatttaaaatttattttgtaaaaatgccttcggaaaaaatggattttttgaaatttgcctcccaaattctggcatgtgcgaagagagacatcggaaattatctacaacaacacttctaccgaaaactattaaccaaacacaccaaactggcaataaaaaatggtgccagacttctctaccgctgcgaaaaaggggtttacgatattttgaatgggccggaatttttaattttgggtgaccggcctaattttgggctgagacctcgggtcccaagtcatatatttgcactccaaattctgagactaaatggggtcattgggtctacaattggccctacactccttatg

SEQ ID NO: 116776 - DNA, 216 bp, Heterodera glycines
atcatcagcttttgattagtgtgaaatctgcacaattcgttgattactttgtgtgcataaatagttgattatgccacacaaaaattcagtttaaaatagtgcggacttttgtaatctaaattaattggcataattctgatttaagcaatccaactcaaaatcaattcatcccataagattttccctcaattaatattttgacggaaataagcaatg

SEQ ID NO: 116777 - DNA, 789 bp, Heterodera glycines
agtaaatgagacagcagattaattaagaattttggggagggcatttagggagtgggaaaggaaagacaaaagaattcactaattgtcagaggaaaagcattcgatcagaaagtaaaagctttcgattagaaagggaaaagctttcgattagaaagggaaaagcattcgatcagaaagtaaaagctttcgatcagaaaaggaaaagctgcactccgtccgaaattttgcactttttaactttttgcggtgtttttgtatttcttcacatttttcaatttctttcactttaactaacctttttacctctgaatttgtccttttattctcaaattctcatcccaaatttttcttcccaacagatggaaaatcggacgcaaattgtacgaattgttctgtgcttcccaataaaagttcgaccagtgaattacagcgaaaagttcttttggatattaaataattattttcgttgttaattttagccaaatggaccattcgctaagctttaccatcaaaaaaattcaaaaggaagcaaaacgtccattcccggcgaattgtgtggtaaattttttcattttgcattgttttcttttgacattgaatccaacaaatccaaaaattggccttaactgatctctcatccattcgcttggcattggcactttcacaggaccatttgattcttgcgccggtggttcgtcgtgcgtggagggcttttgcttgtgtccggccggcactcgtccgtcccccgtgagcggcaactgcgaaacttttgcgcaacaacgcaaaatg

SEQ ID NO: 116778 - DNA, 97 bp, Heterodera glycines
ctggtcatagatttgttgttgctgtttgttgtaatttgtgcgggtgctagacgccgccaagccgagagagttttttgtccatcaattttcaaatatg

SEQ ID NO: 116779 - DNA, 262 bp, Heterodera glycines
tccgtccctctccgtccgccgtataaatgggcggatttgctgtgtgccaatgccaattgtgtaacgcgaaatgggggaacttatcagcatgtccatctgctgccgcctaatgtccaccacaaaaaaatgtagaagccaaatgccatttatagggggggggagagactggagacacaaaaagtgcccgcaaaacgattaatttcttctttttgcgtataaaaatattatgccattattggttttctttattttttgaatcatg

SEQ ID NO: 116780 - DNA, 128 bp, Heterodera glycines
aatcaaaaaatatacagaaaaccaattaatatggttggtcgtcgtcttcatttttcccccttttcagctacattgaccattctgtgctcacatttctccgttccaacaagccaatttgggacagaatg

SEQ ID NO: 116781 - DNA, 117 bp, Heterodera glycines
tttttaagtcttccaaatgcttttcaatgtgtgaaaggcccacgcatttgagaacttttgggcgtccgtcagcgcgtggagtgtgaagccacttggacagtgcttggcctacggatg

SEQ ID NO: 116782 - DNA, 63 bp, Heterodera glycines
gtggcacggtcattttggttttattgtggatatcaagtggaaatcgaactgaggcaaataatg

SEQ ID NO: 116783 - DNA, 291 bp, Heterodera glycines
gccaaaaggttcggtgccgtgatgaaacgaaccagcactgcttaccccgcggcacccggcacggtcccccgaaggaatggatttaattaaattctctccttcggggatttttttccattaggtcatccgatagcggtcgattgctctagtatctttttcaaaatttttgatgaaatatttgtcgggctctgaagggcgtggaagggggggacgaacactgatatgatggaggagaacacataaaaattggaagaaatcactaaaaaattattggaaaacattgagaaaatg

SEQ ID NO: 116784 - DNA, 68 bp, Heterodera glycines
actagtattacagattcagctctccaaattaaaactataaatcttagagcattgtttactttaaaatg

SEQ ID NO: 116785 - DNA, 326 bp, Heterodera glycines
tctcaaatgctgcaattgtgccacaaatgatcagagcgaacaacggcagaatgacacatgaatgcaaaagaaattgactcatttttctgaatgaaatatggaaaatttagcgggcaaaatttagatcagtcggtgcccttaggcgccgccaggaaaattgtttggaaattttaaagcattttaaaaaattgcttaaaattttaaaaaagttgtcttttttcttgaattttttttaatttttcatttcggggagcgggggggggggggattgtccaccctttccccttgttgatgcctgatttatgttgtaaaatttacagagcatg

SEQ ID NO: 116786 - DNA, 1003 bp, Heterodera glycines
ttgcgttcgggccagttgcgtctgaccggttgcgtctgggccagttgcgtggggccggttgcatttggggcagttgccgttgggccggttgcatcgggccggttgcgtttgggccggttgcgtttgggccggttgcgttctggccggttgcgtctggccagttgcgtggggccggttgcatttggggcagttgccgttgggccggttgcatttggggcagttgccgttgggccagttgcgtctggaccagttgcgtcagggccagttgcgtctgggggcggttgagtcttgagccggttgcgtctcaagtatttggtaataaaaaaatacatttttttggtacttttcgatttcttaggcttaagcctgagcgttcacgaaataaaacggaatcacaaaaaaaaattgcaaaaagggtccctcccctttaatttttctagtaaatccatgatattctttccaattcgtgtcaaaaaattttcaaaaagaaattctccaacaaaaatatttttattaatagacacgtaaaagcaccaattcaaatgtgccaacaacaaattatttattgaagaattttatcattacccatggcatttacatatttgttaagtggatagtaatattaacacatatattgctttgatttttcaagcagaatttaatttcaaatgaataaaattgaaaataataaaaattataggattaatattttaaatataattatattttatataaatttatatttattcttctaagttatatatatttatataacaaattaaaaataattttataaataatatattaactttaggctgagtgatgcaaattttggcaacaccgaatttattcaattaatcagcacagcttagggcaaatttgataaactgacgaaataagattaagctttaatatgaggattttttattgataaaattattttaatagaaacacttttattttatcatatttcaaaattaattgccttttgtttcagaaaatg

SEQ ID NO: 116787 - DNA, 182 bp, Heterodera glycines
ttttaaatggttcgctttttggccaatgttcgaaagtggcattcctccataaactaattaaggagtgtcattgccaaaaaatgagcaaagcgatcaaaggcaactgaattaaggccaattaaaatgcataatttggacgggggaagaagcataggccggtaaaggcaagcccaattcaaatg

SEQ ID NO: 116788 - DNA, 241 bp, Heterodera glycines
accaaattttggcaatcgttgaaatttgtgcaaatatattgagttttagttttaaactaacgaacaaacaaaaaagaaggttggcacaatacgccgatttttatagagaaattgccaaatctcgttcagagaaaacggcaagaaaaaggatacaacaggggagtggtatagccctgggagctgtcttgatacctgtactgagtgttttagcccaacatttattagaaaaaataacatcatg

SEQ ID NO: 116789 - DNA, 258 bp, Heterodera glycines
ttgcctcaaatacttcggacgcgtgtttcaaaatgagtttatgtgctggcacaagcttaaaggaactaatgtaggaaaaaaataaataaaatacataaaataaaattaattaaaattatttaaaataaaattattcattcttcaaaactcgcctttcggcgctacttgcaaagagcactattttgaaaattttttcaccttttttttcatattttttttttgtttattttgttacagaatttgcttttttaccatatg

SEQ ID NO: 116790 - DNA, 226 bp, Heterodera glycines
acaaatttgtgccatttccattgccggaccgtccgttgcccagcaaaatccgttttaattaccttcggattgagtacttaaaaaacagttttatggcaataaaagcattccttccatttttaggtacgttgatcattccgtcatcgcttttcttcgttccaatcaccaaattttcgacaaaagaggcacctatttatacttgcggattcaatcatcacacaccatg

SEQ ID NO: 116791 - DNA, 627 bp, Heterodera glycines
atcttatgtgcaaataaacttataaatatattttttttcgctaattacaataaaataatgtcactatttggtagtttttatgatccgattggaagctgtgtaagagaaaacgaaaaatttgggataaaagaacatgcgacaagctttcattttagagttgtagaagatgaggacaattatgcaaattttgagcttatcttaaataaaatgttaaatgatgcacgaattagcaagccaaaacgagggtggaaaatggaaaaaatttctgtcgacttttattgtaattgtctcaatggaccaataagtatcccgttaagtccgctcaacaaaatcacagccaacactctttttaatgtatttatgatgcttcctggtgatggaataatacttgacgatattggattaattactataattattagtacttattcatttccaagaaaaatgaatagaaaaataaaaaatgtagcgggaaaaaatgaaaatattgcttaatgcacataacaaatgaaaaaaaagtcctttaaccaaacataattttgaacccaattatcgtattattaatttgccttatgatgtcagactttaaaacagaataaaaccttccaccgaacatttattaaaatg

SEQ ID NO: 116792 - DNA, 604 bp, Heterodera glycines
tagaatgctcagttttcaacacaaaaaatcaccgattaatcaatgtaaacagcaccaaattttcacaaaataagcataaaaaagcacaaaaaattggaaaaaagcataaaattaagggattaaaaacacaaaaaattgaaaaaagtcgtcaaaaaacgtttgtttgctccctgataataaaaaacccaccaaaataggtgcaaaatgggaatgtgagatatatgattttaaaaatcaaaattcttgacaaaaaaataaattacataaatttcggagatgaatttttgataaaattttccatttcttaacggtgtattttctgaaatttttcggatcgcttcttaggggtgtattttacatcatttttattgcattttgttaataaattttttgaaaattgctgaaaaaattttagaaaattcttcaaaatgataaaatagcacaaaaaagcaccaaaatgccaaatcagcacaaacattaaaaaatctagaaaacattaaaatcagcatgaaaaaaatggaattagaagtctcaaagcaaattagaaagaagtttttaatgcttattatcacgccccaagttagcaaaaatttcagcatatatg

SEQ ID NO: 116793 - DNA, 148 bp, Heterodera glycines
taatgtactgtttgcatatggtaacaaagcgaatattaagtacgcactcaagtacccgtttaaagggccaggacattgttatgtcgagtgcaaagaagagtccggcaataaaatcggaattgatgagccggctcaatatgccaagatg

SEQ ID NO: 116794 - DNA, 100 bp, Heterodera glycines
aattaaattcaaatttctctaaaaactccaaaggtttccctcgaaggcaaaaaatgtccacttggcaacaccaaatacaatttttctcattagttaaatg

SEQ ID NO: 116795 - DNA, 1003 bp, Heterodera glycines
tgagttcaatttgtttacaaattatgccaagcatggtcaattttttatgcgtgtttttgtatattaattattagggtgcggatttttaatggcgaaaaagtccaaaataatgccgtaaataagggcgaaaaaaaacgggaaataagggcgaaaataaggtcgaaaaagttacaaatttagggatataattcttcaaattgctaaggactttaaaacgcaaaattttcgaacaaaaaatgtgtttttcatgcatttctcgtcgagttaatgccgcagaaaacataaggaaaaacttagaaatgcgcaccctattaatcataaaaataaattcaaaagaaaacgtcaaaaaagtacagttagtgaagaagaagcactaaccacttaacaaaaaaaaaattaaaaaacaaaagcaaaatcactattttataaaaatttgtcaagatattaaaaaaaatattcaaaattgtatcaattttttgccatttatcccacgaatataccattcttaggagtgtattttcacccccgcgcccccgcgggggcgacggtcgcgggggcgccgggattgcgggggtctgacaaatgagtcacgggggcgggggcgggggtgaggccaaaaaacctgtcccgcccccggcgggtgtgacgggggcggggctcgaaccctaatttcaaatgaatcaaattttcaaaaaatgatctgttaaatttttgggatgtatttcgaaaatttattttttattggtatttctgcatattcaaaaaactttttgcaaaattttcaaatgccataaatatggtaaatacatcttttatcagctgaatttgattcaacaaaaaataaatggaaaaatttgttaggatatcgcttgatgactttatccgcttcttctcgagactacatatatgttatctggggccccatgcaatttccggaagtcagtgcaatgacgaaaagagaaattgaatagatatttggtggcgtcatgtttgacggaaaatg

SEQ ID NO: 116796 - DNA, 85 bp, Heterodera glycines
tccatgatgtgaggcgccgcaaatttttttttttggcattttttcacattgctaattgtgtttttcaacggcacaggtgagcatg

SEQ ID NO: 116797 - DNA, 436 bp, Heterodera glycines
tgtatgcacataaaaatggtcccccccccccctctacggggacactcattttggccaaattgcgtttccgggcccgaaaatgacacacaaaatgctgaacatgacagccccccgtcccctccttaacaaatatggtggttggcggctgggcgtcaggccaaaactgaatgtgaatgatgaagaaaatttgttttaaattggcaaattaacgaacccctcgggggttcttttttgtgtgtcgaatgaaaaaaaaactaagactgctgctgtttaaaatatgaaggccaaattttgaaaattaaaaacaattaagagttgaatgaattttgaggttttaaaaaaaaattggaaaggaatttttcaaataaattttattttttgcgtaaaaattaacataaatgccaatttttgttggctttcagaccatacaaaaatg

SEQ ID NO: 116798 - DNA, 120 bp, Heterodera glycines
taataaaggcccatagttgaaacattggtcgaccaaatcgacgatctctaacgatcaaatgatggaacagatgccaacagcacagtgcgcgagcaggacgactcctcacaatttgaaatg

SEQ ID NO: 116799 - DNA, 251 bp, Heterodera glycines
tttttccaatttttatttttgtttccccccctcattaagcaaatggccggtgactccgaccgcgacccgggcaggcatcatcaccacaggcatcatcgacatcgtcattcagcgcgcacgtttttgagaaatttgggctaccaatcaccgcacaaactgggcagtggacaatacagcaaagtctacaaaggtggttcacaattccatgtgcttttccagcaccatttcccttcccttttcagtgtttgatg

SEQ ID NO: 116800 - DNA, 121 bp, Heterodera glycines
gagccaaaaaacgaaaaaaccaaaattgaactttatggtgccagatgaatgcgaattaactcgagttgaatttccacctcaaaattgcgcaacttttaagcattctgccatttctaaaatg

SEQ ID NO: 116801 - DNA, 569 bp, Heterodera glycines
aagggaaactttggccgcggaagtattgtcgcggaaagcgacaaatgatatattttgataataattaatattttttcctttcattaatttagtatttttctctattttttattttgtgtgttactggttctctccctctttctttctctctctctctatgcgcgtacgcatgcgcacgcgtctctagggctataaaagccgcaccattcgcctattggggcacttcttctcacttctatttaatatttatatttaatcgtcccttctccatttattcacacatttatttgtgactaataaaggaattgaaaaagggagtcaaaaatcgaagagaaagctcttctcgcataagcatacaagggaaaggccaaagcctcttcctttgtccaacaaatcaattaacgttccaaaggggaacgttgaaagggatcgaaatccctttctcttttttgtccattccgcgacaaaaattggagccccgtaggggtcaagctccagtcgtagcttaccccctcaattgagagaagtccaagctttgaacaaagcttgtccaacattcgtaagagatg

SEQ ID NO: 116802 - DNA, 899 bp, Heterodera glycines
tctctgtaataaaaaaaagttggatatctcttaatgacattttatagattattaaacaactatatttttaaacatgtataatttttataaaaaaaatataataaaatgctttctaaaaataaaatctaaaaaaaattaataaattagaaagagaaaatgtaaaagaatgaataattttgaataattttgtaaatcaattggatatacgcaaatgatatgcgtaatatagaaattttttatattttacaattttaatttctctacggcgcccattgataaattagttattttggccaacaatcaattgctaaattggtaaaatggcaaatataatttgaaatgataatattaaagaaatggaaaattttaatgaaattgtttaaaattaaaaaataaatgactttaatgagtggagtggttctctcatcagatttcatttgatctgttcatttggcattgtttcgccgagttccatccgaaacaatgccctcatcaccaatttcggcacctttgccgttttcggcattattgctgttgttttggttggtgtacggtagcccaagagttagcggtggtgctaaattttctgtcattatgcatagaaaaagatcatgaatagcttttgagataacatttctaagaaatttggttatttttaattttttttttcgttaacgagactataactgactgagacttaattttcttaaaaatagatttaatatttgttaataaatcccaaaaattttcaaattttgcccggcgcaaccgttcggcaccgctttaaaagccttcccattcaaaaactcgattgatacaccattaataatgaatgatcctacccttggtaaatctacaaatgacaacaaaattttttccagaatttacgcgttagcatg

SEQ ID NO: 116803 - DNA, 701 bp, Heterodera glycines
tcttaaaggtgggaagaggagttaaagaaaataaacaaaatgattaaatgacaaaaaacgacgctattgcagtttacacgaccataaaataatttgacaactttaatggatcataactttttctagaagcatcaaaataaatattctttgtatcattcgatagttaaagagttctatattagcctgcaaaatttcaaagaatttcgttatgtttcaaaaaagttatgatcagaaaatttaaaaaattgctttcctgaacattttttggcataagtttttgaattttgggtgaatttttttaaaccttcgtagactaatagaggaaggactcttggggctatcaaatgatgccaagaatatttaatttggatgcttttagaaaaagttttaatgcattaaaattgtcaaattattttatggtcatgtaaactggaatagaaaaccaaaaaaacaactcaccactttggtgtactcaggcgaactctgtcgcttccctttcttcttccggccgaaacacattataataataattgcagagaaatacaattgttgaatgattacagatagaatgaaaatgagagttcattccgtctctatttataaaggcgtaaagacaaaaaatggtaatcggcacgaatcgctttttgtgcaaaaaaaactgtcaattaaaaaatttcagggaaattttttgtataaaaatg

SEQ ID NO: 116804 - DNA, 76 bp, Heterodera glycines
ggtgaatcaaattttaaaatttaaatcattctaattaattaaatcattttattaaataaaggtcactccaaaaatg

SEQ ID NO: 116805 - DNA, 1003 bp, Heterodera glycines
caatcaactcggtctgtaaaagacagaattttttgcggcagtcactcttctgtaatgtagacaaatgcattgtaaaaagtgtataaaaggagcgatttttggccgtccatcgccatcaggaatatgagaaaatcagaaaaataactttccaaaatggaagaggaaaatattttttttttcacgtaaatgaaatgaaaataaaaattttaaaaccggaaatgtttccgagaaaaaatcgtaaaacattgcttaaacgcaaccaaattaaatcaaggtaacttcatactatgtatatctccaatgaaaagaaaattttttgttggacgaaaaggaaacaaaaaaaataacacaaaataaatgttttcgtacgaaatgaaacgaaaatctcaattgactaacgggaagtaggtgcatgacaaaatttcttgattcataaacgaattgctttccccactttgccgctatttttaagctcggaatttgggtttttgagatcgctactctaacaacttattgtcgataatatcttccaaaacataatttatgcttcgtccgcatcatgaactcgcaatatctctaagtggttgtggctttctttgttcttaccatattggggcgatgatttgttttcaaaagcatgccaatgtacaaatatacagtatacaaatacgatacatataatacaatagattttttcaatattttacatttggaatgctccatttacagaaaaatcattataccaattgtttaaaaatgtaaaactgcttctttttggtttagtctctcctctctcgtgttaacttttattgtggtgcgtccgctggtgccctaatcgcctctttgctcgttttatcgcctcattcactggaagtactatattatttggtttacattattaatctaattatttttatagactggattaaaccaattgtacagacttgcagaagaggtgcaaaaccaacgcccttttggtgctcttactcctgggtttaatatg

SEQ ID NO: 116806 - DNA, 310 bp, Heterodera glycines
ttatcgatttgtcttccaacaataaattttatttttctgttgttccttgtggaaacaacattggcgacgcccgagtgcatattttgtgctttaccgtgaacattccaaaaagctactctgacggccacctcacataacccataacactaaagttattccccatctgacgcaagcctgaagagtttctcagtattctgactgagtaaagctaagtgtttgttcggtatttgccaaatattgcaagtggcataaatttaattttatatttgttatttgtcactgtcatttcaaattcattttctctatcatg

SEQ ID NO: 116807 - DNA, 980 bp, Heterodera glycines
tttgaaaaatttaataacaaatattagtaataattttctgccttaattaggctgaagaagaaaatgccaacaaaaaatcaatgatttgcataagaattttccagaaagccacgaaaagataaaaaatcatttattaaaaaataataaatttataacaaatgtaatgcttgcggtctctagttttagaattaattatatttttccttgacgcaccttggtcaaaaagtacaaaaaattggtttatttaaattgtaattatgtctattttatatgaatggaagccctatttttttgttaacttatttcggcctaaaaatttttatgggttgcgaatttttcaaaaattcaaaccaattttcagaaatttttgtctatattttcgtactttttgtcaatacttaagcgtttttgttttgatttcgtcggtgtactctcaaaggacccacagacaagggacccacaaagacagaggacccacggacaaaggacccacagacaagggacccacaaagacagaggacccacggacaaaggacccccaaaaatataattaattaaaatgtattaaaagatttaaaataagctgtgagagaaatgccagttactaaatttattcaaattggactgagaaaaatgctatatgacaaaaaatcactaatcttaatgagaaaaatgttacatgaccaaatgctatatgatcaaaaatcactattcctattaatgagaaaattctatatgaccaaaaaccactaatcttaactaattagaattaaattttgccaatggatttgcccgaatagcctgaaatacaataagtgctataaaagctgaactaaatttacaaaattcattaaatataatggctacgtttttccttcacaaatgggcggctacaaactcgttttcgaaggccatatgtaccaaaaaaagaagcacgaagggaattaatttattggcgctgtgaccaaaacaaaacaatg

SEQ ID NO: 116808 - DNA, 693 bp, Heterodera glycines
  unsure (1)..(693): unsure at all n locations
ggttgacctttttggtgtgactcaaggtctttcttttcctctaaggggggnggagangagnaagaaggaggggagaaagtcttatgaagagaaagaaaaaaagaaagagaaaaaggaggaagaaaaaggaaaaggaagaggaaaagaggaggacaaaggagaagaaaagagaagaggaaaagggaangaagaaaagaaaaagaggggagaggaggagggaagaaaaggagatgaaaagaaagaaangggaaaggaagggagggagaaagagaagagaaaaggaaggatagattgaggatttatttttgatataaaaaaaaatagtttagagttaatatttgataagggatatgtaaggagggttaaaatttcttaataagttgagtatatattaggatttgatagtatagattttatgatataggaaaatgaagaaaaatttatgttagatatgaatggtggagtataatattttaaagtttataatcgagatttgattgaagcaatgatgattggtgatgtcatagtatcagtgttacgcatcgtcacaattcgaggaaaaccttgatgaaatagttgaagaacaatttttagcaatacaatatcacaaaattttaattaaggaaatttctgaactcctgatcgaaattcgtacaaatagcgggagcctaatgccattccatatggaatatg

SEQ ID NO: 116809 - DNA, 198 bp, Heterodera glycines
agcgggcggacactatgatccgatcccatacaagttcatggagcactgtgttaaagcatagaattagacattctttttggagacaataaaattgtaatgtgtaattttttattcttaatgacacgtcattacgaacatccattatttatatattttaattcgcacacttattttcataataataatataaataacatg

SEQ ID NO: 116810 - DNA, 152 bp, Heterodera glycines
tcaagaatggaattaaaagggtttgatttttggttggactctctgaaataattaaaaaattgatttttattctatttagtatatttaaaaataacaaacaaaaaacgttggagcaaaaaaatgctgaaacacgagcactgaaagaaaatatg

SEQ ID NO: 116811 - DNA, 80 bp, Heterodera glycines
taatactgatacagtccgatctagtaaagtacctttatttgtacctgtccacattttttatacctattttcaggaaaatg

SEQ ID NO: 116812 - DNA, 257 bp, Heterodera glycines
ggtaggagagagaaagacaggggaggggagaggcggagggggaggagagacagacagacagagtgatggagaaagagaggggcatagagcagacagacgaagcgtgagagaaaaaaggaccagacagcagacaaacagagagaggagagagagagggggagacaaagagattagactgatctgtcgccaaaggtgagaccggactaatcactttcgactcggacggcaaccgccagccgacctttttcgtcactatg

SEQ ID NO: 116813 - DNA, 1003 bp, Heterodera glycines
tataaagtgacatcattctcgtggtagcaattaatgcttaagaagaaataaaaaaatgatgtgaccggcagggcggcaccatcacaaaattacaatttgcattcagaagatttttgatggatttatttatttataaatgacatcattcgaattattttttttttcgtttaaaatttggtttaataatttatttttttgttatttttttaataatttagatgtttttgattttgtttttctgcgcttcgttggcaaatgaatggacaaaagcaaatgaaaatgaaaatgaacagcgaaattgtgagaacaattttaaattataattgaaattaaagtttaaaatttcaattttaaaaattagtggggaattaattgttttggtatccgttaaaaatccaaatggcatgcatttagcgaaccaaatcctcaaagagttggagcagtgctacgttcagttgagcggcattttgagtgcggcgagaagctaccaaaatgaccggcaacagacaaatgggcaaatcgaaaagcaaatcgaacggattgagcaaaagcaaagggcgacggaagggcaaaaaaaacgaacgaaaaaccattgcctaaggggaaaatttgagggcattttaaagggcgaaaaagggaaagagaagtgccaaaaagtgggtgaaaatttgcgcgcaatcagcagaatattgggcatccaacagagccgattaacttttataatggacgcgacaacggacgtacgaaaaaatggggagagataagggataaagccgggggataaagccaaaaatgggaaaagggaggtataaagccgggagatagggccaaaaatgtggaacgggaggaataaagccgggaaaaggacaaaaaatggggaagagcagggataaagccggggaataaagccaaaaattggaggagaaatgaaaatgataatgggatctcgaattcaagagataaaccatttgaatttatttataaaagagcgtttcagctgatg

SEQ ID NO: 116814 - DNA, 110 bp, Heterodera glycines; identical to SEQ ID NO: 98226

SEQ ID NO: 116815 - DNA, 157 bp, Heterodera glycines
tggactacccaagaataaacgaaagtgaactcgcttctctatcccttcggggataattgtcagtgggccgtcctcttcgggcaagacccagctggtccttcgtctgttacggcatgccaacttgatgtttgacccgccgcccaaggcaataggtatg

SEQ ID NO: 116816 - DNA, 387 bp, Heterodera glycines
accatggtattggcatccaagtacaattcagaataatttttctctgctaattattttttaaaaaaaacttcaaatattgtgtaaaaataagtgtcaaaattatttgatgggctaaaatttgaaaatagggatttttaggttcgagcacctaaaataggaattctagggtcgaatggggggcttgaaaaggaagaattttcgcgctacaaatatgtttttcgtgcttttctcattgatttaaggatgtagaaaaataagtaaaaatctaaaaatcaatccgctccctaacggtttagcattttgattaatattttttgttcccaaaattgaatttaaatttgattccatttttgtacagaatcatcatcgactgttgcgtcgacgatg

SEQ ID NO: 116817 - DNA, 136 bp, Heterodera glycines
  unsure (1)..(136): unsure at all n locations
gctgggacggcacatgactaagcacttcgatganagccgattggcgtgccttgngggaggagggaaaggataattanaattatatggcaaaaaaaaataattaaattatacaatattttttgataaaaaaaaaatg

SEQ ID NO: 116818 - DNA, 524 bp, Heterodera glycines
ataagcaaatcctctcttaattctttaattttttaatttttaaaataaataaaattgggcgacaaattaagcgttggggtccaatattcacggcggtgtcgaaatttctgtttagtttcaaattttctggtgtccaaatttccaatgtccaattttcgcgcatcacctcctctaaaaacttaaaatttaatgttattctccaaaatttcaataaagtacagaaaatctatgcgtaagttgacaaaaacccaaacattttttgtgaatattggtccaatcttttttgtatatgagcgaaaatttaaattttgtaaatcatataaaaatgatccgattattgtttttatactgagaccagaattttacgaaaaaatgatcaagattaacacactttcaatgactagttgtctatcttttcaaacataaatacaattgacccatgaaccctggaaatttcctctggcggggagtcatttaggaccgtaatttatgtaattaaaaaaataaaagctttgatttgcatg

SEQ ID NO: 116819 - DNA, 383 bp, Heterodera glycines
aaaatgggttccggactttttggctttttgaaataatttgtgaaaaatatacgaaaattattttagctttaattacgctgtacaatgcttttaagccccgccgtgaggcgggacagttccaaaattttgtaccacattttactgtggaaagtccaagtaccttattggacaactacgtgtcaatgagcacagtcgcctttggccagttgtggaacggaaaaatgggaatatcagatgggggcgctcttttctaaaaattcctcttttcgtctaaccatccctcccttttgtgcactatttcgtttcaaaattgaatcattttttttggctttttgaaataaattgtgaaaaatatacgaaaattattttagcttttaattatg

SEQ ID NO: 116820 - DNA, 328 bp, Heterodera glycines
ggatttgatttgattttttgttttgtttgatgatactttcagcactttgccattttattgtggttaaaatattgttcgaatttgtgcgggaatcattttttgttatgaaatacaaaacaatatcatatttttttatttccaaattttattgttgaaacttgttctatgaaaatggtttcattttacctgtttgttataatattttcaaaaaaatttcaaaaatccaaatgacagtctttgtttattgaatttgtcatgttttttcatgcccttctcccctttattttagttatttttcatttattgtcctaactttgcattaaaaatg

SEQ ID NO: 116821 - DNA, 1003 bp, Heterodera glycines
gtccacaatttaaggccaaaccaaataaaatttacaatattctccagaattttcccttcaaaatgagcataaaatggttttatttgctctagtattcacagagttataagctaaaaaaaattcataaaattgtcgatgttgtacgtaaccaacgcgttttgaatatgattttttattgacacgaaaacttttattaataaaaaaataattctgccttcttctttaaaagaagaaattgaaattaacacacaacataaggaggacttgaacctgagacccctttttgttgactaactcacagaccactaagacgaaaaaaccaacttaattgtacttggagcccaaaattgactcgccgtgtatatcaaaaatttgacaaaaattgcctaaaagtttcgaagcgaaggataaaaaggtgaaacagaaaaaaaaacagatttttgaaaaatttttgaaggttttcccatttaaattgaacaatctcggtatctatcattcgaaagctcaagactaatgggagctttttcaagctaatgcaattggatgtactagagaaagctgtgttgcttcgaatttttctttttagtgagcctttgtttttgtaaaacaattatattttgttcgaccaaaaaagtttctctatctgtattatgaaaaatttgaattggattaaacgtgtaaaaaagaaattaaatgtcatgaattaattcagttttctctcgacacatttttaaaatatttgttttagaacattttgaattataaagttctacttcttcaaaaatgctccgttttttgcacgccggctgtgtgccccattgtcgcatcaaaggtggcacaattgggggaggggtggaaaaatgccaaagaattgcggggggggggggaagtgccgaaggaatttgagaaggggatggaaaagtgccgaacaaattaggtagggaggggtggaaaattctaaaagaatagtggaggggggggggtggggaagtgcttaaaaatg

SEQ ID NO: 116822 - DNA, 154 bp, Heterodera glycines
gcctgctcttgctgcaccatcatcatcaagtgctattggcatcgattccggtgtcaaaaatgggtgccaatcaaaacatcactcgtcggggaagcgtcagattattaatggcagtggtgccactaccggtgccaaaaacaacaacaacgccatg

SEQ ID NO: 116823 - DNA, 944 bp, Heterodera glycines
agcggagggggatataaggcatcgagataagctatcatcaagaggaagcgaccataaggaaagaggagagggaaccggagggaagagagagaaaggtgtgataatgcggcactctcagacatacgacaatcattttcgatttgaaaaagctctgcaaaaatcgcgtaaattttattacattggcattttgaatggcactattttttctacgaatgttgctgaattgtctgcttcttttcaaaatcaaaaatgattgtagaatgtttgtgcatgaatttcagtggaggatttggagtttattatgctaaaaaattgttagagaaaattaaggtcctagtgggtgttaaatcttgatcactcctgatcaccctgaagaatgacctctgaacacagaggtgcaataaacggaacgagacggagggcggacgacccaatctgacgagcgccacaggcggttgactgcggtggtctgaagggcccccgccaatcaatcagtcaaccgcctgcggatcacgcgagaactttttccgggacccagagtctcagcccaactattggccgccgtagtcgaatgtgcgctggttttaagcgcaataaaaaaaaatttaatttttaaatttaaataaataattaaaatttttcactgattttaagcaattttgcaaaatcttctgatttcaaccctaaaaactgattctttcaccagcacaagtttttggactataactttttcattgtcaacccagtcgaataatattgatatcattctaaagcttaaatataattacaacttttattttttttaattcacaaattttatgttctaaaaaaatgaagatggtcatttatgtctaaactgcataagacccaaaaagttttatgtgttaaattaattccacttctaccattcccacttactattactgtttcagataataacgatg

SEQ ID NO: 116824 - DNA, 581 bp, Heterodera glycines
attagtccctaagcatatcggaagttggaattccgtcccaccgcggttggtttgaaattttttaaaaattctaaaattttcttagtttcaaaatagtaaaagttaaatttactttaaatttttaagttttcccaaattcctacctttcggagcttttaacaaactttcataaagaaatttttgccctattttgaaacaattgcaaataaaaatgtattaatgagttttatactttttacactcttaattgaggacaaattaaaaaactatattaattttagaactttttaaagcattttcttaaatgtccaaaattatttccaaaatttttcaatttttttgcacatattttcatcttttttataaatttatcattttcattttaataatttaattttaaaaaataagcatatgatttttaattatgtttttattactttttttgtttctcatcaatttttattttaatcacattttcaaatgcaattccatcggtgcgttaatactgaaaaaataataagttaatatttattgcgtttttattttatttgataatttaattaaaacagaaaaacaaaatg

SEQ ID NO: 116825 - DNA, 111 bp, Heterodera glycines
ggtgaattttttaacatactttttgttttgtgtaaatgctgattttgagttgtaagaaatgaaattaattaaaaatattcacaattaaataattgaagttttcgtcaaatg

SEQ ID NO: 116826 - DNA, 497 bp, Heterodera glycines
  unsure (1)..(497): unsure at all n locations
taaaaatatgtnnttaagaatatatacgaattatatatttttcttacgtttttcttcttttttgattaacagttattaaataatctnttgtcttatgtgtgtagatatcttaaaaagataaatttgtaaattaaatttaaaagatctttgtcagctgaaataattttaaaatggtcatattaataaaggttaaaattttttataatcaacataattcattttaatctttttaaaccataaatattctttttattaatttaataatcttggggggttttttttataaatattacatatgaaggaatgtgaattcattaattggaggtaatgatgaataatcaccattgctaaactatttggtaacgtgaacccaccaaaatcatttcacaaatcacattctcaaaaactaaagaactctgtccaaaaactaacagtttgtttaaaataaggaaattatttttattttaataagaaaaatattttttaaggctaaaatg

SEQ ID NO: 116827 - DNA, 899 bp, Heterodera glycines
atcaattaccaccaccgtaacatttgctgattaccgtatctttcatttgtcacttctccaccccgccacttcattttgcattttccataaacttttctctttattctctcaaattattaaatagattttgtttttttaattaattagttctcgttaattacccaattaacaaattgacaattacctgatggacgcgctttcttttcgcactgccaccccagtgattcattcattcgcccacttttttctttctttttctctctctctctctctctgtttccttgtcattgtcatttaccacaaaaaagtaaaggtttcgcttcaataaataactttttgatttaatttgctgtaagccaacaaattaatttgcggtttaattaaaagtgatttatttggtttattggttggttggtttttactaattgcacatttgaattggtgcattgaaagtggaaattgcattttggcatccttttgaattctttcctttgccgttcttttgctttgattgtgccgccattttccaccaaaattccattttctgtcttttgcctttcttcagagagactttcaataagcacaacggaaaagccgctgccttcgaccattgagccgggactaaaacttggcgaatttgttgacatcgaagtcgaaagggaaaagccgcgggagggagcggttggagtggttgggcccgatcagatgctaagaacggaggagcggagagggaaaaatttggaggagggaaaggggacaattgaggaggaaattgaaaaagtaagggaattaataatagaagaatgggaatgatcattggtcggaagacaaaagataattcaggaggaggagacggaagagggggaggggacggagcggggccaaggcgcggaaccatg

SEQ ID NO: 116828 - DNA, 875 bp, Heterodera glycines
cctgaattattattctacaaatagtgaaactttgtgtaaacaaatgtgccaaaatctaaagtttttgcttcctttgaaaactttcttaaacataatcactgattggataaaattttaaaaaaaagcttagtggtgctaaatatatttttaaaatttaaatttaaatagaatcccataaagtggtagatgatgttgtattacaaacaatttaaagaactacccaaaaataataagattatatattttttgagataaataaaaaaagcaaattttttagttcttttttaatagtttttgaaaatttccgttgtttaagcctcataatataaatcaaaaaaaaaaatggtttccaatataatttaaacacctataacaaatatggctttgaaacgaattaaatttaacaaaaaataaaagttgaagatgttcctccctctgctcgattcaacacaaactttttttgggtcctcccaaatttacttcaaaaaatcgatggatttttatgtttttatttttgaaaaatgaatttttttattatcaaaataatgcgatggaattggacgggcggtgatcagacagccgacagacagtgggggcggctgtcaataacaattgataaggcccaccccgttttcacgcattttcagcgcctaatttgtcaataattggtctctttccatataaaaataatcaatacaaagccctattagaataaaaataaataaatatgtgtgggcggttgctgcactaattagctaattaccattaattcgcgtaaattattgattgcgctgtttgccttttattggccagtcaaagcattcatcacttcagcagagattatatggatttcaactaccttgagctcagtaatg

SEQ ID NO: 116829 - DNA, 1003 bp, Heterodera glycines
gttgatccatttgtgccatttgctgcggcgacaattgggcatacgccacaatcatacaatgtgttacgaaaccattgtcttgaggcaatttttatttaattaaattagggttgcgactccgaccgtcggggttggaaaactcggggttcgcggttgtcggggtcaccaagatcggggtcaggatcggggtttttcaatttgtcttatgccatacatatagtcaaaagactttctagtattttggcttaaaaaatatttattaattttcataataataataataataataataataattttatttgcatttatttttttaacataaatattttgtatagaattaattataaaacgcctatttagtgcatagaaaaaaaggtcataattcaaaagcggtctctagttataaattaaaaaatttattatattaaaatattactgtggaaaaaaggcaatttctagaaattaccttttaaaaaataaattatatcaataaaaatagtagtattttattcaaaaaaaaaaatttcttttagatcactttttttttgctttccaaagcaacttttttaatttttttaataagatttacgaatttttgggtacggcgatgccgataggcagcgccaggcgaattttataatttaagctcaattttctaacatatttttaccaaaaaatttataaatttccaagaattttttgttttttcttggtatttttcaaaaatatttttaaatatatatgaaattttctggattttgtcaagaaaattgaattttttaatttcaacgaatggaaaattggcttcaattcgtcaatgaattatgccaaggatgttttatagttatgggttggttaaaattcaaattcgtgtaaattttttgcattttctcccgcgaaaatgcaattcttaggggtatatttagccccgacccgagtcggggttaaggatcggggccggggttgtaagcgtaggggtcggggttaaccccgaaaaatg

SEQ ID NO: 116830 - DNA, 639 bp, Heterodera glycines
aaatttaaaaaatattgaaaataatttttggattcagggaacaaaattttgttgtgcacaaagaatataacgtaaattacttaatttacattaaaaaattaaaaatatttattcattcaattcgtccaattagtgctttttgcctataattattaattactaattaattgtggacaagcctagtctatttaaaagcaaatgattgtgtttaattggaaatcattggaatatttttgtagcagcaaatttcacactgaaaatgtcttcttcgtccaccatttttgttgttctgctggtaattgccatctgctgctgttcattaacaattgccatgccagcagcggtcaatgaaattgataggtattattttattttgattttggcattcaatttatctccctaatggctgtgggcgaccaattctggcactttttggttggctgtgcataaccaattccggcacttttagcgcagggatttcgtattccgcaaatttctagaaaaattcaagcaaaagatttgaatgcttcaaaagtgcaaaaaatatttattaattttgaaaattggtggtttcgaaatggattttattttttatatattaaattttaagtgttccacttcggcaaaagcgtggctatg

SEQ ID NO: 116831 - DNA, 122 bp, Heterodera glycines
attttatatttgtttttatttattgtaataagactgaccgattgaattcggcaaaaaatacatttcttattttaaaatgaattaatggttaatttggaaaacaaacggaaagtgatgaaatg

SEQ ID NO: 116832 - DNA, 128 bp, Heterodera glycines
attagcatcgattatgcttacgattacgtatcctatcaagcaattgatgtaggcttttcctttatcaatttaatggcattttttaaatgtaaatttcatttttagttaatgatttctttttagatatg

SEQ ID NO: 116833 - DNA, 88 bp, Heterodera glycines
attaattaataataaagaatatttttaaggcaataaattacggtatttatttgcgctgccaatttgttatggctttgcaatagccatg

SEQ ID NO: 116834 - DNA, 426 bp, Heterodera glycines
ttgtcggtggttatcgatcgcttttcagttgagtgttgaaattggacgatgaaaaccgcgtattgcggaaccgcaacccgcctagggtctataggtttttcggcgattgaaaaccgcgcctagcggaacctcacccttttagggtctattggttttttgacgcgatgaaagtcggcggtcgaaatgtggacggtttgttttcgtccacttgaagaccggcggcagaatgttgaaatccacaaattactctcgcctggagatgtaataaatgaataacaaatgcgctttatgtcgtttgctttttagctgactgcgccaattgttcggtccgagggatttgtttaagtccaattaaatatttatttattggagaaggaaaagaaagtcacaataatttggggaacaaatataaaagcaaaatgaatg

SEQ ID NO: 116835 - DNA, 224 bp, Heterodera glycines
attgaataattgtcattaatgacatcggcatttttacccgttcatgcaaataaacacagaaatttgaaggtgaattcagtgaattggtccaagaattggtcgtaaatgtcatcgatcagttgaggttcgattggcttttatattcgaaacttttttggcattatgacaaaaaaattcgtttgaacgttgaaaattttgcgcgaaatggcaaagtgtcaaaaatg

SEQ ID NO: 116836 - DNA, 983 bp, Heterodera glycines
ttatttaaaaaacaaaacatttttaatgggattgtcccccctagcgtaaaatgatttccaaatcttattttaattttataacctgattatataacggaatttgtggacggaacttgcggataacccaatggtatgagatgcaaccgaaagcccaaaaggttgcagcggtacagtgcttaaaatgatggcaaaaattttcaaaatagtgtcaaaaagatgcataaagtttgatagtaggaaaaaaatatttgccgagttagtttccaaaattttctggagagaggtgagtccgcggttctagcaggcgccgaagtgaaaatttcaaaaaaattttcaaattaaaaagtcagcataaactttctcatttataagcaatcaaatttttatatcattcgatattacaaactgtctgcgaattttgaactaaatttttgtttggcttaaaaatttagaataataccctgaatgtctaatttgattgtttttaagaccaaaggaaggcagagtttttgtcaaaaaaaacataccaaagttgttccaagaaattgactagcaacgaaatttactccatttctttaaatgtccgcaaatgttgggacgcgaaaaaaacattaatttataaaaattcaagccaaaattatgggagttttggcgatagtttaggccctttgaaagcttacagcgaaaacattttacatttattattttctctaaaaaataactacttctttgtaaataatatgtataaaaaatatttaaatgtatccgagaatgcctattaaatcaataaatgccacaaaatccaattaattagtgcacttaagtattaattaaatcataatttattcatgtgtcttccttccggattttatatgacactcaaaaatataaaaatgaatgcttttcttttgatatatatataattttttcagtaataaaaaaaattaaattggtaatttttcttagaattaatttgtaaaatg

SEQ ID NO: 116837 - DNA, 723 bp, Heterodera glycines
ttcataaacagggcttcggtttagaattttcaaaggctcggttttgaaaagtttagataaatttgaaaattttgtgttttctaagccaaagaatttaattgtgataaattttctgacaaatgaaaactttttacatttttgtacaattccagaaaatttattttgttgaagcatttgatcatgcagcagcacacgtacacggaacagcctcaacgccaggcaattaattaatcgaaacttttcgcaatggcataaaccaattggattttgtttagaattaccaatactacccaaatccgcctcccccggtggtgtaagtgccaattgttaaacaatttgaaattaaattaatcagtagggataggaaggaatttgaggcaaattgttttttttaaacaaaaatcgtctatttttaaaaccaattaagcgcactcattagctgcctaattaggcactgccaaattgcttaaggtacgaacgtcgttacgtggagagggacagcggcccgcgctgtgtgccgtgctgctgctgcattccgtgcattccgatccctttgtgcttcgactgcggctgctgaacaccggcggagaagcaaaacgaatgttttgggaaatgcgcgaaaatggaaacgcttttattacaactcatcactcaattaattacataattaattgtcattaatacaaatttacatttgtgaataaattttttcagatctttatg

SEQ ID NO: 116838 - DNA, 290 bp, Heterodera glycines
attttgaaaaatgtattattttacaatttatccaatcaatatttatcaaatatattttttctacctctcattttttattttaaaaagatttttttgcggcgcatttttcaaaaaagcatctttcattttttattttaaaacatattataaaaattaaattttttggccgatccttttatttaaagctgtccttttaaacggtattttactgtatgtattcttttaaacggtattttactgtacgtattcttttaaacggtattttactgtatttatttaatgaccgtatg

SEQ ID NO: 116839 - DNA, 251 bp, Heterodera glycines
tttttaaatataaaacaaataattatttagttctatttaaattagtttgttgtgcagtgttgtcgaggaggtgggtgggaagagaggggaagaaacaatgcacgaattcggtcaaagggtaaaaacgcatggaattgcgtcaaaatattatttcttttttgtccaaaaatgcttttggattcgttatttaaatgtcgagaggaaaatatcggactcgctcagttgggccggaacggttgggccccagcatg

SEQ ID NO: 116840 - DNA, 1003 bp, Heterodera glycines
aaaaattttttagaatataatttatggacaattagcaaaattaatattagtacgtatgcattttatgatttacaaattttgaagtagatttttaattttccagaaaattcctgagaaattgtgaacaaaataaaatttcattaaaattatgtcatactaaaatattattatactattttatattgtttttctaatccacccgtattcaatggacgataaacaaatatttccggataaattattgaaaatcaatagacaaaaattatatgccacaaaattatattaataatgttgtttacggaagtgatggatggcaaaacaaaaataataaacatgtataaaaacacgaaaatagattttaaaaaactagataaattatttattaacgaatttaggtagcaaattgaataaaaattaatcatgaaattaatgttggttatatttctattgaaaatgaaattattatattttaatgtttttttcgtataatggaatttttaaaccaaaaattcatgtgaacaataaaattttatgggatgaatttctgatagtttctcactcatttctttgaggtgtattttctcagtttttttcgggtaaattcttagaggtgtattttttttaaatttttgttaaggatttttcagaaaatctttaagttaggcaacaataatgtaggaaaaactcacaaatggttcagattttactttggacatcgataagtttttttttttttgctatttccatgttaataattaatttgaaaagtttttcgtgataataaattttacgtaaatgcaaaaatattagttgtctcctttttttaattttttttttaattcattatttaaaaaaaaatcattaaaaatttaattttttctctcggtgccgaaccacaaggatttgcacatttcaaatttcatttaaaacgaaattcaatacaattaaaagaaatttaaaagaaattcacaagacaattttattttttcccaatcaaaaaatg

SEQ ID NO: 116841 - DNA, 266 bp, Heterodera glycines
agtcacggaactgccggatcatttggacggatacgaaatctgttattgatgcccttctcatttctcaattttggttggacattgaggtgccttcattgccaaggggtgcaatggggcggtgcacgagttgaaactgcgcgtcgccgacggacattcgcggcgcatcgctccaatgacttctcagaaggcaaattcggcacttttaagtcaaagcttaaagaacgctttaaaattttaaggaatttccactcgccctcaaaataatg

SEQ ID NO: 116842 - DNA, 239 bp, Heterodera glycines
ttcctcactttcacgtatggtcaagaattaaagttcgatttcttttaaacaaacatataaataattttttgtttacaaattttaattttatgatttttgagcaacgatccattaccaaattaattcttgaatttgtctaaatatgtaattgggtgtgcttcattcatttagtagttgcactgatgagaaatgttggcggtggccgatggcaacgggcgcaacacaaacaaaagaaaatg

SEQ ID NO: 116843 - DNA, 712 bp, Heterodera glycines
atccatatgatcacttcataatatcatttatagggattacatttatagtttttcactatttttttcctgagctccgcgtggcctgaaatgcacgaaaaacatgtttttttcggctgttgttaagctacttttcgagttattagcaactattttctagttttttatttttagcaactaaaaaactataaaatttttgaaaaaaactattttcaactattttggcgttttgcccaaaatttgttaataaaaatgcaataaaaacgaaaaatgcacccctaagaatcgacgcaaacattttttcaaagaatacacccctaatatcgaccctaaaattttcaaaaatatacctatgaaaaaagaaaaatttctcaaaaattcatctccaaatttatttatttaattttttgacgagaatttttgattttaaaaattatttatattcttaatgatttggcaaaatatttttgctttttgaagaaaatttttgattttacaccccctaaattcggaagtttttagcaactattttgggggttttttagaaactaaaaattaattattttggcagtttttagcaactataaatgtaatccctaatcatttatcgtctaaaatgaatttgaattcagtttcttgaaactgagttttcactccacggaattggcgttaagaatggcgagatgcatcacataaatttcccgactttggcatg

SEQ ID NO: 116844 - DNA, 1003 bp, Heterodera glycines
ttggatttaatttccgacataatcaattttttttcaagagatattcaaatcggaaaatatttgacgaaaaatagcaaaatatgcaaaaaaatctgaaaatatttacaaaaaagtgcaaaatatgcaaaaaaatctgaaaatatttacaaaaaagtgcaaaatatacaaaaaatctgaaaatatttacaaaaaatggcaaaatatgcagaaaaccgcaaaatatgcataaaagcttaaaagtcccgacttttatacgtaaataccaaaaagatgatgtttttcctactaaataggtgattatggtgaagtgatgtactatccatcattggcgaataataggataatgatctttattgcgtaaggacaaagaaatacatcattgtgattccccaactcgtaacgggaaaggggaggttggtcgggatccggatccgacaaaagtggaaaggggagttcaaagggaagagtttatataagcggagtcataaggggcggggagagtacaaagggaccgccccccgtaaagcaaaaatgtagaaaagcaggaggggccaaactaactaaagagtaacaattggtcatcgggggccccaaaaattgaccgtctcggtcaaaacacaaaatcaattaagctaagaaaggagatgatggtttaatattttttgattaataaaattgttttattattattattattattttatttttttttttgtaaatattaaatattaacagggcggccaagtgtgcttatttctaagatttgtgcttattttgaggggtcggatcttagaaagctaaaatgtgcttatttctaagatttgtgcttatttcagcattacgtgcttattttgtgcttatttttgggtttgaaaataaaaagaaaattttgaatgacagttttgacttatagttttttattgaagcgaatacttgaattaattcgatttttgaaaaaaaaattacatttttattttattttttgagtgaaattcacaaaatg

SEQ ID NO: 116845 - DNA, 181 bp, Heterodera glycines
atggcatgaagaatttctgattggaacatagccaaaggcaacagagggaccctggcgttggaaattgagaaattttcggaatttgcgcgagagggagtggggagcaggcgaaacagtggcaccgatgttttcataaatggacttccgtggaaaatacttgcacagattacaaagaaaaatg

SEQ ID NO: 116846 - DNA, 174 bp, Heterodera glycines
caaaattaaagcgaaatataaaaagagagcggtgaaacagcggtggaaaaagaaagagaagcgaagacccaaaatggcacaaagcgacgaaagcccgatggcccaagaaaagtgagttttttcacacgcaattttttggattcaatttggaaggtgctaatttttcaggagatg

SEQ ID NO: 116847 - DNA, 1003 bp, Heterodera glycines
atcaaaaataaatattacgtataaattcaaaaaaaactaaaacttaaacaatatttgacagaattgttacttatctgataaaaatagttatgcttttattttttattttgtataattattattatttattagttttaacatatttgactgttttatttgaattatcataaatttgaaaatgataatcgattaaattacaaatgtttttgaatttaaacccatgatttgaacttttattaatgattaaaaaattccaaaaaaaacacaatgagaaacaatgattttgctttttttttgagacgacaaacaatttactgtactacgatctgtcgcataaattgtttgcgttcaaaaaattggacatcaatgaggtttgccattttggcgctattttattaaaatagactggatttttgttagtccttcttgttcatgaatctgacatctcttaactaattttatactttcctcacctaaatttgaaaagaaatttcctaaatcgaaattttttttatttttttttgaattttcccgttaaaaaatttaaaatattttttaattttcgggtaggggatccccggggagggggggggggggtatgctacacggggtatgtaccccctggaacaggacaaaacacagcctttgaacacagtcgagacataatacagccgagaataaattttttttaattttcaaacttagaaatcttattgttataaaaaatttttcttagaaaattctaagaaaaaatttttttattttccagcgatttttaaaaatttaatcataaattactatgttttttctaagattttttctttaaaaatttgcttgaaaattttttaaaaaaattattctcggctttctcgcttttccttgttgttgaagcccttgaagacacacatcacccgaattaccaaaaaaatttcgaacacaaatttaaataagaacagaaaaatttccagccactttttaacatatttttgccttttgcagaatg

SEQ ID NO: 116848 - DNA, 216 bp, Heterodera glycines
cccccaaaatgcgcacaataaaaggcgagcaaatggcataaccaattcgttggttgttattcattataattgaaattcataaaatatttaaagaagagtttctgttgccaataaaaaataactttaatttaatttattttattttcatttaatttaattttctttcctttagcagatccaatttctaattcaatccttctactacttcccaaaatg

SEQ ID NO: 116849 - DNA, 76 bp, Heterodera glycines
tagggaaggctttagcacaaaataaatattattttacataatttatggcactttttacagggtgatgatgatgatg

SEQ ID NO: 116850 - DNA, 88 bp, Heterodera glycines
ttttgtaaaaatgattttggggcttgagcgggtaaatttaatctgcttaaagtgggcggagtcctaattctcaggtatataaatgatg

SEQ ID NO: 116851 - DNA, 510 bp, Heterodera glycines
tgagaaatatttttttttgcaattaatttatatacctaaatgcaaaataaaaatttttttgcacgtctttttgttgaccgaagtttttttttctctatttatatgcaaaatttgtacaaattggtattgatggtaaaaaagttaattggagagaagaagcaaatgttgttttttacactgttaaaaatgaagggaattaattttcaattcattttattagaaaaaaagagattaattcaatccatcaaattcttttctggtcttagcctcttttttaggtcatcattttgccgtaattttttgtttgtgccctcccctaaaagaatgtctccaatttgtgtctctttttccaaatacacttttttagttatgtacttttatttgtatatttaccatttttaaaaattttatttttattaaaaaatggagattttcgaggagacaataaaagatgacataattgtcatcattttatgtatcataatctaacaaatatttcagtttatcatg

SEQ ID NO: 116852 - DNA, 681 bp, Heterodera glycines
  unsure (1)..(681): unsure at all n locations
gtcagttaagtcggtccnaagtatctaaaaaattttgataatttagacttgacccttttttaaaatatcacgtgtatatttccttctccaacaatttcttttttcggtgacgcggtttgagagctggaaaaaacaaaatttatttaaggttctttatattattataatttttataaatttaattttaaataattcactacgacaggaatctaaattcccaaaccggaagcgagaaaaacaagcattggcaggaatggggggggtctgatttgtgaatggtaaatattgacggaaattgggagaaaaaaattaaaaatatatattttttaaagcattagcaatttaatgaatatctaaatagcctattcttgagtaaaaagaaaaagaaaattttttcttaatcgaactaattaaatacttgcaaattctgttcattaatttcacgatattttgcattaatttttaaaaaataaaataaacctacaaaaattactattaaaaaaggtgtctaaaatcaaaaaaggggatatttttactgcaaattgcaattattatattatgccaaaaaaaacaaaaagagtgctcctaatggcgaaatacgtcacaattttctccagaagaaatcctacaaagaaaattaggattttggtcttctttgacccaggttcgcaagtaaccatg

SEQ ID NO: 116853 - DNA, 467 bp, Heterodera glycines
aaagtggttcaataggttttggttttgaaacacccccccatcgtggattttttatggggcggcaaattcaaagggctgcgccttcccataggcacgggctcgtgcgggaaacacccgcaaccttttgggactatatactacttatttcattgtcgcattaattgttttttaatgcttattctttaatcaaaaatgaaaaccaaaatggcgaagaaaaagttttaacgataaaaatgctttgtaatcattcaaatgcttgtctggtggaattttaccattttttaattaaaacacaaaaaaaagctttttttcatcgcaaaatttgtttcacattcattgcactttcattccttttgtcatagaaataagcacaatgaatgtttggtataaattgataaattctttaaattataattaaattaaatcccaaaaattcctccattattgaaaaattaaaattaaaaatg

SEQ ID NO: 116854 - DNA, 365 bp, Heterodera glycines
agaaaaaatttaaaaattttttatccctaccagtttctcccactttctttccggaacgggccaactccgtctggccaactccgtctgagccaactttgagtaaatataactcttgaagttattgaccgaatcaaacaatcttgatatcattcgaaagctcttcacaggctctattagcctactaaaaattacagaaaatttcgaactataaaaaaagatagaaataaaaaacttcgaaaattctgccttttttgcggttttcaactgacaacttttttgagagctgattaatcactgagaaatagcttataaatatcttctaaacatctagggcttttgaatgataacgtgattgagcgaaaatg

SEQ ID NO: 116855 - DNA, 52 bp, Heterodera glycines
ggtcttttggtcctatttgatacaatttgagtattttaactcatccctaatg

SEQ ID NO: 116856 - DNA, 797 bp, Heterodera glycines
tttgtttccgggacaggaatccgagtacttcccaaatttatcctttgtcggtagaaattttctcatcaacacccaagttttcctaaaaatgtaatcctctacctttcggcggttttgtatgtgtttttgggtctcaagtttcgagtgttttcattctttttcgggacgttttgcattttccacccattttcttaaccccccactcaatcgcttctctgccaggtgcagccgcaacaacaaaatgtccccacgccgagtcagctgcagttgttgccaactcgccatgacaacacgtcgtttagcgactcatggccaatactcggcggagcgagccaaagcctgacaatgcgtgcaagcgagacgtttcgaaaaacaactcacccgccaccgaatcttgggcttcatctgtttggcattcaagaagtatttcttaggatcacaaacaaacaaaaaatacacagttgcgggtttcactttactcaatcaattaactgttctagaaacattcaaatttaacattcttggaatcattcaatcgctcgaagaattcgctaatggctacataattcaaaaaatttcttagcttcaaaaagattgaaccaaaaaattcaaaaaccgactttcgaagtcaaagaatcaaaaactgactttctaaactttttttaaaaaagatcccgctatgggattgaaactcaaaaattttgcggacggcattccgcagggataaatcccgcgcgggatcccccgcacctggctctaaatcccccttccctcttcgtcaacaggaggcgaccatg

SEQ ID NO: 116857 - DNA, 430 bp, Heterodera glycines
tctttaaaattaaaaaaaaatttgactttttgtaaaactcgctttttcaaaaaattttgtcaacttgaaaaacccgaaatattatagtaaggaaaaataaaaaaataaaactttttttaaaaattttgcatccaaacagagaggatttcaatcagttagagctacaaaattttactttattgactttgatatgtatgaggaaaaaaaacccattttaggcattgaatttttgtttttgttttttttacttttattaaatacaaaaataattaattaatgttaggtgtaccatgtgtactactcaaacaagggtgcacgttttatgaacaaatttggcaaagtcattgttaatacaatgacagtagctggcaaatttttcaaatattgtggtggtaaaattgcatggggcgtgtcaaagttggtcgaaatg

SEQ ID NO: 116858 - DNA, 273 bp, Heterodera glycines
tgaggttatcaatttttcgaatgccttattggtttgagattttttgggggagggagaagaagattgggctttggaggcccccttcatatttatagtttttattgattgattgggtaaaatatggatatatgaattaaggaaagtttttttttttattttatgaagtaaagtttttataaaaattttatgatttaattaagtttattggagttttttttttttttttttttttttaaaattgagggatttatattaaaattaagtggtgaaatg

SEQ ID NO: 116859 - DNA, 1003 bp, Heterodera glycines
  unsure (1)..(1003): unsure at all n locations
tttcggacggtgtgtttaattaaccttagaaatattgatggttttgatgggattttacgaataataaatgaatgagaatggcgaattctgcgggagagtgacccttttctgaagggcttaaaagggaatgataaactcacaatgaaacactgctaaagtgaggggagggaatggacaacgccgtctttacattggccatcccccggggggggggggaattcgaagccaatgcatttggcatgcccaattcgccagcagctgtcagttgggactgacaaaaattaaataaaaatggccgaatgaatgagtgaaaacactaatatgtggcctttggcaaaagcaaaaattacacaattatttgaaattgcaatggttggggtcggcggtgtcagaagatttgcttaatctctgccggagccgctgatctcttttaatctttgtcggccgtcatcaaaatgagaagatgagcgtgctgctaatgctatggaaaaagtggtgatggaaattaaatgaatattattgtaattagggtttgaaatttttttttgtgagtagcgacagccgaatttacaaagaagcatttgaaaataccattgaataatcaaatgaaatatttatggaaataaaaaaacaattagcgaatggatgttaccttaaangctcggaattttgaaaaacctaatcaaaaatcgtgaatctcaacctgacttaaaaattctatttatcctctcctggtccgggcgcttttttcaaaaattcgtaacacccttggaaattttgacagggtccggcgagctccgatttctgatagttataaattaaatatttttggaaatatttaaaattaaattaaaataattcttttatttttctctctttcttttcattttctctttgcttgtccgatggtttccatggcttccgttggtgttgtaaacattcagcagaataaatcctttgcattttcccctttaaatttcttatggtcctttcggatcgaatg

SEQ ID NO: 116860 - DNA, 347 bp, Heterodera glycines
tttttcatctaattagctcaatttacttaatttggtttgttagaacacaaaaatgaattagacagaatttgtgttccaattataaccaaaggcaccaaaacgaatttggaaatgcagcgaaaagcacaaaatataaaatttaatttaatcttttcttcctccccgcctttatttttgtgtctcttctgtgttttgtgcctttccaattgcgcaccctataaaagggcaggtcaaagtgacaaattcaaactcaaattcaaatcatcatcagcaacaaaaacagcaacaaattcatttaaattcccacaaataattaattaattaattattttattttctacaaaatg

SEQ ID NO: 116861 - DNA, 579 bp, Heterodera glycines
  unsure (1)..(579): unsure at all n locations
acaaacagcataattaaagctgttttttaaacaactgtctgccagttattntggagtttaaaaaaaaatttaaattttgattattattcattaaattaaggtgaattaatgaaagaatgtgtcaccgatttttcaattctacgaatatttttcgaaacggccaatttcattctgcaaaatgcttacatggccaactttgaggaacgtgccgaacgtttagctgatttttggagccaattctctaaaaatgaacattcgaaaccaccacaaattggcattagcactttccaaacgaaagaatcagaaataagtaaaattcttgtgattttttgaattaaaatcatcatccaaaacacagactttcaaaaaataatgggagataggacccgactagacgatataaaaaataaaataccttcagagatactttatgccaacaattttcacactttaaatactaaaacgggcgaagtgttgctgaaactgttaatggccaatattagtggtcgcattttgcaaaaaaataaattgccaacatttgaaaattgtgatgaaattgccgacgaattgggcaaaatg

SEQ ID NO: 116862 - DNA, 316 bp, Heterodera glycines
gggttatggttttgtttgtacacttggcagccgtacgttgctcctgttttatggaagttaagggtgggatgtctgagcaaatgatgctcctctcaaaagtgataaaaattaaatgtggtcattaatttatatattatatgacatgaaaagagtattttttcaaaattttcccggttttaagtatattttggacgatcaagatcacaatgaagtgaatgatctgattaagttaatgctaatgactttttaatcatcataaaaagatatataaatttgtttgaccataaaatattcagttttttaataatttataatg

SEQ ID NO: 116863 - DNA, 830 bp, Heterodera glycines
accgaaaaaataatcgacatggaaaagggggaggtcaacataaaatgtaagttattgcatttattgaaaaaccttcccccctccccccccccctgctgaattagcctgaaaagcccactttttgaaaggggttgaaatataaagcccctggggcgggggctcaatttcaagaaaaacggcaattaaattatgtctttaaagcccctggtgagggggctcaatttcaacagcaattaaaattatatttttaaattgaaaaaactgaattaagacatgtttcacaaaatggacacaaaacaacaaacaaagggataaagctgaaggaaaagcgaaaactcagaattaagagtagcaaagatatgggaggaatgagaagcaaagttaaaaaattgatcatgtaagttggcgcgggggatcaatggtgggtgatcactgatcaggagaaattttgatcagttctcgttggagccatgatttttttaaaacaaaaagtaaaacaaattattttttcaaattatttaaatttttttttgcactttatttaaattttatgttgaaaaaaagcatagaaaaataaaaaggaagaaaagtcttcaaaaaaagtaaggtttatatgctcaaactaagcataactaatgtaagaaaaaagaaacccaaaaaatgattgcttcttaaatgtctctaattagtgtgaaatttactaattttaaaaattaattgatttccatgtaattaaatttgtgaagcatttgttcatttttttatattgcctttcatcaaggttctttgctttcttgctgctcagtgtgagcacgtatactgacaaaatg

SEQ ID NO: 116864 - DNA, 893 bp, Heterodera glycines
ctcatgctgcttggattcttgaccaaaatgtggaactaccgttccttcatgatgagtccttcttgaaaattgatcagaatttgttgtgttacattttggagcgtgatcagctgaggatcgatatggaaattaaaatttggcgagccgtaattatttaatcatttctttacttttttattttaaatgttcaatgattttaggcacttcgttgggccgatgaaaaatgccgtcaaaatggcattgactgttcggcgcaaaatcagcgtgcgatgctcggcccggcactgttcaaaattcgttttgcgctaatccctcacgaagaatttgtgagaaaaattggtaaataaataatatttcaaagcatctgaatagtttttgtctttgtggctgccataatgcaattctatcatttaaataaggaatataaaaaggtataattttatatttcaatcacttgattgaaaataaaaacacctgttttctttttccccgttattactttaaggacatttgatttttggcaattatcctcatttataattttttggagtaggcggagtcaaaaggatttttttgaaaatgaggatttgtgttttttcaatcccatgagtttacattaattagcccatcagaatagagagagtttccacaaaatgattacaataaacgagtgacaaatttgctattttttatcattatccatacttattttggcttggcactttattttgaattcagttccttccggtctgttgtcccaggaagagttggacgacgtttttctgtgcaattatcagctttccgtgccgaatttgccgcccgaaagggcggcgcgcaaatttctattccccgcccagcaacggtttctgtccgcgccgattgaccacaaaatg

SEQ ID NO: 116865 - DNA, 1003 bp, Heterodera glycines
tggctaggttccaattacactcattctcattgatttgtgcgccaaccattttcgtcataaccaaatggaacaatttctcgtccgccattttttgcaatacgttgtctgtcagtacaatgcgatatacaacacagagagaaatagagtgcacagttaatcaatttctgagttttggctagatggactgcgtttttggctaggtgccaattcactcccgtatttatttattcgcgcgccaaccatttccgtcatcaccaaatgcaaaatttttcacgaccgccaatttatgtgccatacggcgcctgtcagtacaatgcgatatacccgcccaaagagaaagagagtgcgtggtataggcatttggttgagttttggctaggtaggcagagtttttggctaggtgccaatttactttcgttcttattgattcgtgcgccaaccattttcatcctcaccaaaggctacaattttctcgtccgccaattatcgtgccttatgatgtctgtccgtaccttacacacaccaaacaatagtgaaaggggcgtgactcagtcaaccatgcgcatactttgttcgctaatctcggtaccagccggtaccgtttatcacggacagtggccggcgtctctttttgtgtatttaagcagcggatttataccattttagtcactttattaaagcagcaaaaattaaaattgattatttttaattaaatatgtccgaaaaaaaattccttaaaactggaaaggaagtaagagcaaaaagaaatgtaattaatttttttaaaacgatccctaaaaaaaatgaggaaactaattatttcgaggaaattgagagttatataacggaaaacaaaaaattcggcattacgggacatgttacaaaattctattttaaaaatgcctataccgagtcagctgaagaaaactttaaaaaaacaattaacaaactgattgagaaagcttgtgataaagaggaaaatcaatgtaaaatttgcaaaatg

SEQ ID NO: 116866 - DNA, 524 bp, Heterodera glycines
atttatttaatttcgttgcctttttttctctccgtcccttcgcatttttcgcaaaatgacactttttgattaaccgaccgaccgattggaaagtgaatgttccaaaaaaggtgctgctgtaaatttcggtgagtaattccatcggcggatttttcgcgaagttttcgataaaaaaagaaacgcgagaaatttttaaaaagtttaaagtgaaattattttgccttggaaggaattggaacaattaatgactcatctgcaaaaccattggggggaggacactcatgtgaatttgtgaattggggccattggaattaatcaaatggtaaatatttgcgagaggcgttccaatttaacaattaatcactgatcaaagcgatcgatccggcgaacactcgccgatggatgcgcaatttggcggaacgccccctccccggccgaccatttttaagagcgttggccccctctttttggcgacattctcaaaaattaattggaaatccaattcaatttttgagtataaaatg

SEQ ID NO: 116867 - DNA, 119 bp, Heterodera glycines
ttttgaaataatattttttttaaatggttcaatttttattgatttaaaaaatctttttttaaatttatgtttaatattcctcttataatgaaattaatttaggtcaactttgcattatg

SEQ ID NO: 116868 - DNA, 181 bp, Heterodera glycines
tcgatttggtgacccccaccacacccctacttcggcccccacccctaagaacggcaatgttcaatggggtcaaccaccgcctttctctggctcgggcgccgtttctcagatgatcaccgaggcgatcatcaactccgaacagctgaaggaaaagtccactcgggcagtcatcgaaaaaatg

SEQ ID NO: 116869 - DNA, 601 bp, Heterodera glycines
ccccccagggcattttccgcattgatcatagttttgggccacacaatgccaatgggatgacgcattttgtgccgcgcgatgcaaattgggcatccaaaagtgcatgggaatgccaatggttgatcggttgagggccccattaataatgggccaaattttgttggagacgacaacaacagcaataacaacttcaaagcgatcagaccgctttcaaagcagtagcagcgaagaagaagtggcacatttttggcttttttggcactttttagtttttggtgtgttggcgagtttcttaaaaacttcgatttttaagaaaattttcgaatttaaaaaagaaatttccttgaatttttatattttttcaagcaggaatttcaattatttttttaaattggttttttggaacttagggggagggctgcagttttaagaaactcgccatcgctcctttttgcgcatttccatggcttagcacaacattggcattttttggtactttggtggtgcatttttcacccaattaggatgactttggcactgtccctgaggggccaattactgccatgcaaattttccaacggatcagacgacgtgcaaaatg

SEQ ID NO: 116870 - DNA, 924 bp, Heterodera glycines
aactaattattcatttgacagatttaatttatttttaaatgttgaaatttttcttttgaaaattaatattcgtattagagaccggacgagggatctcgcgggattaaattcgggacccgaccttgggagccatctcgagccttttttaaattcattgagattgatcgggatttcatcggcatcctaacttgggtccctctcgaccatcgccaatcccgcggattggagtcaaaattttacgacaattttcattttcttattaagatcttgcaacactaaaataaaaaaaatattaaaaaataatattgtcatttgctaatttccttaacaaattccttaaaaattccgagttttatccgcagcgtctaacggcaccgccgttctccacaccctcccttccgccttacaagggaacatatcgaactgtaagtgtccaaatcactttaaaaatgttaatatttctcgatcaagttgatcaattgtaattcagttgtccggtctctagtcctagcattgattttggggttcgatggcgttgataggcgctgccgcgaaaaatttgaaaattatggcccgatttttaacataatttcgcaatatgccatttttggggtcaaattttgaaaattttaggggaatttttggagtcgccgccggggaaaaagtggcgaaatttgtgaatatttgcaaagtcacttttttaaaaagaaaattcaaaactttattttaaaaatataaattcatagcccgatcaaaaaattacaaaatgagtttagaaactcatatctgacacctctagttaaaaaaatcggaagtgatagttcgcgagtgccaaagttctgcaagaaaaacatttaaattaaaatgaaatttatttaaaatcgtatttctatgaaattcagaatgaaaataatttcacatatg

SEQ ID NO: 116871 - DNA, 52 bp, Heterodera glycines
actgaaagtgatcaaattggacaaagagggaaagagaaaagtgatcaaaatg

SEQ ID NO: 116872 - DNA, 1003 bp, Heterodera glycines
ttcgtctcaataaattatggcgttatgtatatattgtggcgttttgtcttgttttgcgtattttcaaagttttttcaccggactacagtacccctcgcagtgatgacgtcatcatctttgctgcatatagttgataattatcctttttttggcaagtggtttcgtggcagagtggtagtgtgttgggttggtggcagaccaaaagttcgagtccgcttgcctgtggctaatttattggaattattcaccggactacagtacccctctcagtggtgacgtcatcatctttgcagcatatagtggacaattatcctttttctggcaactggtctcatggccgagtggtagtgtgttgggtttggtggcagagcaaaagttcgaatccgcttgcctgcgacttatttattgcgaattttcaccggactaccgtacccctcgcagtggtgacgtcatcatctttgcagcatatagtggacaattatcctttttctggcaagtggtctcgtggcagagtggtagtgtgttgggtttggtggcagagcaaaagttcgaatccgcttgcctgcgacttatttattgcgaattttcaccggactaccgtacccctcgcagtggtgacgtcatcatctttgcagcatatagtggacaattatcctttttctggcaagtggtctcgtggcagagtggtagtgtgttgggtttggtggcagagcgaaagttcgagtccactagtctgcggcagaatttttcgaataaaaaatttgaaaaaaataaaaaatattatttaaaaataaaaataataaaaaataattttcagaaaaaattttacaaaaaaagtcgcgcacccctgcaatagttttgggtttcaaaaaaagtcgcgcacccctgcaataggtttgggtttcaaaaaaagtcgcgcacccctgcaataggtttgggttttcaaaaaaaagtcgcgcaataggttttggcttcagtactgaaaaattttggcgctcagatg

SEQ ID NO: 116873 - DNA, 54 bp, Heterodera glycines
aaaaatatggacgtaatttaggaaaacaggcaaccgatgagcacacaaacaatg

SEQ ID NO: 116874 - DNA, 206 bp, Heterodera glycines
ttaatgaggttgatgtggaggaggaaattttgcatgggagcgaatgcgaatttattgaagcgactttccaatgggccgatttcgcctgtgtgtcttctgaacttggaccagaaacaagcacaccgcagatcattctagaggaggaacagccaaggagaaggctgaagcggaagaaaattgtgcgcaagaaaaggagcagcacaatg

SEQ ID NO: 116875 - DNA, 680 bp, Heterodera glycines
tggttcgcagacaggcccttcggggccatgtcgcaccaatgtggttcgcagacaggcccctcggggcatgtgtcgcaccaatgcggttcgctgacaggcccttcggggcacgtgtcgcaccaatacggttcgctgactggcccctcggggcacgtgtcgcaccaatacggttcgctgacaggcccttcggggcattgtcgcaccaatgtggttcgcagacaggcccttcggggcacgtgtcgcactaatacggttcgctgactggcccctcggggcacgtgtcgcaccaatacggttcgctgactggccctcggggcatgtgtcgcaccaaaaatggtcgctgaacctaccccttcggggattgtggttcgcaccaaataatggtcgctggacctaccccttcgggggattgtggttcgcaccaaaaatagtgactggtcctgcccttttgggttatggaccggacatttttgcatctgcattcttaatgggatgtgtgagccctgactgatggatttcagcacaggacgactacactccacagcgaagaatgatgtctttgacatttatttgtgcattttttgttaataataaatttttaacatatgtgtgcatttattagttaattacctcatatttttgccacatttgcaacactttctgatttgttgtttcagatg

SEQ ID NO: 116876 - DNA, 103 bp, Heterodera glycines
ttgattaatttttggggttttaggatgcttaaaatgaaagaaaaaaagttggaatattttttttaattaaaatttcaattaaaataatggtaaagaaaatatg

SEQ ID NO: 116877 - DNA, 665 bp, Heterodera glycines
ttattttcaatcagaattgctgttccctgttataccatttatagatagatcatacaaatgtatgttattttaattttatttaaataatttacttttaaatatatcttttaattccaaaaaaacattttttcactcatttttttttatttaaacgaattgttttcacatttctaataaaaaaaattttaaatttgttgaatgcgggtttttctatctttatagatagaaatcgaatagccttttttaattcgtagttcagtatttctttaaaatttatttttaaatatttttaaccccaaaatatttttaaaattattttgaaatttaatggctttattacacaaaaaattaacaatttttcataattttttaaactaaattttgttcaattttgtattataaatttttattttaaattacctggatttttacctgttttattcatttacttttaattcgttaatttctccatggcaacaaaaaggccatattattttacacaataccatacattaagcaatttgtaggaagaattaaagtacacctaaattcaactgccaacataaaattcgaagatttattcatattttttttagcattttttaaatttaaataaaatttaaatatatttttattttatttttagcattttgtaacaaaacatg

SEQ ID NO: 116878 - DNA, 367 bp, Heterodera glycines
ggtactctttttccacaccccgaatttttcggctcaccgcacgacggaattgtttctttcgccgaataaagttgacgtgcaaatatgcgtgtttttaagaaattttcaacgtgagccattaaaactaaataactaactcgaatattatttaaggttaatttgtttttttatcgcttatcgattgaacgttttaagacccaaaggcatcttaggcagtgccgctcgcccgaaaatggcaaaattttaatgaaaagatattttaaggttttgaaatatctaaaataaatgtcttattcccgaaataaaaacgagcggatcagaaatagttctccttcatcagactattcggcacaaagaaacagaaatg

SEQ ID NO: 116879 - DNA, 252 bp, Heterodera glycines
aacgcagcattggaggccggctacacagtccgcaaagtcttccacgtcctccaatacgaccaatgaagtcggagcctggaaagcggtacattgccaaactttgcctcaactcactctggcgccgtttctccatgcggaacctccgctccaaagcaataatcaacaacgacccttgtgttctccgacaatacaccgacgacaagaaaattgacattatggacattgagctgatggatgaggacaaaattaatg

SEQ ID NO: 116880 - DNA, 67 bp, Heterodera glycines
atgcttaattaattgcataggacgaaaagggaggcggaggcgaagaacgagggaaagcggacacatg

SEQ ID NO: 116881 - DNA, 653 bp, Heterodera glycines
aatgaaatgaattgttgagaagagaccgatcaatttgaatgatttaattgttgacgtgctcatgaaaaatgttccttttttgttgttggaatgatcaatcaacctttgtctgtgtaaatcattaggataaatttaacgatttcctgaaagatttccaaaaaatccaaggtactgaagtgtccatttttaatcgggactcagttatccattatcacaaacaaagaagaaaatgaactatagttgaccgggaccaaaatacgaacaactgagtaccaaggtcccggttttgaccgggaccgggaaattcccggtttttcaatccgattaggtcccggttttgcccaaaattcccggtcccgctcaactctaaaattccatgcaaaatatacatttatatgaactaaaaaagccttcaccaaatcaaataatttccctttcttcatcatggcaaatgcgcagaaaattttttaataatatcaaatttattcaaataaaagaatccaaacgaaggacaaaagccgcttactcatttggatatttttgcaaaattatacaatttataagcctagcctcattctgtccaattaatttggctatcactttgtgtcttcgaattgcttcccccgcgtcaacttggccttggaattgcgatg

SEQ ID NO: 116882 - DNA, 454 bp, Heterodera glycines
gtcaagtcccgttttctgtttttttcccgtcgatctcgaggcaattacctaattaattatctgcagcctttctttaatttgagctcttattaatgaaaataagatcccgtcctcttttattatattttaactttttttctgttcttttaggcattatttgtgccaatgcttccgtcgccgtcattttccattcaattggtgtctcgtcttttttcccagttttttaatcgacccttatgttcgtccgcacatttattggtgagtttaactttgaaaacggaccgctgggttggtcacgaatattgaaaaactcattttaatgtttcaaagttaacgtttttgctcataaaaattggtttttgattttgccaagcttttttctcgtattagttgtttctacaataatatgaatttataaaactagccaatttcagagttctaaatagtccaaatg

SEQ ID NO: 116883 - DNA, 716 bp, Heterodera glycines
tttttaatctattttaattaaatattattttttgtgttttttgaataaataaaatgaaacatggagaaaaagcaacatatttatatatggtattcaaattggcatggatgtgcaaaatttgtgtatcaattcagttaaatgtgttaatttcaaaaccaaccattgacctgaagagcagcgcactgccacccatgaagcacaagacgacagggcacctaaacagctttggaaattagaattgtctaatgcactacctcaagtcctaaaagtcaaattagaaattgctgccaggataaacggggttctgtaagtcgagctcccgccctggttaacagcacagcaaataataataattatttaaaaatagagcaaatgaaattatgatgcccgggtgtgtgttttaaagtcgtccaaatgtcgataagctcctcccactaatcaataattttcgacgctatccctcaaggaatgtatttttgaatttcttagtatttggcacaattcccaagggaattgtgccaaatgctaagaaattcaacacgttccgcccagtaatcgataattttcgacaccaataccctgtagtggaggcattttcaaattttcctttgattttattcccttggggcttatcgtaagacaacgggtcttccgatattgagcccttcgttgccaatgcaaccagtcaaaccattcatttcatcttccccaaaatg

SEQ ID NO: 116884 - DNA, 436 bp, Heterodera glycines
caatcattttcgccatgccaatcatttggtgggccgttcactgcccgagaatcaaattcgggacattgtggcgatgatggagcaggagccaattgtcaggtggggaaggaaaggaactaattgatcatcgaattttactactaatgaataaatgaattaaaaaaaaattctattaacaaattagccaagttatgtggtaactccccgaatcactaatttcctttgtttttttataatgccctcattaacaaatattaatgctaaaatgcattttttttttctcggctgtgcttatttttgggaaatattacttgaaaatttgctcaagagcaaaaaatattcggcggattcttctgtctaaaataatgtgcctagcacagatgaaaaccgtcgaattactatttttttatcaaactgctaattaattttgaatatg

SEQ ID NO: 116885 - DNA, 451 bp, Heterodera glycines
agactacgcgacaagcacgtgtacaagccaatgacggtggagtataggtggcccgctccagcgccatccattttcagggctagttgattcggcaggtgagttgttacacactccttagcggattccgacttccatggccaccgtcctgctgtctatatcaaccaacaccttttatggggtctaatgagcgggcactttggcaccttaactccacgtttggttcatcccacatcgccagttctgcttaccaaaaatggcccacttggagctcaaacattcaacgcctgggttcagagtcaagcaaccctggcttcatacccatttagagtttgagaataggttaaggacatttcgtccccaagtcctctaatcattcgctttaccgagtataactgcttaacgagctccagctatcctgggggaaacttcggagggaaccagctactagatg

SEQ ID NO: 116886 - DNA, 94 bp, Heterodera glycines; identical to SEQ ID NO: 97954

SEQ ID NO: 116887 - DNA, 260 bp, Heterodera glycines
aaaaaaataaataaacccccagggcaaaatatttaaatttaattaaaatttatttttatttttgcaaaatgccaaaggagtaataattccacaatatacaaaccaccacaaaactgattatgaatgaatgaactgttgttgttccggttccaatgcttttgtcgtgctgttccagcgcttaatttccaaattttaaaaccacgaaatatcataattcattttggcatcggtgccaaaatctgctaaagggcaaaaaaatg

SEQ ID NO: 116888 - DNA, 108 bp, Heterodera glycines
tgtcgtcaaaaagtaccaattcttctcacacctttgactgacactgatcagcatcaaacgaattccgctgctcaaactaaacgtttcaacccaacgatcggccaaatg

SEQ ID NO: 116889 - DNA, 316 bp, Heterodera glycines
atatttttgggattttgcctgcttttctgataattttccttaatagccaatgcaattatgcattcataaactgaattgctaaataaatgggagcagactttccatctctcaaaatttgttttatttattttccaatttattttcgtttttttccaaaaattatgaaaaatttaatttttaatgcatcctaaaataatgtgtcatcttatttacacctttaattagcatcacttttctgtccaatttatattcacaattatcacctcattaacaaacacagatcactgacggcttctcattgttccaactgaacatg

SEQ ID NO: 116890 - DNA, 216 bp, Heterodera glycines
tgggagaatggccccgacgacacttcccttctgcgcgctttggccatttgcgttccgatggcatttaacgaattttgtaaaagtttaaaaaatgggcagagaatggacgaattaacgcaaacggagcaaatcaaaatgataatttgtgtggggaaacagctgcgaaatgcgaaccgaagggacgaaattgtggccaaattgagggcggaaagaatg

SEQ ID NO: 116891 - DNA, 874 bp, Heterodera glycines
tgcatatctgatgaaatttatttatgtgataagtaaataaataaaaaatagaatttctaattaacgtgatgataatttttccaaacttgttttttggtcggcgattttttgtaagcaaatttggattaaaaaattttaaaacaggaacacaaaatataacggtccatttgcaccaaaaaagggggccaccatgtacggacaataaatgcacaatattcattatttttttggaagatgtacggacgggagccaaaggagattttcgccgggcacttctcaatgtggtttttatggtgctagtgcgtttcttaaaaactgccagccataaaactaaaagccatgcacgtttcttaaaactgccctcccccctaatttcaagaaaattcttgaaaaattttgaaaacttgaaaaatatttttaaaaatttttggaatattataaaaacatgggaaaattaatttttattcgtaaattaataaataaaaaattatgaacttttctaaaaaaaatcgttgaattgcattttaatgacttgaaatttaatttctttttggagtttaaaaccttttgtataatctattaaacactagaatttcaaaaactaaaaatttttaaattttaatacaaacttttttatatactttgtaaaaaatttaagtattaatattttgatagaaaataattaaagctattgaatgataccataaaatattggttgcagttgagtaaagttatgaattttttttacattttttatttagaaatatttcttcaaaaattctaattttctcttagaatttttcgttgaaaattttctttaagttttttaaaaaaaattaatttttgaaaattttttgaacaattttcaaggatg

SEQ ID NO: 116892 - DNA, 1003 bp, Heterodera glycines
ctattttttcaaaaataggaacatttcagtttaatgaaaaattatttttccttaattaaaaatgaatttattggaataaatttaagtagagggaaagatgtaaccaatgctcttgcaaatataatacgttggaatcaaaatgagtcttatgaacgaatgattttaaattttgtctttcatgctcttttcgctctttcatactgaacattttttgcaaattaattttgaattgtcttttcatataaaaaactgatgaaagagaagcattctttctcagattatttataatcagaatatgtacattagatatgtacattaaaaaaatgcattattttaaaaaaaaagtagtttcacattgccctgagcaattctattgactgacgtttttgagttagaacttaaagataatccaattcgttaagaaagatgtgagacagaattaatatataaatgaatttaaatttaaaatcatttgttcataaatatcaattttgatcccaatgtattatattaaaacagcatgggttgcatcttttccgttttttaaatttattaaaaaaaattttgttaaaaagagcaatttttattaaaaaggaaatattcgtttttaaaaatagcggtagtttttaaaaaattctttggatttaaaattccctttttttgacttcttgttcctttttcaactacttttatttttaaataattttgactatatttttttaaagagaaataatattaatggctgtacgcaaaatgaatgacaacgaatttgaaacgttgttgcaagggcgcaatttttttgcgcgtttctcctctttgatgagggacatgcgagctgaattttcaactataaatatgttggcaatagtggaagctgaagacctcatcgtctgcaagggcggagctgggacgcaaatttttaatttggcagagtgtaatttttttttgttttttttttaaatttattaattaagtgcgccagcgtttgcgtagagctcaaatg

SEQ ID NO: 116893 - DNA, 291 bp, Heterodera glycines
  unsure (1)..(291): unsure at all n locations
agtgtatgtacatatgtttatgttccgggacaacccaacatttttatcataaaattttcctccaaatttctgttgtgtacgcaattagtactttcncnaatgaatcaccaatccaaatgataataaaaatatttcaacaccatcactttctactgaatcacatagaaagtatgtatgcttttttggtttggtaaatcacaagttctttcactttttaatattatcattccttatttttaaaaataaacgattataaccatcatcagacattttctttaattgttaataatg

SEQ ID NO: 116894 - DNA, 182 bp, Heterodera glycines
taaaattatctaatttagaaccagaaaaccatttggcgtagtttcagaagcttaaaaatttcatatgtttagtgctttatgataagttttttaagttatcttgcattcaccagttcggtattgcatttcattcactagcgaaatataatttatttgtttctaatttgaacttatcagaaatg

SEQ ID NO: 116895 - DNA, 393 bp, Heterodera glycines
ttctgtgttacggtctataacacttgacaatattacgactccagttttggctcggtttccggataaagaaacaacaaaaaaagttttttttcttatttttgatttgcgtagcataaacaaattcataggttgtgaagcgcgcgacacaggctgaaaatgtgccttttgcagtcccgactagcatcgcagagctccaaatccctctggcctacagtcaatacgagtgatcagaaaacatcacagaaaattttctgttggacgattccggagtatatgcagaaaacggtcaaattcaccggtaaaatttaactattttctctgaagacgtgcttttaattttataggattcttatttttgggagagcgtcacacagtaaaagggcggcacaaatg

SEQ ID NO: 116896 - DNA, 149 bp, Heterodera glycines
  unsure (1)..(149): unsure at all n locations
tttttactgagttntatcagcgcttacggcacagaaaaaaatgccaaaatcgaaattctaatatgtnnanccaattaccataaataaagtaatttttttgaatagtaaaattaattaattggctaatcattgcctttnnaaaaggaatg

SEQ ID NO: 116897 - DNA, 253 bp, Heterodera glycines
attaaaccgataaatagtgagataaatagatactttagataaacttttgtccaatattccttgctttctgttaaaaagccgaaaaataaaacacttctcaaaattaatattgtttaaaaattgtgaactgatagaattattatttagtgaccattttcctcgggtcttcccgcattttatagttttgatcatttaaacaaaaactatactagggacaaaacttgcgtaacattcaccacggatctgagccatg

SEQ ID NO: 116898 - DNA, 57 bp, Heterodera glycines
ggtaaattattttatttatttaatttttgaataaataatttaatttttaggttcatg

SEQ ID NO: 116899 - DNA, 181 bp, Heterodera glycines
attgttcactgtttggtcatccctgatcggtcacacggggttcatttatgagcgcccatctcgccaaaattatcgttataaaatgggcgtggcacctggcccgacttttttgcgtataaatacgggctcaccgggtggcatttttcatttggcgtcccttttcaaattcacaattcctatg

SEQ ID NO: 116900 - DNA, 554 bp, Heterodera glycines
aacaatttggaaagaaaatattatttatttaatttttaattttaggggcatcgatttaaatttaatatgagtaaaacaaaagcacctaaatcatttgcaaatgatcgcagaaaatcggtgaaaataatcaatcaattaaccgactcattattcaataattgttcatttcttcaattgtattaaattactacaaataattttcacatattatgcataaaaagctgctcccttttctcattttccatttaagtaatttatttaattaatacaattagcgcaatttgaatttacaattcacttttgataattccaagggtaatgtaagagggaaaatcgcttttaataatgaaatattgtttttattttttgcaggcattttgtcaatattggtataacggagtcactcagttgggccagcacggtttttttacactataactttttactttatcattcaaatccaataatgttggtatttttgctaattttctaatcgcgaagcaatagctagaaaagcttctaaacatgttaagtttcgaatgataccaaaaatg

SEQ ID NO: 116901 - DNA, 80 bp, Heterodera glycines
cgtgaaaaaattccggctccgtataaaaggggcgacgcggaaaattgtcaaaaaacatcaagtcgtcatcattgaacatg

SEQ ID NO: 116902 - DNA, 1003 bp, Heterodera glycines
actaattaaatttggcatcaattaaacggtcgtcgttgtctcggtccccccaacctgttcctttggcttttcctctcgattttcgagactttttttttcatttttttaaccgttcgttcgtttgtttgtttctttctttttttgtctcgaatgagagtgaattcatctcaatttcgtccgttcttaatctgacaattcgaattccattcaaaggaactttttcgctcatttcgcaaatctttgccccaaaaaggcctttggcctccccagtggcatttttctttcacaatttgtgttcaacaaattaattgtacacacatgtgatcgaaaacactaatagatttgaaatgggccttggtccgccgtcccctatttcgtcccccctcttttttcccattttttccctttttcccatccgttcgctgaatttccatttgttgtaaaattaaaccggagaaagttgctcttcccttcccttctcttccattttcttctcttctcacagtgacgtgggaagtgatcactttgggccgtccaaaagtcgaatttcgacaaaacaaacaaaaaaaagcagaaggaaggtcaaacggaggaaattgcaattttttacgactgaataaatgccacaaaagtatttaaatttggtaactttttgtaaggggatgagaggaaaattgggaaattacaaattttggaaataaaaaaaagagggaaaatggaaaaacggcgggcgaaatgcgaacaaataacaaaatatgagcaaagaaaaatggtcatttattaattactcgttttggccactttctcggaacgaataaataaataaataaataaataaataaatgttctcttttcctttccttcctattttaatgcgcaattattttgtgtaaatgttttttaacataaatatttacaccgaaaatactttttaataattataatcaatattatttaattatttattcgctattaatgtgcatttctgaatttaagcaaaatg

SEQ ID NO: 116903 - DNA, 285 bp, Heterodera glycines
aattcaattgctggatcagtgtatgccttttgggtggccatttccactatcatttatataataacaatcttattttcaattttttatttgtcctataaataaattaaatttttcgataattatacagagcgaaaattttccctccctcattccctactgtaccattggtacggtagggagtcccttgctcctttttttggtatttgttttgcttgggcttctcgtcgtcctccaggtacaattgagggttcaaatcctctaaatttttgatagctcttcaacatg

SEQ ID NO: 116904 - DNA, 52 bp, Heterodera glycines
tgtaattgtgggggaacagcgcgtagcgacatcgactccttatgtcgaaatg

SEQ ID NO: 116905 - DNA, 388 bp, Heterodera glycines
ctgctgatcgaccactccgatgaacaaccaaatttgtacacattatattttcatgctgcttatactttgattgaattttgtttcccagccaccaaatctcatctaatggtattttacttttttgagtttgtgccggaattgtcgaattttattctttctccaaacattacaaatatatgcatctttaaaaaaatcatccgccaaaaatattacacgaatttgcttatgattctgcctttattttatttcaatcacatttttcttttcttttttgtgcaaataaaattagtgtaaaatcatcttaactttaaaactgttcaaaaatgtttaaatacgttgccatttttcttttattttttatcattattcttacaattacgaaggaatg

SEQ ID NO: 116906 - DNA, 749 bp, Heterodera glycines
ttggacttcctttcacttcgggcactttttatgaaaaaattaaaaatttaaatgattaattttggaaatctctttttttctctgatttacatgattaattaataaggccggcatttatatttatgaaaaatatcaaaatatttaaatgaattacgaatgaaactacaaaatatttatcaaatatggataaaatattaataaaaatattttccataaattaatattttatttatgaaagctccaaacatttaatttatattatggatattaaagtttcaaatgaaacatttacggcaaaaaatgaagtaattttcttgcatttttcatcaaataaacctggcagaaaaaagtttaaataaataaatttccgccctattaattacacaaataaattcaaaaaataaataaattaattaattgtcttaaaaaagtaattgccgcttacaaataaaagaaacttttcgagtcataaaggacactctgtgacagcaccagggctggacgcaattgcggattgcggattgcggattacggaaattgcggggtttttggacccccgtaattgcggattgcgggttgcgtatttttgggatttatccgaaattttgatccgtaatttgactattggattatttttcgagacgatttcttgtaagattattttttataaaatgaatttttttctatttttatttaaagaaaatatgtacatttgtttaaattcttatttctttagcaatttaaaaatg

SEQ ID NO: 116907 - DNA, 103 bp, Heterodera glycines
tccatggaaaaagccctttaaaagggggcagaaaattttcaaaaacgaagccaaagcagtggacgggaaaaacgaacaaacgcagaaacggcagtggaaaatg

SEQ ID NO: 116908 - DNA, 130 bp, Heterodera glycines
ggtttgatatcatcggtaagcgcgcccttaggggacactgtcaaggttgctttggtaaatccgacaaatgagccgatatattttgttaaaaacatgcacttggcatatgccaatgagttagaggacaatg

SEQ ID NO: 116909 - DNA, 194 bp, Heterodera glycines
tttatgccatccgacccactaaacgcctccccccccccccccccccgaatttcagtcgatgccaattttgctgagcaattacgcgaaaaagttcgaagcattgaagcgaaaaaagcggaatttacggtggctttttgtgctttggaacattttctttaattatttatttttttacaggaacagaaaaacaaatg

SEQ ID NO: 116910 - DNA, 186 bp, Heterodera glycines
gaggaggaagcggaggaggagggggaggaagtggaggaggaattggtgggggacgagacggtggaggaggaggggcaggaagcggtggagggcaaaacggaggaggcggaagcggaggaggaagcggaggaggcggaggaggaagcggaagcggagggggaggaagcgaagggagtggcgggaatg

SEQ ID NO: 116911 - DNA, 768 bp, Heterodera glycines
tactttaattctgcgttggatttttgctccccatacttttttgagtaccccaaacggacacttgaaaaaatcgatttttttgttttcggggcagtccccccgaaccgatgcgcccagatttatggggagaccgaatccttcgggaatagcttccctatagcctgtactttaattctgcgttggatttttgctccccataattgtttgagtaccccaaacggacacttgaaaaaatcgatttttttgttttcggggcagtccccccgagccgatgcgcccagatttatggggagaccgaatccttccggaatagcttccctatagcctgtactttaattctgcgttggatttttgctccccataattgtttgagtaccccaaacggacacttgaaaaaatcgatttttttgttttcggggcagtccccccgaaccgatgcgcccagatttatggggagaccgaatccttccggaatagcttccctatagcctgtactttaattctgcgttggatttttgctccccataattgtttgagtaccccaaacggacacttgaaaaaatcgatttttttgttttcggggcagtccccccgaaccgatgcgcccagatttatggggagaccgaatccttcgggaatagcttccctatagcctgtactttaattctgcgttggatttttgctccccataaatgtttgagtaccccaaacggacacttgaaaaaatcgatttttttgtttcataaatatttttttcagaaagtcatg

SEQ ID NO: 116912 - DNA, 523 bp, Heterodera glycines
atctagcaaagacgcgaaagtgattgatcgattgatttctttgaaacagcagataagcatttcagaagatgagagcggatcggtagcatcttaaagtgagggacaacaaataaataggaaaagctgttgttccatatggataaatcctagtcggcggatcgatactgatttgtgactatggagcgaattcatggcttttacttgaaaaagacacagatttttaaaatttacgcacctgtttatcaatttttgcccctattttatcattttttgccgttatttagacatttatacacctaaattgaagtttttcgcgtcaaaaataaagctagacattgaaatatttcattttttgtcttcgttttcccaaaaactaatcaattttaatttatattttccatttaaatgatttttattaccatatttagcccttttcaagaattttagcttcacatagtgaaattaaagaaattttgaaaaattttatccaattaaaatttaaaattctccggccttcacaatg

SEQ ID NO: 116913 - DNA, 125 bp, Heterodera glycines
gtgtatttttaggttaaatttaattattattataataacatttgctaaatataaaccaatttagaatatatattttcggtgatactcgttgtcaaaatataaattttaggttagtaggcgaaatg

SEQ ID NO: 116914 - DNA, 52 bp, Heterodera glycines
tatctaacaccgccgtaatttcaaccataattaattcacaaattgtcagatg

SEQ ID NO: 116915 - DNA, 81 bp, Heterodera glycines
gcatttgatagacagaaaaataggggaaaataaatctcacatagtaaataaatttaaaaggaggaaacaaaatgaggcatg

SEQ ID NO: 116916 - DNA, 164 bp, Heterodera glycines
atatttgtctctcatcagtatcataaggtataacaaaacaatgttttatcggctaatttgtaccgattggcgaactattgttatgtcatagtgaattttattgtttattaattatttaaaaaacaaacaaaaaatatttaccatctatacgcctatgtcctatg

SEQ ID NO: 116917 - DNA, 67 bp, Heterodera glycines
ttcgttttccccgttggtttttggggttgattattcggcccgccctttagctttgcatttccaaatg

SEQ ID NO: 116918 - DNA, 1003 bp, Heterodera glycines
cgcaaaaatatttcactttaatcgagaaaaaataaaattgcttataaaaatattttacaaattgaattttatttcaaatttaccaataaaatatttattttatattaaaaaaaatgaaaataaataaatgatttacaaaacatgaaaaataacggaaggaatttttacggtttgagttcacagcgaaaaataactttcttttgcattcaaaattcaaatttggcgcctcttttgacctaattattttggaaaatccagctgttgctggcacagctgtcaacttaagtgattgatggctcaaaatttgcattcaaattggggaccggaccttatttcgcaataaacacgtgactcatcggccagtcagtgcgacgcactgtgtggaaaaggccaatcaatactcgcggtcccgcctaattgactcatgaaaaacaaccacgtgccaggcggtccgcctgtcacctgagcgttctgcggtcgctataaaaagcgcaatttcgcaaaaatatttcactttaatcgagaaaaaataaaattgcttataaaaatattttacaaattgaattttatttcaaatttaccaataaaatatttattttatattaaaaaaaaaacatatttcacttaaaaaatgtcccaggtccaaaaaaaattcttggccgtccccggtgaaaaaataaaagaaagaaatataaaaaattttttcaaaaaaactattgatgaaataaaattaaatgaaaataattatatcgaaatatcaacaaccgaaaaaagtatgcccgattacgggattcaagaaaatattacaagatttatatttaaaaatccaaaaaaagaaaatcgaaaagagagctccgaaaactttaaaaaaataatcgaaaatttaattaaaaaagcaatgatgaaaaaaagaattgggtgggatgttaagaggatttctattgatttgttttgtgagttgctaaatgacccaatcattttgccggcccgggacccaaaaatg

SEQ ID NO: 116919 - DNA, 69 bp, Heterodera glycines
aaggcaaaataatcagaatccgtgtgaaagcagtggtcagccaaagaatgcatcccctggtcatatatg

SEQ ID NO: 116920 - DNA, 151 bp, Heterodera glycines
tttgtgacataaacatttatttgatttattttaccatattcacaatttgattaaaatataggtggtcaaaagtgttgtcccatttcattttttggcacaaatatcaataattaaaaaaatctaaaaattcaggtaagcataactttggatg

SEQ ID NO: 116921 - DNA, 536 bp, Heterodera glycines
  unsure (1)..(536): unsure at all n locations
tttcaattcttaagatacttgcatcctaaaatctatttaattttttaagttgttcatatcagcatttccatttcttgatattttatttaaagggtatcctttctgacaaaatttagaatttaaatctggcaaaatggggggggggggctcccatgttttcttttgttattttcggaaaacaggaaacttggagttttcaaggacgctaatctcgaatctgacattagattggcgattcgttttaactttttttaaaacgacaccgacggtgactcaccgtgggatcgatggatccgattatttatactcaattttcatttttgagttacaatttctaaacttaaaactttttgttgctaccattttcatttaaatatagaaaataacaaaaggaattcctcagtcaatctcaatttcttcttctccgactgttccattctcaaaagcgtcgcccataacgtcacacatatcacaacccggtagattttagtcatttgttttacttatttgttttaatttcaatttttcnnagcatg

SEQ ID NO: 116922 - DNA, 114 bp, Heterodera glycines
cctggagtttgcattctgccggaaggaaagcatggtaagcatgaaattttcggcattttcccctccccaaaaaaggctttttttcaaaatttcgcaaaatatatatatataatg

SEQ ID NO: 116923 - DNA, 90 bp, Heterodera glycines
attacctaattaaaattaatgaaattaatttcattgccgctttcggcaccgatcagatcactgttttttgggcttgtgaagagcaaaatg

SEQ ID NO: 116924 - DNA, 574 bp, Heterodera glycines
agaaaaaaataaaaattcgagaaaatgaaactgcatgggaatcaaaggttgtgggacataaaccaaaaacaggtgaaaagggaaacaggtgaaaataggtgaaaaggaaacaggtgaaaacaggtgaaaataggtgaaatttcacctaaaaatatataggggcgtgtatttaatggggcatattagataatgtctcaactagtatcaataaaaagtgccaaaggaaaattttgtgatggttatcgctattacaaacataaaacgaccaagttcaaactttggtggaaatgtgaacttaattcacatgggtgccagggctggggttttgaaaaggaagggttttttacaatgacgcgccgacacaatcatcatcctgacactatattgattgaaatcgaagaggacataaaatatcataatttttctgcgggggcaaaatgctttttgggtgacaacaagaaatagttgatgatgctaagaaaaatccgagactccaaactgaatttagagatgaatttattgtttgtaaactataaataggatcttgaaaaaaaataccaattaaataaaaatg

SEQ ID NO: 116925 - DNA, 271 bp, Heterodera glycines
ttcgggatgccctaggatgcccttcgggatgaaaaacaataagaagaatgccccgggatgcccttttggatgactgtgaaaatgcccattaggatgataaaatagtgaattttgaatgcccttcgggaagacaaaaagtgaaaagatgcccttctggatggctaagaaaaatgaccattaggatgataattagtgaaaataaaattcgaaatgtcatgaaaaaaaattgaattgaaattaggaatactcttcgggatgaaaaatgaaaatg

SEQ ID NO: 116926 - DNA, 1003 bp, Heterodera glycines
attaacatttattccaaatcaattcaaatgcatgaaatggctattttgtatggcttcattgcctctccgtttcaaaatctgcttgctgtttttttcttttcattcgctattaattaaaaaaaatgtgtatgtgacctaaactccacaagagccaaaacgaaaaatacacccataagaatcgatcccaaaaatttcagaaaaatataccccctaaaatttgaccaaattttcagaaaataaaccataagaaataaaaaattttcccaaaaatgcgtctccaaaatttatttatttgttttcttgacaagttgcaactgtgcgggcgaaattgatcaaaaatgagtcactttttgaattttagtgcataaaaacactggatttttccaatttttaacacctattttgagtattttgggcgtttttaccacctatttgcactttttcagcacccattttagtacctatttcagcattttgtctctactcataacagagaaaggaaatatgaagatatgtagtgttatatatttggcaaagacattttcttctttccaaaaaacccgaacaaaaaaccaaactacctaacatgattccttccatcttaaaaggccaaaaacctctaggagtacgagttcaaattgtacaaattttatgattgttttaaaaaaatttagaaaattcgggattttctaaatacttagggtgtaacataagtttccgcacaatttttttttgacaaattcaaaaattcataactccgtaatttctgcagttattttaataattctttttttattttgttcgtcagaaagtcttctttcatttcatgccattgtttcattttttatttgcttattcaatttttttagtattttttcccgaccatgcaaaaattgaaaattggcccactaatttttctcgattttttatggtcaaaaaagtaacctgatataacaaaaaagaaggttttctgtacaaattagaccagtagaatccgaatatg

SEQ ID NO: 116927 - DNA, 499 bp, Heterodera glycines
agtaaaaatgaatttatggcatttattattttttatatttttctttccttttgaaaacgaatccggcaaaatccgaccaaattttgatgaaatatttggcaacgaatgggacaaaaaggaaagagaaaatggtatctaatcaattattcaaatgcaaaatgaccagaatattatcaaaaatgatcaaaatacaaaagaagaacaaaataatcaacagaaaaaagaaacaattcataaatttgaaacaattaaagaaaagttaagagaaaaaggaaattatcaatggaaaaacagagtcaaaattgagagaaaatttggaaaattattaggcgtaaatcgcaaaaaaaatttacaaatggaaaaaggaattaaatttaaacaaaaagaaaacctatagaatgaaaaagagtttttatgatgaaaaaagagcgaattcaatgaacgtttagatgaatttaaaagattatatggccaaggcaaacagaaagaatttgtgatg

SEQ ID NO: 116928 - DNA, 81 bp, Heterodera glycines
ccttgaaaataatcttttaagttttcaaataaatatttatttaaaattatttggtttgcctttgcttgggtgtccaaaatg

SEQ ID NO: 116929 - DNA, 76 bp, Heterodera glycines
tggaaatggcccagccaatgcccttggaaatggcatcatcggtgcccgtggtaatggttggatgcccgttgaaatg

SEQ ID NO: 116930 - DNA, 1003 bp, Heterodera glycines
tcaccaaaagttttttggaaaatgcgccgcaaaaaaagagtttaaaaatctgattttttgattccgaatgcactgaaatttacgatttgcttaatttctcaccaaaattgttaaaagcgattaatgggaggtgaaaatataatatttaatacatttttgatcgaataaattgtaaaaataactgatttgaagcattttacgaaatttatattgtttaaagtttaaaaataagtgattttaaaatgaaataagaagacaaaaaataaaaaaattttctacattaaccattttgttaaatatttctcagttacaaaacgatagtgcttaaatgatcggtcatcaaatcttcgagctaaaaaaagttttgaaataaaatttaaaaaagtttttctttcttatcgaacctgaaattatgaataaaaattatatctctgaattggtttatttttaattactaattaaaaaaattaaaatttagtagcgaaaaaaataaaaatgaacttctaatttttcttacatgtattaaacaatcagcatagcctggaattttgataaaaatgggtaacggaatttatgcttggaaatagattttgccgagacgtaatttcgccaccgaaatttctttaaaaaatttttcaaatttagaaactttcaagaaaaaacttagaagctttttttaatgtaaaattatttaaaaaactaataaaattatttatttttttaatatttgtacttctttctttgtctgctggtcattattttcattctccacgtcactgtttcttccatcacttttgatggcaactcgtcgccttttttggtattttctggcgatttatttcctttggcaccagcggattcggaataatttgttgcaaaaataaaatcaaaataaaatatgtatatggaaaacatttctgcgattttccttaatttaataaattttcataaaatatgactaaattattgtttgaaattgaaatattttatatgcagatttatg

SEQ ID NO: 116931 - DNA, 333 bp, Heterodera glycines
tgtctgcatgtttttttccgacggtgcctatcggccccgccggcctcaaaaacccttattttttcttaacaaaattagcccaaaatctcaaaatttgggcattttttagtcaaaatctgctagcaaatggcactaaaaatacaaaattttccccggcggcgcctatcggcaccgccggctcccgcgttcgcgaaatttttttgagaagaccgcgccgcaaaaaaaagagattttaaaaagcaaaaaaaaaaaaaggtcgtcaaaaatttcggaccccgtcataaggaaaatcgcatatgaccaccccccctgagcccgatcgtacgtcgtatg

SEQ ID NO: 116932 - DNA, 440 bp, Heterodera glycines
tgctcaattcgtcggaggacagtgacaaccacgacaaaaccagcaagcaaatgcgacaattccgcatttgccggacatcggaatcttcgaaccatatgaagaaaagagcagaatttccgaatggtttgacaggttttcgtttgcaattgattgtgcgtcaccaaacgcacaggacgaagatatttttcaccatttcaaatattttgtttaattacccaagtttgaggtccttcccggaataaattttttatttattctgtgtctcgtccctacttgccccgaccccagcaaatgcgacaattccgcatttgccggacatcggaatcttcgaaccatatgaagaaaagagcagaatttccgaatggtttgacaggttttcgtttgcaattgattgtgcgtcaccaaacgcacaggacgaaaccaaagtgaaagctttgatg

SEQ ID NO: 116933 - DNA, 1003 bp, Heterodera glycines
aaagcggaaaattatttgaaattattaaaagcggaaaattatttgaaattattaaaagcggaaaattatttttgaaaatttattttgaaaacccaaaagcattaatcgcaatttatatggccatattttttgacatttataatttctttggtgtcatatgcacaattttttcattctttcataaataagaaagaaatgccaattcaagtgttatgccaatccgagttagtcatgcgttttttcaattgttcacaaatagaaatgttaaaaaccagaataattaaattaatcaaaaaaaaagttggaaattgtgagagaaaataaataatatttaaaaatttatattttattgtgaataatttagtccctttcaaaatgcaaatgcttccgactttttctgtttcacaatgcggacggaattcagcttcagtggaagttacggtctgaagaaatggatgaatttattttccaatttctttttatcaattactttttgtgctttattttattttgagggcaccttttctatacaataccaaccttaatatttttcttttcaattaattcaaaatttaattgtttaatgaaccgatcgattcagctttaaacattttctctgtcattcgccctcctcccacacattttcgtcggcagatgttttagctgagccattcgatcggaaatccgtccgctgtttggataacaaatgtttgttccattgcgattgatctgttcccatcccttccaacactttcccattgctttaactcaatttgctgttctttcttttgtcttcaagaaattccattcgattttttttaaatttttctttgaattaattgccctattttaatttgataaaaaaattcttcaaaatgccgtaaattggatttgttgcctttttagctaattatgccgcttttccgctctttgtccgtgtcggcgttgcaccattctccaccgttgcccgagcgcaactaccgtattacgtcaatggacgatg

SEQ ID NO: 116934 - DNA, 159 bp, Heterodera glycines
tttcagtttgtcctagtaggtctttttatttaagccgtaaattaacttttattttttccttttgcataaatttgaaaaaaaaaatttgttctgcaatcttataaatatttattttttatttataaaaatacgaaattatataattttagttttttaatg

SEQ ID NO: 116935 - DNA, 153 bp, Heterodera glycines
taatttgtagggctggtggtaactcaacttttgtgcatccattggaggaggtgaaacaatcccgacaaaaatttgatacggtaattatatacgaattaatttcatccattcataagcaaatcatattattataggaattaaaaagcaaaaatg

SEQ ID NO: 116936 - DNA, 197 bp, Heterodera glycines
tttcgatagaattttttgaaaattttgcaaatgaatcctgattttgggtgggtgaaggttgggaagcgaaaaatgggcggagcttcgaactgtcgaaaagtgggcggagcctaatcgaatgaaaacatataaaatcggcacgcttttgaacttccgccaaattttgcaaatcattcatagttctatctacaaaaatg

SEQ ID NO: 116937 - DNA, 487 bp, Heterodera glycines
  unsure (1)..(487): unsure at all n locations
ccaaagaacccaaaaaattgggctaaaaatcgcaaaaagtggctatttntggtgaaaatctgctaaccaattcggcaccgccggccctcggttcctgaaattctttttggaaaagcgcgccgcaaaaaaaaacagttttgaaatgaaaaaaaggccatcggcggcggaccccttttctcaaaaatcccgaccccccccccccctttttaacgtatgacagacagacaagcaagggcattccgacactcagatttttgataaaacccaaataaatctagaatctggcatgtttcataaaacccaaataaacctagaatctggcatgtttcataaaacccaaataaacctagaatctggcatgtgtttttcggcaccgtgggttctaaactattatttttttagcaaaaaatttcctgttatattgaaatttagtataattcctcaaattaaaaattaaaccacgcattctttagaaaaaggaacaatg

SEQ ID NO: 116938 - DNA, 245 bp, Heterodera glycines
tttagacaatttggaagctacaattttggaaaaattagcgaatggaagactgcaatttatagggtaaaactgaaatattaatgagatgaagacaacaaaatgaaaaaattaagcaagtataatgctatttataatgatttcgaatgagccaaatttattttatgggttaaataaacattgaaaggtataaaatgcaaaatttttagttctttgtattattattcttcaattttttcctaaaaatg

SEQ ID NO: 116939 - DNA, 174 bp, Heterodera glycines
tcactacgctctgcaggacccgattacccggacccgaccaaccctagttttacacataaatgttgcaaaaattgtttctttatttgctgtttttgttttcaattaattgagcttgtttttaacaatttaagaagaaatcttgagagcgttgtttgaaaccaaatattaaatatg

SEQ ID NO: 116940 - DNA, 80 bp, Heterodera glycines
tacccgggggacctctagagtctcgccacgcagagagtcattcactgagaaggagagtaacggaatgggaaggagggatg

SEQ ID NO: 116941 - DNA, 159 bp, Heterodera glycines
tttataaatattaattgttatattatatttttgtttgatagtattgctaatatatgaataaattttaaaaatttaattttagtaattaaaaaaaaatttaaaatggaataaatgaatttcttttaccatttgtgtatttgtttttctattataaatatg

SEQ ID NO: 116942 - DNA, 1003 bp, Heterodera glycines
ttgaactagaggtgctgtgtcgaagtgacaaaaaggcaaatgagaggtgatcagagggggcgggtcatttcagtacggaagagttattctaatgattaattaattatttaaatttataatttaataataagctaataataacaataaatatttttggctctatttcagtttacacgaccacgaaaaaagacacgacaatgttatattttgataaatttcatgcaccataactttctctagaagcatccaaattaaacaatcttggtaccatttgatagcctaaagtttcctctatttgcctttaaaattcaaattcctttgagtttcaaagaagttgtggtcaaaaaggtttaccaaataaatttatgaaaatactagccacaacctttttgaaacacaatcgaattttttgaattttacaggtaaatagaggacacttagggctatcaaaaggggtccgtatcgttttggcgccgacgttttggcgccagcccaagttttcggactataactttttttgttgttaaccaaatccagcaatcttggtatcaatcgaaagcttaacatgtttagaagatatttctaaggtattgcttcgcgattagacaattaccaaaaaagttataacatgaaattccaaaaaagtcgaaatttttgagtttttttcttaataacttttttagaagctaaaatttttgtttgttttttgtaaggctaatagtgtgaagggcttttgaatgatatcaagattgttagatttggtcaacaagaaaaaaagttataataaaaaaactgaggctggcgccaaaacgtcggcgccaaaacaacccagtcccgaaatgtcccatagtatgatgattgataaacatacatggtatattggataaatgatgcaaaagatgataattctcaaataacatttcaatgtcctttgtagggcaagcgctttcgacttgtgactaaaacacgaaaaaagtgcgagaaatcagagagcgagagaatg

SEQ ID NO: 116943 - DNA, 64 bp, Heterodera glycines
ttgcactgattaattcaaatttccattaaaattttcaactcaatctccaactgttttgacaatg

SEQ ID NO: 116944 - DNA, 1003 bp, Heterodera glycines
gtttttaatcaagaatagttttttcagggtaaaagcttctaattcattatcaactatttaggtgtaaaacaatgtttcaatttttaattaaaaaaaaataagcaatttgcgccgaaaattgacaaactaaagccattctcataatgctattttgaaaaaaacgaaaaaaaaacttttatatattgatcccaaatccgcaccatataattttgcagaaatttgaattttatttaaaaaaatatatttaattttattgtcgaaacggtcattgtcgaaatgtccgggagccagcgggggcccaaacgctctggtccctccgatatgggtccgtatcgttttggcgccgacgttttggcgccagcccaagtttttaggttataactttttttgttgttaaccaaatccagcagtcttggtatcaatcgaaagcttaacatgtttagaagatatttctaagctattgcttcgcgattagacaattaccaaaaaagttataagtagtaaaccatacgccacctctgcagcatgacactaattaaaagtgacagctgaccagtggaggggggctaattagctaattgattgacagctggtcaaagggaaaagtgacagatgggggggggaattaaaatcaaaacctatgggagggttttcgggtgactaattggggggatggtcaattaattaattaattatttgggtggggaaaaagccaaaacctatggggatattgctgacaaattggtaacacgaattaattgtttactgcatttcaacaatttgtttggctgaacatttgagcagggttgggggggacgcgggggtgaccaatcctaatcccatggatgggagggtgggtgattgacagttctgctaaagggtgtggaatttccggcaacgaaggattatgcaaatttgtgcgcggcactagtgctgttgtttggagctaccaaatatccattccgcaaaatattcttaattcagggggcgggctcaaaatatg

SEQ ID NO: 116945 - DNA, 282 bp, Heterodera glycines
tctgagcaggagttagttacacgaaaagtgaatgcgtgctttttgaaagaatgaatgttcgaatcactcactcactacacaccctcaaaatttgtattcaaattttgtgctaaaaaattcgcttcaaaaaatcgcacatagtagcctatttaagtgcagattgtatgcttaagtatacactttaatcattcattaaaactaattttttgaaaaatggacaatttcattaaaaaaagtgaaggagtttgtatgaataatcagtttcagcatgaggacaaaatg

SEQ ID NO: 116946 - DNA, 374 bp, Heterodera glycines
tataccataggtgccatcaccgacacacgaatattttcgcttcttgccaaatgacaaataacttcttaagtgaaagttttaccgttaccaccagcgccattaataaaaaaataatgctggtctttttttattgtgcaatttttcaaaaaccgtatcaactattaatttttgctcatttgtcaattttgcataacaacaaacttgaatttaaaaaaaatttggatgtaatatcgctaaatcgttggtttaaaataacagatttgagacattaaaatgtaagaatacatttactgtgtttggtatgaaaaaagtaaataaaaacaactacatatttcatcataaaatcacctatagaatagatttacattcctatg

SEQ ID NO: 116947 - DNA, 116 bp, Heterodera glycines
ttttggcgcgaaacgcgaatattacacccctaagaatgagggatgaaattcctcaaaaattttcaaaattggacctataaattggctaattttcagtgaaaacctgtttaaaaatg

SEQ ID NO: 116948 - DNA, 1003 bp, Heterodera glycines
gggggaaaaaaaaaaaaaaaaaataaaaaaaaaaaaaaaaaaaaatttttaaaagggggggaaataagggggaaataaaaaaaaatttttttaataaaaaaataaaaaaattcccctttttgaaaaaaattcctttgggttacaaaaatttttttgggcaaaaaattggggaaactgagccaaaattttttcgtattttttccaaaaaaatccttgccaaaatcccattccccctaagggcctggatttttagggtgcggaaaaccccaattttggaggcctaaatagaaggcgaaaaaaccccctaaatagtgcggaaaatggtaaaatattggggaaaattttaaaaaaatttgtgctttttttcaatgaaaaataaattaagacccagtgtaaataacttattcaacaaattttattcacaaaaaattaaatttcatttttttgaataaaaagcaaaaaaaaatttgcttaatgaaagttcgatttttcagcttatttttcatttgaagtctatattcaaagagaaagtttttaatttttttttgtccaaaatcttaaaaattatttctatttttgcaatttttgaaaaattttcaagaagtcggtccttatggtgcattttttaattgcatttttggtaagaaatttttcaaaaatgccgaaataggggtcaaaataagggcgatatgccaaaagtgccaaaataggtaccccctattttaggggcgacaattcaaaaatagggattcctagggacgtatagaggagccttaaaacgaagaattttcgcgctaaaaaggttttttttcgtgcttttctcattgaatttaagccgcagaaaaaataaatactaaaaaactaagaatccgggcactaattttaggtaaatattcctggctttattctagtttacgcgtccaatatcaatgagcatcctcagtttctttggccctaactttttttttccctgggtcagtgccaacattcatggcatcaaatg

SEQ ID NO: 116949 - DNA, 240 bp, Heterodera glycines
gctgaagtgcaataattaattgatcaatgtgtgagataaaacctgtttccccaattaattaagctaattttgttttaatattcctctttatccacatgtaaatgctattttagtttatggttttaaaagtttcaatatttaataattcttccatttattttaaatgatttaaataaattaaaataaaaaatttatggaaaaaatatattttatttcgttaaaaactaaattttttagatg

SEQ ID NO: 116950 - DNA, 188 bp, Heterodera glycines
aattttcttaattattgtagaggaactcagagcggcagcgaaaagtgccacattgtttttcattttaattgtaaaattatttttaaaatttaattattaaaattttccaaccactaaaaataagctataaaaatatttgttattttataaatatagccaaaaatttaattttttgtatcaaaaatatg

SEQ ID NO: 116951 - DNA, 373 bp, Heterodera glycines
tttctttgagttttttaattgtttcccatttcgcactcatgtgatttctgaaagaggagagtgggaagagagaagacaccataaggaatttcaggaagatagacagtcgattttcattgaaaatccacacaataaaaggaatgtagcgagtagcgtgcgagaagatgggtttaaaaagatatgtgaggagttcgaaaagacagctaatgaattcggcctaccattaatcaaggaagtaaatgtccttgaagaattaggaattgatctggaaagggaatgggtagagaaaacggcagtctcatctgttgagaaaagtgaattgttagaacgagctaaccaaagtcgagaggctgaagagctcagtgacgaaatg

SEQ ID NO: 116952 - DNA, 624 bp, Heterodera glycines
  unsure (1)..(624): unsure at all n locations
ttgattaaattcccataaaatttttcaaaattttacctataaattggctaattttcagtgaaaaactgtttataaatgatcaaaattttcaatttttttccccggcggcgcctatcggcaccgccgcgcccccaaaactcctattttttcttagaaaatggcccaaaatcgcaaaatttggtaatttgatgaaaaactgttctcagcggcgcgccaaaactcttatttctcattagaaaaatgatacaaaaatcacaaaatttgatgattttttggtgaaaatctgtcaacaaattttaaaaagtttttttggaaaaagcgcgcctcaaaaaagcgttttattgatttttaaatttggaataaaatttttaaaaatgatttttgctttatgattttaactattaaaaagttgtagaaaaaatttcgcttttcgcatttcgcttttcgcattttcgcatattttggcttttcgcatttcgcttttttttcatttcgcatttnncagtttcgcaaatttcgcttttcgcatttcgctttttatttttcaatttggcccatccctggtatgaatgtaactggccagatttcggtacttttcacaaaaatgtaaaatgaaaaaaaatg

SEQ ID NO: 116953 - DNA, 92 bp, Heterodera glycines
ttgatctgatcagcttcttttcccttttaggggtcggcgatctttcgaatcgaacggtttcagcggagatcactttttaattagtgaaaatg

SEQ ID NO: 116954 - DNA, 168 bp, Heterodera glycines
atttttgtctaggcaaccgaaaagtaaatttaattggcactcatttgtttggcattttgtaacatacaataaagaaaaagtacccgtgggcgtcgttagtttaaaatttgttgcgctcttccttctaacataataaatgggcagcaaagaatgaatgactgatgaatg

SEQ ID NO: 116955 - DNA, 381 bp, Heterodera glycines
  unsure (1)..(381): unsure at all n locations
cctcaaatttcaaattttgattgtgattgacaaaaacaaacccccccccccctatatgacaatcgcgatntgtacgttggattgttacgatttttttgaatttttntaatttttctcccagttttttnttaatattttcaatgcctggaaaaagcagaaatttctgaccgttgttcgctaaaaaccaccantggattttggtggacggcggtgcccgtaggcgacgtcgagaaaaattttttggttttatcaatttgatcgggaccaggagaggatcccgggtccggaatttaatttattttacatttcttaaaatatggtcatatattttttcttcttaaattgataattttttttttatttttagcctcttggaaaatg

SEQ ID NO: 116956 - DNA, 1003 bp, Heterodera glycines
acaattccgtatttaaaaatgtgttgaagttgcaacccataaagtaatttattttttcttttcttattgttcttcttaaaaactccaagaatttttatgtttatttcaattttgtattagattaaaaaattagaaaatagtcaaatattaattctacgattccgattcatttgtttaaattaatacaaacccctattttgatatgattcaaagaatttccattttttaaattggataatatatgaaaaagattacaatgatgcatgattaccacccaaagatttctgatcatccgctcatcagttcattactgatcactgatcgccttcttcgcaataattcatgaatgagtgagtaatcatgttttccgatcactttggtgctgacgagtgatcaatcaatcgcattttgtgcatccgctttttctctcctcgccccctgctcccgctccctaaattttttcggcacttttggttgactaattaattaactggcgaataatgcgttggtcagctgtttctgattttcgcggatcaccgacggacgagagcagcggagaagaatggaaatgctttagcaatatcatttgttagcgtttgcatcataataaataattgcgcttctgcaagcgattcgcgagaggaatcaacgggaaaagcgaagaaaacaaaactcgtcccatcggacgaacattggacagtgattataaaagtaattgagcataatcagtggcagaactttattatgggcaataataattaagaagatgaggctaattacggtccccattaaaaagcgcataagtgcattttaatttgataatttaatttaccattaaaaagtcattcttatttatgttcatcactctaaatttattatttccaatttttctttaattttacaaatcctttgtccattttaattgacattttaccgtcatattttacatcttcggcatctattatccttaacttatcgctgttttagcttctccaattcaatg

SEQ ID NO: 116957 - DNA, 141 bp, Heterodera glycines
ttttcaaatattgcggattttttcaaattattattttttgtcactattggtgatcactgatcaggcccaagccaacgcttgtgccgttaaggtgtccgtgatttgctccgcgtgttggcccagttgcacgccttgtccatg

SEQ ID NO: 116958 - DNA, 285 bp, Heterodera glycines
ttttgcatcgactcaatcgccaggtgtgccatttcagtctcaaactgtcgcgactcgcgctgccccaacgccacgcgggcgatcacatcgaactcattttctacgaaatgcctacaaaaacgggggggggggggtaaataaattttgactcaaaattttaaaagagttcatgatatgatacccatataacttggaacaaagaaaaaaacttggcacacactcaaacatattttatctctaccgtaacgtagtgacgtgtttcaaaaatgtatagtatatggcatg

SEQ ID NO: 116959 - DNA, 77 bp, Heterodera glycines
gagataataggtttatcataaattttcattaaaaataaaccctcaattattggtatgaacgatactttccaaacatg

SEQ ID NO: 116960 - DNA, 359 bp, Heterodera glycines
atttcagtgttcgctgttgtaaaacatttttgcccgcttttttctccttttatgacgccgcttcggtacgaatgcgcaacaacatgctggtgatgatgaccgacctgtgcttccgcttccccaacgtgttcaacaagttcaacgacacattcattcaaaagtgcaaatttaatttatcatttatcccgaataatgcaatgctcctcaattttaaaataattaaatgcttttttggggtcccgactccttccttgcctaatccgtcttatattaatttcaattttattactaatttctccattcccttccaaagggttcgtgacgagaacaacggcgtccgctacacgtctctgctgatg

SEQ ID NO: 116961 - DNA, 510 bp, Heterodera glycines
agaagagcgaaaacaaactttttttttaagagagagaaaagaggaaaattgtacggttttgtgtatgagaaactgttgaaagaaagcaattagtcatcacacgctttgatcagtaaaatgaggaactgattagtattttcgaaaatgggattctttagagaaataaatgttaaaatatgctcggacagcgattcaaagctcaaaagaagagaacattgaatagatctgcaaagagaattattacattgtttcatatatcaatgaaatatctttaattaattttaagaatagcgtgcagaaacaccatcattgatatcattgatattttaacataaataaaaggtatttgtaagctattgatacgcgataagacaattaccaaaaaagttatacatgaaaattgcaaaagtcgaaatttttgaagttttttcttaataagttttttctaagcttgaaaatctttttgttttttatacagctaatagagctttttttaagagctttcgaatg

SEQ ID NO: 116962 - DNA, 253 bp, Heterodera glycines
ttgttctccgcttaatcgtctcaatgcgaagaattccccactattgtggtcttagtaaaacctgctgaaaatgggggggggagtataaaacgagcattgtttagtcatttgatcgcacatttttataggtgaaactaacagctaaagccaaagcatttcagctttccaatcgctcaattaatttaatattattaccaaaaaagcactgttaaattttatattttttaatatttagcaggaaaagccaacaatg

SEQ ID NO: 116963 - DNA, 418 bp, Heterodera glycines
tctaaaagtcaaaaatgggagtgatcagtgtcaaatggagagagatagagagagagagagagagagagaaaaaagtgccgaaactgaggaggaaaagagagccagaaagtgaaaagaatggttaagccgggagtcaggatcaatgtcgagaattcagaccacaaaactggacgcataattcggtcgagaaccgggattgaaaagtgtaaagcggagaagagagagaggataaagagattgagagggagagggagggaaagaaagaagagagacggggaaagagagaaaaaagaaaatagggatagaaagggagagagagggaggggaagaaagagagacggggaagagagaggagagagagggaggggaaaaaagagggaccggggaagagagagagcgagagattgggaacggaatg

SEQ ID NO: 116964 - DNA, 127 bp, Heterodera glycines
tgtgccgaatggaatcgccgaacattggccaaatggtggacacgaagaactccgaaatgcgaacattttcattcttaatgcgcaaatatgtatatgttgtaattgaagtgaaaaagcggtgaaaatg

SEQ ID NO: 116965 - DNA, 713 bp, Heterodera glycines
atcaataaatgtttatttaaatattgttttatttaacctctttgattttagagtttttagaaatagattatggtatatttattcattttaattattttatgtattactgttcgggtggtcaaccccgagagatgaaagtttgcatttattttccctttgcatttgtctctttcttttcctcttattttccccactctctaattgttgtgtcttcctttattaatgtaagacactattgatttattttgtccaatgcatgtccattcccctcattcattcagttgctttttatgcacttatttctcttcgcctaaatttttgttctcctccaatttatttattccgcctccgacttcgcccatttttatttaaaattgtttaatttatttgttcatcaaataaacattttattgtgtcggcttgaagaccgaacaattggcgacgcccgtcttaaaaaagaagctcaacgtcggaatattttggcaatttcggacagattccgaattgctattcatcaattcttcaaaaaagcaatagacccaataagggtgagcttccgccaggcgcggtttattcatcataaaaaaaccaagatacccaggtggttgcggtttccgccaggtgcggtttactcaacaaagacaaggaaattcaccgaaaattgatcaacaaaaattgcgcaaaatccgacaatcgatcagctagtgaaaatg

SEQ ID NO: 116966 - DNA, 1003 bp, Heterodera glycines
tttcgcattttttggcgtttcgcatttcgcttttcgcatttcgctttttggcgcgaaatgcgacttttacacccctaagaattggattaaattcccacaaaatttttcaaaattttacctataaattggctaattttcagtgaaaaactgtttataaatgatcaaaatttccagtttttttccccggcggcgcctatcggcaccgccgcgcccccaaaactcctattttttcttagaaaatggcccaaaatcgcaaaatttggtaatttgatgaaaaactgttctcagcggcgcgccaaaactcttatttctcattagaaaaatgatacaaaaatcacaaaatttgatgattttttggtgaaaatctgtcaacaaattttaatcaaattttcaaaaattttcccggcgccgcctgccccctcttcccaaaaagtttttttggaaaaagcgcgcctcaaaaaagcgttttattgatttttaaatttggaataaaattttaaaaaatgacttttgctttatgattttaactattaaaaagttgcagaaaaaatttcgcttttcgcattttcgcatattttggcttttcgcatttcgctttttttttcatttcgcatttttcagtttcgcaaatttcgcttttcgcatttcgctttttatttttcaatttggcccatccctgttgagcatgctatgttttttgcgatggtaatgcatacataattataaacatttaaaaagccttgaaaatgcagttgagccaaaattaatataatatattcgatagccctaagaattccctatttatctaaaaaaattccaaaaaaaaaattcattgagttttaaaaaagtcctggacaaaaattcctgtttaagattttgtcgtttgagccaagttatgaatttttatggagtttgaacttatcccatttctattattaataaaatcgcatcaaattttatttacaggttaataagggattcaaatgcacatataataaaaatg

SEQ ID NO: 116967 - DNA, 996 bp, Heterodera glycines
ttcaccaaaattcacgtttattgcattaaattattaattaaaatatatttattatctattctttctctctctctctctaggcaaatttactttttaactatttaaaaaacattaaggtaaccaatattcctgaggttacaaattttccgtacccccctccccgacttttttattttgccaattttgcccctattttgggacttttcgcccctaaacaccaccgggccctaattattcatatcattaatgctctttcgtttcgttccattcttttttttctatttttattttctctttttttgcaaaaacaaaggcccgattttgatggatttgcataatttttttgctttttgctctttgaagaaaaaagagatcgaaaatagcggcaacatgtgaagccaacttttgcatattaatgttttggcgtcgttgggatttggccaaattaaaattaattaatttattgtttctaaattttctatttttgctcatttggcccaattaattaattaaaaactgataaaaaaaaaagtaaccaaaactgctgaaatgtgcttaatgaaagtaagcaaacatttaacaaaaatactttgatgttccaaactttctgactagaataaatttggttgaactgataagattttttaaaatatttttgatgattttatgtaaataaaatggtcaaagattgatgcccaattgaatttgcttcgtgcggaaaaactgtgttaataaaagtgattagtgaaggtcacaaatcggaaacgcatgtgatcatttgcaaattatttgggtaattaaatggcatttgacttttatcggcccacaaattacggtaattgtgctaaaaggccaaagattccattcaaatgattgattgattatctgtgctgattaagcgaattttctccgtaaaaaagccctttaaaaggcatgccaaaaatggaaattcattcaaaataatttaattttctctgttttccgaattacaaaatg

SEQ ID NO: 116968 - DNA, 84 bp, Heterodera glycines
tagaagtttttcacgagtcgtgccgccattttgcgcctttgccctgcgtccgtcggcacaacaccccgaaagtggctgggaatg

SEQ ID NO: 116969 - DNA, 1003 bp, Heterodera glycines
aatgccaaaaaacggcacccacaaaaatggcattatcagcatcaaagagtttggtgagatggcccgcaattgtacagacgtcaaagatggaagtgacggacagcacggggcaaaggcaaatgctggcaaaaaatggagcaaatttaaaaatcgttttttcaatgaatataaattgctaaggttaaccaattttttggtaaaattatttccaaacaaattgtgccaaaataatattaatccttttttttgcaaattgtaatccaaaaaatgggcaaaattggacgtaatttttgttttttctcgccactgaagttggcatttttagtggtagcatttctggttgcattggtaaaatttcgaaaatagctcgaagtttttggaaaaaccacgccgcaaaaacggtttttttaaaaaaaagtcgtcgacttgcaaaaaagtcgcaaaatttggcattttttggttcgaaatatgttaacaaaccgcactcaagttttcaattttttttcacgatggcgcctgccggcaccgtcgggcctcagtttttgattttttaataacacaaaccaaaacaggaatggttttctggaaaaatacaaaaaacaaacagaaatagttttttggaacacaaattaaaaattaaaaaagttttttgaaaaaatatatgcaaaaatgggaattgttatgttttggatggttggtaaaatattgaatttctagagtgagtatttaatgacaacttttcattttttattaaaatttgattggaattaattggtttaaggccacctattggccctcctcccccgtttaatgtttgaaacctgaatcaaacaaaatatttgaataaattatgcgtttaagatttttttgattaaaattcggcttgaatacatggaaacaaaaaagaagttaaaatgttacaagaccgtttaaattatgtgcaaataaagtgcattaaatttttaaattttttattattcacagggaaacctttttaacaatg

SEQ ID NO: 116970 - DNA, 154 bp, Heterodera glycines
ttctgtgccgcaccggcgtcgaccaaatttcgggccccgtggccaactgcggcaacttcaacccgtgcctgaacacaacttcgccccgggcaagcgttttttcatgtgaccacggcggaatttgtgaaagcattttgaacattcgcgacggatg

SEQ ID NO: 116971 - DNA, 453 bp, Heterodera glycines
ttaagttttcacctaaattttattttgtatataaattaattatttctgttaatcctttctttactcgctgtacataagtgtcagcttattgttagcccaaacacgtacagattaaagttaggtaattaaaaagatttgaattatttttcatggcattatgtttttggataattggcatttagatcaacctaaccaacaagaactaaagatcgattcatcaatcaaataacttttgatttcgtttaatgtggtcatttacattcatacatccaagcccgtagttagtggtgaatgaaagggcgggtggggttaggattgggtccattttgaaaatttctatcaatttattaaaaaatttaattgcaaatattcatttagatttaagcattttctaatttaattaacggtttgccaacctctgcacattcttcgttacaacttccgagattaatg

SEQ ID NO: 116972 - DNA, 73 bp, Heterodera glycines
tgggccaagcgatggaactgagcgcgtgccgaagccgttctcggctgtcctcaatctcgcctttgtaataatg

SEQ ID NO: 116973 - DNA, 1003 bp, Heterodera glycines
gtggcaaatcactgcatagcataaattaatgattcaaaaaagaaaatcgagtcaatggatgaaagaaatttttctctccttttatcgtactatttttatatctctaatcaatcgaggcgttgagaacaacaaagaaaatgacaaatacccagatttttgaccacattttcacctcactttcatctttttaacattttcgaaaaatttgatggtttgaaacgagttaaattgcttagcattcgcttagaaaaagattcaccttttcaaaactttttttagataccaattttgtttagtttagttggaaatgaagaaagttacggctgatcaaaataaacaatcaaaaatgtcagtgatcattgtaaatttgaattagcgcgcaataatttacgccaattacgctatttggcgttatgagcaattttgtctgttgactagagaccggaaatttcaaatttgcggatcccgctgcgggactggaactcaaaattttttgcgggacgggatcccgcgggattaatcccgcacatcccgcattttccaaaaaatgcgggattgcggactgggatcccgcaaaatcccgcgcgggatcccgtcccgcgacggtctctactgttgacccatagtgagaaagagagtatagagaaaaaactaatatctttttttctctaacttttctcttcttttggtggattatctaatattttcagtattataaaataacattcgcattccgatgcgcataacttttgatgcattccggaatttcattattaaattttgcttatcgatagagaaaaaattacgaacaaaactggagaatttttagagcaaaaagtgggttagctaaaaagttattcaaaaaaacaaatttttgaatgcccttatctttttttctaattctatcaaaatgcttagcatttgcttagaaaaaggttctcctcctcaagagctttcaaatgataccaagtgttttcattttttaaagagatctctcaaaatg

SEQ ID NO: 116974 - DNA, 248 bp, Heterodera glycines
ttcgaaagctcttatcatgctctattagccttacaaaaagcggatagattttcaagcctgtaaaaaattttattaagaaaaaacttcaaaaatttcgacttttcgaaattttcatgtataacttttttggtaattgtctaatcgcgaagcaatcgcttagaaaaagcttctaaacatgttaagctttcgaattatatcaacaatgttggatttggattagatagaaaaaagttatagccaaaaacatg

SEQ ID NO: 116975 - DNA, 1003 bp, Heterodera glycines
acatgttaatgacgcaaaattgctcaattttaaatataattaaaatccattaaaaaaaacaaatagaaggaaacttgtgaagaatttgtgattattaatctccaataaaatttttatgtttaaaatatataatgattaaatattttcaaaaacttttttttttaccacatcttccccctttcactttctgccccctcggcccctctcccgcgtgaaggtcatttgcacttttgtgagtgaaagtagcgaatttttaataatgcaatttacgatagaatttaagtacaaatttaaggtcatataaaattcttttgttttgcattgcgatttcgtaatttttttgttttacgattgcgaaatctttttttttgcatgactcactttttttttgccccttttaaataaaagctgtcaagaaaaatgattgatgactcccgaaatacggctttaaatgtgcataaaatttcgtcagacaattttttgccccgtttttgaataaaactgtcaataaaaatgattgattggttccttatttcgcaattttcaccctttattttgtaatgtgcacgtgacttttagtttttggaccaactatttcacaatatgcgcattatttgggtcacctgtcacaaaaaaatgattgacgactttcgaaataaagaatatccagacgatttttttttgcagtttttgaataaaatgtgacagttgtctactaaaatgattgatgaccctctaaattaaggtagacccagacagtcacgtgactagacccctcccctttcccccaattcgtacacccggcccaaatcgcaaatcattcaactaaatagttggatttcattaaactctctttgcgctctaatttattttactccgctctatttttttttctacattttatttccaatctactataatttttctgccgtctattttctttaaatctctctgctcttttctattactcttcttaaatttcgcgttttggtttttaaaaatg

SEQ ID NO: 116976 - DNA, 352 bp, Heterodera glycines
tatttttgcggggggataccgtaggattaaccccacaaaattaacttttgtataaactatatattggggtgttgtataagttctgtcaccccgaccaaaaatttcattcaaaaatttataaaaaatcaaataataactcaaaattaatcaaaatatgcaccatcattcccgatcatattctgccatttttgagattttaaaaatgatctatcgattaaattcaagatagttagactcaaataaactgatgggtctacttaaaaaagtggacaaattcaaccactgatttcttggctttagtcagttgctgttctatgaccctgtactgcttcaacttcttgtcaacgacatg

SEQ ID NO: 116977 - DNA, 269 bp, Heterodera glycines
tctgggataataaatattaaaaggtgatatatcaacaaaaaaacacacttgaatatcaaacgaagaaattacagtagtctaaaaattttgacaaaataaagtacagtaaccgagaaaattttgacgagcaaattcggtattccagaaaactatgataaacaaaatatgatattccagaaaattttcctaaatgaagtacggtagtcagaaaattcagaatacagtagtaaataaaattataaaaaatacagtaactcaatatattaatg

SEQ ID NO: 116978 - DNA, 912 bp, Heterodera glycines
attttttcaaataatttttgatttgattttttgttaataaattgtttttcatttatttccttttgtgcgcatttatgtcagtgatttgaatcattttcaatatttttgatcatttttctttaaaattttctcattattttttttcaacgagaaggcaaagcaaaagctacacaaaatgtgctccaaaccgacgaatgttttcctcttcaaacgccttgtcagccccgtccaaatttgctgccgttcaataaaaggcggcggtttggtccatccggtgaccggcaaaaatccgccaacgcttgaggaattcgacccgtaaagacacaattttaattgctatgattgaaagcgatttgttttttcagtttgaaccccggcgagtggcagttgggggtgagttttctcacttaacaattttcgagtgggggaatacaaaaagcacacgtattttacaaaaacaaagcctagcctaaagcttaggccgaagcctctgggccaaacctaagaaatttttacgagttgtcttttaatgagttgccatggcatcattttgcaaaaaaaaaaaaatttttccaccatttcaaaactattctaaacgacaaagccataattagtgaggaataattcatgtttcttgatgtttgagcccttaaaagtctttaacagtgttgtatactgtactgtgtcattaccacaaattttttctaccgtgtttttattttatcattttttctttctacaggcctatggtaaaattttgcctcgtctcccggagggcacgcgttgtggcggtttggtgatgggcaaatacggcctgtacaatccgaaggtgcgcgcgctgcaggaggaatgctatgtgagactgagaccaattttggcattttttgccatttcaattatttaaacacgatg

SEQ ID NO: 116979 - DNA, 770 bp, Heterodera glycines
aaatcactcatttttgttaccactataattgataaaatggtgcacattctatacgacacatcggtttcgggctatgatgcattttttgtgcaaaatggatgtggagtcggggatgactcctcctaccaagtttttcgaggcgcgcaaccgtttcagcgagggtggggcactgcacaaacgggtgcaggaataggagatatttttcgtggtctctggcgctttttcctgcctttaattcgcagagctggagatactgtagcagacgaaacaattcagactggaaaacgctttataaatagagtaatcgatgaaaaacccggcttaaaaggaagtatagagacattgacaactgagagtaaacggggagcagacaatgttttagagaagggcggatttcgacgtcaatttggcacaggaggacgaagaaagcgtataaaagctaacaattctcccactctatcacatcagactttaatcggaaaagcaataacgaaaccattaattaaaagcaaaaaaaggcttcgatcagacgcgtttggtctttattaaaaatgacatttcacaaaattgacgtgagtagcatcgattcgattaccaacgccgtggattttttcagtataccccctacaaatgttacagtatcatcgtcaaaggttttcgagattttgccgagtaatcccctcaccgacacaccttaccattttaaaatacactcgagccaaaactacattgacctgtcaaagtgttaccttttgaccgaatttcgaatg

SEQ ID NO: 116980 - DNA, 94 bp, Heterodera glycines
ttttttcaattggtaatcagagaaaattgaagaagtgaactgaaaaaaaaattatcaaaaaaatgtgaatggaattaatgggatgaagaatatg

SEQ ID NO: 116981 - DNA, 949 bp, Heterodera glycines
tcccctcgaagaaacgaaaaatcttaagaaaactaagaaaaaaaatttcgaaattcattttcttagagttttcttataaaaaagctctaacaataagattttttcttgaaaatttctaagatagtaaaaatttttttgaatttttcgacgcgggaaacgtagtgcaccgatttttagacacctatttataggaacagtttatttccttcccgaaaaatattaaaaataattcattttttattttaaatttttcaaaaatttcggaattcgcgtgaaatgtattggttttcattgtttttccacaatattttttgcatattttctaaccaatttttcataatgcctaaatgtaaatttatttttagcattttattgcctccgccgacgctcgagggagtgttggccgaattgaacggcacaatttgcgcgttggagcaattgttggagcagcgacagcgcatccgacaaaaattggtgggttttgccgggaaaaaattcttaagaaacttattgttagtaagaaaatttcaagaaaaaaattttttgaaacttttctgcgatttttttgatgaacactaccaaattttttcaaaaattttttgaacttttcttactaacattttttaaaaatattttcttttgtgaaatttctaaatttgaaaattaaaaaaaaactttttcgagggggaaatgaagtgcacccaccatttgtcaatcgcaaattttagaccgaaatttaaaattttactcccccttgatttacaaaatttgcccaaaaattcttctctaaattgcaatttttgaattaattattaacttattttatttaaatgtttatttaacagcaatttttgtttttttaattttataattaatataagtaataaaattgttgtgcttaattaattgcaaaattgaattgtttcagtttcgtgaatgccaaaaaatg

SEQ ID NO: 116982 - DNA, 1003 bp, Heterodera glycines
ttatgacgtgccaaacttttttaatgaataaacaaattaaacatttatttgcaccaatcgagtgtccagtggtgtagcggtagtgcgcttgtcattgatttttaaaccctaggttcggaatcccctacatgcaaattcatttttttttttttgctttttataccaaagtcaattatccaaaaaatgttttgatctaaaattcttatttttaacccattttgacacataagttactcaaaaagtattagacaaaaattagattttatgaactgaaaagatatttattacattattatctttaataaattttttgttaatgaaataaaataaaaaataaaagatgtgttttataaaaaattttttataattgacttttgtataaaaaagcaaaaataaaatacccatgggtgctctatccacccaccaaatttcatttggaaatcccacggacacctggggaccttcctttgtcagcacgctttcttttagcttataattatggatagaattttttaattttatctgtttagcttttatttcccgagtgatcattcaaaaagtcaattaaatttaatgaaaacgaccaaactactaaaggtggcgtctgagcccaataatgagaagcaaacaaatttaattgatgaaaatttatctcggccaaattaacaaaagaaattggccaaatgacaaaaatatttcagctaaacaaatttttgtttaaattttttggttttccgtcaactcgaaacaaaagtttagtttagtcaactgtcaagtgcaacaaaattatttaaaataaattttaaataatttgaatcgatataaattggcatcaatttaatggttggctaaagaaagagcagctaaacaaatttgaaatttcaacaaaatttggtccgcctaagtgcaaaaaaaaatttgtttaaaagcgattaactttttagacattttcacactaaaataacatcaattaataaattgaataaaaattaattcatcaatg

SEQ ID NO: 116983 - DNA, 347 bp, Heterodera glycines
aaaaatggtttagatgattttttattagtgaagtatcgacttttagtttgtttccctatatgtaagacattttaggaccaaaaatgagaaattggaaaatttaaattttcgactttttgctcgaattcgagtccgaggttcgacataggtcgaaattaatgcaagattcggattcaccggcccttatattgtataaaaacccgggattgtcaattgattggactcataaagtgcattagagccggggaaaattcttgaaaaatttcaaaatttttgttgaattttttaagcatttgtcagcgcataaactcattttggcatcatcttccgaagtttttgaggcaatg

SEQ ID NO: 116984 - DNA, 360 bp, Heterodera glycines
  unsure (1)..(360): unsure at all n locations
gaaaaagatgaagcaagaactgaaaacttaagctactaagcatcacaccccctgcgcnttagcaagctaaatttatttttttaaataaaattttttactttttcatttcaaaatacttttcaattttttcatttattttactatttgagtgttgttggttcgttttagaaaaagtgatgagtaatgaagaacaaatttctcgttttcacatcagcggtttaacggataaattatttgtcgttataataattattattcatagagaataaattttttcattccattcattttagcatccattttattaaacacaaaaaaatatttgtattatttttaaaaataataaattttcaaaaaatg

SEQ ID NO: 116985 - DNA, 992 bp, Heterodera glycines
tttgaccaaaacaatgtattttgataataatctgataaacaatatttaattgtgaacaaaaaaattaaattaaaatcgtgggattcgaactttttggggaaaaagtaaagccacaggcataaccactggccaccactgctcaccttgctttacctttctttgcaaaatataaaggaaaggaaaaaaggaaaagccgcataactcggcgcacacgtccattcagcaaaaacggtaaaaattcacataacaaaccggggtcaatctacccacccaccaagtttcatcccgaaactccacattcacttgggggcccctcctttgtgaggaaaaatcttgacttttaatgaaatttattaagaaaatttgttaattgtttcataaattttggaaatctttttgatgaaatagttatgaaaatgttactcaattatgtatgggtttggggtctttttaacagttgaaattgccccaaattttcaaaaatacaaagttctattttgaaaatttgaattaaagacatttcgccaaaaataataattatttatcaaattttgggcagtttcgctggtgaaatttaagcccgttttagcccggtcaaaatgaccgggcccgggctcgggcttcgacaattggccgggcccgggccgcccggtcaaaaaagcccgttttaccgggcgtcccgagcccgtttaaaaactataaaataaattttcaaaaaatcaatgccaatcccgcagaatcctgcacaaaaagtaaaatttgctgatcacgctgggggatttgaactccatcagttaatcggtcactgaataaaccaagtgcattgttaagcaatccgtcctttgtgcctttgtttgtgctaattctttttatttatttttttaccgcgtgggagaagaaatcagcaaattcaatttaatttttctacctaattctttaaaattcttttcttttttccaccaaaaaatggtgtttttcatttgcgaccaatg

SEQ ID NO: 116986 - DNA, 1003 bp, Heterodera glycines
aaaaaagctttctcctattggtgtaagcattatccaacggcaaacgagcaaaccttttatctttgtgattaggttgtaagaattattgttaagcaggcattgtttaattggaataattgttaaaataacaatctgtttgttaatttcttaaatgattgaaatatgcccaatttcttcacaaattatttctgtttacgttggccatataaacttttaaatcatcaaatagatgaataaagtagttcactatttaaatttaattcttttttccatttgtgtatattttttttctcgatttgcgcctaataattttgcaattttgttgccattccattggaatttacttttttctctcaattatacattaattagaccaaaattttaaattattattttttttactgatcattttgggtcagtccccatttctacaacaatttgatcaaccgctgattcattttgctcatttgttttgtttttaatttttttctttttctttcattttttcccatccatttccgaatatttcatcaaaattttgtctaattttgccggattcaattttatagataaagaaaataataaaaaaattaaatgccataaaataatttttagttttaacaaatttttctaatggcataatttaataaggcaatttaatgctttgactaatttgttaattaaatagaataaattaatttatgattattgtatatgtttttttaagtctctaaccatatttcagtggtgcaaaacaaaaaattaattttaaaaatagtaattaattttgaaatttttacatgcaaaaattaaaaaactgcctgataagaagaaaagcattcccccgggttttattacatcatatcaaataatacatgaaaataatgatgaaaatgataagcgaaagtgtggaattgataaaatgattcaatttaaagaaaaacaatcagttccaaaaacatttgtgttttaattttggataattttatctatattcgaaatg

SEQ ID NO: 116987 - DNA, 167 bp, Heterodera glycines
atttttgatttgatttttttgttaataaattgtttttcatttatttccttttgtgcgcatttatgtcagtgatttgaatcattttcaatatttttaatcatttttctttaaaattttcccattatttttttttcaacgagaaggcaaagcaaaagctacccaaaatg

SEQ ID NO: 116988 - DNA, 137 bp, Heterodera glycines
atttccttattttattaagtaaaataatgatttattcagttttttaatcagaaaaaaatcatttaaatgcctcgaaaaatgaattgccatttaattgaagaaaaataaaataaaatcatttcgagacgacaaaaatg

SEQ ID NO: 116989 - DNA, 1003 bp, Heterodera glycines
gaacaaaagcttaaaaatttattttcgtcaaaataatataaaaaattaccaccttgaaaactttttttttataaattaaaatatttattttatttttttattaaaacacccatttatatgattaaatttcttgttatgaccttatttttaaataaaaaatatggcgctagttgcaaagaggtccattttgaaaatttttcacttttttttgacacatttttttttaaatttttatttacacataatgataatattaagcattaacagtaaaattatggggaataaaagtataattataacgaaggagatcacagaaagcattaataatagtttttcctttagccctagcattaagtcgaaaaatttgttcacacatgtatgaattcgttaaatttgtactggttccatgaattcttttcgtcttttgtttcaattgagcccagagtccttcacatttattcgtgttgacgttgaattcggtaccgtaatattcatcatcattatatgtgtaaaaaaatagaacaaaaaaagtgaaaaatttttcaaaacgccacgcttttaaagtagcgccgaaaatgtaaagcgcattaaagaaaccgatttgaataactcagagactacagattcaatttgttggcatggcattcccttcaaaatcgcctttgccttatttttgggtccctttgcccttgtttatgttatttacttctttgcttattgttagttttgcatttcaattccgcagaatgcgttgtccgtccgtagccgtgcgtatctgcgcagctgcgaacgcgtgaaggcctttctgactgccacagaagaagtggaggttcgcaatatgaaagtgacggagccgggcggtgaccaatcggtgtgccaatttttggagttgcttagcacgcagcgaatgtacgaaaagtaagcattttgtcgttggtttcacatttaaatctcttcggcgtgttcaaagtaaatggaagtgggtggttgtgcactgacaatg

SEQ ID NO: 116990 - DNA, 397 bp, Heterodera glycines
aatgattgactgaaaaagtgatgacgcattaaaatcttccagtaaatgataattctttccttattccttaatattgttttaacttaagcccattaaaccaggtgcacattttgaagtaacctataaacacatgttattattttttggccgttttcattttaaatatttacctaaaatatgatattttattgtttaaatcaattataaaatatttttaatatgggtctgggatgagggtctgtgtttgtcagggttgaaaccttctgagtcggcaaattacccctaaaataacgaagttaggtctctactttcctaataataaaaaattaactactctttatttcaaattttatttaatttaacaatttgtcatgcttttttgtcactttaaaagatg

SEQ ID NO: 116991 - DNA, 517 bp, Heterodera glycines
tttcatggatggattaattttgactggagaagatcgtctcattacgtctacgagcctctgacagatttttgccatcccgttaaatactgctttgaagtgccaaaaaatgacatgtgtcagaaattaaattgtgaatgttttattttattacggtgtgcttattgtgaattatatttatgctttaaccatttttttaatgattaccatttgtgtgaaaatgaataaaattgaatgaaaaagaaggaataaaaatttttgacccgatggaattgatttcaatggccattaatttgcataaaatcaaaaataaaacggggaaaataaattaacatatgagggattcgaacctacgagggcaaaaagggaaggcaggagcacaacctccgcaccaccgaacaacacaaaacagtgcaaatgtttatttaatttattgcaataaaaaaaagtttggcacgtcataactcggcactcagactcatttcgcagaaaataaaaacacttttcttaagaacccatg

SEQ ID NO: 116992 - DNA, 1003 bp, Heterodera glycines
caccgtccgtctgtctctatccccattccgataattattaatttttttttctaattttttaattaaaaaggattatccccctgttattgcccaaccgacggagtgccaaccctcaatttgtactttccttgccactttgttaccttatttagtattattattttaatttttgtcaccccctccgccccccccccattttcccattaaaaacgtgggaaaactgacaattagcaaaattgtttcccctggagccaatgcgcgaaaacgacttcaaagcgcctttgccgacattacgcctgaggccttttggccctcacttcaaaatgccattcagtcaagtgccgtccgcctcttgcgcaacgccgctgacttttcacgcctttttgttttctaatccaattagcggcggcatggcgccgtaaaaaggcacaagccctcgcttatacaatgtgacacttttttcggggatgctaaaaagtggcttaattaacggaagaaggaaaatatttttttactagaatttgttcgggagtttgttttttcgggaaattcttcaacatactatatatttgtatttttttcaaacattaatttaaaattgttatttttttagctttttatattgaaatatttttaaattatttaacataattgtttggaaattgattcttttatatattttttaaatataaatttaaaatataattatttttttatttgttatttttaaataaactttatcctaaaaattatatatccttgttcatttcaatgtttaattatttttaaatttaaattattttttaaaccttccctttttaaaagaatgtaaaaatagatttaaataaaaatagacaactttcattataatgaactaattcataatttgcctataatgctacttaatttaaaaaatctcgctcgaaaaatcgcaaaattttatattttattcattttaaattacactaatctccaataaaaattcatttccattttcaaaatg

SEQ ID NO: 116993 - DNA, 168 bp, Heterodera glycines
cgaggccgcgaagaggccgagggagtactttcggtgcaggaaaattattaaaattttaaaattttttaattgcttttaaatatgccaaaaaatgtaggcttaacttttttagtgaaaattcgatcactcatattttttgctaattgagcagaagcgtaccaaactatg

SEQ ID NO: 116994 - DNA, 1003 bp, Heterodera glycines
tgaagtcggttctaattaaaacaaaaaaaatcaggcttctatcatgtgattcttttaaaatcgctgcatatatagacattttcattctattttacggctatggagaactttttttttttaatttgttgctctaaactaatatttaaattaaaaaatcccaaaacacaattttctttttaaatataaatattttggaagctgtcatgaatttcttaatcatttcttcttttaatttttgctggcttaatcagatagtagttactatccagtcattgtcgcggtggtgattgatggcttttggtctttgatgtttgccgcgtgattaattacctatggggggtgattaattagtgcgcgagcctaagcctatgggggggggggtgattaattagtggggagcgagcctatggggggggtacttaattaatgcctatggggcgaagtttttgcgtgaaattttcgcgcatttttttgattttaaatttcggaagggggggggggggtgaagcctaatttcggcgggaaattttcgcgcattttgatgaaacttttttaaaagttttggggtgtcaaattttgtttttttgttttttggtgatcattggtgggggggactatgcagcagcgctgtggtgttggtgatggatgagagagataaagtgagagagagagagagaagaagcaacgagagaaaagagacgggatgtgagataagagtgccggggggggggggatttgagagtatgcgatgccaaagtggcgtcctttcgttgaatgacgcgcggtgagggagggatggcgcaattgtttggcgtccgtaaaaacggagtgacctcaatggttggggggtccactcgcttttggcgaatagagtgacctaacaggggggggggattgattctggtgagtatgagttccccactttcattattttctcctttttttttgcatcatacgaacatttggcttccccttcccccattaagtttctttttttagaatg

SEQ ID NO: 116995 - DNA, 769 bp, Heterodera glycines
taatgtaaattttgcaatttattaaaatcaaaaatatcactaaaaatgaaattttaatggaatttgtctattggcttttgccttgagttttgatttcttttttgagttatgttcaaaactattttcattataaatattaattttttcattaaaacaaagttttatagcggtagaattccattttttgtttgttgtcaattttatacaaattttcagatgacatttaaatgtttttctttcgaattataaatttctgttaagctttaattcagaaatattttctgagtttgatcagttacaattatattttattaataataatttgatgatgatggtttttggttaatacatttccatatttattcattcaaagaatcaacgaaaacatttttagaattgaacattctttcggcattttgtgattttgtcgaatatttcccattaattatcattttaacttttaaaattaaaaatatttattttaataaatattaaaattattccattaatttctttaagcttcttttcacctcccctttctctttttcattgctcaaaatgacttctcccattgcttatgaccaattgcgagaaatgacgcgcaatttcctctcaaaaggcgtcagtgccgtggaaacaaatgccattttccagggaaaatttggcaccgaaaattctccgactctttgcacggttaaaacaatgaaaatggaaatatatatttttatatttcttatttatttgattaataattttagatttacaaatg

SEQ ID NO: 116996 - DNA, 285 bp, Heterodera glycines
cccccgaaatcagaatttttaaaaaaaaaatttattttttttaaaatattatattaattttttcgtaaaaataacaaacgagtttatgaaatgaaaaaaaacagatcatttacaattgaacgcgtctaatacacccctaaatattgaggtttacaaaaacgaaaaaatacacccctaagaaccgactttttgagttgcccccccccgaaacgaaggtcctggctacgcccttggcatggcttcgattgaattcattttaaatctccgtttttccaaggagtgatg

SEQ ID NO: 116997 - DNA, 51 bp, Heterodera glycines
ggttgtggactgggtcttcggcattaacaatgtacactttttcagctgatg

SEQ ID NO: 116998 - DNA, 439 bp, Heterodera glycines
tttttttttcctgctgcggttaaaaaatgtcaatgtgatcaagatttatgtagtaatgggtaaaggagatgttatgtcccccggatttaaagcttttaagccatttctaattaccattttaaagagatgaatttataataaggaaaagcatttacaaaataatatgtattaaataaaaggggggggggaataagtttgttcaataacaacgacctctgttttggtgggatcagtggaatttgttatttggaaaaggattgttgaccaaaggcatagaacagcactgacaaatgagcagactgaccaccgcagaaatctcgcagcccccgagggggaaagtgggaggaattaaatactggggcataatggggagggactttggataggatgagtgggataatgacggcaaaaacacaaagggaatgatggaggaggaatg

SEQ ID NO: 116999 - DNA, 61 bp, Heterodera glycines
agcaacaacaatgaatggcaggcattgagtacacagtttggtcagaaaatcactgaaaatg

SEQ ID NO: 117000 - DNA, 328 bp, Heterodera glycines
tcaatcacatcgtctacctcatccacgagtagtagctcgacaccatatggctctacaagtactccgaccactttttcaatttcaacctcaactaccacgaccctggagccatttacactttttatacctccacatatatgcccgccagaagaagatgagaccacaacaagtccctcaacagtttcaacttcgtcatccagtacaacaatggttattcaaaaatgcatttataatttacttacctaaatgattttttaagtcatacgattcgcttgagcacaagtacagagtgttgcgaaaagaatattatcaactgaagataaacatg

SEQ ID NO: 117001 - DNA, 1003 bp, Heterodera glycines
ttgattacattcaattttatccttaatcaatttgcgcaagcattgcgcataagcgcggcgaaagcgtggtgggggggggtggcggaagaccattggtgaatcgattaaatttagttgaacggaaatttcaggagggccaaggggggggggtcaaagagagaagccaatctacggtgagaggaggattatcattgatagattttgtttttataattaattaaattaatatgtaagttggcaaatgtagcaaaagaaaatacaaaaaaaatagaatctttagatggcatttaagttttagcatatttaatctttaaataagccttcgtaatttaatcattttgagcattcattccgctgaagcgcagaagggggattgaaaatttgcatcgattatgcgactcggggaacggaaagggaggggccaaagaatgcaacaaaagagcgtggagggagatattatcaacaaataaattgggttcaatatggataattttaagtgaaagagaatccctacaaaaagcaacaataaattcatttgaatgataaccgccaacaaaaataaattagcagtattttaatttacggtgtcaaaaataatactagagaaaaatttatcgaaaataaaaataaattcaattttaaaagtaaagggaaatttagggtttttgtcatcaaattaaaaggaaatatttgcaaaaaaaaaaaatgaaaattttgatggtaaaaatgaaaagcctttaaatggttacaaagaattcaattttgtttaaaaattagaaaaatttttggtagatattaattcgaaaaatactcattttcaatttatttttttcctaatcaatttgcgcaatcttttcatagaagtacagccagggcagcggcaggtgggggggggggggggaacattgacgaatccattaaaaggtgaacggaaatttagtcgggggtcaaatggtgaagcgaatgagtgggcaggggtcagcgaaagaaaaagcgggaaatg

SEQ ID NO: 117002 - DNA, 1003 bp, Heterodera glycines
acgagaaaaaaaaagtagcgtgaatacataaatgaaaatttttaatttaatttttaaaatttcttaccgtctgttcatttttgctgcaattagcacacgttggtctttttcaattgattgatgtcacaaaaatgcacagaataattgttttggaaaaaccctttctaagcaaaaagattatttgaaaattaaaaagaataggtggccgggccaaaggcggaaaaatgtgttgatgtgaaaatgattttaagggtaatagtttagatggtagcacacctttttgacagaattttttataaattttaaaatttgtaaaaccatgtctcatggggttttcggggtcgctccagggcagcgcaccgataccctccaagccaaaatcctggatcgttttggcgcccacattcggagccaactcgattttgaagggaaaatacggtaataaaactgtagtcaaataaaataatgttcttttctttttgtgcttacatacctatgtatcagggatggcattccgaggcccaaaaaattttcggaaatcggaattccgaccccaaaaatgtcggaaatcggaattccgtgccatccctgctatgtatcacacacacatattaaagtggctctactgaatgaactatgaatccatcaaaattacgagtccaataaacctaaccaatcttttgaacaataactttttctttttcaaacattcattcatttttgaaagcataattgtctaagtaaaacaatatgccaaattcgcagcatttatgcactttgcaaacaaagtaaacaattgttgattatttccgttttcaatttacaaattcaatgtgttaacaaacttagtttattgataattaaatcggtagggctcatataaagtgcatagaacgtaaagttttctttcgttttctcctaaataaccaaatttgtgttaggtgaactttaccgttgatgaaattcattctcttatagacaagaaaagaacatccgaaagatg

SEQ ID NO: 117003 - DNA, 381 bp, Heterodera glycines
acgaaaaaaaacttattggaaacaattaaatattatatataatttttctctaattaaattcgcccaataatcaacaaattgtcccgccacccatatttggtatatacacatttaggtttgttttccttaattatgaatattgtttcgaatcttttgtctctaattacgccccgtttgccccttcgccttcctatgccctccttttttgccgtgccattcatcaatttatttgctggcgattgacccgaccaatgcgacccctccccatcaacaataaaaacgacaattcaattattcattttttcaaacactaacctttcacctattttatccttttattatagaattttcaatttttagcaaattttttaactaaaaatg

SEQ ID NO: 117004 - DNA, 176 bp, Heterodera glycines
atacgtaaatcaaaccgggattttgactgacgcgggaatcaaggctgtccttatctggttgtataatgtggcaaatttcccgggagagcgagagatgggacgaaggcgttcagtgatcgggaatgtgccttcggggtctcataaccgtctaggcgacggtagtgggcgagaaaatg

SEQ ID NO: 117005 - DNA, 140 bp, Heterodera glycines
ctaatccattgtcatgccctccctcccccgttcggcatgacgagttagcatattatcaacaacacatttttgattgttcgttggcctactgctgatccaaacagaagcaacaatgctatataaaccgctgctgacaaatg

SEQ ID NO: 117006 - DNA, 428 bp, Heterodera glycines
ttgctcattttttggcatttacagtgcccaaaacagcctaattgggaaccatgtgtgccgaaagagatcgctaatcaagttggaaaaaggctttatttttaaattttttgtttttcaaaatagacatatttaaagaaacatataggtagttttaagtgaaattattcggcttttgcttttaacttcaaaatttaattttcatgctttatttaaatatttttaagcaaatggccgtttttcaaatattttaattaacctatttatgttttttttgtaatgttcgaaatgttattaaaatttttgctagctctttaaaattctaacgaaaataaaattcactaaattagatgaccgtatttactgaaaccaagccccctgggctttatttctcaaccccatcaggggagggcggctttagttcaaatatg

SEQ ID NO: 117007 - DNA, 446 bp, Heterodera glycines
  unsure (1)..(446): unsure at all n locations
gatcgctccgcgggcgaactttttggatggaatggaaaagctgaagaagcagtggaggagctgatggacggaagcganccgaagtgtggcagactgctttgnttgttcgaattcggcaaacactttgtgaacaacaaaattttgtgggaaaacagcgaacgatggcaaaagcgattgatcagtgagaaaatggtcgaattggtaattaattatttaattaaattaattaattaccaaattaataggaggagacgaagcgaacggaaaattgggtgaagccgaaatttgacgaagagaaagcagaggaatattgcttcactttcttacaattgtacgggagcaaaagcgacaccaattacatgatcttttttgtcatttgcgatctgatcgatgtttctttggaagtgcggcgctttttttgcgattcgtccgactcaaaagccatg

SEQ ID NO: 117008 - DNA, 918 bp, Heterodera glycines
agtgagtggggatgccagaattattcgtccgatgtttgcggcaaacacgcggacaaatatggcttttctttttacaaaaaagatgaatgctattgcgcaattggtcattccaactacaatattacgtcactgttgaaaaaattggaattgcccgccggtcgtttgaattaaataattttttatttaattaatatttttgcattatttatttttacaattttgaacaaaataaatatggtaatttttatatgactcccgaaggatgcgttattggaaaatgctgtagtggtactactgtattttaaagtaagatactgtagcataacataaatttttaaacataaatggtcaaaattctataaaaatgaattcatcttttgcattttccattgacgcattttctgtcaaaatattattttaaaaaataaacacttttctaggatagttttctgatcacaaaatgatgcaaaaagtgctaacatgcatgtgcaaatttgggcgattcacaaaaaattacaaaaatcaaaatctgaaatttccaatcattttttattcaataaaaacattgaccagtttaacatgttttgtcgtgtgaattgtagataaatgccgagtcattctcgcgcgatttatttattgattttatttatgatttaaatgataaaaaaaaacataggaaaagtgagacttttgatttttgcacatttttgtgaactgccaaatttgcactttttgtgaatcgaccaaccactgatgcaaaaatctaattttccattttgatttccattaacaaggcggtggcgttggtttttttaacgcccattaatttgattatttggtaaattcatataattttttatatatttctaattttttaatcattttttgttttttagacttccaatcggtgtttaaatg

SEQ ID NO: 117009 - DNA, 538 bp, Heterodera glycines
ggtgttggttgtggaaattttaaagagaacaacaacaaatcagagaaaaaaaacatttctcattttggcgtactatttctttgtctctgttaataagaaaagctgaatttacttcgtgacgtttaattttttttctacatgataaatccattttaaattttgcttaccgatagagaaagaattaacggatttttaacgctcgaattttagttttttacgctcccatctaaagttattcagaaaacaaaatttcgaacgtccatatctttttgctctgtgttaaaattcttagtatttgcttagaaaaagcttctcctaatcaagagctttcgaatgatatcaagattatccagtttggatggcaaaaaccctcaaaaatgactctgaaatatggtcattttttaaattttttttctctgtaaagaaatagtacagcaaaatgagatttcgttcttgtcattgtattttgtttctcataatgctagtagtgaacttttttttcagttcgcctattttttaaaaattttgtttgaaaatg

SEQ ID NO: 117010 - DNA, 96 bp, Heterodera glycines
attaccaatcgccttcttagcgaaaaatttggatttacgaaaaatattacggaatttcgtgtcaacccggatgtggagcgccccgatgaagcgatg

SEQ ID NO: 117011 - DNA, 1003 bp, Heterodera glycines
tctgagtgctataagattttgcgccattatgataaaaaattaatttttgccagaatattaattttgaaaaacctattttgacatttttggataatttattaacaaaatgcaataaaaacgaaaatatacccctaagaatcgacactaaattttcaaaaatacatttatatgaaatgaaaaattttctcaaaattcatctaaaaaatttattaatttatttcatgacaaaattagattttaaaaattctttatttcaatactgatttggttacttttggtgatttttgagtaaaatcttacgctcttacacctaaattttggcttttttagagcgtattttccattttaaatgcctatttttgagggtttttaggactaaaatatacctttttgcgatttttagagccgaaaaattgcatccctaatcattagggttggatttatatagttcaatattgatatggaaattaaaaccaaatcaaactgtacaacttctaatactgtctacaatattaacaaaattgatgaagcgtaatttgaaatggtgctaggtcgtttcctaaaaaccgccacattgggcgtttcctaaaaaccgccaagtgggcgtttcctaaaaaccgccacattgggcgtttcctaaaaaccgccaaatgggcgtttcctaaaaaccgccaccatgggcgtttcctaaaacccgccaagtgggcgtttcctaaaaaccgccaagtgggcgtttcctaaaaaccgccaagtgggcgtttcctaaaaaccgccaccatgggcgtttcctaaaactgcaaagcaaaaatttcgaaaatatatctttcctttttaataaaatttttatgtcagttgtttgccaacgttataattaatataaatcttaataatatttttacgccatttatttgccaacactatcatcattgtcaagcgcaataaaattaaaatattaatatatttattgctacttataaattctaactaataaaatttataaatg

SEQ ID NO: 117012 - DNA, 217 bp, Heterodera glycines
  unsure (1)..(217): unsure at all n locations
ggtttttttgtttttttattttatttgaagaatttagaagtttttaatctttttattttttgttttggttttttggttaataaaaaattttatttaagtttanattaacccagggcggaatcctgcgcgacgacgagttttgtaaaaaaaaaatttaaatttaaatttaaaaaaaaaaaataaaaaattataagagaagaataaaagaaatcaaatg

SEQ ID NO: 117013 - DNA, 330 bp, Heterodera glycines
gctataaatattcaatttctgaatagacaattcattttcaaacaatataaatatatttttattcaatattttaactaaataataatcattaaaacataattcctaaaattgaaaattttttttaaattaatttaatctaatttttcattcggatatttttaaatgcaaaaactatttttaatgaaataatttatattcataaaattaaacattaacatataattcctaaaattgatgaaattttatttaaattaatttaaacaaatatataataacattttttatttttagatttgtgcaaattgtcttttttaactctctgttacaatg

SEQ ID NO: 117014 - DNA, 177 bp, Heterodera glycines
tcgccaccccattcattacccattaccagtgccaacatccgcttcactgattacaattcaaagttgcatatatatatgtaaaaggagagcaattaaaaataaaatatttatatttaatttctcttaaaactctcatccctcataatgttttgctactcaatcccatcatcaacaatg

SEQ ID NO: 117015 - DNA, 101 bp, Heterodera glycines
ttggagtgtcacatccgatcattctcccaccttttttatttcatggtaatttggcttttaaatgtttgtgttgtttagatgataaactgctattgttaatg

SEQ ID NO: 117016 - DNA, 107 bp, Heterodera glycines
ggtttttgggggcattttgcagagaaacgcgagtgttttttggtggctgtcccggaccgcactgcagcaacacttcttcctattattgcgcagcgcattgcaccatg

SEQ ID NO: 117017 - DNA, 529 bp, Heterodera glycines
  unsure (1)..(529): unsure at all n locations
tttttttttcattaaaattcccaatttaggatccccaaatatagggtcgcaccaaatgccggaacccgctagtttgtgtgtcgggtcccgttacaaatccccaaattcgcgccatgtaaatntagaatgggaaagagaatggggaaacgagcggagagaagcgagaggaaaatggggagaaaggtgcactctctcaaataatgcctaatctcttttccatccgtaaaagcatgtgctatttcttttctctgtccgtcggctttttgttaagtctttactagtacataattgtttctctatatctctggttaaaataaatgtgagagaaaaaagaaagaatttaaagcgtaaacaaagaaaatgaaaagggcactttctctctccctttcccactgcttcattttgccaaagtgaccacaatcttttttgaggtcaatccattttttctcttttccatattacttctttgagtaattataaaatatttttagctaattttattaaatatatagcgaaaccatagaaaatg

SEQ ID NO: 117018 - DNA, 269 bp, Heterodera glycines
gcaataaatgagatatttttaaaccatttcgcaggttgtttacgatgggaggtccacaattactggcattttaacttcaaatcctgaccaaattgtcgtccacgatttcacctatggtattttaaatacaatttgttgtggtataaaatgtgtattccccaaaaggccttcaatatcatctggactttgtacaccatggaaaatgtggccaaattgggccaatcagtgctgaattggccgatgtcgggcgcaatgccaacgggacgatg

SEQ ID NO: 117019 - DNA, 502 bp, Heterodera glycines
ttttcacatctttttaaattgttcattattcaaaagaagggattttggtatccaaaataatggaacataaatttttggaacttaacgaaattttatgacttaagcctattgaatgattacaagaattaaaaatatggttgcggttgttttttttttgcaaagatttataagcatagattttttattttaatttttttttgagcaacgcccattttgatggttttagagtgacgtcataacatcaagaatattaataagccgcctcctttccatatttggcacttttacgagaagtgccaatgccaatttgctttcctatcaatttcaaattcatcaacatgcttgcttcttctctgctttgctgggtcacacctcttcatttaggagggggcggggaggcgggtggcacccaaccgaaaaattgggtcccctctcaagacaaagtggtgacggcactgtttatgttttttttgccaacccatttttgttggcacaataaatg

SEQ ID NO: 117020 - DNA, 427 bp, Heterodera glycines
ggttttaaataaaatttttttcaaggactagtgattaattaaatcgtcgctgatctgacggactaatataggcgttattttaaaaatataactttgctcaaaacaaccaaattttaaatacttggtacaaatcgataggcctaaatgttcactattatcctgaactatttaaaaaaaaattatttaacattcaaaaaagttattaccaaaaatgctcgaataacaagggtttcttgagttcttttgattacataacttttttgaaacttacgaagttttttgaaattttgcagactgatagagaactcttattgttagggctatccaacagatacgttttaatgatttttgttccactaattaatgaaaaattcactcattagtaaagtgccaagaaattgctgtccgcataaagctgagcattatg

SEQ ID NO: 117021 - DNA, 237 bp, Heterodera glycines
ttgcgtcgacgagggcagctcttggcgcaattttgccatcaaattattccatggttctttggatgccaaaaacgggtcaaaactattttttgaatgttttgtccattaactttggcacaatgccaaattcagcggatgtcaaacggcactaccgtaccccaacaaatcaccacagacgtcattcacgcccttcactgatgctgctgttacgctcctccttctcatgcgcgaacaatg

SEQ ID NO: 117022 - DNA, 526 bp, Heterodera glycines
atggcatttcaatctcccacctcagacgtttgtgggcactattgcatattttttatttatttggcttcaaccggaatgttatatgatgaaattttgaaacaactgaaattgtattgtgtggattataattgtgacattgcaattaaaaactacgtgaataaaattttgttttatctcttggggggagccttcaattagtaaaggtggatgattccgaatcatgatttaaaaatataccagctagtgccagtctctgggcattggggtcaaaaggcgtcagctgacacatttctcctgtgtctatctcattttgatgcgtcagctgtctagcattttagtccttaatttattagagaaaaagaggcattgagtatcgtaaaaagagaggtattgagtatcgaaacgattcattcataattttatggaaattactgctagtacggggtataaattaagtgaaaaattcaatacaacctcatttattggccaattccaaaaatcatcatgagcaatcgatcaaacaatg

SEQ ID NO: 117023 - DNA, 286 bp, Heterodera glycines
tcggtgcctaaatggatatctgacgcgggttctccaaccgtaaaaacctctaaaccaactttaattcgaaaaggagttattccctaaaacctgacttggcgcctgcattccatcgtcagaaataataacctttagccttctgctattttttaaaaatcattatttactcatgcaatttcaggttattatcaaaagcaacttaatgaatgaatagacgaataattgctcagcaaaaaaggcgacagcaagaacgcaaatttgacgaaagtcttgaaaggcgcggatg

SEQ ID NO: 117024 - DNA, 310 bp, Heterodera glycines
ttgaaaataataattccgcttaaatcgaaatttgatcaaattgtaggctttaaatgatcattgacagtttaggtgccacgtgaaaagccaaaaggcgcacggtaaaattgaagtctacaaatgctaatcgtcctttttcaaaaaaagccaacgttttttcgagaagtgcttattttattggttttaagagttgtggaacttaaatctgacatccatttctacttaggttggaccccgaacccggatcagaaagtcgaaactcgcatttatgaaacaaaaaatggttccaatacacagaataacaaaaatg

SEQ ID NO: 117025 - DNA, 84 bp, Heterodera glycines
atgcacaatggtaattaatggttttttaaaaattataattaaattaattaatttgtttttttttttaaattttcggtcgaaatg

SEQ ID NO: 117026 - DNA, 222 bp, Heterodera glycines
acagcccatgggaatggtggaaccgggcgcaattgccggaattcgaagggaacggccggagaattggagacgggacaaaaagaggaggggggaaaggcgggacaaccggacaataacgaagatggcacatatcagagtcagaaaagttttgaagcctcaatttttggggaatcggaatccaactcttaaaatgtcggaaaacgaaatttattatagaaaatg

SEQ ID NO: 117027 - DNA, 1003 bp, Heterodera glycines
  unsure (1)..(1003): unsure at all n locations
atttcgaatttatctgatgaaaaatattcaaaaaattttccaataaacttctaaaatgacctatgattatgtaaattttacggaaaaacaaaattatttttataaagattagtggttattacggattgaacgctaattcattcctacaacatttactaaaaattagaaatgtttgataaactaattaatcatttcttctatatgttttaaaaataacttattaaaatacacaaaaattattttaaaattttttaaactataacaactattatataatgcgacgaaagaacagaggaaaatttattttaataagaattttctttccaaaaaaattttttgaaaaatatatatccttttcagaagtaaaaaaattttgaattaattattaatatggacaaataatttgacaactgaacatcgttagtatgatgagtagggttgtaaattatatggattaaacatattttttctgcacatatgctatgaagaaaggggctcaaaaatagaatttctacgttaaaattttttgatttggtgaaggtttttagtccatataaaaccagattttggggttttgggggaatcatccatatttcgctatttttgcctttttagtacatatttcggccatttttgacaaattttcacaaaaaaatgcaaaaaaaaagcgaaaaatacacacgtaaatgtagactattgggaaattttaaaaaattacatacccaaaatttacgaaaatttgggttttcgtcgttattttgggatttttaacaaatattttcactttttttttgcaatctttcttttttttaaatgcggattttttttgaaattggcatacttggaggtgttttttatacaactgacacgacaaaataaaattgcattttttaattttaaatccatttttttggttctttatagtatttttaagtttactagcggggttagcgccttcggcgcatcccccgctanggtagtacgattgtgttgtagaattatg

SEQ ID NO: 117028 - DNA, 586 bp, Heterodera glycines
tcctcccttttgcattggacggcacaaaacgaagcgaacggagcgcggtggcacaaaatgggaaatgacggcacaaaaacaaaaataaaagtgaattttttgacttctaaggcactcctaaaatgggacagttgaaaaattgcaattttatgagtattttaaatggaacaaaaaaggcaaaaacaaaaatcttttactgcaaaaaatatgtacgcttagaattatttatgtaagcaaagataataaaatgtacgcagtgaaaagcctaaaaaactaatttttttcgaatttccaaccaacaaaagcaaaaagaaagagcataaattgaatttatgacgaaatgacatttaattttttcaaatttgcggatcctgctgcaggatatgaactcaaaatttatttgtttcggggcgggatcactcgggtattaatcccaccaaatctcgcacttaaaatttgcgggatgccgtgcaggagtgcttggttttttaaattccaaaaattagaattaatttaaaattaataaaaaaacaataataattagggcctgtaattatatgtaggatatataaaatcgcaaaatatg

SEQ ID NO: 117029 - DNA, 364 bp, Heterodera glycines
taaaaaaaaatgtgaaatggaaaaatgaatttggcataaaacgcagcaaaagtaatgcctttaaatttttaatatttttttataattaattttattaatataaaaataacgatacgattttcaaaaggttgtaactgttgagttgaggttgagaaccgaacgaaaatcactttgttaccgaagaaaaaagtcattaaacgaatattcaaaaaagtaattgttaaaaaatgatcagttttgtataccttattaagggtccacaagttttcaaattaattgcctttctaataaagctttcagcacttgaaaagtgtctgcccaatttggcattccaaaagggaacaattggcatttatgctcaatg

SEQ ID NO: 117030 - DNA, 148 bp, Heterodera glycines
  unsure (1)..(148): unsure at all n locations
tatcgcaaatgataagtataantttttctctaaatattagttttcttattgttcccttcttttctttctctctgtttatatcactcatgtgggacggaatgacccctggttgatcctctctaacaccccaggccatccatctgagatg

SEQ ID NO: 117031 - DNA, 603 bp, Heterodera glycines
tacaatgaataaaagggattattattattatggcattgtttcttttaatttttgtgggcttttttggcgaaaaaaagttgtcaattactcatatcaaaataagcaaaaaagaattaggaaaaacaaatcaaaaaatagtaaaatattaattgctaattaaaaacggaatattcggattcagagagatccctgacccttcgccgggagaatccatgtggggatttggtgaattacaacagaaaataacgctatatacatatatttatgtctgatgaaagggctcccggaaaatgagtcagtaataagtttttctaaaataaagttgtgtagcattattatattgaattaccaaaggacaaaattgtataaaaacatcatactgaatttgcgattgttttttaaaggcaaaaaaaaattgaaattacccaaatccataaaataaacattctgtaaattaccaacccacgtttatgatttcaggtaataatactaccgtgtttgttttttcaagaaatcctgacttatgacgcattttccggtaacggacgaaagcagtaaaaaaattgtaataaaaaattttaatggagaaaaattaaaagaatg

SEQ ID NO: 117032 - DNA, 1003 bp, Heterodera glycines
aactcagaagcgcaaaaaaatttgattacagtgacagatatcgattacatacattcctttttcgtttctattcacataatgtgtcagttttgtcattgactcccccccccctttttttcagcaaatcataacaacaatgtttggatggacaattacccattttttgccatgctcattcgccccgtttcgatgcaatggttgacaaacttttcgatggcaatttcaatttcggcaagttttttttaattttttttttgtaaaagtcagtagttatttagggttttaatgtttttaatgattttgtgtccaaaaacggacctctaattttcaaaattactcagaaaataaagaaaagtcggcaagttttttttttcgggcatttagaccatagggcgtgagttcaggaaaaaattggtaaaaaaataaaaaatattagccctattgatgactttttatgaattttttaagctggatttgaaattttactaaattaagccaataataggattttcttttgtaaggattttgtgccaaaaactacccttcattttcaaaatggctctaaaattttttttccaaattccgcgtatttttattaaagtgtccgctttttagggtttttggtaccacattttttgatttaaaaaataaattttttaatgatttcaaatttttaatctttagccgatatttcggacatatttcgtccatttacaatcaatatttcactcttgatttttttgtttttagattgattttcaacgacatttggatggatattttccccctttttgaccgtcctcaactcggtctcaaattggcattgcttttgtcacgtttcgatgtgctggtggacaaacatttcgatgccaaaaaagtgaattatttttaagggtttttgttgtattaaggattttgtgccaatttggggcctccgattctgcccgttttaaaagatttttgcacttttaattcttaacttttcagcaaccaaacaacaatg

SEQ ID NO: 117033 - DNA, 211 bp, Heterodera glycines
tattagggatagagaacgcatttaattaggaaaatttgacgtgactaataccagtgatgtaaatgtcatttaactttgtaagcttaaagctagctattcaattaattggagtgtttgggctttatttcttccgcctctgtttttaaattattctctcccaatttctttgcctttgaatgatcttttactgtttttaagatgtgttgagatg

SEQ ID NO: 117034 - DNA, 182 bp, Heterodera glycines
tttttattggagacaatttattaagaaaattaattctcacattagcgtgggaatagaacttaaattaaaaaaaaagaaatttaagtacagaaattgaagaaaaataatataaaaagaaatttttaaattcattttattcacattttaattcattaataagccaaaaattacagcaaaaaatg

SEQ ID NO: 117035 - DNA, 531 bp, Heterodera glycines
tagttcggcctcacgaattttttgtaattcgtgtcgcttgccttccccagggtttggccccacggattttttgtaatccgaggcgcttccccggtcccatagttcggccgcacgaattttttgtaattcgtgtcgcttgccttccccagggtttggcccctcggattttttgtaatccgaggcgtctttttccttgctcagttggcccctcgggtttttcgtaacccgaggcgtgttcctttctccagtgaccaacccctcgggttttttgtaacccaaggcgtcccccattgtgagcaggtcgctcctagggttttttgtgacccaaggcgcctcccgcttacacggtcggacccatcgagtttttcgtaactcgtagcgtccttcctcatacattgtaagactcttggtgggtctgaagtcaaactcactttgtccactgtttgttcaacttactgctattttgtgaccccgaaccccacacaatttgttcggaagtcgggtagcagaacccaaaagtgagcaaaaatg

SEQ ID NO: 117036 - DNA, 201 bp, Heterodera glycines
atttaaagcggctgttgagcagcttaaacaaatcaatgcctttgttcaaagggctaatcccgaacagactcatcacacatccataagagagaaacataagagtgaagaaaaagaatcaaccttaaacttggctatcagatacaaagaccaagagaaaaaggctaatcgacaaacatcgggtgctgttaagccaaagccatg

SEQ ID NO: 117037 - DNA, 60 bp, Heterodera glycines
tcttgaaaatttaaaattcaaaaatttcacggcctccccccccctcacttcatcaaaatg

SEQ ID NO: 117038 - DNA, 197 bp, Heterodera glycines
tttttttatgcttataaacttcgccaaataccttagcctactccatatcccaaaataattaaaatttattttcccaaaaagaattaaattatcataaaataattaaattcgattttacccaaaaattaaaattattttctcaaaataattttaaaaaccttttttttgagttataagcatttattttttaaaaaatg

SEQ ID NO: 117039 - DNA, 96 bp, Heterodera glycines
aatttttcaggaaatatcaaaatattgcatcctttttcagctccgttagctttctctgccgcggccgccggcgcttttgcaaccgccgcggcgatg

SEQ ID NO: 117040 - DNA, 59 bp, Heterodera glycines
cgtaacaatgaaatggaattttcattaatccaaaaaatcatacttatatattaacaatg

SEQ ID NO: 117041 - DNA, 86 bp, Heterodera glycines
tattccccgggtcaccctattctcttaattttgatagaaacaaatacattcgagcatttgttgacatgtatacggggctcgggatg

SEQ ID NO: 117042 - DNA, 151 bp, Heterodera glycines
tgccgcatttttattgccattttccttttgttttttatttatttttttttccctttccaatttttttccccccttaaatttttaagttttatattctcacaaattcgacgagccccttttttttttcagctctttttggcactgaaatatg

SEQ ID NO: 117043 - DNA, 247 bp, Heterodera glycines
acgattgattggcagtgcgtacgggattaatttgtggaagcacacttcccctttttctctatcagtttattcatgtaaagccatttctttctcgctctatatctctctctccattttccctctttctctctcgctctcatctttcctcttctctctctcttgtttctctctcactctcattctctccttatttctttgctctcactttttctcgatcagtctcgagttcaaatcaatctcaattatg

SEQ ID NO: 117044 - DNA, 63 bp, Heterodera glycines
ggtatttgcacggagcaaatattttaaatacatttaaattcaggggcaattgttccgacgatg

SEQ ID NO: 117045 - DNA, 501 bp, Heterodera glycines
tttgcgcctttgtccaaatcgggttcaaaattgttttttcaatccctgatcgcctaaccagcattattttttaccttgaatccgatttgacctaggcgcaaatgtcggggccaaaagtcgtgccgcaaatgtcggggccaaaagtcgtgccgcaaatgtcggggctcagttcatttttagcctggcttaaagcttctgtaattttaatattctacctaatttctgctgtttttctcatttgaatttcgtttaaatttgctcggactgaaaatgctctgtgcttacgtcgcttaaaataaaaccaaaaagggacagttctcgcattaatttatcatttcttttttcgcatcaatcaaatgccgctgctgacacagttttcctcgccaattgggcggaaagtttggctataaaaatgggaaatggacaccgtaataaccaaccactcattcattagtgtattaattaatttgctatttttgtgggccgaagtgtgccaaaatg

SEQ ID NO: 117046 - DNA, 892 bp, Heterodera glycines
ttgtgcacacgaagcaatcaataaatcaaatttaaaaaaggttattttatgcgtttaggctcattaatgcattttaattgaatccatttgcaaaattaggagaaaagaaaaataataacaaaaaattagtgtttgggttttgtggaatgagaatttcttgcattggcattttgtgccaaaagacggaaaaaactatgtaatggcaaacaaaaattaggaagttatttgactaagattaaaattgggtttgtaacttttaagctgcatgggcatttcgcctatttaccgattctcgaggccgagaacgaattacaccatttctttgtatattgtatatctttttaattttccatttattattttatcatttttattttcgataatttagtatgaattaacataatttttttgcatccacaattttattcattataatggatgaaaaatgattcattagcaaaatcagagtcgatttttgccggatggttttttgataacagcggaaaaatggtggtgatgacaaattggaaaaactgtgcaaattccactgatagaaaaagagataaaaaagcgaatgaataaattaattttataaaaaataaacgaacaaaaataataatcattaatagaaaatcgtacaaaatgaaaagaattttaaaaaataaaattgaaagaataaaaggaaaaaaagtaaaagtgttacctatttgatatttccagtttctgcatttatttaaaattttcaaagattttctagcgcgcaatggacaaacattccggagacctacaaaaagtttagatattaattgtaaatatataaagtcccaaaaaagcgataaaaataatctaaaaaacaacaaaaataattgacataaaattgcagtctaacatg

SEQ ID NO: 117047 - DNA, 662 bp, Heterodera glycines
ttttataaatttcaaaaattttcccggccgcgcctatcggcttcgccggaaccttgttccctaaaagtttatgggaaacatccccctcccccccccccccctctcgaccctctccccgctcatccgatcccgttacatcccccctttttttgtggccaccccggcacagcttttttgacttaatttgttgccgccgaaaaggaagaaattggcgatgcgcccgagggggaaacatttcgtgccattaatcgcttctctctgagaatagacagcacaaagcaaaagcaaaaaagttggttttggcggggtgtggcgtcgtcgtcgtccatccccccgggggacggatgaaaaagcggtgccaccaacagcccaaaatcccgtcagaaaatctgcgggactgccgctgttttcgcccccaaattggccatcgaaatttttgggatatttttgcttcttcgttgaaattttgaatgtcaatacggtgccaaaagggatatgaagccatccaaaatagtaatgcattttcgagtttaaatgcgtttaaaaaataaatatttaaattataaataaattgttcgattctttgaaattccttttttaattttcaaaaaatattttaattttcctttcagagcaacaaaacttttccgcccagctcaatg

SEQ ID NO: 117048 - DNA, 669 bp, Heterodera glycines
ttcaaattaataatcaaaaattcttttaaaatttttttgaccccaattcaaaaaaggaaaaaatttcccgtcaaaaaattattcgattttctccattttgttttccatattttccgaaatttattcggtatcataatccaaaccaaaacgaaatcgttttaaaatattcctttctggacttgacttggtttcttgatatcgaagctgttttctccgctatttctaaaacggttataccaaaccccagatttttgaatccggttttcagaaaaaatgccttgtggtgaaaacaatatttcacatttcactccataactttgtgagttcggcacggatcgagaccgggataagaccattggaaagagcagctcgagctctacaagaaggtatggaaagaaaaaatagttatttctgggactttttcagaaatcagaattaattctccaatgtggcccaaattttaggcccccagccacagccccttgcttctcccagttttaagtcttggatttgtcaaataaattcaagacttcaaattaataatcaaaaattctcttaaaatttttttgaacccaattcaaaaaaggaaaaaaatttgcagtcaaaaaattattcgaatttctccaattttgtttccataatttccgaaagttattcggtatcataatg

SEQ ID NO: 117049 - DNA, 816 bp, Heterodera glycines
aaaaaagtttttggaagggagaatctttttctaagcaattctatatataattttcgtaatgtatgtcacaagaggagagagagagaaagagaagaggagagagagagagagagaaaagaggagagagagagagagaaagaggagagggagaaagaaagagaggaggagagagagagaaaggaggagggagtgaagaggagagagatagaaagaggagagagagagagaaagaaaagaggagggagagaagaggagagagatagaaaagagcgtggtgagtcgaagtgcaaaaagtccgagtgtggcgaagtgcaaaaagtccgagtgtggcgaagtgcaaaaagtccgagtgtggcgaagtgcaaaaagtccgagtgtgggcgaagtgcaaaaagtccgaatgagtgatgatcagaagaggcgggtcatttcagtaccgaagatttattctaatgattaattattatttaaatttataattgaatgataagctaataataaaaaatatatttggctctatttcagtttacaagaccacaaaaaaagacacgatcatgttatattttgataaatttcatgcaccataactttttctagaagcacccaaattaaaccttgctaccatttgatagccctaagaatcttctattttcctgtgaaattcaaaaaatttcgttgagtttcaaagaagttgtggtcaaaaaggtttaccaaatcaatttttgtaatttacaagccacaactttttttgaaacacaaccaaatttattgaaattttaaaggcaaatagaggacactcagggctatcaaaagatg

SEQ ID NO: 117050 - DNA, 1003 bp, Heterodera glycines
  unsure (1)..(1003): unsure at all n locations
ttaatttcaancataaatacactaaaacccataaataagaaataatttaaatagaaaattataagcataatcatgtaaaagaaataacaaaatttaatcaagcgcagaaagtaccgcttatttgatgcaaattctaactgagaaaataacaattatttaaatagcatttaaaataatttgtaaaaacttgcaaatggtagacgaaagcgctccgtcaaagaaacgagaaaatatattattattacaaaataaattatttaatgaattttaaataactaataaaaaagctaaaataaaaaattttatataaatataataaacatacaatttaagaataatataatttaatcgaaatctaaaaccgcatgaaatacagcctatttgaatataattttttaaaatatgagcatttgaagtaataaaaaaaatttaatttttttaacaactaactcttttaaaaaaagtgcatccactttggcattttataacatgcattccgaggccccaaaaattttcagaattcggaaaacgaaaaccgaggctcaaaaattttacaagaggggtgggggatgtagtccggcggtgccgataggtgccgccgggaaaatttttgaaatgagtaaatttgttaaaagaattttgtccaaaaattgtccacattttgtgattttggagctaatttttaggaaaaattttgggtttttgggaggccggcgatgccgataggcgccgccgggtgaattttgaaatttaagctctattttctaagatatttttactaaaaaatttatgaatttccgataaatttttgttttacttcgatattttgtcaaaaatttcttgaaatattattaattttcatgatttatttagtcatgcaaaattggttttaaatttcaacgaaaggaaaagtttttgaaaatttgggtttaatttgttaacaaattatgcaaagaatggttggaagcgtcggagttcgggtcggggttaaccccgaaaaatg

SEQ ID NO: 117051 - DNA, 1003 bp, Heterodera glycines
aatttttgggcggaccgtcgtcgtttactccattcttttgcgcacaatgtccaaacagaaaagggactttcccttcctataaaaagggtcgaaagtggaaattgcattcattaattaattaaaccaaaatcattcattaactaatcaatcaattggtcagtccctctcacaatgctcttctccactccaatgccactctttctcgtctcttctgtctttctcttcgtttttcttctcgtcgccatgtttttggccaatccgtccgatgcgcggcctcaatttggctcatttgccgattcgatgaccagcggaacgattttgagtaatatgtggggaaaaaagcgatgagaagcggccaacagcagacggagaaagaaagaaaattaaagaaaactgaagagaacaattggaaataatcaacaattaataaataattgttaattttgtataatcaatcatcaattataaatggttggtaattaaattgattttttattttgctggcggaaacttaaaatcccgaaagggttcccgactgcttattgttcgattaactgatttataattttacgctatttttggggtttgccaatttgtggcattttcgtattgctatttgattattatataattcattttcaaatatcaaatgcatttcgttaataacactgatttttactcttttaaaatggcatttaaatttaattggccaaaaatgtcacttgcttaatcatttacttatgttcaaacataatcttttaatttgtcggaattgaatgaataagccataaaattcactcggaaaccaatgagtaatattcaaaagcatttttttgtcgctcccggcaaatggcaacggtctgagcaatggcggacaaatttggagctatttataagcgaaaaggtgcagaaatgggcatttcttttgttgcatttaaaaattcatttaaaacatttttatgtgtgattaaaaattaatatttcagccaaactcttccaaatg

SEQ ID NO: 117052 - DNA, 178 bp, Heterodera glycines
ggtaccgcaaacgcacggttttggcgactttaggacaaattttttgttgtctttgtgccaaaaaggggccttcattttcaaatgatttttgcctaaaaccaaattcaggccattttttaggttctttgcttttttttgcaattttatattttaatattttcagcaactgcgcacaatg

SEQ ID NO: 117053 - DNA, 292 bp, Heterodera glycines
gtaaagcattcgtattagcatcgaatattttacgactgatcagtcggatcaccctcacatgctcacaatctgtagtgatcgcattgaccatcttcaaatgccgaactgtacaaattaaagaacggcacgatcgatttatcgatcaatttatatgcatattttcgatatttatcaaaaatcgaacgaatcactttcccagtctctagcacaaaaatataaagcaaatatatgtaaatgacaggtgctaacaaaatttggagcgcggccgcactggggaaaatatttcacaatg

SEQ ID NO: 117054 - DNA, 737 bp, Heterodera glycines
ttccgtaaaaagctgctcaatttattgccgtccatgattttgatacaactatggcgcaactctttctagtacggcttcgttccacttgagcagaaatcactcgtacgtttgaatgtttaaatttctccgaattgatcgacgtgatggaaagtgattgcgaacagtgaaaataaattaaatttggccgtcagaccaacagtatggtaagttgagtcccaagctgaatttggcactccacttcctgcactttttcagcctgaaaggggcaagcgcgcccctaattctttttttttgttacccatttctaacctttttacaccgattcagaccgttattattttgagtttggggactatgatatcaatatttacattttgggccacatgtatataaagactgggccgaaaagaagcctatacaaaaaaaaatagaaagtgtagaagaaaattttttactgtttttctcatttgatttttaaatcactttatagcattcaaaaattattttattaactcggcatgtcacgaaatgacaagctaaaaatcaatgtgagattaagaattttctgcttattttttctatacggcgtatatgtatgtcattcaatattaaaatgcaaattcatggatttcgaaatattcataatttttaagaatttattttaataatattattttaattatataataaacagatcaaaagattcaaaagttaatgcaattcattcagtgaaaatg

SEQ ID NO: 117055 - DNA, 212 bp, Heterodera glycines
  unsure (1)..(212): unsure at all n locations
atttggaatgacaaaaaagcattattatacggatgaggaaaaacgtaaaaatgttaaagcaattgnatcaaatatatgcaaaattaaaaacgaaattcaatgaaaaattgaagggaaaaagagaaaaatgccaaaaaataatagcaaaatatttggacataaatattagaagcatttataaatggaagaaagaaataaaagttggaaaaatg

SEQ ID NO: 117056 - DNA, 129 bp, Heterodera glycines
ttttctggtcatttttcttccttcgtgcgacagatggccacactttgtcccctttttcttctcatagccaaaaaaatgaaaatttatttgtccacgaaaatgtcgtaaagccgaaaacagtgccaaatg

SEQ ID NO: 117057 - DNA, 67 bp, Heterodera glycines
ttttgaagcgaccaaacatttgtggcaatgcctctcaactagcagcatttgacagaagtgaaaaatg

SEQ ID NO: 117058 - DNA, 1003 bp, Heterodera glycines
tttcagaaacttcctttaataaaattttgtgatattatatggcaaaaaattgttcttcaatcacttggtcgggtttacgggctcaacaagcacctgtcgactaagagtatcaatacagactaacaagtacttgtagccacggttttgtttagcaattcggtcaaaaatagccaaatcggtctgccattcagtgtgtaagccaggtgccaatgttggcaatcgacggtagcgccgcttggcctgacgatgcagtgtgtttgtacgttgggtggctaaataattttggacatcggttagactaatttttggttgagttttcgcgcctctctcagcagcggttcaacgctcgtgaatgcgacaggcaaacataggtccttgtacaagaactcaagcaaacgaagctttttaaaatccataatgatggcttaaatttcattgtggtgtttttataaatgccttttgcagttggctctttgttttgagcacgtttgtccttgttcagcaggtgactaataatgtcataaacactgctggttataaaaagccgcccacccgctctcaagacctgtccttcctcagacactccaagagattgggcgtttttataaattaattttaagatttccgtttgttaaggttgtcgtttatttgaactcgatgcactcccgcatttgttccgctcgtgggacgccgctgtgtacaatgactggcacattgccaattttgccggcgcgctgcagattcatcacatttgtgttcagctcaccatagctataaataacgcgttcaatcaggggtagagatcattttatccacatttcgcaacagacgcattatccactctgacttcccactacctgtgctcccagacacaatcattgtgaatggatgacgaaattgtccatcctcccttttaaattgttggaaggcgtccattttactttttttttatgtaattttctttttatttatagtttttttttattttcacagattttaaatg

SEQ ID NO: 117059 - DNA, 251 bp, Heterodera glycines
atcgttcactataaataaaaccaaaactattttaatttggtaaatatttttagaaatttcgtcgctttttaaaaacaccatgccaagtattttaattttttttgttgctctcgacacaatttgctcgagcaagtgctggtcctgtcgccgccattggggctaccgctcgaattttaaattcattgaaaagttttcgagcagcaaaagcacttgtatctggagcaattggcacggcaagtggtgcttccatg

SEQ ID NO: 117060 - DNA, 876 bp, Heterodera glycines
ttcaaatttctttgaaatttccgggctctactaagggctcttgtgaaagcgccgggggcgctttcaacactgagacagcaaggaacacgaagcgcctaacttctatataattatctatataaccttcaaacaatttttacacaactttcaacattcttacaacttttcgcagaaattaaaaaaaaaattttttttgataatttgtgaaaggctaaattttacataattttctgcgcttaattactcactcggccactttgcactaatttatgcttagttgattaatccaaactttttacagttctattttaaaaaaaaattacaaattttctcgtaacaaaaaactcattagctgacggaaaacgagcaaaatcagtgtgaaatcatatttatacatcgagaaattttagaacgatgctaattcgttgggaagtttgtaaaaatatttatgattttttagattcaaggaagaatggtataaaaattaaaaagaaataaattcctagaaaaatttacggatttttttgcaatttaataacttttaggttttcagatttttaacaattaaaatccgcgaattaaaatcaacctattccaaaatcacagacttcaaattaatgaaaatttctttttccatcggtgcaaagttacagttacacgtttaattcccaattggtttgcaattattttgtcactaatttttggatttctttcattggttttgatatattttttcattatatttaatttgtccacatttgaatatttattttttgcttaaataattattaaaaattattatcaaaatttttcttacatttaagatattttggcagcaattcctttttccatttaataaatgttacttgagaaatg

SEQ ID NO: 117061 - DNA, 298 bp, Heterodera glycines
tgccgttcctcttggcattgattttcttctaaattttttttgccgaaattacgaacatttaaaagaatttaaatattttcttttttacaaaattttgattaaaattattgcatttaaacaagtatcaacagttttttgcatatcttttacagaattacattttttgattttagcatttttttgggagtgttttagttatatttctgaatttttagacatataaaaacccgtgcccttttggttgtgccgttcatgactgatcggaagaatttttgtttttttttcagaaaaaaagatg

SEQ ID NO: 117062 - DNA, 603 bp, Heterodera glycines
tttttggtcataactttgctcaaacttgaccaaattttttgaaatttagatgatcttgtagagaaatgttaggactattgaatgatactaacaatgtctaatttggttgacattggcaaaagttatgggcagttttttgttgaaaatttccatttgatggtttttatataacgactatttttctttgtttttcactgtctttggttcttactctttcttcatcactcaatcattctctctctaaccctcttttctttccctctcgatatttctctctttcatattttctctctctccctcacctctctctctctcctgtttctctttctctctatttccctctctcctcgtttctctcacattctctacctctctttctgctgatttgtcatcattttgctgtttttaaagggatttgtttcaattgatttaattttaaatttcaaaggaaattactataagtaataattgtcctaaaaaatggtccaatacaaattatatatattattttgatgggcgcggtttgggtgaacccatccgcctgttgcttcactatgttgcccaaccgtttgaggacatccgaattaaagactatgaagaatg

SEQ ID NO: 117063 - DNA, 389 bp, Heterodera glycines
cacaaaatcgctacgaaattcctgccgtttcactgggatgttttgaattttacccagaatcgagatcgggaccccaaaaaaccatagagattttttcggcacgagaatggacaaccgaatttttgatagtcagaactcgctagggagggacacgcgagaaaaccaaaacaaattggaaaacaaagaaataatccatgcttattgttagctcagttagtaacagctagtgctgctcgagagtctcggtctcgagtctcgaggcttgtggtcaagtctcggtctcatagtccagtctcgaggtttttattatattaaaaaataggaaagattgtttcaaaagaggcggaatgtgcaattgtgccaataaaaaaaaattccaggatgccatg

SEQ ID NO: 117064 - DNA, 157 bp, Heterodera glycines
cgcggaaccgcggagagaagggaccaaaaggtcagactcgttctttgaacataaaaccacaatatttcaggagaggaagggatgcccggccgtgacggactccaaggctcgcggacaatcagtgaaatttcattttgaatttgactttcaggagatg

SEQ ID NO: 117065 - DNA, 1003 bp, Heterodera glycines
ttagagattttttggaaaaatgccaaattatgcacaaatatgcaaataaatcgccaaatatgcacaatatacatatggaaagtcatcctagaagcttcaaaacaagctaaaaacatgtttttcgtgcgtttcaagcctcccacagtccaggaaaaaaaatatgcatgtgcatataattccgaaccctactaatatgtattatgcttacgtggcagaaaataaatgttcgatattcatgatcggaaaatgcgtcagtgaatgcgtcagtggaaaatgcgtcaatagaaaatgcgtcggtgatacaactatttgaaaataaaattctatggcattagtattgtaatatagaagtaaacttctataagaacatcgttctgaattcctgaccccggaaccgaattcgaacaaaaagccgaataatcaaaattttcgaaattagggtttttcttaaaaattgtttaaaatacacggaaacaaactgaaagccatcaatccttcaataagagatcatttatgccgttttttggtacttatatgttatctgtgtacagattttcaaaaaaattttttttgaaaataaacttgttttataggttttcggggtcgggaaaaccgattctggcatcttttgaccaattcgaaccccgaacctggattcgaacaaaattcgaaaaaaagtcgaaaatttgttttcaccaaaattcacgttcattgctcaaaattgatttttaagggttaagaaaatttaaagttttgcaaagttttggcgttctgattaataaataaataaataataaacttatttgcactgggagcccaaaattgaatcgccgtgtacgtaagtatcgcctcggatcccttcgaaaaagcttcgtcaacccaccaccccctttcatgtaaatctccaacccaaccccatcccaaaaattgctttctaatagagaccacccattttattcatataaaaactcatttatttaatttttagatatataaaataatg

SEQ ID NO: 117066 - DNA, 1003 bp, Heterodera glycines
gttgtgaacagggacccccgacacaaggagggctctcattggtgcgccatttacgcgaggggaatggaagcaccagcgctttattttgacagccttgcccagcccatcccgcccagcattacgtcatcttttttgtgcgaatttcgtgagggaacaagaaggaatactcacacttaccagtcccctttactctctacttgtgccgcccattgtattgtttttatttaccacatgtccctgggggattcatttacacaatttctaagtattcttaataattgtgcaagtccggacatgtacgcgattgttttattacgaaaaatgttaaatcaataaatgtataattcttctgttgcttaggtgtcgttaattattcataagtgctcattgcactctcaattcccgagggaattacttcaaaggaaaatttgaaaaagccgcctttcgggatggcgtcgaaaattatcgattgatgggaggagcttgtcgatttctgggaggctttataagcacgccaggacacaattatttccatttcttagtccacattatttattaaatttaaacattttattagttttgctgttaaccagggcggttgctcgatttacagagccccgtttatcctggcagcaatttttaatgtcttttaggccttgaggtaatacaataaacctgtctaattttacgagccgtttaggtgccctgtcgtcttgtgcttcatgggtggcagtgcgctgctcatcaggtcatggttggtttgcaattacaacttttaatggaatcgatttcacatttcccatgcccaatatgatcgctataaattggctcgattgaccattcatttatcattcacactcatttctttcctttaattagattttgaataatgcaaaatcaacctcccaaacggccctctaatttttctattgattatcttctatcaatgcctaataaaaagccgcggcgccgctttctcatcaacgaattattgggagaaatg

SEQ ID NO: 117067 - DNA, 852 bp, Heterodera glycines
atttgcatgttgtatgagaggaaaatggcatggattttaatgttgggtgcgcaaatggcctggaatttgaatgttgtatgagaggaaaatggcatggattttaatgttgggtgcgcaaatggcctggaatttgaatgttgtatgagaggaaaatggcatggattttaatgttgggtgcgcaaatggcctggaatttgaatgttgtatgagaggaaaatggcatggattttaatgttgggtgcgcaaatggcctggaatttgaatgttgtatgagaggaaaatggcatggattttaatgttgggtgcgcaaatggcctggaatttgaatgttgtatgagaggaaaatggcatggattttaatgttgggtgcgcaaatggcctggaatttgaatgttgtatgagaggaaaatggcatggattttaatgttgggtgcgcaaatggcctggaatttgaatgttgtatgagaggaaaatggcatggattttaatgttgggtgcgcaaatggcctggaatttgaatgttgtatgagaggaaaatggcatggattttaatgttgggtgcgcaaatggcctggaatttgaatgttgtatgagaggaaaatggcatggattttaatgttgggtgcgcaaatggcctggaatttgaatgttgtatgagaggaaaatggcatggattttaatgttgggtgcgcaaatggcctggaatttgaatgttgtatgagaggaaaattgcatggattttaatgttgggtgcgcaaatggcctggaatttgaatgttgtctgggacgataaacaccagcatcatttttcttaatgatgaaacaacctcattatcataaccgggtgtcatg

SEQ ID NO: 117068 - DNA, 1003 bp, Heterodera glycines
tttagatgaatgattaaaagctgatggatgatgataaacaattgaagaatgatcaagagagggaagattttgaaaaacatagcaaatttgggcattatttatgaatattttttaaattttcttgacgagaatttttgattttaaaaattatgtacaattaacaaagaaattaccatttaagttcattggaaacccaataaaatcagaaataaattaaagatttcacaggaaaaatgcaaaaaagcgaaacacataactttaagaatagttttcactgacaaaagaatgagattattacaaaaaaatcttgaaatgcaatcattgaagctagaatttgataaaaattttgcattttccaaggtttaaatccattttttttggtaaagtccatgttttatgtccattttggtttgtatttttagtccatattaactctaataatgagaaaagtcttcgttgaactgatgagtggttctaactgattgacacttttaaattctcatttattcatttcattttaaacggatatttaaaaatcacataaaatgccaaaaaaagcataaaataaaccaaaaaagtcctgaaaataagcaaaatgtaattaaacccaaaagccgttttgggattcttcggagaacgtaataaaattttatggacgattttcctgtgaaatctttaatttattttgtgctaaaagcttcaaaaaaggtcaaaatatgtgccaaaaattgctcaaaaaataagtgattttatcaaaaaagtcatttgtatagctactgcatgcattggattcgatcctgggaccccccttttgtgacaaactcacagaccactgagacgaaaaatccaactaattttcgcttggagccagaaattgacccgttaatgaggcaaaattcacatattaattcattcactcattaactgtaataatttggataattggttttttcagtttagttcatttctttttcatttttgttattaccaattcataaaaatg

SEQ ID NO: 117069 - DNA, 608 bp, Heterodera glycines
ggctggaccccttcgcaaaattgtccgctgaccccccctcgaccccggggacgggacgaaatctcgccgccggaatctcgccggctgaaatctcgccgagacaaaatctcgccgccgaaatctcgccagctgaaatctcgccggccgaaatcttgccgcagaaatttcaaaaaaaaaaattcaaacagaaatttttcaaggaaaaaagtttagaaaattttttttataagaaaattccaaaaaaaaactatttgctaagtttttttcctattctttttttcgccatagaaattctttgaagtggtgacgatagcactcactcactggaaatggttaaaccaatttacgaatttagccaaaaaaaaaaaaattctgttaaaaatcatccccatccaaaaaattttataatatcttacaaagttttaccaaaaacccgaaagaaaagttctaattgtaatacagaaatccgtaattacgtccagccctgatcccctcagcaatgggactgcttgtcccccccccccccctcccctccctcgttccgcctgaaatttctaaaaaaaattttcgcagcgagcatttcaaattttgtttttgattgtcagatg

SEQ ID NO: 117070 - DNA, 246 bp, Heterodera glycines
atttaaacacataacagtatcgccttgcagaagggcaccataaatgggtgaactgtaagctcgttaaacattgagcaaatcattgaaaaataattttttctgtggtaataattgatgtattgtaaacagtgaaaaataatgatgatgaaatttggggaacccgcaaaagtcgagccgcaaatgtcagattttggcttgggccgcaaaattcaataaaaaaaattaggccgcaaatatccgaaaatg

SEQ ID NO: 117071 - DNA, 215 bp, Heterodera glycines
atttaaaaacttgaaataattcacgcttgcataacttttggtgctgatcaaaaaagtttcttacaccgatttgatcagatcactccttcctagtgaccgggacacccgaatacactgaaaatcggggaaattttcgaaatccctagggggttattgatcaccataaatgatcaatttatgatcaatgccataactttttatagaagcacccgatg

SEQ ID NO: 117072 - DNA, 1003 bp, Heterodera glycines
  unsure (1)..(1003): unsure at all n locations
aacttttttaaaattaataataaaaaataatttgcaaaataatagagaaatctttaagcgttctatgtatttaaagaaaattaaaattggttgggaattaaatatatccatatttttatggtcatacaaaaatgtaaagttgctgaaatgcatgaaaattgttaaacttcaaataattgaaaccaaccttgataggattggaaaacacaaagattttctaatattatttaaatttcaaataaaatttattgagttttaaaatcgagataataatgtttgtgctagttatggatttattaattggcaattacatttaaaattaaattaaattccagtattcctatcatcatagaaataaatattttatatattttaataaaattgtttgtttaaaatcaacggagtggcgattttgcttaaattttaataagagaattatcgaaaatggaaaaactgtaaattactgatcaaaattttatacatcactatttaatataaattagatttggannttganaataatgatttagtgntttagtttttnatggaatnaggtgtaatttattttattttttttantaannttggtttttngtagatgaggtggattttnttggaaaaatattnaaaaaaagaatggagtaaaattgaaanaaaaattgataaaaatttttaantataaaatnaattaaagataattttaataatttatttatttgcaataagaaaaaaattattaaaaatcatttccacaagaattgaatttcattaatgcttagcttttcattttccactctttattttttctatatattaataaaggaataattttttatagaaaacatttgaaaaaatataatttaaaattcaaaatgaatttattcatattattctttttgtgttttattttatttttgatcaccaaaattgatcaaattgaatcagcaaatgaaaaattacaacagaaaacatttgacgaaatatttgaaatttcattgaaatg

SEQ ID NO: 117073 - DNA, 538 bp, Heterodera glycines
tttcagtcaaaagttgaaagcaaatgaaagaattctcctaaaatctatttatagcaagaaaataaaaaatggagaatttacaagacttagtcgccattctgacttggatgagaatttttaggaaatacataaatattcggggtgggaccctaggttgtgaaagtttccggaattcatcaggtcccataaaaatccataacccggaaatttttaaatatgcgactgcggtgcgatgcaagtttacaaactgcattaaaaatagtcattttgtgaatttttaaattattaaaaagagaatcatgatttgattagatttaggtaagtccaataaaaacaatgcagaagaattggtacttatcaaaaccgctagtttttaaaataaaattacggttcagaaattttaatcaaagaatccggagttccgccgcggtcctaaaaagatacggggttccgaacccggaatactgtccctctcctaatataaattcatacaagcgaaaaacgatatctgaaaattataaattttattagaaaaatg

SEQ ID NO: 117074 - DNA, 60 bp, Heterodera glycines
  unsure (1)..(60): unsure at all n locations
atgggtaaattaantcgtaaaaaaataattctcagaacattcggcaaagaatggacaatg

SEQ ID NO: 117075 - DNA, 261 bp, Heterodera glycines
atatttcttctcagcatttttataatttctgtggaataaaaattatattagacacttcatcaccgttttggcataccaatccgtacgcgacctcccgagagaagggtgggtgaaagtgttcgtttattttattgtaactgatttgctcttaaaacaaaggccaggatcagagatcattgtttacaaattagtccaacgatattttaaaaggtggatcgttcgattgatgactccttcgtaattgaacgtacaacaccaatg

SEQ ID NO: 117076 - DNA, 184 bp, Heterodera glycines
aattaaaactcaaataatttttttttgctgtaatttttcgagaatttactagtaaaataattgaaaataattgccgcgcaaatttcgcatttttataaaaatatttttaaatttgaatcaccaattagtcatttacgtatttcttcatcatctttgcaggcctactgtattgaccgtaactatg

SEQ ID NO: 117077 - DNA, 971 bp, Heterodera glycines
aaattgttgtattacgctttaaaaatttgaaaaacttttcaataattggggcctacaggcccccaacaattaatctatcgaacacaaaaaactttttttcttatttggatcaaaaaatcaatggaccgacattaatcttaggggattttaatttgaatagcaaatgtataaaatgggataatggaaaaccaaccccactttcaaaaattggacaacactttgtaaatttcttcacaaaaaattttctaagtatgcattgtaccgggcccacccgaggaaatgaaatccttgatctttgcttgacaaatgatgccaggctggtaacagaggttgaaattaaagacagtctaataaattcagaccatgaatctctcttcataaatctatctatttccttacagaaaactaatccaccagtaataagctatagaaaatttgacccaaaaaatattcatcaaataaattccttcttaagcttccatctaaatgactcattgcaatccgagtttgacttagagcataaatataacaggttcactaaagaatccattgatgcaatggatttattttcaccaaaaataaccttcaaaaaggaaccaaaaaatgttaattatcctatttcactccaagcttctataaaggaaaaagcaaaaatctggaaaaagctcaaagaaaacccgaataaatacaaatctttatataattcaattagcctacacataaaaattcagattagaaaatttcaggagcgcgaagaaaaaaaatttcttgacaaaaatcccaaaaatatttacaaatatatcgaaaaagattttcaaagatgggaaaccccattaattctttatgaaaacaaaactatcatagacgacggggaaaaagcagaaatttttgccaaacattttgcacgtgggtgatgttgtttggaattggcattgactttggcactcgtcaaatatttttcacgaaaaatg

SEQ ID NO: 117078 - DNA, 451 bp, Heterodera glycines
aaattttccctttgctttgtccaatattattttgcatttaaatgatcaataaaataaagatattacaatcaataagtaactgaaaaaatctacaacagattccattccaaaaagaaataggaggctaatatattgggatttccttctttgctttatatctaacaaacgcaaaaaaattaaatttataagcaattttataaatttttcgattaatggagaaagtggcccagcagaattattatttaaccgattcaaaatcatcgtctttggcaagtgctgcccaaaaggagtttgacttcatccatcgtgttttgttgggcccacaacgggacaatttgacagcaattgaatatttagtggcacaaaattttagccaaaattcatcaatgatgcctgcttatggcacggaagggcaaaatgccaaaattggaaatggaaaagcacacaaatg

SEQ ID NO: 117079 - DNA, 191 bp, Heterodera glycines
tttagctgctttctgcgcttccctttgaacatgccgctcgtctgcttttactttctaaagcaattgccaaaaattgcgattctctcgtgcaaaaacaaaaaaaagggtggaaggtgaaaagggaaaccttattttttatgattttatttattttttaggtcttttccgaaaattgtatcgacaaaattatg

SEQ ID NO: 117080 - DNA, 102 bp, Heterodera glycines
ttcttacccaataaattttaggcgctatttaattttttaaaatgttaattaattcgaccacttttctttcaacaacaattccaccatttttattggagaatg

SEQ ID NO: 117081 - DNA, 1003 bp, Heterodera glycines
tgacgggggcttttttcaaaatttgtgggacggtgaatttatacaataaaaaaattgtatagtttctattttagcttgggattaattacttatagtaaaataacattttattttaattccataaccttaaaagcttaaaatttttagcctcagataaattgtgtattagagttgatataatattatgtctccgttttaaagaaatttttaacacgtaacagggggttctaccggagaccctaaaaaacttcctcaatccgaattttagtttttatgcgctattttcaaaatcttttctgatgggtggagggtcagacgccagaaatttttttaatgaatttagttataataagaattcacgtatttttatttcgaattcagcacaaacaatgttcaaatttggattttgatctaataattcgttttcttaattattattttttgctttttgaaccgctctttttgcggcgaatggaacaaagtggtcaagtggtgtcgaaattaaaggcatttcgccaaaataatatttaaatttttcaattttttcgtcaattgaaaatacacccgttcaataataaaaaaaaaagaaaaaaatacagatcacagtgtcggccatcaaaacttaaatgagagagcgattcaaaaaatctttttataattgtttttaatttttttgcccaattttaaagtggcaccacacgaattattccatcctattacttcaattcccacgcaatttttttttgattaattttataaattttattaaataaaaatggaaaaaaaataaaatgaaagtagaataatctaattgagaaatttaatttttaggaaattagaaaaatatacaaaattaataacatcaacaaatcggaaaccaatttgttttccaacgagacaagcaaaagagagcaaatgtatataaatactgtccatatgttaactgaaaatcatccaaatcaacgcggcacagtaataaaatattaaaagatccgaaaaaatg

SEQ ID NO: 117082 - DNA, 762 bp, Heterodera glycines
tggaatttcatatttcaaatattttttattcaatccgaaacaagtcactgaacgttagttcgacaaatttaataaaataaaataagtttttttttttttggttttttaaatgttctcataaataaaatttaaaatttttcaacaaaaatttgtttgaaattttttgtgaatccaaaaatatcaatttcaaatgtttatgctttttcacattttgtccaatttcccgaacacaaatttcgttgaaggcacatgccaacgcaaattatccacaaatccgttaatggacttcctgtactcggcaaaatctaatccaagcaatttaaccatcactaaagagttaatatgtagtggaaaaaacccataacaattttctttaaaactttccaatagaaattttaaaaatctaaaatcgcaccgcaaaaattaatttaattctaaaacattctaaaaagaaataaactaacaaattgcgcgatcgaattgaaatattagacaaattaatcgcaaaattataataaaataaataattaaattttttataatttgaaaagttttccaataaattaaagtaattaaatttttaaatctctaaagagttagagattataaaattaaataattaaatatttttgattggaaaagttttacaataaattaaacaataagattttaaatctattaggaatcattctttaacaagttaactcttttttatcctttttataaataaatttattcattaaaaaaatttttaagaaaatg

SEQ ID NO: 117083 - DNA, 522 bp, Heterodera glycines
atataaaaacgcaaggaaaaactatttttgaaatttttctttataatttttaaaattattcttcttttagagaacccacacttatttgttagtaactatttgaagctaacaagaacataaaatgtcgtaaatttgaattttatttttggttttttgaacatttgcatatttataaaaaaataattacattaaattaaaagaaattaaatgttttaaatctaaacatttaaattattttgtttaatttattaagcaattaatctaaaaatcaaaaatgtcttgaatttttcataaagtgtcctggttttgaaatagtgaataaacaggcgaaaaatttctaattaacgtcatcaaatttatagattaatattatttcaataatatatattcgatattaaacaaattctgccaaactgagtaatttttttttgataaaattattataattcaaaaagaattcatttaattgtataaattttgaaaatattttaaaaccatttagactgtcattgcataaaaatg

SEQ ID NO: 117084 - DNA, 126 bp, Heterodera glycines
gctgcttgcgtagcttttcaatatggtctctccgttgttgctcgtcttcgtcaaatccatctgttgactcatccatatggcgttctgttgcacctttttctctttgttcctgggcttcgtccaatg

SEQ ID NO: 117085 - DNA, 94 bp, Heterodera glycines
ctatttatgaaaataatctaacaattcagatgttaaactttattatgaattccgaaacaataaaaatttgaaaagattcgttccatttaaaatg

SEQ ID NO: 117086 - DNA, 66 bp, Heterodera glycines
atcatttgttttttaaataaaatccttttttattattcattttaaaaataattcgacaaagacatg

SEQ ID NO: 117087 - DNA, 785 bp, Heterodera glycines
  unsure (1)..(785): unsure at all n locations
taaaaaatatgcattttanagttttaaaccccattttttggttgtttattgtactttttaggtttatttaagcaaatattaaatatgcaccccttttttgggatttttgggggtttacaacatatattttggcattttttatccatattttggtccatatttggccatttttgccctttttagtccatatttcgggcttttttagtccatatttaatgtccatatttcgcgttttttagtccatataatttacaaccctaattataaccaaataaaattgaaaaatttatttgaaataaaatttaaaaacgggtaacatagatctatttttaaaaataattcttacagttattttctaaatttcatttttctaaaattcaaaaattgtccaagtgtcaaaaaattttgataaaaaaacataaaaatgaattcataactggcttaatgcctctctatctctccattctttttcgttattccatcatctttatttatttattttttgccaaaagctttcacatgcaaatttttttttattatatttcaaatcataaaacggcaaaagtgctgttcaattttacgttttccatattaaaattcaaaaatagtcaaaatgatattggcccgcccatcttattaatccataatttttttatagcaaaggcaataaaacccaataataaatatagaccaaatcgcttttggagtatttaagggtggccaaatctctccaccaatcactttccattccaaacccgatcccaactccaaatccccccaaaatg

SEQ ID NO: 117088 - DNA, 170 bp, Heterodera glycines
ttgatttcgtaaattattagaagtaatgtttttaaatttaaaatggtgcattattgtttttccataaagaataaacaaaaatgaaataaatttttataattttattttaaaatattttctttttttctcaggttgagcctgactggcgtgcctttatcaccagtaacatg

SEQ ID NO: 117089 - DNA, 209 bp, Heterodera glycines
agtgcaaataaaatccatttaaatgaacttttatattaaaaaacatttaaaaaattttttgattaaatatttttattgtaaataaatgtaaattattccattatctaattatctaattaatttaatttaaatagtttaggaagaaaatgggcaagatggactgaataaaacacgacctctttgtctatgcttttacaatcaacaaaatg

SEQ ID NO: 117090 - DNA, 587 bp, Heterodera glycines
  unsure (1)..(587): unsure at all n locations
tacgtaaaggaaaacaaagatttatttaaaattacggcccttcaagaggacagtcgaacatgaatttgccgattgaaaacttaattatagagatgttttgttgtatntngnagggaagaaagatgaaanannnnggggtanaaaatttntnaaagctcggttactgaaggatccaacagtaaaagacatggttgataaatcaaaggtcatgtggggacgtggaaggaaaaaggcaataaaatatataaaaacacccggcatagtgcgagagaagaaacccttcaaaccactaatatgggccagactgtagagaaaatttattttaatttaaaatctccggcaagttttgctggaattcaaaaaattttaaatgaggccaaaaagattgacccggaaattacgactgatgacgttaataaattcctagaaaagcagaaaacatacacgattcacaagcccatcaggaaaagattcccgatactaaagacgatatctcgagttccatccaaacccaaataaacacactacgggaaacaaatcctcaaatttaagaagagcctgatataaaagtgtggtttgacaaaatg

SEQ ID NO: 117091 - DNA, 425 bp, Heterodera glycines
  unsure (1)..(425): unsure at all n locations
gagaaataattcaaaaatattataaaataacgagaaataaagggagaanggaaagaatatttacaaaaagaatgggttaaaatagaaataaaaatgcaaaaaaattggggacaaatcgccaatatatttataaatggattaaagaattagaacttaatcaacgaatacagaaaagctataaatcaacagagtttgccaattaggatcttttntaaggaattagattcatactctactgatcatcaaaattgtaatgaaagtagggaataaaaaaataaatattttctggtcagtagggataaaaatggttatttaaccgtggaatactttagtttttatttcattataatctttttaaaattaattgagagatggatgaaacaatttggcattagccgtaaagaataacggaggaagaaaaaatg

SEQ ID NO: 117092 - DNA, 704 bp, Heterodera glycines
aacatatgattatatggtacaaaataaagaacatttttatcaattgttttactggtgagataaatatccatcttactaatgcagttgctcatcgatatgcgcttattctacgtctaaacatatttttgtatatgtatacgtcttacattttttgtttcccgcagtggctcaaaaaatgaaattctgtcattacattaaaaagggggtgcaagggatttaaatagatttgaagcattccatgacattttgtgcttatcatttaaaaaatatttaaaaccctattcataattttttttaaacaggatcattgcattgattaatttttttaattttgtaaggaaattaagtcgggtacgtaaaaacaaactagaaaagcctgacatactaaatttgtagaagagttttgtggcgaaagcattttcaagggcctgatgctttatttttatttttttgtctcaagttgcacctatttacgaaggttaatgtccgggagacatcatttgaatatgtgtggcattatgtttttgttattttccccctccactcattcattgttgacccctcatatttttgcataaatacccctccttccttcctccctcgttcacttttcttcactttgttatttatgaaaatttttaactctccatttgtccgttaagcacaggggaatttactttgggttacaaagcttcaacaacatg

SEQ ID NO: 117093 - DNA, 522 bp, Heterodera glycines
tttttatccgcaaaaaatttctgatggaattaaggaaatatctaaaaattcattagttatatgtatgtatacatataggctctctatagatagcgataaaccaaagggaaagggacagtgcctccattgatttgtaggcacaaaaactttgtttcataaatttttaaaatttaaatgttttggcgttatttactaaaaaattttttatcctcttcgaaaaatagagaaatttaaaattgtcggtgagtgacatccctcgtcaggcagtaaattcagtggcgcttatcggcactttcatgctttgcgaaataatattaggtatagagattaaatatttgctactcttaggaatttgaatctctgtaattctaccccgccattcccgaatcccgactttttcaaaattccgtgcttcagaaataagtctcatgtcaaaagcaattaatgtatcaattttaggaaaaccattgtttaatttaccatttaagacctgttaacttcttttgccttattttgaaaatg

SEQ ID NO: 117094 - DNA, 54 bp, Heterodera glycines
  unsure (1)..(54): unsure at all n locations
ttaagtcgattgaacatcaccaaacgtattgaccacctgtcncacgctttgatg

SEQ ID NO: 117095 - DNA, 969 bp, Heterodera glycines
  unsure (1)..(969): unsure at all n locations
atttttaggctcaaaaaactgccaaaataggtaggctttaggctctaaaaactgccaaactaggtaggctttaggtcataaaaaaccacgaaaataggcactaaaaatgggaaaatagacactaaaaagcctcaaatttatgtgtgtaaaatgacaaaatatattcaaaaaaataacaacattaagccaaatcagtattaagatacataatttttaaaataaaacttcttgtcaagaaaataaaaaaataaattttgaaaatgaatttttgagaaatttttcattgtaagggtacatttttgaaaatttttcgggttgtatttttcgttttttatttcatttttgttaacaaattgctcatcaaacgccaaaataggcaaaaataggttttctttcaaaatttttaggttttttaggctctaaatataaaatcctagaaaataggcactataactcgaaaagtagcttaacaacaacagaaaaaaaacatatttttcgtgcatttaaggccacggagagctcaggaaaaaataggcaaaaacctaaaatcatagccctagccataatatataagtgatagaaattgaaagaaagactaagatttttttaattccaactcgctttagtgttanatgttatttctagcgaagctccaaaaccgcagaagtgctttatcccagcccggaatcaactttaacccacccgataatttaacagattttccgagtaaaatcagaatttgcttaaacaaaaaaaaaattcataattattgttatgaattaatattttgaaataatcttaatcttaagcaaaatttaataatttgtttttaataatgttttaatactaccaaaatcaataaattggtttttaataatgtataaaaaaaaatttgtgaataatttcttcatagcataatgataatcattttataaaaaattatttattcattttcaaaattggaaaatg

SEQ ID NO: 117096 - DNA, 303 bp, Heterodera glycines
cgctgagttgggacaccacaaaaatcctcaaattttctcaaaagaccacaaaaatccgcaaattctcatttttcataaaaccctcttttaccctctaaaatagggttaagccccgaccccgagcccccgacattttcgggcctattccccgacccgacccccgacatgtcgccccccgaggtccccggccatttgtctcaatgtgtagcctaactacatggagacgggcattttattgtagtttttgtaaaaaatttgaattttttttatttgaaaatttaaacaaatttagtttttggaatg

SEQ ID NO: 117097 - DNA, 154 bp, Heterodera glycines
aaatctcagtccggaaacagagttaattttaaaaatattatttaattttttcttgcaattgaattaattctggctaaagcagacgtaattttgtctaattttgggcataaaattaaattttaaatattttttgttttagttaaatccacaaatg

SEQ ID NO: 117098 - DNA, 760 bp, Heterodera glycines
  unsure (1)..(760): unsure at all n locations
tttttcatgacttttttgcatttttntgtgacttttgggcattttttatgactttttcgtgacttttgggcgatttttcatgactttttaagtcgactttttgagatttttcgtgacttaaattcccatccctagtaattaatatttaaattaaaataatatntaattatatttttttcaattttttnnagatgtgccaatcgcgcaatgaattgccagaatttccttcccatgctctgagagatgcaaaatttttgttagcatcaaacacaaacccgttgttctgtctctgctttccgttaacatgattttattgattttttcaatcgattttttcctgtactaattgcttttacctaaatggggactcatttcaaaaaattaaatttagaataaaaatagattttctaaataaagttttaaaaaaccgagtcttaaaaattccaaaaaaataattattttttaattgatcatagctgtatcattttgaaaatataatagattttgcctggaagtcctcataaaaaatatttctatttagccattaaatttgtcttattgtaattagagtaccgttattttgtacgaattctcgggttgaattgaataaaggttgtttcatttgtatgaacatttttaataattgaaatcaacaggataggtttaatgaaaattgtttaaaaaattttttaatttgtaaattttataaggttttaaagcatttttaaatggattttttccgcgcgggagagtggaaatg

SEQ ID NO: 117099 - DNA, 430 bp, Heterodera glycines
acttcgtcaatgcttagattcttggtatcaaacgaaagatcaaagtctacagaagtttttgtatagctaaattctcggctaaatgcaacagacaaaaaattattcttgaatttactataaaattctgaattccgcatttctcattgctattttctatgtcaagattttgatgttttcttgagtttctaaattccagagactgagaaatcgtttgataccaagaatcaacaatataggcattgaaaatattgtggcccaagaaactaaaacgatagttactgattggacgaataaactgaatagagccgaaaattctgttaacatttgatcaattaatacatatcaaatgcactacagttaattacccttaattgcctaataaatttccttttctaatttgaaatttcatttcaaagtgcatcccaaaatg

SEQ ID NO: 117100 - DNA, 476 bp, Heterodera glycines
ttctcatcctcctcacgcctccctcatcctcctcgtccccgttccttcatccccccccccttttcactcatccctcctcctccatctcttcactcctccctgatgctcctccctcatccttccgctaatcctcctctctcatccactttcacctcctcactcctcctttcttctcatccctcctcattattcattcacccgctctccttctttatgcttttctttattaataaaaatgccttattattaaagataaatatgtaaataaggacatttgtcctcataaacaaatgttttttttgtttgtttttttattttttattaattcaacaaaaaaaatattctatctcatcaaattaccacccccctcccttctcccctcctttaatctcttcattcattcattctttcttccatcggttcatgacccacactcttaaatcaaaaaatcacacccttttttttcttcaaaaatg

SEQ ID NO: 117101 - DNA, 563 bp, Heterodera glycines
agttagaagcatactcacattttttctttttatctataaacttttccgctctctcgtgaatgccttttcttttttctctctgctttcttttcctgcctttcgtctcgcctcactatttctgctccattgctttctctctgttttcttttccctgtcctacacaattacgcactattttttctgtttaattaattacaatataataattatttgattttatttttttgcgcaccaatttcagcaatccgatctgccattctcattcaaaaatggtaccggcgctgtttggcacgtttggaagcgcgaagaagaggtttgaattatggcttatttaaatttatttatttaattttaaccaaaaatatatttaattatttttgaaatttaatttaagtttttttagcaaataatgtgtataatatttattgaaaaaactacaataattataaacaaatttaattgttttttatttaataattgaatttttatttaaatttaatttattttcattttctaacaaagacattttcaataataattaattattttattttagcaacatg

SEQ ID NO: 117102 - DNA, 1003 bp, Heterodera glycines
caaaggtcgacgattagccttagtagggataattaataatattttgatccacatttcctgctaaataattgatcagcaattgctaggaaaattccaacactttttcttttattttttcgttttactttgctggcaaatggttgaaatcgttcaggtccaattcgtgttgcgaatgcacgaaataaatgcgttcaatgtcccagatcacttcgtctcgaaaggggtgttccaaccaatcacaatgtgcctgaaaaggcgtgcggataaaaatgccaactttacattttggaatttcgataaatttatatattgtttaatgatgtttgatgaatagggatgcgatttttaggtaagaaaaatcccagaataggtacttaaataggtaaaaaaaaatctcaaaataggtattaaataggtacaaaaattccaaaataggtaccaaaataggtaaataaaaatttttattaacgattttttagtggaaaaaagcaaacaaagagggaaaattttggttctacatatctctttgtaaacgaaaatttaaatatattaatattttcttagataatattgacattttaaattaaaaattttgtcaatagaaaaaataaataaattttgggataaatttttgagaaatttttccaattcttagggtgcatttttgaaaatttttttggtcgattcttatgggtatattttttgattttattgcatttttgttaagaattttttgaaaatccttaaaataggtaaccaaaatgccgaaataggtataaaaataggtacctaataggtagaaaaatcccgaaataggtaaaaataggtattataaaagtgggtgtagaagctccaaaccaagctaaaaactcgttttttatgcttatctcaacgttacaagtgcgcaaaaattttaggtatttacctaaaaatcgaagccctattaataaatagtcaagaaaatccaaaatttaatattcaaatttaaataatttgtagaatg

SEQ ID NO: 117103 - DNA, 77 bp, Heterodera glycines
taattatttctcaattagcctctgctaattgccccgtggaggtcactgatgttgaagtggcagtgttcaaagtgatg

SEQ ID NO: 117104 - DNA, 892 bp, Heterodera glycines
attcgtgattgcaggaagagaaatactgtcgagaagaaaaatccaaaggacaaataactaatagggattttgtatatcttcaaataatattggcatttcatgaaaaaaattttctagtaaaagaattattaacatataaaataataaaaagaaaaactgtaaactatttttttattgcatcttaaaaaatttagcgcaatgaacattctacgataaaaatgattaatttataatattaaattatctttaaatataaacactaaacaatttgaaaataaaaaataattccaaaattaaagttaataaaaaaaggtgtaaaaacttgtaaatattaaggtcaatgccagtgctattatctaaattgcgaaagtaggtatgcgagaatgaggaagaacggcatatcataaattttaataaataaaaaatcaaaaagaatatgttacaaacaactacaggcatatttagacctaaaaatcagtggaccattagttatgattaattatgaaattaaatgaattttatcatcttgggtatacatatgacagaagtggaataagaaaactgtattttacaataattttgaaataatttattccgataaaattaattaaataattcaaaaaatatatttactttttgaaggttttcataaatgaaaaattacacaaaaattaaaataatttattttttaaaaaattgaaaataatttgtttaattaaaatgtatcacaaagttctgaagagggttcttcgaaaatcgagagcaaataaaaaatacgtgtaataaaaaatggtgaaatttaaaaaaacacggattaattttaaaaagcaaaataactgagaatgaaaaacataatttgtgataattattttcaggacatactttacaaatg

SEQ ID NO: 117105 - DNA, 165 bp, Heterodera glycines
atcccagcacaaattttttgaaattcgaatagattaaattgtttattttattccaatattttatttgggaaacaataaatatgaaataacataaattatttattgtgtattaatttagtattaaaatttatattttaaataaattttagttattttgtggagatg

SEQ ID NO: 117106 - DNA, 120 bp, Heterodera glycines
tggtcaattcggtgatcagcaaacgcaacctgttgcacattttgtcgccgtaaccttaacaaatggaatggaatgtgaagatggcacggcaaaaattgtacagaattaatcactcacatg

SEQ ID NO: 117107 - DNA, 545 bp, Heterodera glycines
ggaaattttccaaaaaatgccaagtggccaaaatagtgacgaaacgccaaaatagtggcaaaaaactattttagtggccaacttccaaaatagtttttttagtggcaaagctccaaaatagtgaattcctagggataaatagtggcgttaaaccgaagaatttccgagctaaaaatgtgtttttcatgcatttctcgtcgaaataaagctgcagaaaaaatagaaaaaaaccaaaatggaaaattgaattttatactctattcaagacagcaggtggttctattggaggagtacaattatatttctatgttcacctattttgaacggaaaaaaaattattttaaaggaaatgaaatttataaaaaatattttttatgtttcggaaaaactgataaaaatctcaaaaactttcaaaattaacacaaaaatgatatttggctacatcgataaaataaataagctaattgcttcatgcgcgagagcccacggaaggagaagttgtgctaatctcggaagaaaaacttcctcgcaactgttggccaatg

SEQ ID NO: 117108 - DNA, 932 bp, Heterodera glycines
  unsure (1)..(932): unsure at all n locations
aaaaagtttgaaatagtgacgaatagtgacataatttcagccaaaaattgagcaaaaataatttttattcactgattccattgcaaatgagtagggctgggatttttaagggcaaaaaaacaaaataggtacataaaaaaataattttttaaattaaaattcttgccacgaaaatacctttttgagaaaatttttttcatttcttaggagtgctttttgaaattttttttgtcgattcttaggggtgtattttttggttttattgcatttttgttaaagaattttccaagaaatgtcgaaatagtgacgaaacgccaaaatagtgatttttaactattttagtgacgaagtcgccaaaatagtgatttctagtgaccgataatgacatcagaatcgaaaaatttttatgcggaaatgcgttttttaagctcctttcttcaaaacaattattgctgattataatgtggcgtctttcatttgctgatacaaaaccaatttcggctaaggttatggagggggagggggtccttttgaatagcgacccaattttgggtagncttatnnaatctataaaaagaagantntntntttctttttctcatttcatccactnnnaaccattacnnataaaaacattccnnaaaaatcattaatactttttatnatcattannattnaaatttttaattaatcgaaaaanttatttaccttattattattatattattaaatgtgacaaataagtagcaagaaaaaaaaatcaattttacaatttaatgagtgttgtaatcatgtcaatatttcactttaaaatgtgtagaatttataagagaaaaatataaaattcattttgagaaatatttttatattcttatttatttcgttcttatcaaaaaatattattataatttctaaaaaaaaattctgcaatg

SEQ ID NO: 117109 - DNA, 91 bp, Heterodera glycines; identical to SEQ ID NO: 100405

SEQ ID NO: 117110 - DNA, 130 bp, Heterodera glycines
agaaacagcggtgcaagaagattggcaagcagttgctgaagaagagcagaagcaacaacagaagggggccatcggcgcatttgcgtcgcccgaggggacaaattgctgcagcagcaaaaacccattgatg

SEQ ID NO: 117111 - DNA, 1003 bp, Heterodera glycines
accctaaattaatcaggtgaatagtgggattagtttcaacttgtttccatgcccaccaattgacattaaatgtatcgtaaatggaaataaggggcaaacaaaaagctcattcatcattggcactgttaaatttcaaaacaaaatctaaagttccaaatgaatgccacaacgaacaatacggtattcatcaattttattgggataatttcaacaaagttcgtagttgaaagtgtaaaatcaaaatcacaatttttacgttattttatttttgggcttgagataatttctttaaaaggcttaatttttaatgactctgatgggtggaggcgccgtgaaaatttttatgaaaaagtaaaacaaaagtttacgagtcttttatttttcaaattcagaacaaatcaatgtatgaaaatttagcttttgaacctaatttattaaaagccaaaatttgatgtttttttttgctttggttttcgcaaaaattttgcagagcgacaaatttctgggaagaagggggtcggtcaacagtgctagcagacgccaccgagaaaattttatgaagatttagaaatttttaagtattaaaattgaattcttaatcccttaaataattttttttttactcacttttgttcaattcttaaatggacgatttaaagaattttttttattaaaagatattttttattgaaaaatattttgcagcaaaatttagacaataagataaaatttcgacatgaagcaaatagattgataaagtcacacattaaaataaaagctaaataaataaaaaaaattgtcaacgattttcggtttcttttaaaattcacgtgaaagcttataaaaaaatccaccaatttccgcaaaaagattttttgtatgttttagtctaataaaaaccacgtctattaaggaaataaaaaggggggtatttaaacgggcagaaaaacaacaaaataccaaattattcattattaaataaaacaaaatattttttgctatg

SEQ ID NO: 117112 - DNA, 70 bp, Heterodera glycines
catttatgcagctttgaatggagcagcatttttctcgaatctcgacctgagagatgcgtacctccaaatg

SEQ ID NO: 117113 - DNA, 69 bp, Heterodera glycines
tgaaatattgaatttaaaaaatatatattttaaggacatggctcaaacgagccgagtgttggagttatg

SEQ ID NO: 117114 - DNA, 592 bp, Heterodera glycines
ttggccatcactgccccccgggggtaaataatcgctttgcatttcatcctttgtcaaatctggaatggaatgggagaaaataaagggtccattacatttccacaagcaccgtttctcccccccccgtattatttcccccgggaattttttcaaaagctaaaaattcatcataagattttaagaaaatcgcttaaaaaatttctttacaaatttctagatttgaaaaaaaaaatttttcggccgtggagttggaaacgaactgctcccgaaaacaaatcccaaatataaaatgagacttaccctagctttattctcaattcccgattttcgctgtgataatggagttaattagtactctaatgaattcttgaataattagcgtcattaatgagtggttattattctggcaatgatgaatgtgaggaggatgagcgggatgttggtcattcaagaaaaaaatgtatcaaaagcagcagcaacggaaatggcggcggcgccgcatttggcaactcatcaaatttatggtttctgagccacattcgaattgcaaaatcggaattagagtcagcaaatggcacccaaaaataaaatg

SEQ ID NO: 117115 - DNA, 348 bp, Heterodera glycines
acatatatcatcattttgacaaaaattgcctaaggacaaaacgccaaaaaaccccactaatttaaaaattttgccgagattttcccttgtaaaaatggaagagccgatctcgagatagaaaagaaactttcagaaaacaaaagagaattcgatagagagggccaaaaaactagcctaggtaaaatttcaagaaaagttacccacaggaaaaaattttttcccatggcaacaaatttacaaaatcacctactttttaaggcaaaaaatggtacttacacgtaaaaaaattgataaattaaaaagaatgagtgattgtgggaatgaagcaaagcgaaagcgcaaggaatg

SEQ ID NO: 117116 - DNA, 101 bp, Heterodera glycines
tggcactatctgatgacagccgcgggttgatgctcgagtgtcacaacaattaccgctctcagctggccaaaggcactgcggcaaatttgaccggcacaatg

SEQ ID NO: 117117 - DNA, 108 bp, Heterodera glycines
ctgctattatgtggtgaccagcgcacaaatgaacgtgccgtgttcaccggtgacacgctgttcatcggcggttgtggtcgcttttttgagggcaccgccgagcaaatg

SEQ ID NO: 117118 - DNA, 982 bp, Heterodera glycines
tttatgataaaagaaataaaaagcacataaaattattattctgtataataaaaaaattaaagctaaaataatataaaattttttgactatttggcataaggcaaaaattgaaaaaccccgacctcgaaccccgacgcttcaaccccgaacgtgaattttccaaccccgacgtcggggttgcaaccctagtctaaatgaaaaaaaaagttttgggccatttgtaaatccaaaaatttttcaaaaaaattctcagaatttttctcaattgaaaaatgtagcagcctatcctccttcgatttgcttaaattaaaaaatcatttgtcattttattttatatatttaatttttttggatttaggatatccatttggctatcggtttttattaatcatcacagtgagcacttttgcttacctcacaatgtttggtttagcatttcttattaaaaaattcatggacattaaatcgaaaaagtaaaaaataatttattttttatttctatttttaataataataattttggtttattgtttaagcattgtttctcctcctctcaaatcaacaaaaggatgattgaaatgaataagcaagtttctcgaaatctcatcattcaggtgttaaagaatcaaccagcgtttagaataattaattttttatgttctttttaaaatacgccaaattgcgttttttcttctacaataataaagaattatttattcatttcgtgctgattttgagccacttcaaatctcataaacctggtctggatttaagaaagcgttgagaaaaaaaaataattaaatttcattcatgaaatattgtttttagtaatttttcaaagataaaaaagaggcttttagagttaccgtatgactccaagaatgtaaaatttggtttttcttacttatgcgcaaagttagacaaaattttgtcgggaaaatgccttcggtaccaaaaatgtctttaaatttaggcttcaatg

SEQ ID NO: 117119 - DNA, 577 bp, Heterodera glycines
aataaattaataacaatatttaaaatataaaatttcaaatatataaattcgatcagagctttgccattttaaatctttttttagagaaaaatatttttaaaattttcgtaattaaataaataaaaaatttataaatttatttaaataaacgcaaatgagataatttaggtttatatttatatttttttaaattttctttcaaaatctttctaaaaatcggttcaaattctaatttttttttggaatctatgaatcaaaaatttttcaaaaataacaaatgtacttttggaaatttcaaaaataaattaataaatgactaaataaaagtgccataaatttgtgccatttttattttgcatggattgtttagacttttttggcttcatctgaacgcggcggtttcccatcacacaataatattgtgaacaacaacaataacaacagttcttctgcaacaccacaaaatgcaccacaacaaatccgtagccaagtgcttccgccaccattcccagtcaattttgaataattaattaattagttttttaatttattcattatttatttagcctcagtcatg

SEQ ID NO: 117120 - DNA, 308 bp, Heterodera glycines
atgaaattttcatgctaaatttatttcatcaaaggaaacattgccgtaaaattttcaactacaccaattaaaatgtgattcttcaatttataaataaaattactactactgtataccaactttaatttttttaatttcaccaactcagctacagtatactttccaccggtgtcaccaattttgaattcgtaatatgacatgaaaattttgccagcatttttaggtatatcagtccacgagcattgaaattgccaaagagatcgacagtatcaccaccgtaacaaacaaacagtacattcataaccatg

SEQ ID NO: 117121 - DNA, 1003 bp, Heterodera glycines
tatttcgtactttaagccaaatattataatataacatatttttaaaattttattgtatttattattcttttttatgaaattgattgtagttatattttattattaaaacaagaaatatccaaaggtatttatttatttatctttaaaataaaaatctaccgtttaaatgcgtacagtaataaattattgaaaaacacagatggaaaaaagtgcaatttaagggaatttagaaaaaaggtgaaaaatcaattgtcatataagcgcaaatttttttctcgttagaaatatccattaatttccgctcattttggtgacaataatataaattgcaaaatatcttaaaaagctgataatgtgaaaatcttagttcactgcagaagatcaataatgcatgtaaaattaaatctactaaaaaatataatataccattatattatcgtagatcataaaaacaaaaataaataaattatatcagataatcaatagaaaataacagtgagatgtaaattgacaaataaatgttaattttagaatgaaaaataaataatttaagtttttcttaattgaaaacgtttattaattccttaaagtacttaaaagtagagatcatactggtcggtattttattcgttttttcattcagaaaaaatagtatttatttatatataatttttttattactttggctaatgttttttttgagttttaaattaaattttagatgagtttttgaaatttatttcgtatatgtaattatttcttcccgcctcttccctcattggtagcaccggatggttctgttgtctgcccattcagataattaatgcagtgttttaatttcttattctcaaaaaattagctgcgataataagatctcttgtgccttatatttaaaatttaatagtcataaactttctagaaacaataatttattataaattttaatttttattacatttatccacaatgtataaaataatttttatagcctttaagattaatg

SEQ ID NO: 117122 - DNA, 75 bp, Heterodera glycines
actattaagcattgtcccaactaattaacaattccctccccctggcgcttcaggtagaaaacttagcaaaaaatg

SEQ ID NO: 117123 - DNA, 209 bp, Heterodera glycines
actcatttcgatccagaattgccgatcgtagtcgctgccgacgcttcgaaagatgaattggcgcgacgataagccacatctttccggacaagagtgagcgcgtcattgaacacgcctcttgtaccttcaacgcggcacaacaaaactacagccaaatcgaaaaggaggcacttggcttggtcttcgcagttcaaaaatttcaccggatg

SEQ ID NO: 117124 - DNA, 492 bp, Heterodera glycines
tttttgggggggggggggtgcaaagttcgaatccggacggtgtaacattatttttctgtgcatttttgggttattttgactgtttttaattaatttgaagatttcttttaaattatttaaatttattttttttaacttaaagaatttcatttttttttttgaatttgtaaaaaaaataatttaatttcaaattaaataaatattcaattaataatttccaacgttgtttttaattaataactaccatttttttcgtgttttcattgttttattcatttaaaatattttttattttattaataataaattacatttttttatttgaattaaatttttataaaattcgagaaattagttcctttcaatttcaataaatattctatattataaatttctaactttatttttaataagtaaaaggattttttaatttgataaatttataatacatccaataatacaattttcttatttatttcattttaatccatg

SEQ ID NO: 117125 - DNA, 500 bp, Heterodera glycines
catttttttcttacatattttaaggattttttactgtttgggaaattctcaaaaaaatccaaaattttggttattgcttatttttcatttttctttatttttgaaatttatagaatggctcgtgaaaaaataaaaattaaccaaaaatcaagttttcaaatacttatctggttctacgcctatttagctaattttatggcattttagcaaaatttgcaattttgagccatttttaattaaacgattttgcacataaaaactttgttaaataaattgaaaattaaaatttttgaattaaaatattcctgttttttgtgttcccatttttacagtagccacaaattgagcacgacatgagaaaatgacaaaaccgatgacaatgattcaattttcatccatgcacaagagggacggacatgaaatgaattcatcgtaaataataaatattaaaattaaattataatattttatgaatttaaaataaaattatagccaaaatg

SEQ ID NO: 117126 - DNA, 1003 bp, Heterodera glycines
caaatttataaaatcgaagcaaataataaaaagaaaagtcggaggcgatgatgagaaacaaaattatcaaaaccaaaattcacaaaaaaaacaaccagtcccacggacagacaaaatttagaaaagatcaaaaataattaaacagaacgtcaaaattataattatttaaattaataatgaggtcacttatcacaccattttaaacagattttcactgaaaattggccatttttaagtcaattttgcgctttgaaaatcatcatttcaaaaagaacaacaatcatcattgaccctgtgaaaccaccaaaatgatgataaatcattacatctggcagcactgatttaaagcctgatggataaagatttttcactataacactgccaaattaaagtgatcactctcaattgccaattcaataattaactatattcggccccataaaaggctctcttgacagtgtgaagcaataattcccgcatttattcactcttaattaccccctccaattccttcaaatttccttcaaactgttggtataattcgaaagcttaatgtgtttagaagctttttctaagctattgcttcgcgattagacaattaccaaaactgtctgcggcgcaaatgacgcggcgcaagtgtcgactttgcggatcggcgcaaatgtacgttttattcaggttcagttccttgtcatagcagtctttttagaataatttttaagatttttgttgaaaaatgccattttatcataatcaaagctcaaatttttttaaatgaaccaaatggccgccctcactttatttattttgtatgtttccctcgtctcccttattattgcattttttgttaaggaatttcagaaatcctgaacatatacgccgccataaatggcgaaatgggcaaacataggcattataaaagtcatcgtagacacctaaaaccaagctgaagtatttgtgtttgcgtaaaaataggggaaaatttatgaatattaaaaatatg

SEQ ID NO: 117127 - DNA, 529 bp, Heterodera glycines
  unsure (1)..(529): unsure at all n locations
tttttaacaatgttatttcattaancaggggaaagttttcacaccaggaatttgtatggcaccgggaagttttggcactatcttaaggatttaaaaataaaaatatttaattatctaaaaatgcaaccatctaatttggggtcttggtattttcgggtacaaataagacgggtattcgggcctaaacccaaacagaaactggtacacgtctaaccctacatttagagtgtaagaattgactaaataagattgccaagttcgcaatttaattttttttttaaatccaagaagatataatttttaagcccagggattatttgaggatgaaatcattaatttagtattttttttagtttttcaaattaatatcagtgcccaaacttcatgttgacaattttatttaatcatttcattctcctgtgtttttacagttccttctgatgtgttgtcaaaagatgaagtgattgccgtttatcagttccatacccttccaaatcgtcgtgggatattcaacggatttttcccaatg

SEQ ID NO: 117128 - DNA, 52 bp, Heterodera glycines
aacattttcttccattttatgtttcttatttggtctccgttttttaagtatg

SEQ ID NO: 117129 - DNA, 284 bp, Heterodera glycines
ttcttattcacaattgatcatttgatttcagctgctcaaacgaattattaattctctaattaaggctttaattcgttgtttaaacctattaatgcatttgttttaatgtcaccataattttctttcaaaaagaataagttttatttgatatacttttccaatcgtttatgcatcgatttggtcaaatataatttattcaaaattccaaattttttgcccagcaaatcccatcgccaccgccgaaattacagcctaaaaacccattcttttagttgcttaaaatg

SEQ ID NO: 117130 - DNA, 440 bp, Heterodera glycines
gacgtataaaataattttttgaattaatgaaaatatgaacagatttcctgagtagttgccttaagttcaatatttgaaatatttcatattttttttgcattggacttcaaaattaaagtgacctaccaccgttaggggcctattcgtaaaactcttattttaaaaatacttgaaaaaaatcaatgaaattttcaaaaaacgctaaaattcagaaatgagaaattccatttttctgctcatttagctgtttagtatttctcaaacaaattatcttcataatgcaaacgcagtgacagtgtatttcccggaatacatttttgagagaacagcgacgaaagtagagaagggcaaacttaaaggaaaactttatttggaatttgagagtaatttttttaaccaaaacgcggatgatcaaaaaacatatttctcttttaaaaatg

SEQ ID NO: 117131 - DNA, 169 bp, Heterodera glycines
gctaagggcgggcgcttttggtttaaaaattcaccggatggtatatgaatattttatgacatctaaattgaaaaaaaacttgttaatttggaaaaaatttgggccagtgttgtttaataaattctcattatatttaaatcttttcagcagttggcggcaaacaacaatg

SEQ ID NO: 117132 - DNA, 281 bp, Heterodera glycines
gaaacttaaaaaatgaatgaatatatgtaaaaaaaataataaacaagtgtttatcattttaaatattatctatcatcaacgaatttttcttcaaaaaattacatttattcggttcataaattgctaaatcattatttatttatgtgacataaaatgagtatgtaattgaaattgcttattacataatattatttttataagatttactcactttataacatttaaatttaattattttcattataactgatacttttttaggttcgtctcagcacggaatg

SEQ ID NO: 117133 - DNA, 853 bp, Heterodera glycines
agtcggcgatcagcagaagaagaaacgaaatgaaagactgatcaagcaaaggaagagcataccgtaaagagaggaagagcatactgtaaagaaaggaagaaatactgtaaagagaggaagagatactgtaaagaaaggaagacatactgtaaagagaggaagagcatactggaaagaaaggaagacatactgtaaagagaggaagacatactgtaaagagaggaagagcatactgtaaagataggaagagatactgtagcgagaggaagagatagtgtagaggaacgagaaaaatgtaaatgcggaacatttaaaaatatgacatcaaaaaatatttattgaccgaagaaaagttccgattcaatggaaatcacaaatttaatggtcaaagaattaaaaagttcggtgaaaggggtaattaatcagtaattattaaattattattttcaacaacgcttttcttcagctgctccaccaaaagttggcctttttcgcaactttcgtcccacctttaaaagagggaaaagcattttgaaaggctttttcagcgtggtttcaatttgctcgctttttgcgtccttttaataaaattgagcaccatttactccacggggccggcaaattgacggacggacgccgacggagacgcaaaagacggcacacttggcaaatgccgaacagccgttccgcggacggatcggtgaaagagttcaaaggcacgacgacgaaattggcacgccagcgaaaataggcactaagagagaaaaaggagaacgaaattggccatttgaaaggcatcgaacaaatatttatcggtgtttttcatcagtgaggacaaatggtgggccaaatg

SEQ ID NO: 117134 - DNA, 929 bp, Heterodera glycines
ggaactttatacaaattttaaaaaagtaatattttgtatatgcatttaatcaaatttctactttctttataaatgttagctaattagtcagcgtctatttattttctgtaaaaatttgcctctttatttaaaattaaattatatataatttcatgaaataagacactaaatgtatagagaatgaattaacgtgggcgattggaataaatggacaaaaaagcaaagtcaaagacaaaaccttaaagcactagccgattgaaataaatggacaaaaaagcaaagtcaaagacaaaaccttaaagcactagccgattgaaataaatggacaaaaaagcaaagtcaaagacaaaactttaaagcactagccgattgaaataaatggaaaaaaagcaaagtcaaagacaaaactttaaagcactagccgattggaataaatggaaaaaaagcagtcaaagacaaaactttaaagcactagccgattgaaataaatggacaaaaaagcaaattcaaagacaaaactttaaagcactagccgattgaaataaatggacaaaaaagcaaattcaaagacaaaaccttaaagcactagtcgattggaataaatggaaaaaaagcaaagtcaaagacaaaaccttaaagcactagtcgattggaataaatggaaaaaaagcaaagtcaagaacttatcctacctaatttcatggtgactgacgaggcatttgactcccttaagagagccttcccttctcatgtacttgtacctaaaatgttgttggcacaaaaagtaaagggggaaaaagaagacaaatcatccgatcaagggctaagtctcaacagatcgcagtgtaaaagctgctctactgctaacaaccccctgaccagtagtcaagtcgtatacaagtgattttgcgccccgacgttccaccatg

SEQ ID NO: 117135 - DNA, 595 bp, Heterodera glycines
cattaaaatatgcaaaaatgtccataggcttgaaaatatggcagaaagaagaccgaaaaaatgaatgagagggaggggggaccaagtaccccttttatacttgtccttaacatatattcttggccaaacaaaaaaaagattaggaaattactatcataaagaaaatatttaccgatatttcttgatggttatgtttaattaatcagtaaatgatggctatgtatataccagaaatgaaaaggaaaattgtgttgtctgcttacggttgcgttaatccctaaaaatgggtgaaacgaaaaatatttaatccaaaaatgagtgaacaaagttgttaatccctaaaatgggcgaaatgcaaaattattcatccgtaaaacggctgaaatgcaacaaaagtggccgaggtaatagataataagttgcttataggttgctaatccctcaaaaacagctgaaaatgcaaaaaacctgctttattataattttgggcctgaataattgttgtcggtgccaaaaaaagactggaataagggggagaggtaggggggagtgcttatataaagcgtgcctattccaatagcgcatccaacaaatg

SEQ ID NO: 117136 - DNA, 215 bp, Heterodera glycines
  unsure (1)..(215): unsure at all n locations
tcattaaagtctgacaattacgaaaagtttcgggcactttntaatttcgtaattttatttgacantaattaagaattttgttgtatatcgtaacaaatataggaattcaatgtttttgctaatttgagaaatttaaattgtaggcactgcgttgggctgacgaacggtgccgtcaaaatggcatcgaatgttcgggggaaaatcgtcggaaaatg

SEQ ID NO: 117137 - DNA, 82 bp, Heterodera glycines
ttaaaaaaagttgtttttcttaaatctaaacatttatatatattctggttcaatttttattgtctaaatggaccaaatcatg

SEQ ID NO: 117138 - DNA, 375 bp, Heterodera glycines
cctaaaatagtatcaatgtgggcgttcctaaaatagtatcaatgtgggcgatcctaaaaaagtatcaatgtgggcgatcctaaaatagtatcaatggggcgttcctaaaatagtatcaatggggcgttcctaaaaaagtatcaatgtgggcgatcctaaaataatatcaatgataataattaattaaaataattattattcaatgaaacaaatattttgcaagtaataaaaattgttttctacataaaatattattacgtcggaaacgataatcaatgtatgtcaatatttttttgccatataataacaaatttttaatttaaaaatatatttcccttcagtgttaaattcattctttagattgactaaaaaatg

SEQ ID NO: 117139 - DNA, 104 bp, Heterodera glycines
tgtaagaaaaaaagagctaaacttaagcaatattctatgggtaaatttaggacgctcgatcagtgcgtgatcaagagcaaattaagcaacgctacagaaacatg

SEQ ID NO: 117140 - DNA, 392 bp, Heterodera glycines
aaattttgaaaatttgattaaaatttgttgacagattttcaccaaaaaatcatcaaattttgtgatttttgtatcatttttctaatgagaaataagagttttggcgcgccgctgagaacagtttttcatcaaattaccaaattttgcgattttgggccattttctaagaaaaataggagttttgggggcgcggcggtgtcgataggcgccgccggggaaaaaattggaaattttgatcatttataaacagtttttcactgaaaattagccaatttataggtaaaattttgaaaaattttatgggaatttaatccaattcttaggggtgtaaaagtcgcatttcgcgccaaaaagcgaaatgcgaaaagcgaaatgcgaaacgccaaaaaatg

SEQ ID NO: 117141 - DNA, 454 bp, Heterodera glycines
aaaattaaaaaattaaaatttagcaaaaaatgataaaaattattgcaatttatccacaaacctccaaacatttaatgcactgaattctcaaagaattggtgagcattgaaacgaataatttggataaatattgcattaaaattataaaatataaattatttagccaaaggaaaaaggctaaaaattgttcaatcattggaaaataagcgaccaaatttgacgcataaaactcactttgattacatgaatcagttgaagattatgctggcaaacaaatcggaaattgaaaaagtgcgaaacgcaacaattgctgccctcgggggagaatttgaaaaggaaaaagtatcgtaaaacaaaaataataataaattaaaaaactgattaaattccacaggaaaatgatgcttattcaatttgtgcattaaatgaagcattaggaaaagccaaagaaatg

SEQ ID NO: 117142 - DNA, 57 bp, Heterodera glycines
tgtgtaaagccacgctttcttgtggagcagggcgaattccaactgagctcagcaatg

SEQ ID NO: 117143 - DNA, 67 bp, Heterodera glycines
  unsure (1)..(67): unsure at all n locations
acattttgnnntataaattcagaaatcttgnnttaatgattaataaatgtgattacatatntaaatg

SEQ ID NO: 117144 - DNA, 384 bp, Heterodera glycines
attttgggaattgagaatttttattcaaaaataatttcattcatgcctgaggcactctactaaaggaatttccaggctcagcactaaaacttttttttaatgaaatttgttaattctatcaaattggaaaattttttccgcgtttcaaaaacatttagtgaactggggagatacggcggtgccgatttgtaccgccgggaaaatctttttaacttttgatccttctcaaaacctgttccaattttaagataaaaaataagataattaatttaaacgttatttttatgagataatcttatacgaatcgtgtggggatgtgctaaagaggctaatgaaactgaatgttctgcaattagtgcccaagttcgaaagaataccagcatg

SEQ ID NO: 117145 - DNA, 904 bp, Heterodera glycines
aaataaaatctcgaattctcaaaaagcaaacatttaaaatgaatttttttgtcagaaaaacgaaaaattctttaatttttgttttttaaataaacttcagaaatatcaaaaatatatttcaataatgagaaaaaaaaatttattttctagcgaaaaaaattctgattggaaatttgcaaagttttcggtgcacgaattggccaatttactcgcttaacccaaggaaagggaaatgcgcaaatggatactgtatttttaattggtacagtagggccgtaaaattgtttatcggcccaactttgcacttttcgtaaacattcacgcggaaaaacatggactaatgaagcatttaatgattagggttataagttgtgaaatgaagcatttaatgattagggttattagttgtgaaatgaagcatataatgacggttattagttgtgaaatgaagcatttaatgacggttataagttttatactttttttttctttgcatttaaaaagtgattttttgtgtttaaattatttggtttggttaaagtttttgtccgtataaatccattagagctcgacattttgaaaaaagcctggacctggatttcatgaacaaaaacccagaatatttattattattattattattgtttttaaatatatttaatctttttgataacttgccataaaaggggtactcaaaaaaacaaattggaaaatattatccaggaaacccagagttggacttgctttttctggataaaaacccagaaaaatccaggcccaggacaaacccagtttgccgaaaaatagcctggcctggaactaagcctaatacaccgcctaagaattgaattttttgaatttttaaaaatacaaaaataattcgctttcaaggaagtaaaaaatg

SEQ ID NO: 117146 - DNA, 1003 bp, Heterodera glycines
gggtaatttggggcgctgatcacgaatatgacatttatttttcaaaattccgaatcccgaattcgaacaaaaactcgaaattgattaatcacaaggaaaacatttttctaggggttttcaaggactgacctctaccgtaccacggcattcaatttaaaattgaatcattaggaattattagaattcttttttggcgcaaattttggcatattgtaagagcaaattacgcacaaaattttttaaatttgattctttcaattcttttctatgcctcttgtcatagataagtagcgatgtgaagcattaagcagtagtgatgaagtggtcatttaaatttttgaggggacacgtaaaactgaaataaagcagatttcccgctgcccctacgaatcaagcccgtacccaaaaaaaagtcaggatttttatgtgtaatttttcaaaaattttcagcaccggagccaaaaagcaggcatttatagcggttttatacaaaaaatgacaactttttggcattttggcgtcaaatctatccccctccccccctggggatacgaatataaacaacgattaaaacccgagaccgtaattaccaatatataattttataatgtgttttagaaagatgtcttttgtccaaagtccagaagctaacgttccggtatgccatttttgagagtctaatggaagtgaaggtttttgggtgtgcagaagttcgttaactcatgcaaaaatatgcataaatttcattaactttgagtttagaattttaaaatgtttcaaaaagggacattctgcattcttaaaaacttttactttacaatttgtgtaaaattccaaacgtttttgtttggattcacaagggaaatcaatgggtggggctgtgggaatggacggattcgtgggttttccgcggtgggcgttgcgtctgtgtcccttccataggacgggcagtaaattcattcttcgtccattcacttaccattacaacaaaactttgattatg

SEQ ID NO: 117147 - DNA, 1003 bp, Heterodera glycines
ttatttttttttgaaagatctaatgaagatcaatttcactaattgatcgcatttttggcaattcttctcaaattggaaccactgcttttaaaatttggaaaaaagaaaaaaaatcgtaaatttttcattatgcaaaccgtgacattgttatgaatagtgcttaaattttttggctttaaaaaccgccaaaataggcactaaaaaccccaaatttaggggggtgtaaaatggcaaatctatcaaataagctaaaaaaaaattaggcctaataaatatttagaaaaataatttttaaaatcaaaaattcctgtcaaaaaataaaataaaaaactttggaaacgaatttttaagaattttcagaaatttttgagcttcttagtggtgtatttttcttttttattgcatttttcttaataattttggtcaaaacgccaaaataggcagaaatatgatttttcaaaattttttacttttttagctcttaataaaaacctaaatagaaaataggccctgataactcgaaaagtaccttttttatttcaaattttattattcataggtccaattcgatttatcatgatgaaaaaaggagcaaaatgaatgattattatgaaatgaataagtaaatccttctttaaatgacaaaaaaattgccggattattgaaaattggaattaccactttaaaaatatgggaaaaagaaaataattcttaaatttttcgtttttcttatttgtgtattgctgttcaactgctgacttttttctaaattttttagtataatttaattttattcgctattttatttgtttcatgtgaaattatgatgaaattcataactttcagttatttaatcttatttactattgatcgcattttttgtcaatgcttctccacaaaaaaattttttctgatgtaattaaatttattttaatacaaatatatttaataaaaaatattcaaaaattattaattaattatttattatatttttttagtgatg

SEQ ID NO: 117148 - DNA, 127 bp, Heterodera glycines
ttttgacatattttctgataatgataaattttattggccaggctcaatttcttatctttgtattcctttagacctgtcaaccccaactccgtcaaacatccacaaattaaccctaagtgaactaatg

SEQ ID NO: 117149 - DNA, 704 bp, Heterodera glycines
agcgcttttttttgatttattttcaattttattaccttcacaactgagcacattgtaatatttaaaggtgcaaactccgccacaaacggtacatattctgttttttgttgcttttattgtgttcaacaacattttcttcttgaaacatcgttggaatttaatggaatagaaatattaatagagaaaataaaaataaaaaattgcaaaaattaaataatttatgtatgcattacctaactaattggattaagtaaatgaaaaagaattcagtgaaaagaaaaatttatacataaaatggtttctttgattattttttccaaattgggagtttatggtgacccattactcgtcacttttcatttcgtcaccgagaaatttactgtgtttaatgaaaatttttcttacccaaaatttgtagacttaataataattattagagtaaatccgattttttaaattttctgaaagcaaatgttttataataaaaagcatcaaataaattattttttcaaaaataaccaaataataaaatatataaaaatcaacataattacccaaacaaaaaaaaaaaaaagaagaaatttttgaactttccaaatctaataagcatgtgcgcaaacaaatgtgaagcctaaatagatttaatggccaacactgaaaaaatgaaaaagccacgaaaatagagaagaaaaaaaggccaaatg

SEQ ID NO: 117150 - DNA, 230 bp, Heterodera glycines
ttgaacagccaaaatttcagcttggaaccaaaaagaatgtcacaataattgacgtgttggacagtctttgcccaatttgggcattcttttttgattatgattacggcaaaaaatatggaaacaacttggaagctttattcaaagtttcagtgaagccaatgtttatagacaacgaaccgatttggcacaaaattatgaatgtttttcaaaaaattaaaaaatacaacatg

SEQ ID NO: 117151 - DNA, 826 bp, Heterodera glycines
gaaaattattagatacaattttgttatcatttcattttgaaaaagggaatttaggaaaaaatttataagctaacataataatttttttgctaatttcaggcagagcgaccagttgttgttacgttgtgctcgacgtggcgtggccttgtttttttttaattttttttttttgccttatgagttgaaaccgacggtactttcctttttgtcacaccccctgctgaaatattttttaaaacaatttccctatggtaattttcagcgctatacacgaagataactggtccaaatgttcacgtaactcacgccgacgttttggcgccaaaactataataaaaaaaagaaaacacccaaatttaaaaattttgtaaaacaacaaaaaaaacgtatttttcgcgaaggtaatactgccgatggttggttgcccccttttttgaagaaaatttttttgttttcaaaagtcatgaaaacatgcttccaatggttttcagggtcgctgctcacgaaccaggcatccatttcgaccaattcggaacccggagccgaaattcgaacaaaaaatcgaaaataaaaaatttcaaaattctctttttgtttctaaaatagattaaaacaaccaaaacgttttggcgccgacgatttggcgccatgtagggaggaggtagaaatgatgaaatcgttataatttttctgacgaagtctatcaaagagccggattaattcttcatttactctttttcgctttggcttatgttatcttaattttgtatttaggtaatgaatcgtcaaattgatacgaaaaaacaaaagcctaaaataacgcatg

SEQ ID NO: 117152 - DNA, 514 bp, Heterodera glycines
tggccgtacctttgtcggcgctggcacgaccggtgggcgttttctcctgactctccggcaagccaatcaccacgagtgaatgttggcgcctgtcttcctccacagcatcagctgctgcacactgttgttggagaagtgtggtcgtcgaaccgagcagagctgtgagttgtctgatgaacagctttgcatatgccggaatggcgttgtcggcttcgatttcgggaggaatttccagatttgagacgtcgtgaagaagttttttggcggtgactgctgcgataggcgaaaaatgggtcgatggctgcttgcgatatgtgtcgtttgtttgaagtgctccccaacatttttttgtataaatacggccacttttttgactttgccatcattccaattctcatcgtttttttgcattcttcactccctatttttttattccgactattaaaaaataacttcttttatttttagctgtcttttgtttgtcacatacaaattccgtctccgtccaaaaatg

SEQ ID NO: 117153 - DNA, 1003 bp, Heterodera glycines
attcagcaattgtataaaaagttataaaaaaaaagtaatagaaattaaaaaaaggttcgacagcgaattgagcaggcaaaggagactgccaaaaacacaaattttgctcctcgcgaaataatcggagaaacgcgggaaaatttggacgaatcagctcttttaaggatgccgacgtacagttcgattcaaaaaacaattcagcgccaaagagtaatcccgggcgctgcaggggttgatcgaagtggaatagaaaatataatccttgaagtacattcgagagtagggggctgacattttagagcgacaggaaatttgatgcctttccgttccgttttttagttattgccattctggttcatttttcttgtatttttatggaatttttagccttttggtagcctatttcgaaaaattttttgccgaaactgccagccctctgagtattcattaagatttaaaattaattttttttaaagggggaatttacgttggacaaaaatggcaacagatttttactatttgattcgcgcattactgaaccggaattagctaaattttttattttttctacagaaaatggattatcaaggttgaaaaaatacaaaaattggtctggtgatgggacatttaaaggtttaaatgatcttaaatttttatctattaaaatatttaagtttgtccggctaatttcttactgttgtatactgtaaatgtgctgattgggcatgtttctgtaccgtcagcatatattttaatggaaaatcgtaattccaacacgtatggacgggctttcactgttttacgcaaccatttggacaattcaataccgttatcctttttaatggattttgaagaaagttataaaaataatttagtaaatttaaaataatttttatgaaaggtgcaaaaaatgggttccaaacagcatttggtcaagaaatgcctataaaacattgcttattccatctttgtcaagcggtgcaccgtaaaattcaaaaagatg

SEQ ID NO: 117154 - DNA, 159 bp, Heterodera glycines
agtaaatgtgagaccctaaatcaatgagagagagttggatagagataaacaactcagtgtatgtgggcgggcatcttgtcaaacccaagacaggagccaacaccaaaagcttctctttactccatccacccaactctctcgagcagtagatactcaatg

SEQ ID NO: 117155 - DNA, 62 bp, Heterodera glycines
gggggcgctatgaggtcgaatacaatgtgttcagttcaacgatacctcgacgtgtaacaatg

SEQ ID NO: 117156 - DNA, 399 bp, Heterodera glycines
  unsure (1)..(399): unsure at all n locations
agaccgagagtgattagacaaggtgtggtcaatgcttatgctgctggatcacatgangaatgcacaagaaaanccaaacttgnnccctagagtgttagatgtgaattttgtgatgccttgcattttgtagaagagaaagtcaatggtcgcggcaattcttttaaggattgttgccactatggcaaagtttttgttcctgagattcctgagcaggattttcctgaggaattaagggatttgtttatgaaatttgatgcgagacatttgaatttttttaagaacattcgacatttgaatagttctgtatcatttgtttctatgaacccgcttaggtatagatatccgtgtaatcgagggccgtattgcttccgcatttacggtcagatttatcatcgaatg

SEQ ID NO: 117157 - DNA, 112 bp, Heterodera glycines
atgaagtcagcaaaatttctctcgtaaaattttattaatttatctccgaattcattcgtcaaacattttatgagaaaaaaaatttttttttttctgaataaacattaaaatg

SEQ ID NO: 117158 - DNA, 119 bp, Heterodera glycines
cgatggatgcgcctctactttatgcaagtagggaattacaataaattaaacaaattaattaaatttaattataattattttggagtgaattcaatttgaaggtaattcgtcgtataatg

SEQ ID NO: 117159 - DNA, 67 bp, Heterodera glycines
tggactaactatttgttgttctattttcgaattgaaatatggtaaaagtaataaacttacagaaatg

SEQ ID NO: 117160 - DNA, 123 bp, Heterodera glycines
ttaaagtaagcgcgaaaaagtcggtaaataaagggccttggaactgtgaaaagttcgtcgcactgccaaaacagaaactttccttcctctgtaaggaacgcaacagcagcacagaaaacaatg

SEQ ID NO: 117161 - DNA, 1003 bp, Heterodera glycines
tgcaaatgcttaaaccccggccaatatatattactgggttttggtattaaaaaataagttgaaaaattcattacttattagcctaaggagaaagaaaaaacaatattcatttaactaatgattggtcatttagaacagaagaagaaattaacaaaagcatcggggagaattcgctaaatattgtcagaatgacaaagctcaatttcaatcttgacaaaggcatgtgcaatatttgtaaaaaagcattaaattttttaaattcaatttaagtagtgatttattagagtccgattagactgtcgcattgggggcaaaaaaaaaaaggtgaaaatctgatataaaaatgaagattccccggatgttaattgatcatatttaatcagaattggattatcctgagagagaagggtccgtagttcgggtgcacccaaaatgtcgctggttggactacactttgttcattgttaatcaaattaagcattcttggtattgttcgtgagctttgtgttatttgccaaatctcaaattccttaagttaaaaaatgttatgaccgaaataaattcaacttgccatgtttttgtacataataataaaaaaaaattaaaattttgctggctaatagagtttttcaagtgctttcaaacaatattaagatgtttaatttggttgagaaagaaaaatttatggtccaaaaatttgcccgttgacttttcggctggcgacgttttgtcctactccaccgtagttcagctggtagaacactgatccgcaaaagccagagacgccggttcaaattaggcccgtcgcaagttttttcctcaaatgcttccccaagtccttcctacataattcaacctaaacaaatgccataataagcttggcacttttaaatggcgcctatcagttttaatacttaatttcgaaaacttttttttaaataattctccataagatttaccgcaaataattcttcctgctcttcttaatgaattggaagaaatg

SEQ ID NO: 117162 - DNA, 551 bp, Heterodera glycines
gtgaatgaatgaattgttgagaagtgatcgatcaatatgaattattgaattggaaattgtcgtgctcattaaatattctttttttgtgatcaacatggatttgtaatgcgtatgtcttaaggataaatttaatgatttccttaaaccgaaatccatcggtaaaatcaaagtaaaattgaaaaagtgcactgaaattgtgcagttttgaacgcattggtcaccaccaattttcctaaacaaagcaagccaacaatttcacctatttgagggaatgggtcgtttcggcgccaagccaaaattaaaaaatcatgaatcagtgggaaatttttgagcgatttaaattttcaaaaaattaaaaattttaataaaaattgtagaacaacaacaataaactaacaaaagaaaatttaacaaaaatattcgccttgcgcttatgaatcaacggaaactgtgccatttcaattgatgaacgatcggaccaacgaaaagctgaccttgaagaaaaaaggcgatcatggaaataccggtgttgattggctaatgaagcgatg

SEQ ID NO: 117163 - DNA, 400 bp, Heterodera glycines
tttcatcttttttttcaaaatatccatctcaacgaggccattgaatcccgttaaatcctacacggcctgatgcaaatccccaaaatctcgatcccagatttttcaaaaagtacagtctctaatatcagtgtatgtgtgccgactgccgacgccctcaaaaattttgaaaaccggaattttgagcacaaaatgtcggaaatcggcattccgaatcggaatttccggtccctgacacataaataaaattctcaaaaaaaaaagcgtacgcacttattatttattattatattcattcattatttccacatgttttcaagttgatattccttatttctcccttaaaatttatatatatttttaatgctttagattatttaattgttttaatttggtctaaatg

SEQ ID NO: 117164 - DNA, 238 bp, Heterodera glycines
  unsure (1)..(238): unsure at all n locations
atatttaaatggcttttcatttttcgatttttctaattttttatcgcattagcaatnaaagaaatattctctcatcanttaggtagaaaaaaagaatatnnattatcanttanaagtattattcaaaaaaaaaaattgtgaaattaattttttaactaaagatttaaatgaaaaatttaaatattgagatttatttataatttgaaaattaattaatattttagatcccttttcaatg

SEQ ID NO: 117165 - DNA, 175 bp, Heterodera glycines
ttttgtattcatttaaattaaaaaaatgatgagaaaatacagagacaagtgtttttttctcatgctttcctacattagctcgtccagaattagcaagaaatatcaaattctacaaaatcccggcactaattaatttatttaagcctatcataaatacacactcttttttgtcatg

SEQ ID NO: 117166 - DNA, 55 bp, Heterodera glycines
ctctattcataaatttgaagaactaccctttaaaatattccctttcaaagaaatg

SEQ ID NO: 117167 - DNA, 116 bp, Heterodera glycines
ttgcaatttgatttaatacacattttgcattttgtatgatcacttggctggaggcgccccgggccgcccggcgcggatttgcatcgcttgacgatgagcagcagaacaacgaaatg

SEQ ID NO: 117168 - DNA, 692 bp, Heterodera glycines
  unsure (1)..(692): unsure at all n locations
aaaaatagaagagccgatctcgagttaanaacttaagtttcacaaaataaacttgggatcgctagagggggtcaaaatattggtctatgcaaaattttaagaaatttaaaaagctagaaaaattttttgaaagggacgaacatttcaataattttaattcttttttagccaagtcctcgatttaaggccaaaccaaataaaacttacaatattctcaagaattttcccttcaaaatgagcataaaatggttttatttgctctagtattcaccaagttataagctaagaaaatttcataaaattgtcgatgttgtacgtaaccaacgcttttgaatatgattttttgttgacacgaaaacttttattaatgaaaaaataattctgccttcttctgtaaaaaaagaaattgaaattaacacacaacataagaaggactcgaacctgagacccccttttggtgactaacgcacagaccactaagacgaaaaaaccaacttaattgtacaaggagcccaaaatgaatcgccgtgtcaaaatattggttgattgctttttagactaaaaatgatagtatcattgcatgattgcttcaacaaaagcatgttgatgaacctgcttgagcaggacgacgaaaattggacctgaacgtccgagacaaggacggcttcaccccgttgcatcagttcgtgatg

SEQ ID NO: 117169 - DNA, 69 bp, Heterodera glycines
aaagattcggccgccggcggaagcgacgattatgcgcagagtttgggcataaaatatgtgtacactatg

SEQ ID NO: 117170 - DNA, 408 bp, Heterodera glycines
ttagggacgaattaggaattagaaataatgccccattcaaaaaaaaatccaggaaaattagtcaaagccaatgttttttttaaatttttaataattttcaatgtgtcccagtttttagtcttacaatttagtcaatacaccacacgaagagaacaagggtgagggttcgagtccgctcgacaacattaatatttttagaaaaatataaattcagtttgtctctattaacggcgatacagaaatagtacgccaaaatgagagatgtttttttctctgcactctttatttattggttcatctctcattttttaggatgttgttgtcaaacattctaaattttgaatgggaattttagcgttttttagaaaattgcacaggtgtggggtagatgggtgatcattaaaaatg

SEQ ID NO: 117171 - DNA, 114 bp, Heterodera glycines
  unsure (1)..(114): unsure at all n locations
tataaaaaaaacaaaatatantcttctataaataatgttttttaaataaaagaaagtaattttttttaataaaaaacaattaaataaaatataataatatttcttcaggaaatg

SEQ ID NO: 117172 - DNA, 330 bp, Heterodera glycines
tttttgctttttccatgtaggcattgattttttacggcatatttttctcaatttctctttttatatgcctgatttatacaactataatgcgcatacatttattaatttgtataaaattttaataaataaatttagtttctgcttttttgaatttcccattttgggcatcgattttccatggcaaattttctaaagcaaaaaatgcatataaaagtgatggcacagattaagcaaggcattcgcattgaataattttaatttaaaattatataaaaatgcattttctaacttttttctattttaatcttttagagaaaataagtggcaatg

SEQ ID NO: 117173 - DNA, 490 bp, Heterodera glycines
gctgaaattttgaaaattttgcccttattttgtgatacttttgtcgaatttttaaggatttagtccagggttcccaattgaaaattttcgaaatgaacatttgaagtcaaaaatcagcatttttgaaacttattccaaatttaaaaaactaataaaaaattgccatttttgaggattttttccaaaaatcagcataaattagtaaatgttttctaaaaaaaaaaaaaaaatcagatttgacctcatgaaatcagaaaaatgctgataattcagtagagttgggagccctgatttagtcaacaactaatgggcaatattttgcgatttatttctattaatctcatccgattttttatttgtattgttatcgattattatatcaatttttttttttgctgcatttttaatcatttatttttttaaattcattttctttaataattcaatttatttttattaaaaaaaccattattatttgaagataaaaatg

SEQ ID NO: 117174 - DNA, 123 bp, Heterodera glycines
tttctcttttctttgtaattcgcgacatttaacttttttctaaaatgtttttctatttttaaaagccttcgaattcgaatgatttcatgtttgttgaatttcactgtataaatcacaaaaatg

SEQ ID NO: 117175 - DNA, 412 bp, Heterodera glycines
cataaaagaacccaatgtttggttttaaaaaatatctatttctatgtttaatcgccgttttttttgtatttattaaaataaaaaccaaaatttatttatttaatggtttgttaaaaaataattggtaaataataaggatagaccaaaatagaatttacgtattaaaggaaatgcgacgaattccaaaaagcctttctttcgttccccaggaaagtgtctgctttgataagcattaaaatgttcttttcttcaacaatttgactttgaccacttttgataatcgcaatttatttttcagttcgtgactcatccatttaaaaaaacaaaaataaataaattgaaataaataaaaataaataacattttcaacattttcaattccttccccccccccccccctcctcagagaatg

SEQ ID NO: 117176 - DNA, 255 bp, Heterodera glycines
cctgaaaaatttgaaaaaaaattgttaggattcaaaaaaagattacggccaacattttcataaaaagtagattttttacaaccataaatttttaaatttattttttttatttttttgaattttgctggtcaaaaatattacactatccgaatgaaaaaaaacaaattttaattttaaatgtaacaactttaagattcaaaacggtccgagatgtttacaactatgtggcggaaagggaaatggtgaccgacaatg

SEQ ID NO: 117177 - DNA, 1003 bp, Heterodera glycines
agtccatttaaaggagcacaaaattccctataaaatctcggccttaaaatgtatttaagttatttctcataattgaactaaattacttgcactttttctctgtcttcgtttcaggctttttttcattcacttttttagcttataaacacacaaaattatcattttagttaaaaaatttcaagtttaaactaaaaaaaaacccaaaataatgatatttttcatacaaattctattaccagagcatgccaaaattttcaagttttctccggcggcgcttcggcacaactctgtcagcaaaggtctttttttgaaaaagcatgccccaaaaaagtcgtttgaattttttttagcagatctcactaaaattaaatggatttcaggaaaataaaacaaattatcccaattttatacaccatgaaatgaaatttttccgaaatttcctcgtctgggatttctgttcctttttttattttatttttcttagaaatttctcggttggctataccggttgaaaatcgaggtcccggtcacggactttctggtcccggaaattcacgggtcctgtgaaattcccgggccctgttttgcccaaaaatttccggtcccatgccacattaatgagaagcattgacaaaaataaaacatcggcgtgagaatattacgccaaaagtcatgctcctaaaataagccttgaaaaaaatatgggaaatttaaaaaaagtatagtaaaatgagtacgataggatgccaattttggaatgatattgacattaggtacatggaattttttattttttattgaagacaatttatgaaatgaaagttttgaatttgctgggaaaattatgtcgccgcacattaaacgtgggatgttttatacgacaaattcgaattggcaaatttaagtacagaaaattggacaaaaatgtaataaaaggaataattatcttcagtttaaacacactaaaatttaacaaattgccacaaaatttgaccataaaatg

SEQ ID NO: 117178 - DNA, 364 bp, Heterodera glycines
ttaaattatgcttaattggcagatctggctttaaaataattcataattatcaaaaagaccaaataaaattattgttaattgtgagtttggctttaaattttattaaatgttatacagaaaaccaagggttagcccgaatggtaataatttcattctattttatattagcaattcttcagtgtttgaattttcctttgcacaatgatttaaatttggctttctataagaagtataaaaaagattttttaaaattttttgaaaaaattaaattttcaaaaatttatttaatcctattctagcacaatatttaaaatcattatttggctaattgttcgacaataatattccaattttcgtcaaaatg

SEQ ID NO: 117179 - DNA, 1003 bp, Heterodera glycines
ctttattgtgtgattttatttttggcttggcgccgaaacgtgggcgccgaaatgaccctttcccaggtttgttggatttgaatgacaaagagcgaattaggtaattcaaatattcgcttcaataaaagacgataagtcaaaacaattcaaattttacattttttttgttttcaaacctaaaaataagcacaaaataagcacgtaacgctgaaataagcacaaatcttagaaataagcacacttggaaaccctgttaaacagatcatttccgaaaatttaattattaatttttttgttttaatcatttacgttaatacaaattaaaaatatttaaaaataaacaaaattaataatttaaaaaaaaaatcaaaatttttgtaaaaatttttttaccgttcctggcgggattcccgttaaaattgatgggatttttacgggaacgtgaaaaagacgggaatcccgttcgtgaatcacgccccgttcttttttgtttgtttttaaataattgcaaaaaatttgtattttttctaatttattatttttcaatttttttaatcttaactttatgatatgctaaaacaaaggaaaagtataaaattgggcccgttaaaaaacgatgtccattttcactggctgtacatatttcatacatattttagcattttttatacatattttatttacatatttcgtgatttttcttgcatcaaattcctagtcctaattataatataaacaaaattaaattttatttgactatttgtgtctatttaacatatattttgcgatttttttaaataatccgttatcctgttccaatttacccggatcagaccttattttcaagaatgaatccggagtgaattccacgctaaaattcttgtttccggatcatattgcgttttgattatctaatagtgaatgctttttttgtgtttttttaaattattcaaaaccaaatattgcatttttaaatttagttaagcaaaaaattctaaaaatg

SEQ ID NO: 117180 - DNA, 598 bp, Heterodera glycines
tgccgtactgaaaagatgccaaattcaaatatttttaaaaagccgaattaattttgcaagctttctttatcactaattgagagagcggggtgttctattggaggaattaaattgtacaaatatggtgaataattaggttaaacattaaattgataattaatgaggcatgttgtcactttgtatcggcgcaagaaataaaataattaaatttgaaaattattaaaaccataggggaccctgatttgaaaacatttttaatacgatttctattcgttgaaaacatattttcggcgtcggtgacaacacgaggcaaaaccaattttgattaccgaattctgaatcccgaacccaaatttgagcaaaaagacaaaattaaaaaattcaacatttttgttcggattttgaatcatgggctcggaattagtcgaaataaatgtcggtgattcgtgatcagcgaccccaaaaatgccatgaacagttcaatcagtgattcttgcctgtgacacgcatgtgagcagaaccaacgccgcttttgtgccgatgagacggtcgcacactcggcccacggcaatgaccaaaaaggtggagatgacaaatg

SEQ ID NO: 117181 - DNA, 374 bp, Heterodera glycines
gtttgtctagtaccggtaccgccggtaaaaatttgcactggtaagaatgggggtcttctcgagaatagcccaaaaaacttcctaatacatacctaaatttatattttcaaacaaattttcatgttcccattaaagtaaatatattcgactcatcacattacgcacttcacttttagccataatcgtttcacaatgttgattttcccgcacatcaaattttcgacactccttaaacgcgcgactgtcaacagctcctagtaagtatttttactaaatgacaaattgcaaaaatctaatcgaggtcatataaaaataaaagctgtaaattcttgtcgggttatggttttctataatttttgcatttttcagttatg

SEQ ID NO: 117182 - DNA, 302 bp, Heterodera glycines
ggtaatcttcaagaaaaaaccaaaataacgatgaaatcatttcatacaaattttccgatttttttaaactgattaaaaaaagagttacttttttttgttgcttttaggcctttggtgtattggagggataggcgacagggaaaagagaaaattttctgtctgtacagacattttttgctgtttttgttttaaaatttcaaaataccaaaacagggcttatcgcttccaaattattatttttttcccatttttcgatcgttgccgccatctccggctcgtgcatgggcggcggcttggagatg

SEQ ID NO: 117183 - DNA, 1003 bp, Heterodera glycines
ccaatttttaaatattgcatcattatttaatataataaacaaattatattaagtaaaaaatagatttggataatcctactaatgatcaatcccaattttgtaaatatttccacataatttaatataataaacaaattatattaagtaaaaaatagatttggataatcctactaatgatcaatcccaatttttaaatattgcatcattatttaatataataaacaaattaaattaagtaaaaaatagatttggataatcctactaatgatcaatcccaatttttaaatattgcatcattatttaatataataaacaaattatattaagtaaaaaatagatttggataatcctactaatgatcaatcccaatttttaaaattttcaccatttataaggcgatgagatattttattttttatttttaataattactttgctttttatcctatatgaaatagagtaaacttaattttctttaaattttcaaattttaccaaaacccttaattcaaaaaagtattttattttttatatcccttttttaaacactttttagatataagaaattttatttttaagcattaaaaattaaatggttacattacaaagatttttgcagaaaatggaaatatttcaaaaatgcgaaataaaattgtattaatgaatttccgtcttttttttaaattcatataatatgtaatttttattataaataagctttaaatagagatgcaaattccaataagttcatatttctttccctgtttaaacgtgttcaaaaagtagaaaacaatttcgtgtttcagaataaaagttgtatttctattttttaaaatttttttgggttttctgcatattaattatttacgtatttttctaaataaattcaagtaaaaatttcgctatttaatataaaaaagaaattaaaaaataaatagaaatttggatgactcttctaaaaccaatcagttttaattttatatttcagaaagaaagacataatg

SEQ ID NO: 117184 - DNA, 395 bp, Heterodera glycines
tgtgccgctcttgtttagaatttagttttgcaaaagaatttcattttttcttagaatctaagtcatctcttataatcagagttcccaagttttttttttcaaattcatgacaaaaacactaaaattcagattcttttgcaaaataaattgtagcgctaagaaaacctattaaaaaacaatcgatatttttattagcataaaacatagggcttcccaactgaaaatctttttatgtttttatcggagccctcaaaattcaggacaatctgaaaattcaggacctttttgatttttcaaataggtacactccaattcaggaaaattcactttgtaactctgtttataatgaaaaaccgtttttccaaggtgccagatttgtgagcctgccacgaatg

SEQ ID NO: 117185 - DNA, 126 bp, Heterodera glycines
agaaggtgcgtctgcaacttttttagtcctatttgtttgtttttaggcagaaaaggaagatttacggcaacaggaccgggtaaaccctttgcatttttgctgcccgtgaccaattaatgaaggatg

SEQ ID NO: 117186 - DNA, 1003 bp, Heterodera glycines
gttcgctgttgtacatattatgtgtattgtcatcatctaccagttattgtatatacatatgtgtacatatgatggtgtatcgagcaataaactttgaaattgccttgatcctttccaattatgtatgaattttgggctaatactggagaattagtgtcccggcgaaatataaattaaaaatttaggtcatattcatcgtcagcgaccctgaaaaccccaaaatacatgttttcagttatccttacatgaaaatatatttaggaaaatctcagggtgaccaagtttttttttcaaattcaggccacaaaacactaaattccagatttaaaccccaaaattcagattttattcatttaacatttcatttacatgtaatatttgagtttttaattttacatatttatttaatcacgaaatatttgagcgtatattttgcaataattcaaaaacaaatccagataaagttaattaattttcaagcgtttaggaacagaatctaaaagttatctctcttcttttggtcccaagaaaacttttcaaatatttatgcccttcaaaaaattaataagagagaatcaggcggtgccttggcgccacttggaaaatttggtcgttaatttagcaaaatttgtaatgccaaaaagcggtgccagcgacacattaagtgaccgttatcgtgaatttacgcgcatctctaatagcttaaactaattaaattaatgagtatgtaaaggtgagaaaaattttagaaaatggataaccaaaagttgctacttttttattgtatttttggtaaattatcacttttgtttggcattgtctgcggaaccgcaaacaaacgcaacaaccatcatcaaattgccaatgaatttgttgctctggagcaaataagtgaagcattgtcgcaacaaattaacggtgaaaatagaaaattaataattaaatgcccattaattaaataatcattttatttatcatacaaatacagaggaactgacgaatg

SEQ ID NO: 117187 - DNA, 191 bp, Heterodera glycines
aagagaagaagagatacagaaagtggaagagaaagtgaaagatgtacagaaagtggaagaggaacagaaagtggaagtggaacagaaagtggaagaggaacagagagtggaagaggaacagaaagcggaagagatagtggtagaggaacagaaagtggaagaggaacagaaagcggaagagaaagtggatg

SEQ ID NO: 117188 - DNA, 155 bp, Heterodera glycines
  unsure (1)..(155): unsure at all n locations
tcctcaaaatacaccgttttctttgcttccgcaatctgtgaatganccgtcgacgagtaccaaaaatntattttccagaataattgtcatatttattagctttgttttggcttctcttggattcaagtcgaatttttgtcgaagatttggaaatg

SEQ ID NO: 117189 - DNA, 56 bp, Heterodera glycines
ggactatttttgtcactcttttaaaaagcggaaaaataattgattctttccagatg

SEQ ID NO: 117190 - DNA, 394 bp, Heterodera glycines
aattgaataaataattgtgaattattagtagggctgtgaattaagtcaaatgacttttttttaccttaaaatgacttaaaggcaaattttgaattttagcgaagaacatttcgaaaaataatctctgatcggtgaaaatgcaattgaaaacctgcagaaatttttctataaattgttaaaaataagttatttttttcacttttgcctaatttttgaggacttttttccattttctttcgtgctttttttggcgttttttgtttatgacttttttagtcgagtttttgtagattttttgtgacttaattcccagccctaattattacctccgctaaaaaaaataatttaaaatttaaattaaaataattaggaattattattttagcgcaaaatg

SEQ ID NO: 117191 - DNA, 595 bp, Heterodera glycines
taatttctgaaaaataatttataatatccgaaattattgaagaaattaaatgatttaatattaaatgcattacattgtaatttaaaaaataaataaaaataattttaaaaagtttaaataaaaaatgtatttataagcaattccatttaaaaggcaattttaatgaaagaattatttgtctaatacataaatgttttaattaaagaaattagaacaagtgatgaataagcttttttcagctttaacaaccttttacaagcgtaatttcgctaattgcttttctattccacaaaaaagaaaaattaatgttaaaaataaaaataattgttgttaaagaaactgataaaaattttttattgctattttatgaaattagaatcataaaggaatttttttttgtctatgattgaaaacatgtgtaaatcctattattgatttttatctgtttggatattccccattttttcataataaatggaattttaaaattgattttattaaatcgcacgtgccagcacttaaagggtcgtcgcgggtcggatcaagaaaattgccgagtcgtgcgtggtttggtcgagacatttcgtaaaaaatg

SEQ ID NO: 117192 - DNA, 1003 bp, Heterodera glycines
aaattgccgctaatgctttattttagtttgaaaattcacagtttaaaaatagccatttaatgcagggcttccatttgttcttatttataagagatgttctgatttggagggtccaaatcttacaaaataaaaatgttctgattttgggctattattcttatttcttaaaattattcataaatttagaaatttatggcataaatgttcttattttccctagaaattaaaaaaaaaatttccccggcggcgcctatcggcaccgccggacccactcgcctcccccgttctccaaaattccttggaaaaatgcgccgcaaaaaatttgttaaaaatttgtttttttagattaaaaatgcactgaatttgctaatttacttcccaaaatcgttaaatatgataattggaggcgaaaaatacaaaagttgatgctatattaattttataaagtgttatacaagcgatttaagcattttttgttaaatgttcttatttttgaccctaaaatcttattttatggcctggatgttcttattttgaaattttttcgatggaagccctggtttaatgtaatgttttattttagtttgaaagtaacattaagacataaatttaaaaaaaaggaaaatgactaaattatattttgatgatgagtgagataagtgaaagtagtggcaacataaacaaaaactagagtgcccgccctatttagcaaatgacacaaaaaccaagggtacccgtttgattttaaattgggttttcgacttttattagagttcgggattagaaatcaattaaaattgttgtcagattcgtgatcactgatcccccgagaactcatgggaaagtttccacgacttatcacaaaaaaatacaaatcaaagggtcccacaatgattttctgttgtggcattcggcaatagcattgtgttgtcaattaaatctttaacccatttcgctgttttatttgagttattgataataaataacctacaacgcctaaatg

SEQ ID NO: 117193 - DNA, 179 bp, Heterodera glycines
ttttaacccagaaaggagaagcgtttccccgctgctttttgcatttttagacgcaacggtcgatgactcggacacgcgtttatggcacgttgaccacggcactttgctcaacgaatatgtggcggcaatggcagtgctgcctttttcggtggcttcgcttggcctttcgcccaccgatg

SEQ ID NO: 117194 - DNA, 66 bp, Heterodera glycines
agatttgctgcgtagcaaggtggaaaatgattgattgcttttttgacagttcggctcccttcaatg

SEQ ID NO: 117195 - DNA, 538 bp, Heterodera glycines
ttttttgcaggccaggggtttgctcaaaaaaaattttaaaaaatacctccttgtagaggacccttaggcggagtgccctttcagcgggcactttttgattcgagttttacaaaaaaagttaggggccgtcaaacgcacgaaaaaatgagaaatcagtccctggtactcagttggcgctcggatcaaaaaacctatagttttcccgaattctcctcaaaaagttgtaagacccttccactactttcagacccgtcccattagccgttaagctcaaattagtttttgaaacgaaactccttgtcaatataacgtatatactagcgggtgcgtgaaccgtcggctatttagctgggaaaaagcgcttcgcgctttgggagcttcgctacctagattagctatcgggttgtgaaaagatttggaatttttaaaaaattatcagcgatttttaggccgcttcgcggcctcagacgggcggctctcgagcccgaagactaatttactgaagagcggtccagtatttactggccggtttgacatg

SEQ ID NO: 117196 - DNA, 647 bp, Heterodera glycines
gttatttcgggcccaactaagccggtattcaggtataagtccaaacagaaactagcacacgtttaattatacgtttaaacaaccgtaagaattgattaaataataagattgccaggttcccatacataaattttttgattttcaagaacatataaattttaagaaaaaagggttgctaaaatttactaaattttaatgatttatataacattttatttatttattttgttttatttttttgaaatcccccctctggtgcccaaacttcccggtgcccaaatttctggtgcccaaacttcctggtgcccaaacttcccggtgcccaaacttcatgtcgcctttgaaattaggtagcaaatcaaaatgccaaaaatcaaatttataaaaatttttctatcttggtatgcaattcgcaaaatttttcgtaaaatctctgacagaaaattccgacttcttgttcgaattcgagtccagaagtcgaagttggtcaagatgaaggttctattcgtgatattctgaaaaccacctcacacatgtttttgtgacattaaagcagaaaaattctttctaaaaaagggaactataggcagtattaccagtttcttgattcaaggtctttagtatttttcttttgaaatcgtataatg

SEQ ID NO: 117197 - DNA, 516 bp, Heterodera glycines
  unsure (1)..(516): unsure at all n locations
ggaatgtaaagaagtgtgtaaagctggaaatggatgcaatgatattaatattttnaatataattaaatgtctacggtatatttatttcttcgtttcttcaattccacaaccacgacgccatttttggtaaaatttttttaattattaaatttaaaaacaattcctaaaaattcattaaagacgaaataatttcacaaaaattaattatttgtattttacgaatttaatttattccacaagaaaaattttatacttattttttataaaatggtcatttcgtgatttgagaaaaaaatttatgaaaaaaagattattattttttaactaaaaaccaattaagagctttttttaaaataatttattgaactataaaatcaatgcgaaataatttatttaaaaaataatttccacaaaaattgaattttcattaaagcatttttcattttccactttttattattaataaataatttttattaaggaaacttttgaaaaatatatttaaaattcaaaatg

SEQ ID NO: 117198 - DNA, 418 bp, Heterodera glycines
atttagctcaaactttattataattaagcaatcttgaaatctttagcgatagctcctctctatgtgtcctctactatcttattgttttaaaaaatttagcaaaaattttaccaaaacttttaaaaccaaaaattctaaaaatccgactaaataatttgtcccgaatttgttagaaaacttaataataatttttttaattaaaaatcttttgtctatataaacatataaagggtatttgttatttaatttgaagttttggcaattctaaatttaaaaattaaattcaaatattattttcattgatatttcttgttattattcactgggaataaacacagataaatacatatttatggaaaacatttactttttttttttacaaattttgaattttagagaattacaggaattgcacatg

SEQ ID NO: 117199 - DNA, 87 bp, Heterodera glycines
  unsure (1)..(87): unsure at all n locations
aaaatatatatgaaaaaattaaaaaaaaagtaaaagtaaaaattttaaatataaaaattctaaaataaaanttaaaatggaaaaatg

SEQ ID NO: 117200 - DNA, 89 bp, Heterodera glycines
aaagcacagcaagccatccaaggcaacaaacaaagcacagcaagcagtcaatagcaacaagcacagctacagcaacagagcaaacaatg

SEQ ID NO: 117201 - DNA, 622 bp, Heterodera glycines
  unsure (1)..(622): unsure at all n locations
attaaattcatttaattaggataactatgaaaggaatacttttcaagaaaccgaactggcgcccatttggncggcactcctttaacggttttgactaattgtcaactttcagcagatgtttttctcatattctttgctctcttttcaaatttaaattgatgaaaagataaaattgttaatttcaaattatgtacaaaaaacaattatacatttgtttttgattttcaatcatttgtcatgcccaatgataaatataagcggcgctaaaatttattggcataagcaaagccttaaaaaatgccatcaaaattaggcaaatgccacgccatgccggggcatatccatgacactcggcattccaaccccatatttaatagcatgggctaacatctctgcattttatttaaaaaaatataaaaaaaatattaataataattttgcaattttattcatggatatcatgcatattttttattgaattgatttgtattaattactcttcttctcctcaataataattttatttttttaaatatatttttcaattgaataattttatatttataatttaattaataaaattccaaattattatttaatatgcatagataaaaaaatgatg

SEQ ID NO: 117202 - DNA, 1003 bp, Heterodera glycines
tgaaccaagggaaaaaagaaggaaaagtcaaggatagtagccactaggccatttgcaaaactgtgaatatattaattttttttttaattttttcctttaactccaagtttcgttcctaatttttcactcagccccccattcttaccagtgcttgtttttcccggttgccctaccgggaccgggacctgagcttttcaaaatccgggacctctgaggaccgggaatttccatcccggtcccggcgcactctacttaggggtgtattttttggttatattgcatttttgctaataaattctccgaaaaaatgtcgaatagtgaaaaaatagtaacaaaacgccaaaatagtgatttttagtgaccgatagtgacaacataatcgaaaaatttcaacggagaaatgtgttttttgagttcctttcttcaaaacaatttaaaacctaaaaattgcgaccctaattatgataccgccgggatttacgatttttcataaatatatgtacctaataataaaaaataggcaaaacgccctttcttttaggggtcttatcaacccgcgacttcagaaaaattctaatctttcattaaaaatatattttttccccaaaaattttaatatatgaaaaacttgggtttttaaaatttttactggtgatttctgacactttggcctactatctctttatatttaatagaattaaagttcaatgataccataattgttcagtttaattagggatgaaacgagttatggctgatcatcaaaataagcaatacacaaaacgcccataatttttgaattaacgctcaaaacattgccaatttttaatttttgaattaacgctcagaacatgccaattttggcactgggcttgtgacccattgccattgtgcctagtggaactggcataataattgttgaatttctttatcaccatttatttgtcatttatttagacttaacttttttattcaccgattggctgatcagcaatttattatg

SEQ ID NO: 117203 - DNA, 1003 bp, Heterodera glycines
taacagccccactaattacaaccgaaggttgtgagtttcattgattgtctgcctcaaaaaagatggtgtttaatggaaggtgctcaaggttggcacgtgcgaatttagaaaattagcatttttattgcaggcaattcatttagagaagtcattaatttatttgttatgaagttctttcattgaaattagtttaaaaaccctttcttgccgattacattctgttctaaattgtagcaaatgagcctattcttacaacctatttggcatttactataattgtaacctttggcgtttctaattgtaaaattaaaattataagaacagttttttcagtatctgcgcccgctattttctaatgatattttttagccaaagaataatgcttttttgaggtatggggtgccattaaacaattggcaacatctggaatattactcaaaaaggtatccttctactagcttccattaaatctttgaaagaaattttcaattttttcaaactattttcataaaatcctaccgaattcatttttagccggccgattaaattttgactgttatatctgaaatgatagatcattaaatagaaaggaaggaaaacgtttgggctaactcttcgcttcttcagaagaaaatttattgatatcattgtcctatcagataatcgcgggcgtagaatttaaaaaaacaaagtaaaagcataatctattaaatgaactaattaaaagcagaattttttaagaatgtgcctgaatttgtctattaatttgtggcccgttaaacatgttttttcaataaaagcacatcaattttgtaaaaggacctagtgcagaaatgcgtatcgccattgtttttatatagacaatttttacggcgactgcctgaacctttcttgaaatttgagaaatttgttcaattactgacgcctttagatgtacggctattcttaatatatagcaaaatacagaacattttaatagaatagaatattttttaaatagatg

SEQ ID NO: 117204 - DNA, 468 bp, Heterodera glycines
agtttataccaaaaaggatttttttttctgaaaaatgtttagttggttttttaattaaattatattttcggttttttcatggaatagtgtgaattttcatgaacctaggttttcataattcgcttgaggactcatggctgccatataagtgaggcctttgtactcctaaagtttgtattctttatataatttaattagtgcaaaaagataaatattgtgggaatatagtaatgtctcttagcatggcacgggttcgtccttagatgccaaatttttaccgggacttgaaaaattgaccggagcgggtcccgggaacgggctctataaaatatacatttttgatttcaaataaacgcacgtgttttttcaagtagaattagacgggcccgggtgcccgaccgggtcccagacccggacaccctgttttttcaaaacagggacccgattttttaaaatccaataccaatg

SEQ ID NO: 117205 - DNA, 328 bp, Heterodera glycines
  unsure (1)..(328): unsure at all n locations
taaaaagtgcgaaaggcagttattttgtttaattaataaataaatattttaagatttaaataaaaattttctcttgaaaactttaattatcgtaatgtctaatttaactntgaaaacaatnntaaaaatacataaatcaccagtgttttatatctgacaaatgagtgccttatttatttatttttttaaagaaaaaataattaattaaaaaataaatattaaaatgaattgaattaattgataaataataaattaattatctcgcgttttcgtaggcgtccagcagaatgtcgcgcacattgcactgcgggtcaatgtgtccaacatg

SEQ ID NO: 117206 - DNA, 88 bp, Heterodera glycines
atagttagtccttttgttgaatttttagaaattttatccgtcaaatcggcttttggaattttaatgagtaaatcaggaaccgtaaatg

SEQ ID NO: 117207 - DNA, 336 bp, Heterodera glycines
ttatcattttttaatctcctttcttcttccttcactctctcgtgctctctcgaacaatttttaaattagggttacaaaatataaaaatttgatgagacttttttccaattggattcttttctatatctttcgttttgttttataacgaaaattcacggggcaatttacatctcagcctccgccgaaggttaattgcaaaacgggcagaattttcccccgttttttcgatttttctttttagatgaatttagataaggggcatagcctttataaaaaataaatgccgctttttaattatggcaaaacattcaattattctttttaccaaaaacaatg

SEQ ID NO: 117208 - DNA, 433 bp, Heterodera glycines
atttttatttttaaattttcgccgatttcgagagggcccttattaattaacagaaatatatttattattcattttttccttttaattattttgtgttgaatttaataaagaagcaaataaatttgcaaattattcatacaggattaaagtgcttaacaaagatcattatttaaaagatcagctaaaagaacacttaattatgattaattccttttatataatatatgaaaataaaaaatgtagaccaaagaataaagataatattgtaagatttaaattgaatatgaaaaaagaccaaagcttaaaagcactaaatctgtataaaaagcagaataaaattaaatttttacacattcatttcaaaattccacataatttaaaaattattttaattttaaaaattattttaatacatttactcattattttaatg

SEQ ID NO: 117209 - DNA, 223 bp, Heterodera glycines
taattatagagcgttaattataaatgagccagtaattactatgtgctctacttaattacaacacattacggaatcccctttctgtgcagttggttgatgaatttttgttcatctttttttagtaaattatttgaaatttcaaatatataaaagttaaataattttttagtattaatttattattaatacttccattttgattatttcaagtgaacaattaatg

SEQ ID NO: 117210 - DNA, 1003 bp, Heterodera glycines
ttttttttttttattaaattatcgttgaataacaaaaaaaaatacaattgataaaaggctaatgggttaaaataaaaatgctgattggaacttcaaaatatgaaaataaaacatttaaacgtattgtataacttttttgttttataattaaaaggaatgctaatgatgccttttgccgtaggtcaacaataataaaaattctttgaaataatgcctttttaccacttcaaattaatgaaaagcattggaattgcaccttttattggtcatatgttttgcttctgattacaagaaattttgtaatgtgtccagcggtgttaaaattacaaaaaagtttttttaaaaggtttttttgtattattttgttcctttttccccccaaacctttaaaaaacgttgcgcgggcccccaaattttccctttttcccgggggttttacccccccccccccccccccctttaaaaaaaaaaaatttcacaaagggtttttttttttttttttttccccccccaaaaaaaaaaaaaagggttttctccctccaaaaattttttccccggtcccccccccccccccccttttaaaaaaaattttttttcccccccccctttttttttttttttttttggtggggggggaaagaaaaaaaaaaaaaaaaaaaaaaaaaaatccccccccccccccccccccccccccccccccccccccccccggggggggggccccttcttttttttttgttttttttttgtttctccccccccccaccccccccccccccccccccccccttctcttttgtgttgtgtgggtgtgggtgtgttgtgtgctccccccccccccccgacaccatcacacaaaccaaaaaaacaaaaaaaaaaaaaaaaaaaaaaaaaaaaaaaaaaaaaaaaagaaaaaaaaaaaaaaaaaaaaaaaaaaaaaaaaaaaaaaacggttgtgaggtgtggtgtatgattcatattgggaataaaagccctctgaatg

SEQ ID NO: 117211 - DNA, 550 bp, Heterodera glycines
  unsure (1)..(550): unsure at all n locations
atttatcaagatttgataggctgcggactgagctaaaatntaaaaaaattgactcaattatcgtntacagacaaaatccagtacttttaaagttttgcctacatctcaaatttaattttgtttaataaattaataaaagggcatacaacagaaagcataatttttttttgtgagtgtggctcagattgtggtgatatatatagccaaaatagtggtgcctaaattcatccctttgctcacctctttttaaactatcaagtgttggaacaaaaatctgttaacagatcttctaatagaattaaatctattttaataaaaaaaagttgcatcgtaattttaaatttccgtgccctatattcgaattttcaaattttagacagccattttttctattttgcatttgaaaattcggtgtgtccacaatatgtgacggagaaattttggaagccatttcgagcgttaactgtgccggttgtgttgcaccgctctgttctcgaaggtgaaggggcactgaattgtgcaaatttttaaaaaaagctaaaatctaatg

SEQ ID NO: 117212 - DNA, 76 bp, Heterodera glycines
tcaccggtctaaatgatccgaaaacaaaatttaaattcaaatttaattgcccattttgtgtccacttttcccaatg

SEQ ID NO: 117213 - DNA, 154 bp, Heterodera glycines
ttttgttgtgaaaatgatttatttaccacaaataaattatgcaaaaaattacattcaacagcaaaagcatatttttatccaaaccaaagccaattatttttattattttaaaataaacaaagtaatttgggatttaaatttttagcaaatcatg

SEQ ID NO: 117214 - DNA, 380 bp, Heterodera glycines
aaactgtaaaatttagttcatttaaaaaaattgctaaaattttaatgggaattactaaactttttttgaatttttagttacaaatttcaaatttctccaatgaactctcaactatttcacttggattttcaaaatttgtcaaaaaaaaactccaaaaattaaatgattttcgactatagtatcattttaaaattgttattttttgacaattgctcaaattcggcacgaatctttatttgttttttcaattttggcattctgttttctctctctttttcaaaggcttatgccgatttctgctcggatggtcgccctttctgcgcacgcatctcaacgacgagctaattgatgtcatccaattttactcggactgcacaatg

SEQ ID NO: 117215 - DNA, 192 bp, Heterodera glycines
ctgtgtactcactcatgttctcttacatttttttaaaagaaaagaaacggatggaaaaccgaaggcatcgtcggccgcaacaaaaagcgtcgtcgccccaaattgttttccccatttccatttcccctttctcatcatggcgattgccccaaattttgttgttgttgctgctggcgacgttcctcggccatg

SEQ ID NO: 117216 - DNA, 129 bp, Heterodera glycines
aaacaaaattcttaaaataaaaaattttaaaagatgaaaaattttaaatgaaaaaggcactttaaaatttgtaagctgatatttctcgaccagattcacacggtcgatcaatggtatctccacacaatg

SEQ ID NO: 117217 - DNA, 684 bp, Heterodera glycines
caggcatggaccaaattgaaaaataaaaagcgaaatgcgacaagcgaaatttgcgaaactgaaaaatgcgaaatgaaaaaaaagcgaaatgcgaaaagccaaaatatgcgaaaatgcgaaaagcgaaatgcgaaaagcgaaattttttctacaactttttaatagttaaaatcataaagcaaaaatcattttttaaaattttattccaactttaaaaatcaataaaacgcttttttgaggcgcgctttttccaaaaaaactttttgggaagagggagggggcaggcggcaccggcaggcgtcgccggcaggcgccgccgggaaaatttttgaaaatttgattaaaatttgttgacagattttcaccaaaaaatcatcaaattttgtgatttttgtatcatttttctaatgagaaataagagttttggcgcgccgctgagaacagtttttcatcaaattaccaaattttgcgattttgggccattttctaagaaaaaataggagttttgggggcgcgacggtgccgataggcgccgccggggaaaaattggaaattttgatcatttataaacagtttttcactgaaaattagccaatttataggtaaaattttgaaaaattttttgggaatttaatccaattcttaggggtgtaaaagtcgcatttcgcgccaaaaagcgaaatg

SEQ ID NO: 117218 - DNA, 104 bp, Heterodera glycines
ttttttcacggggcgttcactatagtttacccgagttgagttcaaaattgccgttatattccatcacattactaacttttttagcctcttatttcccaaaaatg

SEQ ID NO: 117219 - DNA, 433 bp, Heterodera glycines
gcaaaataggtgctaaaacgccaaaatacgcaaaataggtgctaaaaatttgaaaaatccagtgtctttatgcacaaaaattacaaaaaatgactcatttttgatcaatttcgcctgcacaattgcaacttgtcaagaaaacaaataaataaattttgaagaacgaatttttgggaaaatttttcatttcttagggggtgattttctgaaattttgataaatttttaggggtatattttttaaattttttgggatcgaattttagggggtgtgtttttggtttttattgcatttttgccctgaaatttctggaaaaagaccaaaataggtgctaaaaatcgaaaatgcacaaatatgtgctaacccccaccccgttttaggttttttaggtgctaataagtcgctctaaatcaaaaattattcggataaaatg

SEQ ID NO: 117220 - DNA, 289 bp, Heterodera glycines
tttttcattttccattcccctttaattttcttttggtctgtaggatgtttttgtattaatgaatcgagtcaaaaattacatttcgtgttttggggattagaattggtcaaaatggatatgtatctgtttcgcgatcagagacccataaaccatccgggaaaaagtgccattcaacaaaagcccacacatttaaaaaaaagaaacggccgatttcacataatttttcatctttgctaagccaattgaaatctgacgaaaactgtctaaatcatttcccctcaacaaaatg

SEQ ID NO: 117221 - DNA, 136 bp, Heterodera glycines
tccgcggaaggaagacagatcaattccaactcattttttctttctctctgttgattcgttttatgtatgtttcttccttacaaattaaaataaaataagaaattctaaaataaatggaatatttctaagtcaaatg

SEQ ID NO: 117222 - DNA, 426 bp, Heterodera glycines
tgaaaaagcgatggaaaatcagtcgaaagaaaaaaaggaggggggggggggtaaaaatataggcccgagttcattatgagcgttcggactaatttgaacaaattcagaaaggtatgggcaaaaaaatctgaaaaactcgaggccctcactaacaataaaaatgtattaaaggattaaaaatgatgaataatgtcattaaaaaaatgatcacctcaaaaaaaggctcgtcaattgggctattgaaataggcactttcgtcgttcggaatgcaactcgttgtgaagttttccaacagcgtaccgataattgggtggaccggaacgcggcactctttgagctgtgctttaatccattcctaaagaacgcaaattggcattgtcggataattatttaaatggcgattgattcaatgaaatccttcaaatg

SEQ ID NO: 117223 - DNA, 362 bp, Heterodera glycines
  unsure (1)..(362): unsure at all n locations
caaagtgatttgntatcattataaccaaaattgttagcatttacgaatttgatgtttttgtgtgttagagatgtgaaaatagtacgccaacacgagaggaaaagaaatgcatttttactttttgaactctactacaaaaacgggatgtctaacctaaaacatttgatatgttcgatgcagaattttctgctatattttctctgcacagtggagttgacccatagtgttcttgcaaactaaatattgattaaaaatttaaattttttgattctcaaaatgaatttatgaaaagtttagttttttaaatcctaactttgaaattttatcattggttagataaaatttgaagcaattaaaaaatg

SEQ ID NO: 117224 - DNA, 138 bp, Heterodera glycines
ttctcgtggctaattgttttaaaaaattgtgttttatgtgggcgtttcgccaacaccaccaccgcattaattcgtctcgggtttcccatttattcccatttaatttcaattttcacaagctttccgttgattgaaatg

SEQ ID NO: 117225 - DNA, 142 bp, Heterodera glycines
cgagaatggccccgtcgacgtgtcccttccgcgcgctctctaattttgtgtgccggtggtactcgccgaatttggcaccctatcagcggcaaggcaaacgcaccagtggctagaaaacctacagtctgtgcaaatcaaaatg

SEQ ID NO: 117226 - DNA, 72 bp, Heterodera glycines
gagattgaaggggaggaggagaagaggtcatttgttaaggtggaggttcggcggttagagagatgggccatg

SEQ ID NO: 117227 - DNA, 591 bp, Heterodera glycines
tttccctttcatcaaacttagccccgtcccatgctctttgttgtgtccccgggtttaaggctttaagccatttcaaattttaagagagaggaatttattaaggaaaagaattacaaaaactatgtgtgagagaccgggaataagttttggtcaacaacaaactcagagcattttgcgtgggtcagtgcactcttaaaagcctttcccaaattctttgttcaatgacctgctttctaattgcatttcagtggacaacattccgtcagttaggcatccatcctcaaagtttcgctcctttgtccattcctacatcggtaggtacaaaggcatgcactgtttcataccgcgtccatttttagaaaattaaacggtccaaattttaaaatatagcaatttttgagtcgttttcaatttgggctttgcatttaaatgtgtgcttacagtgcttgtgttttgtgcttattgatttttgacacgttcgtttaaaactcaaaccctcgcgattcttttatttaaattaattgttgtttgtttaatgttttcagcttaaataattaaacttcaataaattttccatttaatttagccatg

SEQ ID NO: 117228 - DNA, 546 bp, Heterodera glycines
gagaaggaagtaattattgattaggtgtatgaccccacgccacttcgccatcttccccctcccattcccctcattcagtttgttattgtgcccaccaattttgacctcccaatttattctctgcatttatttattattttattttcttcggcaaataaacttatttaatttgttatcttcggacataacaaattttggcgcagtcagcaactcaacgacagcgtttattttccaagctttatctcgtgctgatattgcttgtgttgattcatcataaaccgatctttgccatattttacggcacggtttatcaacaatctgtgcaactaaaccgcatctttgccatatcttacggcacggtttatcaacaatttgtgcgacataaaccgaatctttgccgtatctcaaggcacggtttcatcttcgacaagaaccgatttttgccaaatctcgaggcacggttatcgtctatttcaagccaattttacggcacatcatttctccgatttcggcaaattaaagggatttataagccattggaccatg

SEQ ID NO: 117229 - DNA, 1003 bp, Heterodera glycines
ataaaattataatttagaaaatgaataagacttttatttttatttttttgttatttcgatttgagtattcgacctctaccaattccggttttgaagaatttataaaaaatcacaaagctatagaacttgtcaaaagctatcaaaataaagaaattaaaacattaaaaaaactccatgaacaaatgcaactaaaaggtattgacttaagtttttgtaccttaagacgctacgtgtcaagactaactattgtttctgcgcatacaaataaatcaaaattacatttacagttcaaaattattatttaaccttattattttattttatcaatcactgagcattttttgtggaacgcccacactgagctttttttgtggaacgcccacactgagctttttgtggaacgcccacactgagcattttttgtggaacgcccacactgagctttttttgtggaacgcccacactgagctttttgtggaacgcccacactgagctttttttgtggaacgcccacactgagctttttttgtggaacgcccacactgagctttttttgtggaacgcccacactgagctttttgtggaacgcccacactgagctttttttgtggaacgcccacactgagctttttttgtggaacgcccacactgagctttttttgtggaacgcccacactgagctttttgtggaacgcccacactgagctttttttgtggaacgcccacactgagctttttgtggaacgcccacactgagctttttttgtggaacgcccacactgagctttttgtggaacgcccacactgagctttttgtggaacgcccacactgagctttttgtggaacgcccacactgagctttttgtggaacgcccacactgagcttttttgtggaacgactcaccacggttcgttgtttgtttgctcttactttgtcaatttcgaaatccacaaaatattaatttggcaaccgacgcagtgattgtgcaaatgccaacaatg

SEQ ID NO: 117230 - DNA, 144 bp, Heterodera glycines
tgtaaggaagagagataaatattattttgaaattgaatttttaagtgcgctgcggtctcggaattatgtgggcgggtgattgagtacgtcgttgggtcatcaaacccattcagcgtccgcaaacgcatcagcttgggcacaatg

SEQ ID NO: 117231 - DNA, 443 bp, Heterodera glycines
gcacgattacgattttgccaaaattggaaactcagcggactccgaattcgaatgcttaacaaaattccaattaaattccgagtgaaggacaacaaaagaatgacatttattgacccaaggacaatgattttgagctccgatgcgagactggcaccatgctcacaataccgcaaagaactcatttttgtacgcggttcgctttacgaaattgatcaaatcgatgcacaagtaaagcaggtaaatgccaaacgcattgaaggttttagcctgaatctgtcgttggcaccgacttatacccgccactcttttttacaccttgccctagtgaatgtgtctgactttattggccaatttttcgacgccaatttggcaagagaaagtgaactcacattccaaattaaaagtgaggacacggttataacaaagactttgtctgagcaatg

SEQ ID NO: 117232 - DNA, 155 bp, Heterodera glycines
tgctgctcagtgaatgcttttgctcggttggcgccatcctccggcggccgaaagtaaaaatgccatttttttttgcaaaattttccattttcacctcccctttttatttcagtgtaacaagtccaagtacgacgggatcaacaggttcaactatg

SEQ ID NO: 117233 - DNA, 90 bp, Heterodera glycines
ttgtcggaattaatggggaaaatggtgcattattaactgatcaatttgctcaggcgaaaacatttgcattcctccgaacttcgaacaatg

SEQ ID NO: 117234 - DNA, 55 bp, Heterodera glycines
tttttgtcatcgaattcctcttggtcacagaaatgacccgttcaacgccaaaatg

SEQ ID NO: 117235 - DNA, 890 bp, Heterodera glycines
aaaagaattttggcggaggacagcaacagttgccgccaccctcgaggcccggagaatgtcgccaaaagcgacacaaatttcttggaaattttcatttattttttaatccttttcatcgatcaattttgcattcgctcgctcgttaattatgagtcatcttctctcttcctcatatttttatggatttttttccatttgtttgtgcacatttttcacgtgcctggccccgcccccattgatttgtgagggtataaaagcccggcccattctccattttcctcacttcttgcttcttgcttcttacttctcacttcttgattcacttcatcttgtgagatttctacaagcacttctgcttgatcagcattaagtcgggacagttttctgtccaagcatttgcattaaattgtaattgtgcaattgaattgaataaagattaagaaagagtcttagtcttatcattttctgttaaagggacacccaggagccctttaatacagaccattaagccgttgacccccgttgggtcacaaaaggcttatcaaaggaaaggagaaggatttctccttccaaattgtcccttcagtaaaggagaggaatttcctcctttaattcgtccctttggacattcagtgaatttctgtcttttggacagaaattcgctttgcttaaaagactccccccttctgccgggagagtctgcttccccttctgccgggaagtgcaaatttttgtggctttttgcccacaaaattggagccccgtaggggtcggcttccagtcgtaagcctaccctccaaccaaaccaatccaaagcgcggcctgagcgcttggatcaaacacacaacccaaaggggtttattgtgttttcatcaagcgtaagagcaatg

SEQ ID NO: 117236 - DNA, 572 bp, Heterodera glycines
aaaaaaaaatttgggggaagaatttttgaaaaaatttccaattcttagtggtgtgtttttaaaaattttcgttcgattcttatgggtgtatttttctgaattttttagggccgattcttaggggtttccgttttattgaatttttgttaacaaattttccaaaaaatggcaaaatatgcaaaaaatctgaaaatatgtacaaaaaatcaaaatatgcatgaaatatgcagaaaaaccctaaatatgcaaatatgcacaaaaatcccgaaatatgcaaataaaagtcccaacttttataagcaaataccaaaaagaaggtgtttttcgttctatttggactacgtagaatccaggaaaaaaatatgcatttgcataaaatttacagccctggtcataactcgcttcaattcacctgaaccaaataaatttgatatctattttctattagtgcgcttttttactgtcaagcgaattatttttctagtgggaaaaccagaaaattgttttcattaaagtaggaatagttttttatgattgcctatttagcttattatcgatctttttcaaaaatg

SEQ ID NO: 117237 - DNA, 354 bp, Heterodera glycines
ggtgggtagaccacccctgggttgtattgccaaattttttttctagctgcggaataagcttctgtgccgagatatgaggctttaaatatttaataattatattatattaaatttaaaaggagaagcaacaagcgaccggttggcagggtggttgtgtgtcacgatttcatttttgtaatggaaagttcgagtcccccctacgcaaacattttttttattgtttttaataaaattacatatttagataatttaattataatgcaagttaatccccaaaatattatttctttacttcaaaaacatttttcgaataattttaatgattcaactatttcgcctgtcgagattgaaatg

SEQ ID NO: 117238 - DNA, 221 bp, Heterodera glycines
aaatgaccggccaataaatccattagatctcgttaaaaaaagaaaaccttttgatcaaatggtcaaatgctgacggaaattgctgggcccactggtcatcgaacgggcgacatggaaacgagcaaactaaaaaagtggaaattaaaatttgaaattttgatgttatgccaatcacacaacctccgatttgggcggtgacacgcaacagttgaacaacaatg

SEQ ID NO: 117239 - DNA, 632 bp, Heterodera glycines
tcactatttcggactttttgtcactgtttatttactatttcgacattttttggaaaaattccttaacaaaaatgcaataaacgaaaaaatacacccctaagaatcgagctaaaatttttcaaaatatactcctatgaaatgaaaaaaaaattttctcaaaaatttactttcttggcaaaaatttttaattttaaaaacttttttaggtaattattttgggttttttgctcataaaaatcccagtcctactcatttgcaactgcaaatagtgaataaaaattatttttgctcaatttttggctgaaaattatgtcactattcgtcactatttcggactttttgtcactgtttcttcactattttgggatttttactcactattttagttaactatttcggtatttttcgtcactaaaagttgcggccctaataattacgtataaaagaaaaaggattaaccagaggccatcatgccaaaaagcagttgctgatcctaacaaatacaataagtgggattaaataaatgccaaattaaaaattgtagaaaaaataaacaaaatcgaaatgcctatgctttgctaaaaaaatattattttttttcaaaaaaaatatacaataattcagctgaaatg

SEQ ID NO: 117240 - DNA, 83 bp, Heterodera glycines; identical to SEQ ID NO: 108673

SEQ ID NO: 117241 - DNA, 420 bp, Heterodera glycines
acgatgaaaatgatggaaaagaaagtcggaagtgacttgctttttctctttttgacaatggctgcaaccaatatttgttttaaattctcacttttatcaatccccgccaataaaaatagagatctataaaacttctcttaaaaaacaaaattttcaaatgaaattgggtgtcatgctttggctgatctctattcctaatctaaatttggtccgactaattgtttgcttgtaatttaatgatttatcctttgacctcttttaataaaattttcatcgaattctctgaatttttacattaagtgccggaagaatccaagtccaatctgtttttatcagttgtttcaaaaaattctgtttttcatttgtcagcgtcaaagttggcctttgttttgactgtccattggcattttgttggacatg

SEQ ID NO: 117242 - DNA, 964 bp, Heterodera glycines
  unsure (1)..(964): unsure at all n locations
agtaatgactatgagattctttttcttcaaattcatcatgnatgaataataatgattngatatnttatcgtatatagtcatgtttttatgttntaatgaacctttttttaatccttcaatttgattatatttctgtataattattactttcttgcttcatttttaaaaatttgctccaaaatgatatgtatttattttgtttagatttataactgaatattaaaaaattttaaaaaggaaatttttatttaatttttttacaaaactttaaaaaggaaattattatttttttacaaatttttaaaaagaagttattttttatgaaaaattttgttagcaaatttcatttcactttattttccggcgacatttgttggcatcgccaaaccaaaattccttaatttaaaaaaaaaaaattaaagaaacattttttaataagaatctattaaatgctattttcaacaaaacataaagactgttactaattcatacacataattgtttattgtttttgtatgtcattcgaattttcaattaaaatttacaattatataaatatattttcatcaaatttaatttatttaatgccaaaaaattattccataatattatttttatttttacataggtttaaatagttttataaattttgataaagatgataaacttttaatgtttggaattatttttaaaatgtgtaccgctcaaccctaatttaatttgtattttgatcattttattcgtcgaaataaaaataattattaaatttattttattcgctttattccttgaaaacaattacctcagtaggtgtctaatgaaggcattataataaaataattaaattaatcacagtttaattttaaaaataaaaatttaattaactaattaaaaaattaatattttattttaatcgatttttctcttcgaaaataattaccacacaattcagattcgcataatg

SEQ ID NO: 117243 - DNA, 264 bp, Heterodera glycines
ttctttggatgtgttgggactacgccaaaaaacgacacgtcaaaaaaggacgacgacggcgacccattgacgacaaaaaagaaaagtagcaaaaattaataattaattaagtttataattgtttttcagctgcttcatcccccgtggcgattggcggctggcggtctttgcttttcttgcgccttctcagcttggcctcgaaattgcactgctcagccaccgatttgactgtcttgtcgatgaacactttaaaacgagaaaatg

SEQ ID NO: 117244 - DNA, 1003 bp, Heterodera glycines
attagatattttttaattatataaaatgtatctattgtttagtgctgtttgagactctcggtcttgagtctcgactggggaaaagtctcgggtttttttggtctcagtttcggtctcgggtctcggggacaagtctcagtctcggtctcgagtctccggaaattttcggtctcgaactgcactattattgttcaggtcaatgatgatttttttgagatggtgttttgaaaaaaatcatcaaaaatgggcattttttaacactgctaaccataattccaaatttttcaaatttatagcgaaattttgccttgaaaattctaaaatttttctcggcggcgcttatcggcatcacagacccccaaaattcttttaaatttacaaaatttaactgaaaaattgccaatttttggtgaaaatcattaaatataaattaataatttaaacagaatatatatttaaatttaagaccaaaattgtaatttaaataaaattcgattattaacatgtatcggaagacaaatagaaaaaaaataaaaaactgaatcaaacttggtgtagtgttagtgagttattcaaaccttttttaagtgacaggttcgaattaaaaataaaaacaattcaaacgaaaataataaattattttatgtctaatatcaaaatttaaattaaatataattttttaaaagtttcattaatttatttcaatttaaaacgaaaaagtaataatttttattaaaattaatgatgaaatttgaattaatctaatccaattttcacaatttgagaatttgaataagaaaagtacaagaactaacattgattgttttaaaattttgaaatgtaattaagttcgttttaaagaaactttacaataaaaagtaaataaatgtgtacgaaaatatatgtataaaaataaattcatttaaattattatttaatatggaaattaataatttatgaaaaagagtcagaaatcaactacataaaatgaattttcagcatg

SEQ ID NO: 117245 - DNA, 98 bp, Heterodera glycines
tcccgccgtctccgtccccgtgctgttcgccgctgcccccgtcgcctccccgcccctactgcggctccccttctcttccgttccctcaaccccaaatg

SEQ ID NO: 117246 - DNA, 385 bp, Heterodera glycines
ttcttggggtggcataaaaaattataaaaatattttaaatcgtctggtaccgtaggatttcgaggacaatcggaaaaaaatctgtatccgaatttatcgtatttagaccagaaaatacatgtatgatccatgccaatcttttgccaaagtgccaaacaaaatctttggattggccatctactgatcagagacaaaattacaccagttggttcatttgatcaatcgtccttacaaattctaggattcaccgcttttgatcaattaaatggcgtttccataattaacaaatttgattgatcacttgcaattttaattttctatagctttttggattaaatcaacaaccgcccaaaattcggcaaatgtttgagtcttggcaataatg

SEQ ID NO: 117247 - DNA, 1003 bp, Heterodera glycines
  unsure (1)..(1003): unsure at all n locations
aatttttcaaaaaaaatctcatttttacccatttcacaagcacaattctaatcaaaagcatttcaatgctttttgaagcatctttttctcgctttctaagattttaatcattttttggaattttcttctctgaaattaaaattttgccttaaaagtgaaaaaagtaattaaaaaggtcaaaaagtacaacaaaaaaaaagataaaattttgaaacattgttggacattttgccaagaatttaggtgtcagaaagccgctacttttgaaaatttgtcaaaaaatcgacaaaatatgtgctagaaactaccaaacccccaaaatatgtttttattagcaaaaagaccaaaatatgtgaatgttaaatactataactttaagtanattatgtatttgatttttcattttaatacccccttttgngacttngaaaaacgtccgatccaaccctcaaaaatatgtaaattttaattcttctatagctctaagggttttatacatagtagtctgtaaaatattaaaaaaaaatttttaattgcaaatttcaaaaaagttatggccatacaaattcaaaaaacttgatgtttcgaacattttttagcctaatttttttttaaaactgaacaaattttttgaaaatgtccgtccgcaattgtccgtaaaacattttagcatatatattttcttcgataatatgttttaaacgaatacacatattatataataaaagccacgttattatattattgatatgctggggatgttttatattattataggcataaatatttgcataatgattgttgggctgacgtcactatgtgtataataaattttaatgttgaaatatattgtattgattcttcgattttatgaaattattcgctattacatacattcattttaaacaaatacgagcatttaaaatttattcaatttattagttattaaatttttatatttctctattatataaatgattttaataaaaaatatattaagatg

SEQ ID NO: 117248 - DNA, 470 bp, Heterodera glycines
ctatgaatgatttttgtcggggggggggggcgggctcctcctaaattttttattgccatccattaatccaagccaaacctcctcagaccataaataaatataataaattctatcgtatttaaatggtgtttaacgtctttaaatcaatcattttatttttatttttacggaaaatttttttaattgttattttttgttttgacttcgttaccaaagctaaaaattaaaaaatgttaaaataaaataaaggttttattgtgctttttaagctgattgttccggcgcttttgaaatgttttcttaccctgatttatttcaacattaatcaaaaataaaagtataaatttgactgattttcacggcaaaaaaaaatacgaaatggtattttccccttccctcttttttaaccccatttcaaaaattttgcccccaatttaaaaaataaaattatagtcaaggctaaaaaaatg

SEQ ID NO: 117249 - DNA, 516 bp, Heterodera glycines
  unsure (1)..(516): unsure at all n locations
gcaaaattaataaacgaacgngagaaataatggcttcgcaaaatgtgaaaaattaaaacgctaattattacaaatcataaaaaaataatgctaataatgggcgaagaaaatgggattttaaggggaacaaattgggagaaaaattagtgaagcgaaatgttcggatccacccaggagcgccatgacaatgccctatactctggggtctgttgggactcggggacacccaaaatggggcccctcgtcgcagccccgggctggccaaattggcccaaaacaccaaatccccaaattcgctgttcgatgtcccctttatttgttgagtaaaaaccaagccaagcgaaacaaagttgaacaattaacagaatgaatgaacgaacgggccaggggaattgagggtggcagaaaggggaggggcagttggtcaattgaggggacaaaaagtgatgagaggggctgacacaaaggaagggggaggaactccaagcccaagccaaaggggaaccccggccaatg

SEQ ID NO: 117250 - DNA, 72 bp, Heterodera glycines
ccttaatcgggcaataaatcccgagaaaaggccccctatgcccccggtgttcgagaatggtatgtaaaaatg

SEQ ID NO: 117251 - DNA, 106 bp, Heterodera glycines
cgaggcaattctcggggaattgcctatttttatgtaaaggcattcaaatgcccgattaatcccaattttccgtgccattgccattcccccccccccctcagaaatg

SEQ ID NO: 117252 - DNA, 125 bp, Heterodera glycines
taaactgatttgaccaaaatgctatttcgaaaattgaaatcaaaaatcttgaattttcaaattcttttcgtctttcttcttttctttttttatgatttctccattcagctttgttctatgagatg

SEQ ID NO: 117253 - DNA, 645 bp, Heterodera glycines
tattggtcatgaaatttgaatgaatgaatgaagagtgaattaaaatatttttgtgcccggttctcatgggctcattaattattcaatagttaatattgacttcaaaagacatttgaatttgccgacaatagtgaaggagataacttcaaaggaaatttgaatttgccgacaataaggaaggagagttcgagaaaattaattggtattcggatggggacaccccgcccctagacttcataaatactcagtccaaatcacatttcattcacatctgctcatatccttactcactttaataataaaattgtaataaaatttttattttattgctgttaaccagggcggttgctccaattattgggctccgtttatcctggcagcacttgtgtgtcttttagggcttggggttgtgcgcgtgacctttactaattacccgagccgtttaggtgccctgtcgtcttgtgcttcatgggtggcagtgcgctgctcttcagggcatagttggtttaaaatttttaaaattattattattattatccattaatttgcattcacaacgacaatttccatgcctcaaaaatatgtgtcaagattgttcattttatccattcaattcattatttttccctgtaaaattagataatg

SEQ ID NO: 117254 - DNA, 1003 bp, Heterodera glycines
gacattggacgcatcgaattggacattggacgcatcggacaattgacgcatcgaggaccaattgagtgcactgtcttggtgcacgtctcagcgcgccggccaaccccatctaccaagacgtgccccggacaactggcgaccttttgtgcacaggcgggttcaatttttttcccaaggggaggtctgattaatctggtctcatccagaattaatcagtgctttaatttctgttcccacctcctcccaaaaaaggcaatcaagttcagtctggactgaaattttcgaagtctcatcttcgaacagtcaaacatttaaagtgcccaatttgaatttgcccgaaaaatctcggcatttcatttccatttcacattttttttgtttttgtccaattacatttattcaaaaaatctcgaaatctcattttcgagttcaaagttttgtccaatcctatcatttcatttctatttcacattttttttttttgtttttgtcccaatctcgaaatctcattttcgagttcaaatttttgtccaaacccatactgtccaatttttcgaaattttattttttgagtttaaattttttgtccaatcccatttagtccaaaatttcggaatctcatttccgagggtctaaaattttttttttttttttgtttttgttttgtgttttgttgtgttgtttttgtttttttttgttttgtttttaacccaaattgtccaaactatccgctcttgataaaatcagagtcttagctctgacagtgcgtggtaaaaagggctcacaaatcgtgaatcgtgtacccttccccttttctgggtttttgttcccctctttctgggtttttaattactgattctcaactcagaacgcagttcggttattgattaaattggagtctcagttccaaagttttaaattgttcggtcacagttcggttattgattattgaattggagtcttatctccgaattttcgaatttggtcagtgatttgagcaatg

SEQ ID NO: 117255 - DNA, 62 bp, Heterodera glycines
gataaaataattgaaaaagtttctcaaaatatggagtgactgatcaacaaaatgtgcaaatg

SEQ ID NO: 117256 - DNA, 577 bp, Heterodera glycines
attctgtgaagagtttttctaataaaatatgaaaaaatatctattatttaactaaattcttataaagtaggggagaaaaaaatttaaacctttatttttttttatcttttttttacaaaatattgaaatgagaaaataaattttgtgcctattcttaaacaaaaataatttaaatgtaattcattttcttctcttcgtaattgggtccaaccaaaagtcaatctctctatattttatatgacttttgctatccaattaattaaacaaagttttttgtttgccatgcaaaaatttggtcgcaaattctgccgcctttctcccgggcaaccgaccgaccattccaaaagagcctcgcttcgtttgttggcttttccctcctccctcacccccttctctcatttgtttgcattcactgccatttatcaccttaatgaagagatccacgagcattcaatttgatcacaaatccgccgatcattctcctcccgctccggcgacgatcgccgccggagagagtcgaaacagcggcaacagatcgcctcatcagcctccgcccgcaacggcgcccattccaatg

SEQ ID NO: 117257 - DNA, 559 bp, Heterodera glycines
ttttgagcggttttcaaaatttaaaaaaaatgtgcgtgaaggcactcttttattccaaagaaatggacaatttgcaaaacaagttaattatagttgggattttttgataaaacgaaattatattctaacgtatcagcagggcagtaatttatgactcctggcctttaaattgaaaaaatttgtttttatttgtaagccctaaaataaatcgtcaagaaacaaaatgataatttaacagaaaatatttgacttttgatgaaaccgaaaccttatttatccctccccctaaattttattttttaaattcataccaaattttacatttttttttataaatcctatttttggcttttcaaatcccatatcttacctattttggagtttttctcgctaaaaagattggacaaacttatatgtagagagagcgaagacggctgaacagcgataaaaattgaaaattttgcagattttatctaggccaggagggggggggggggggctgactggccggcaattttaattttaattattttcaagttttttacaaaatgctgagatg

SEQ ID NO: 117258 - DNA, 596 bp, Heterodera glycines
  unsure (1)..(596): unsure at all n locations
atatannttttttggaaagttgggtggaattcattaaattttcgatgttttctgtgctcctatcctctgcttttgaaagtgcaactttaataggcgtagaaatttcacaataacccgggccaagagtcgattaaccaatttctgaattaaaacaggggggaaacgaactgctccaaatttgcttgcgcacggggatggaatcgaaagcttaattaaatattttataaactctcgaactttttttaaaattttaggaatttttcaaaaaataaggaaacttataatttcaagaaaataattatacataatttctcacgatttcaaaattttatgatgaattgcaagttttttcgaaaaatattcccaaaaaactgctgaaatttttttgaaaatttcaaatgatatgggtgggggacatccgggggcgggtggaacggtgggatagggggcgaaagattaaaaataatcgtttggtggtttgtcagacacataaggtattaagcttagcgtagcaaaagtcactcctttatcagactacataaggcaatttccgttttccacgtatattttcaataaaacatttcagcaggacgatg

SEQ ID NO: 117259 - DNA, 1003 bp, Heterodera glycines
gatgaaagggggggggggcaaagattaaagggattaaataaaagcaaagcgaaacaatgggaaaaaagcgaaagcattgctttttattcagccaatcatttcaattcttttccatttcaaattgtcagtttcaaagtgtttcttcttcttcggttcttctcgttttcccatttctcttttcattttcctttttctgtcgttaatttgtcatttttcggtggttattttatttttttttcggccctttcctccgtccccaaattgaaatgattgggacggaaacggccattcgtttcgcgcattgccttcactcaaaccaaaccacgcttctcactaattaattacctattggaaataaataacaatgcacaaacttcgcaattctcttctctctttttcattttccattatttttttttgtcaaattttactcttttttttgcattgtccgttttttcttttttattttttgttcatttttaatggcgctgccttttcaaattactttttttgtcttggcccatttgaccaatcgccgccgttttttcgctctttgcgatgttttggccatacttttgctgttttgatatgataatgataattcccctcctttcaattccattgcaatttcaatcgatcatttccatccatcggtcgtccatttgtcatcccttttttgcctatgtacattaattaactaattaataacttgttgttgtttccttaacggtgctgctaattgcctcggctttccgctgaattggaccaaataaaatgatggaagaatgaaaagctatttccgacttttatatttctatttttggggcttaatattctttttataattttcaattgccaagaaaaaaaatttcataaaattacgcaacaaaatacaaaaaataaaaatataaatgcaaaattaactcttaaatatctctgatattttcaacaaaaatcacttctgtccctttgccagtgatttctttgccctttccatccaatg

SEQ ID NO: 117260 - DNA, 55 bp, Heterodera glycines
cttgcggcgccgaaacaattggtcgtgggacagaatcataaagcatcggcaaatg

SEQ ID NO: 117261 - DNA, 52 bp, Heterodera glycines
tttttagcaaaatttatttcttctaaataaataaaagaaatttattaaaatg

SEQ ID NO: 117262 - DNA, 787 bp, Heterodera glycines
tttcgtcgccgaccaaattcaaatttgactctagcgtaccgttttccctctcacctgtcaatcaaatttcaatctttcgggactctatgcgcttcgttttcccttctggcggaagtcatgcaccaaaaaacgtcccctctcggggtgccatccccttcccacctgtcaatcaaatttcgtagcctgccaaaattcaaattttggttctctcgcaagccatccttctctgctggcgttcaaattgcttctttcgccggtcttttcccttctttcaccacacacaccactgaaaatcgatcacacccttccgctaattactccgccccttcgcatttgtgccggaattggcgtcctttcattcactcttctactctctcaaaaaatcagctttttcaaccaaccttctcgcccagctaatttcttttttattgtcttcaatttcctaatttaattcgtcctttttcaattcttcttctctctatctgtttttttgtcctgacatttcgtcttctatttattcccttttcttcaactttttttgctgaaaatgtctcgtttctgccctcgcgttgaaaccaaggaattgggacgcctttccgctccgaaggggaaatttagtgagttcgaaatcactttaaattcagcacaagatttgcaaatctttaacttttgtttaggcctattttactcccttgaattcgcccgaaattaccgattgattggaaaggagataacggaaaacaagtttcgttatctcatgaaaacagagaaaaaacaaagagaaatg

SEQ ID NO: 117263 - DNA, 667 bp, Heterodera glycines
tgtttcttctccttattaattgcctcttcgcgatcggctctcttctgacaatttgtcttaatgttatcaattgcgacatgctttttttctttgttttgcttaattatctctaaaatacgcttcatgaacaacaccgacttcatcacttcctgcaaatgaacaaacaatgaaaattgcatttgcatttaagcgtcactttaaactttaattatattaatcaattatacatttaataaaataaaatgaaaaatcaaataaatcaaaatcttcaaaacgttcattatttattctaaaagcctaaaatgatcagaaaatgagcttggggcgtgcttgccaattttctgaagaaaaaacccggtactgaagtgtccattttcaacgggattcgacgttttttcgtaatcaaatctctcgaatttctttttctcgggttactaatttattgaaaaatgaagcaaatccctaatttgatttgcctttaagtgctcaagttcggtcgcgcttgagaacatcatttgtccgacaatttcgccaatctttttctctaacccttctattgcacttttgtgactggtgaatttcatacaaagtttgccgaacaaacaatcgaaaatgccatggagaatccttttttgttccgccttataaatgggcgaggagggcgatg

SEQ ID NO: 117264 - DNA, 210 bp, Heterodera glycines
cgttttaattgcttaaatcccttcaaatttaatccttttttttctgtttgagtgtacggcgcggacggagaacaacagcggcattttcttcccgattttcacccaattcacaaattttgtattgggtcaaatactttttggtgattcctcctaaatccaaattcatccgttaatccgtcgcttttctgaccaaagtccgttttcccaatg

SEQ ID NO: 117265 - DNA, 194 bp, Heterodera glycines
tctcgaaattaaaaaaaatttacaatcaaaagccggattactgttgaattttcctgactcggactagccgggggctcccggataattagtgttgtatgacaaagtcgctggtggcactgcctgtggttgacccgggctttgcggcgtaggcgataagcacggtgccggcggctgtcgcgtagtcggccaagatg

SEQ ID NO: 117266 - DNA, 544 bp, Heterodera glycines
agcattaaatcgtcaagtatcagtaagaggggttttccttgttctttaatcttattcatgtccggaatcccgttaaaactctcgacaccctccccgattaatcctaaaatactatcattcatctcaccgtaacaataaagaattttggtgggcgatggttcaattagattcttatggtgttttaaaaaccgtaatagccaacgggtcttaccactcccggtagcccccgagagaattagagtgaacggaccgcgaaacatttttaattcctcttatttatttgacctatttatattttcataggaacatgtttcgcgcatttggggcatagccagaaattatcaaataatgatgtaccgaaatgcaaaagactgtgctatttacacctgctacaaatctcgtaatgacagggacagtaatgacaacacttaattttatgtgggcagttcatttttcaatttaattttattttgggttgctatttatagaaggggtatataaagggagtgaaaggaccatttgattgatacattgtatcaaaatg

SEQ ID NO: 117267 - DNA, 168 bp, Heterodera glycines
tttgttgttttaggacagatccgtgctgtcccggcagtcaaaaagtggtttcacttatgtccaattacgttggcacttttgccaattccatttccaagtcatcgctttgttcggatgcccaaaatgttgcggacgcgttgaaaggccaactgatcggctgctcgaatg

SEQ ID NO: 117268 - DNA, 333 bp, Heterodera glycines
aggtacaacagtgatcagaagaggctcaacagtgaatagaagagtacaacagttaatagtagttacatttactcgcaggttttgtacataatagtttaaaatggttaaatcatggtttcataatcatattattaaggacattgttttatagcaaatataaataacactgaaatgtgttaataatttcttaaacatgataaaataaattaacacgtattgacatgtttttggcagtgaattgttaaaaaaatgttttctttcaaaaatcctgtctatcgccgtttgtaacaacccccaaactcattcaagaattctggaacgtttatcaaaatg

SEQ ID NO: 117269 - DNA, 1003 bp, Heterodera glycines
tctcttgctctgtgtatataagttgtagacctatcattcaaaaggcaatcggcagagaattttgtcctctttctgacaggcctactgtctgatcaagtaggtgtaaacgacttttttgatcagcatcaaaaatttagcattcagaatttttttcacaaaaataatttgaattaaaaaccggaaaaagcatttttttggctcacgtgacctttaagcatttcattcatttccggccaataaattaaatatatttgttattaaaaatcggaaaatgcatttttttaggcttgcgtgacctctaaaatctttcaattcatttccgaccattaaattaaatgtgcatatgtataactgtttatttgcagtttatttttttcattttcaaatcgatttgttttataaatttgcattataaaatcacttttcctacttcataaaattcattccaaaatgtttatatttttaaaaatatttttatttgcttccgttaatttggtgacgagctcaccgacgcatgaaggttttagtcaaaacaaaatttattctaataatatttttttagacaaatattaaaaactttaattaaaaaatataaaaagaattttgtgtttttaagttttttctgcaaaaaatttcaatttttcaattaaatttaatattttaatagatttttgtttttgttaaatttttattaaaatatttttattttgtttaatttttaatttgttgttgagagtttttttaaatatttttagtatttacatttatttatttttattttttaaaaaaattaataaaaatttttaattattttttttcgaatcgtccatcgatgtgccggcagaaaaagtgcaccttttggcaaaatatgtgacaaaagcgtataaaaatgagtcggaagcgctggaagtggcgacaaatttggcggaaaatttggtggcggacaaaggcattgtgagaagcgccccgcggggctttgaagcggccaaaattgatcagaatg

SEQ ID NO: 117270 - DNA, 134 bp, Heterodera glycines
gacacaatcatggtgaatgggataagaaaattgcccatcctcccttttaaattgttggaaggcgtccattttacttttttatgtaaattttctttttatttatagttttttcattttcacagcttaaaaaaatg

SEQ ID NO: 117271 - DNA, 211 bp, Heterodera glycines
  unsure (1)..(211): unsure at all n locations
gtcaataccaaaattgtttatgcaaaccgacnagaaaaaagggcggaggatcggcaattttattaaaaacattgatcccttatcagacacttttctttgggacaaaattccaatgcgaaattatacacattaaattactttttaaaaaaccaattcaaattataaatatatatcgtccaccgaattgtaaaatgatcctatgtcaaatatg

SEQ ID NO: 117272 - DNA, 260 bp, Heterodera glycines
tttgtccgcatgggtcgcggtttgcacagcgctggtgcgcttttgatcatcgcgcaggtctgttaattttgggcatctacccacgcttccgctaaacccctatttctcaattaagattgtgcgcgccggattcaaagtgcgcaaatttttgaaggaccgcgccttcaaaaagggatgctgcgccgccatcgccagcgtgagtttcgcactatttgaattacatttttagcaaattgtaattaacaatttgtacaggaatg

SEQ ID NO: 117273 - DNA, 183 bp, Heterodera glycines
ttccacctgaaacaacggcagaaccaaatttcggacatttttcaatgctagaaaagcactggtacgacgagaagctaaataggcggacatatatttccaacatcacacgacgagtgagcagagagatatagccccccccccccccgaacatgtcgcggattattcgattttaagacccgaatg

SEQ ID NO: 117274 - DNA, 484 bp, Heterodera glycines
tttagattataggtttaatagtaattactttttgctagtttaagataattggtttctttctttcgcatatataagaagcaatttaaataattgtgaattttttgcgattgtttctttaaaattcatttttatgattcttttaattctctataattgctttttaaattaaaaaaatgtactagttaccttttgtaagtatttaaatataagtgtttaaatatcataataagtatatttaattattaatttttttttgtaaaaaatgaaagaaattatttttttaaatattttttgaatataaagccgcatttatttgactttttgaggtttttgttatttttcgtagatcaaaaaataaaaaaaggaagttataaattccgccacccatgcgcgttttataaatccgccagcacatttttttgcatatatctttaataatattaaaattttatgcaataatttcagctatattttatacaaaatg

SEQ ID NO: 117275 - DNA, 1003 bp, Heterodera glycines
ttaatgggatgctaattaacaggtaattaaaaatagtaagagggatgaaacagaagctaattgacataattaaccgtataactaaacgttttttatgaatatttgtgggtgataaacatgccaacaattaatcaagaagataaaagagtaaattatcaagacatgtttgtgacactgtttagtattaattaattcataaatcttacaaattaaaatgaattcaaataaaaaactttttggtaaacttttttaataattccaataaaaataaaaaatttaaataattttttgatgtatttttcatttctaataaaaatcagtaaaaaaaatataaaaaattttcgaaggatttttaatattcttgtaaattacctattcatacaacccaaaaagtcattttaattaatttatttcaagcattttctcattttgaatattaaataaaatatttaaaagtattaatcacatttttccatttgaactctttgcgacaaaattaattaattgcttttacaccaattggcattgaaatgaggtgatacacaacaaaaaaacaacactttgtgctgcagtgcgaaaatttgtttcacttctcccgcccaaaaatggtcgcgtggccataaaaatttgaaacaaaaaaatcattaacaaaaaaaaaacatttacggagagaaagaacggagggcggacgggcgggcggccgagccggccataaaattggacggattgaaaaatgtgaaacaaaaaaattgacatggacaaaaaaagggcgggagaaaatgtgagtgaatggggggctgccccacattttaatgggcaataataataataataataataatggataagtcgggttggttgatgatcatttctcattctgtgctgcttggggcacacttcaaaatttgcaaagcaatttttgccctgggggaaatttaaaaaaaaatttaaaaaaatgaaaattcttttgccctaaggggattgatgcgcaactattagaatg

SEQ ID NO: 117276 - DNA, 780 bp, Heterodera glycines
tttatttgctccatttattctccgcgcaaatgggccacaccttaagaaatttaaaattccttatctaattcgtcattaatttagcaaaattatgagattttacatattcaaaaatagttctcgatatttttcaaattgaaaaatcggaaattctgtaaaatttctccattagctttttgggattttcccattttttgaattgtcacattggacttttttttgtttttggttttctctgttggctttcggcattcgtttgttttttgtttcgttgtggtgaaattttgtaaaaaaataatcttctttacctgattaattttttttaattaaattaaaatataccaacaatataaacacgcaaaaatattttttaatggattttaacttttgagcttttctttatataaatctgagttgtgttgtgttgtgtttgttctttaatttaattggaaaattcttttaaagaaattcaatattcccttttttcaaatgaaaaaatgagtccattttatttttagagaaaaattatttatttatttattttcaattggcccaaaaagctttttcttaactgttttaaagccaaaagatgcaaaaaatcttttttgtttgatttgtaatttgagttgaatgagtgggcgaattttgtacaacaaaaagtcacaaaaccatcgcaattgtttcaacaatttgggcaattttcttttgccatttgtccaatttttgtcggtataaattaatttttaatgctaatttaatcttcagacagtcataaaaatg

SEQ ID NO: 117277 - DNA, 134 bp, Heterodera glycines
  unsure (1)..(134): unsure at all n locations
ataatttaaataatttattctcttcgcctacgtagtagtgatgtgtacagtcatgtactctgctgatgctcgcgtgtcgacgtattaccaaaacgtcggtgcaacagtccgccaaaatgttggtgggcganatg

SEQ ID NO: 117278 - DNA, 125 bp, Heterodera glycines
cctaaacattggaaaaagccaagaattagcattaaaatagctaaaaaagaccagggaatgccgcagatggggcatatgcggggaccgccgctgccggcataaagccagcgggggagcgcagaatg

SEQ ID NO: 117279 - DNA, 253 bp, Heterodera glycines
tgtaactgatccatgggccgagatttttgaaatcttatggtcggaattcggagattagccccctcctcttgatattaactgattagctaatataattgtagaacctaatccgaagttttgattcgatctgctgttgatcttgtgatctatataatagcatttttggtataactctctctgttcaattataaaaatgtactattgactgattgatcaattgattgatcccttttttctctgatcagatggcatg

SEQ ID NO: 117280 - DNA, 80 bp, Heterodera glycines
ctttccatacaaaaatgggtgggtttaaatagaaaaataaaagcttttgtttcgggatcactttaatccaaataaatatg

SEQ ID NO: 117281 - DNA, 322 bp, Heterodera glycines
tttcgaccaattcggaacccgagccgaaattcgaacaaaaaatcgaaaataaaaaatttcaaaattctctttttgtttctaaaatatattttctaaaatatattaaaacaaccaaaacgttttggcgccgacgatttggcggcatgtagagaggaggtagaaatgatgaaatcgttataatttttctgacgaagtctatcaaagagccggatttaattcttcatttactctttttcgctttggcttatgttctcttaattttgtatttaggtaatgaatcgtcaaattgatacgaaaaaacaaaagcctaaaataacgcatg

SEQ ID NO: 117282 - DNA, 58 bp, Heterodera glycines
ggtttcgtttttgaattttaaattttgttttttcaaatattcaaattgccaggcaatg

SEQ ID NO: 117283 - DNA, 501 bp, Heterodera glycines
tttttaccatagaattagtttttgggactcagaattttcaaaatgttgctttctgacaaaaaaattcgatgcgattatgaaaggcgaaaacatttcatcaattatattttttctttattaattgaaattggccataaataggcatttttgcctgctaaaataaggatttagaaagagtaaaggcaaaatttgacttaaaaggtaccaactgaatttaaatttggcattttcaatttagaaaatttcattatttctcacttattttgacactcctcacggttttcattcgattgagtccaaagaccggtcacagcatacaattaatggaaccacacattcatcgccgccagatatcttcatcggagaaggccatcacaaaaacgtaaataaacaaaaacatttttaattatggacttaacatttaaacccttttaattatggacttaacatttaataattgattttatttataaattgtgacgataagctagcacaaagatg

SEQ ID NO: 117284 - DNA, 258 bp, Heterodera glycines
ttgcggaatatgcgatcttctcacatccccgcatgaaagcattgtttttacatttttttatactaatttggactcgatgatgtcatttcatttaattttttatcactgataaagaacgaatccctggaaaattgttgccaaattaaagaattttcctggttattttaaattttaaaagaaatatgggataagtggaaaataaaaaatattattaaaagtgaaaaatcaaatcaagttttttaaattttaaaagaaatg

SEQ ID NO: 117285 - DNA, 405 bp, Heterodera glycines
tggcctccgtgcgcctgtatttcgagacggtgttgggctatgccgacgcgttggccaccacatggcccctggtggtgcagcgcgggcgcgaggacaaactgttcgcgcctggccgagtggtcagtgccatacaattaatgctcactcatcacggttttagggggccaaggcccttggcacacgtgtagttaacatgcttggtcatgactccatcatggcacggatattttgcccaaaaatggaaaaatcgatgtcccccaaaaattttaaaaatcaaaaaaaaatttattggctccatttaccccacccctattttatgtatggtggtgcctccttctccattaatcagttgattaattatttccaatgcttaattggcaattaattatgtaactgattacaatg

SEQ ID NO: 117286 - DNA, 186 bp, Heterodera glycines
cgatgcaaggaaaatcccattcagttgatcaattggatgtgcacttagaaaatacccagagttttttatagaaaaaatgcaactgatcaagaaatcgaagaggcattgttaaaaaattcaaccttaactgcttattttaagttttgcctagaaaatcctgataaagaaattaaatacactgatatg

SEQ ID NO: 117287 - DNA, 215 bp, Heterodera glycines
gatcttatctttaaatgggacgttatagttttaggcaaaataaaattttgttctaggaaatataaatcataatgtggttgacagaatttctggaaggttacggtattcccaagggtattcttggtcatgtcatagtttagatcttatctttaaaaatgggacgttatagttttaggcaaaataaaattttgttctaggaaatataaatcataatg

SEQ ID NO: 117288 - DNA, 185 bp, Heterodera glycines
tgcaattgagggggaaacgtgtggagtgttgggacggcttcagttcgaagtgcatggtcggctttgaaccttcgaaatgaattcgaattccctttggctttgctttttgcagcaatcgttggcttcgcccgactttgtgccggcgatgtgttcgaagtttcggtaaggcacggccaccagcgatg

SEQ ID NO: 117289 - DNA, 580 bp, Heterodera glycines
ttggaaatttttaaaaattacaccccacaaaacacgaaacatttgagttttcgtcgtcattttggcattttcaataaatcatttcttttttttaatgagaattttttcgaaatttggcaaacttggaggtgtttttgatacaacgaacaacaataaaaaatatgcatttttaagttttaaaccccattttttggttgtttattgtactttttaggtttatttaagcaaatattaaatatgcacacctttttgggatttttgggggtttacaacatatattttggcattttttatccatattttggtccatatttggccatttttggcctttttagtccatatttaatgtccatatttcgcgttttttagtccatataatttacaaccctatttattagcatgccaaaatttccgtttcggttcaaaaaagttatgacaaaacatgttcgaacaacgagttttgaattcttctggccaagtttttatgaaccttaacaaagtttttcgaaattttgcagattaatatagggcacttagaactatcaaatgataccaagattgttggaattggtcgacaatg

SEQ ID NO: 117290 - DNA, 194 bp, Heterodera glycines
tctgctacccggcaatgcttcaacgaggcgatcatttggacacgaacagaaattataaagttaaaagaaaattcatcgttgctgttaatatggtaaaatgctctctctcaccacaatttctggctaattattaagtacataattaaccccctccccagggcaattctattgcagaagaatgtgttaaaaaaatg

SEQ ID NO: 117291 - DNA, 145 bp, Heterodera glycines
caatgcttttaagccccgccgtgcggcggctccccttttgtgcactattttagtttttaaattggttccggactttttggctttttgaaataaattgtgaaaaatatacgaaaattattttagcttttaattacgctgtacaatg

SEQ ID NO: 117292 - DNA, 450 bp, Heterodera glycines
ttttctgagccaatgttaagcattttaaatttaaatttatttaagaattaaatggatttaagagtgttttttaaatagttaatcaatttccaagagtttttttatatgctattttagaatatattaaactaaaataattcattttgaaagacggaaaatcaattagatcttattttacaaattccgataaaaacttactcaaaaatggaatgaaactgagaaagtgtgggttggcaaaaggcaaaaaaaaaattcaaatgcgatcggaattcaatttgctgattgccgaattttttgagagtgtcggcattatccctggtgtataccgaaaaggtgaagcccgtaacattttttacacaaatattatacattaaattaataatggcaaatatttaaattttattgaaggttaattgcattaatttaaaaataattttccaaaaaaaaatg

SEQ ID NO: 117293 - DNA, 967 bp, Heterodera glycines
ccttaaaaaaggaaataaaagcaaacaaatacataatcattaggacttcaaattatatggaaatccatataattttttttcatggactgtgggaagctaaaacgaacgaaaaacatgtttttagcttggtttatagcttctatgatggatttctatcggaacaggacgaaattttagcttggaaaaaagttattaagaaaaaactttcaaaattttggttttttttgttatttcatgttatacttttttggtaattgtcttatcgctaagcaatagggtagaaaaagcttctaaacatataaagctttcgaatgataccaagattattagatttggtcaacaatgaaaaatgttgtagtccaaaacttgggctggcaccgaaccgtcctctgccggattatatccatattttggcattatacccatattcttatcagatttgtcggcatcaactagtctatgattttatgtctatgatttttaaaataataacttttttttaaagtcatgtaaaacgtctttcttgtggttttcgaggtcgctgatataaatttgacatccattttggtcaatttcgaaccccggacccaaattcgaacattaagtcaaaaattcaaatttttgaatttcgaacttttattctaaaattgattaaaactagcaaaaaaaaatcaaccacaggccattgcaacagcaaaaatgagccattctatgcatgttcgaatataacagtaaaattcgaagaatttgaattttcgacttttgttcgagttcgggttcggggttcgaaattaatgaaaagggataccagattcgtaatcagcgcccttgataacccccgagtacttttcagaattgtaaaaatcgacctttttttgccctttttatgggaccagtaaagttaaccggtttaccgcctattaatttttgaaaaaatcaagtacttgatgacaccatagctaaaatg

SEQ ID NO: 117294 - DNA, 942 bp, Heterodera glycines
agtagcgccttgctaaaagcttcttttttaacaaaaacctttatttttctatgaaattttttctacgtgagcaaaaaagtaaaatttttgaaaaccccaaaaaattaaaatttttataaattatttggttttaaaatttcttagaattttcctcattacaaaagctttttaatttggtttatattgacagggtttctttcacaaaaattttttgttttagtaaattttttgaaaaattttcttcgggggagggggaaggctgaagtgtacctaaattgaggtgtcaatattcacgtaacttcacaggtttcccgttgacttggaatgggacaaactcttcttcgcctcctcctctgatgccattgtccgtctccgttgcaatttctggcagaggcaccgaaaaatgtgtggtggtggtggcccgagtgccgtggtccatccgccgtgcaattactatgccatttttgtgccatcgagcggcgccgttctccacaaatttcctcacaaccatccacaagaaaaagtgcggaagaaaaaaccattcccagtgttggtctccgtttccctagtttttgtccaattttccggattccattttttatcaccccatacatttcgcgcaaaatttaaagttttcttttcaggaaaatacacagaaattggacggcgattgtttcgcagcaaagcattctgatcagcagcatgtggactttgatcggatgctgaattggtggttgcccgacggttggttggtgctcgcccatttgcacaatttgtcggatttggttggtctgtgcctccgtcacacacttcggcacgtacagcccaatgatcaccaccatctccgcttttggcatgcgcttcaatcgttgtcttcaacgccaatggacaacaatttcggctctgattacattgctcacttggaatgcattttcaacaatg

SEQ ID NO: 117295 - DNA, 61 bp, Heterodera glycines
tttattcctgaaatttaaaatattttaaatttattttaagacaaattttcatttaaaaatg

SEQ ID NO: 117296 - DNA, 111 bp, Heterodera glycines
ggcattgtttaaaagggtgggggcaatttcaaaataaatggtgaagaattaaattataaaaaatcaaattaagcgagaattataaattttgtgaattgaattatcaaaatg

SEQ ID NO: 117297 - DNA, 255 bp, Heterodera glycines
ttgtgttgttgttgggcgcactgaagtcgttcgttcgttgattgggtgttgtgtcagcagcaaatgtgcaaatggacaaaaattcgccccttttatatgcattttctgttgcactttttttcagtgggaaatttgaatataaaaaggcgtgaaattgagagaaatttcattctcgtcacattcttaattctattctctgcactattacatctaattgctgctgctcaccgactccatcgacaacgacacgcgatg

SEQ ID NO: 117298 - DNA, 613 bp, Heterodera glycines
aaatccattagctcttaatagcatattggcaaaaagtcattataataaattctattttacattcaaatgatgacgtgaaaagtaattataataacagcttacgcaaatgactaaaaattttcgattggtttttattcacattgttaaaagaattataataaatttatattttcatgtaaataataatttaatacatattttaaaattagttacgttataataaaattatataacaaatatataatttgaaaattaaaaaaatagcttaacattcttcattcgatttagattatggcagtatctgctgtaattgttgtttgttgtgtgatcgcaaagccaagggacaacggcagaaaaaggtaaagcaaacgaatgcttttgcatagcaggtaattatgggcaatttgaccgggttttgtgatgggaaaagcgaaattaatgagcgaaaaaagaggcaaaattggcaaaaattcaaaaataaatttgtttttttattaagctgagctcactttgactttgactcttgaggaaatgttccgttttgaagcggaagtcgtcaaagtgttaagcgataaatttgaaacgaaaaaagaaacaaaaaataaaacaaatg

SEQ ID NO: 117299 - DNA, 1003 bp, Heterodera glycines
gacttttcttttgctgactctaaatggtcttaaaatgaattaaaaagtgttctaaactttgtttgaagcttcgaacatgcattttttgtgactttttttaacttttttacactttttgggatttttgtgacttttttgagtttttgcgacttttttcgtgatttttttgactttttgaggcaaaatttgaatttttagcgaagaaaatgccgaaaaataaaatttagatcggtgaaaaggcacggaaagatgaaattgttcgtacttggaagaattacttttttatgcctattttaggtattgatgattatgtgatctaaatgttggactttgccatttacgtgtaacatatatttgatttttacacatgaattcataaaaaaagattggcatttagctgaactatgtacatatagtcaatccccccccccccaaaaaagaaaaaatatcacaaattatacaccattgatttgtctcaaggagttaagcactgaaaaaagggtctccagtagcgggaatgggtttaaacggttttaagtcggttaaaacttcgaaaatggaaagaatttggcacataactttttaattttaatttatcagaccaaatgcgaaaaatctgaagtttcgactttttgttcgagatcggttttccaagccattcccccatctgtttgtgcatcgctcaattaccacgaattaaatggcaatgcgacgaattgcgccgagaattaggccaattagagggatcatttgccctgcgggtaagtgtgatgggcacgggtatggtaaagtgatgtcaattgggctcaaagaggcgaatttcttcaattaattggatggaccgaatgaccaaaacggcaaattgagggccaaacgaaatggcttttcagctgtgaagcggacaaattcctccaaaagaagaaaaaaaggctcaaaaaaattttttggataatattccatttttataaaataaaatatattatttctttttattcagcagatg

SEQ ID NO: 117300 - DNA, 57 bp, Heterodera glycines
tttttcagataattttcactgcttttgcatacattcattctcgcgcattacaaaatg

SEQ ID NO: 117301 - DNA, 393 bp, Heterodera glycines
ttcaccgtcaaaaatgcttcccatcgcttgaatgcaacgcattgtgacgacgaaacaaacgaagcggacacaattggctaattagtgtgcaattagcacagcaattacataattaattgttcaatgttcacttcactaaacagtgctttcattttttattgttgttggttcctgtcattttgatccatctttgatcattgttttttgaaaaaaagaattggatagaatttaatttaattagatcataaataggctaatacatctataaagaatagggggactcccagtgattggaatgtcaatgaattgagtccaaatgattgaaaattgcagaagatctaattttattttatagattgagagaaaagacgagaaaactgctaagaaataatg

SEQ ID NO: 117302 - DNA, 369 bp, Heterodera glycines
tctttaatttagacaagggaaatattttgaaatgtcagtgtctaattcactttaaaactatatttatcgttgtaaagcatggtccatttgctattgtaaattatttttttttttgcgctaaccctcaactgatcagaaaaaatggatcaaatgtgaaaatacaaacaaaaattaattaatttatgcgcttttccctcataaatttaatgactattcatcatgggttcgcttccgcatgacagatgatgaattttattttcattttcttaatactgctattccacataacatttatttatgcatttattagttgtccagtgccaaaaaaggcgaaaattggcattaatcaaatttaggtgattaaaaatg

SEQ ID NO: 117303 - DNA, 79 bp, Heterodera glycines
agtcagtcatttcaaaaatgaaattaaaaaaataaataaataaatttgcccccttttttttgcagagtttgccgtgatg

SEQ ID NO: 117304 - DNA, 142 bp, Heterodera glycines
cattctaatttctgtcctttttgaggtgttaaactcttcagctgtgtgccgttactgtcgttttcaagtaaaacatatttgtttacgcattttaattataatattattatgataatcaacaaatgttaagaaatgcataatg

SEQ ID NO: 117305 - DNA, 258 bp, Heterodera glycines
aattgatgacgaaaaaacaaacaaattaattggggtaggcgggaaatgagtggtgttccccttcccccagaaagctatttaaatgccaatttttcacagcagaaccataaagaacggcaaaaaataaatttttaggtattttagcaataaaaaatttatttaaatcaatgcatttaaaaaacaattaaaacattattctgtttttaattattttcagtttttctattattaacaaataataattcattagcaaaaatg

SEQ ID NO: 117306 - DNA, 360 bp, Heterodera glycines
atgtagcataagggcgtcgaatatagttatatagttttatttttgtgcaacccaagtgctgcaagtataaaaaaattctcagaacatggagagggcctaaataagattcgtttaatggcatttaattaaataataatatattaggttgtcagttcttcgaattttattttcatttgggtttttaatctatatattaatttataatgatgccttgttttttaactgatacatttgttttatgttatacataaaaagacttataaaaattattaatttttctattagtaaattttggtttgattttttattaaaatacattcattaaagtccacaacaaagaattgttgagcctgcggaatg

SEQ ID NO: 117307 - DNA, 120 bp, Heterodera glycines
ttttttcgcatgcttttttataataaatattaaatgttcatgttgtttttaaagtgaaggttttgacccaaatatttaatcaattttaatttattatttttggtagaattccagaaaatg

SEQ ID NO: 117308 - DNA, 337 bp, Heterodera glycines
atttatcatttttttcaaaaaacaaatgcttaattttacttctattaatttcgtgcttaattaggagacaatttcttaaaaaagaatcgattaatttattaaccaatcgtccaactaatgcattcaattaattaattactaattacatcattcattattaattattaggtatacacgttgcataaatcaattgctgggcaaatgcggaaatgggtaaaaataatactaattgtttacataatattctcagcttatccatgcgaaaagcagaaaatctttataaatacataaatttacatttgataaatggaaaaagcattttgaatgcttttccatg

SEQ ID NO: 117309 - DNA, 307 bp, Heterodera glycines
  unsure (1)..(307): unsure at all n locations
cctaaactttatttattatgaaaaaagtatggacacaaaattttttttatattttggtcactttttcgtgtaacaaataaacttttctnaagtttgctngtagataaaaagctaanggtctatgaaaggtaccaagaatgttaattcggtcgatttgacagaagttatgacgatttttttgttttttaaagcagtgcgagttggttttttgccaattcttacccttccaatcagatccagaaattgtcaaacaaaagataggatttctgcaataggtacggtatcaaaaaacgtatttgcacagatg

SEQ ID NO: 117310 - DNA, 275 bp, Heterodera glycines
aatcgaggatcaataaacttttccttggctgattatatttcatttaatttcaatatatttatttttttggaattccataaattattttttaacatttacaaacaggaaagggaaattaaaaatttttaaaatcaactatttaccattaaatataatagattgcaattgattgagattttttaaaaataaatagagattttgcatatattccacttataatataacaaatataagcagaaaaacaaaatttattattttttttgcatcaaaaaatg

SEQ ID NO: 117311 - DNA, 66 bp, Heterodera glycines
ccatttgctctgctaattgccccgtttggcctccccgccctcccttccgcttcttctgccccaatg

SEQ ID NO: 117312 - DNA, 120 bp, Heterodera glycines
aaatgtatataattgaaaaatgccaaaaattacgcaaatttgggtccgtaatttcacgcgagcatcgaacaatttggtccgtttcacgctcataaagtgtggcgatcagttcaaggaatg

SEQ ID NO: 117313 - DNA, 409 bp, Heterodera glycines
tgatttttataaaattagacgtaaattggatttgtaatgaaaatgataaaaatatgaattaaaatgaataggtgaaaaatcaaaagaattttgaaatttttgtgcttaatacgaataaattaaatttcaaattaaaaattatttctatcttttgcaaaagtttaactaaaaagcttcgaagaaatgttttgtaaaaaggaaatggagtaaaataaatttaataaatttaaatttaaaaaaaagaaaattgaaatataaataatattactgtctttggaatgttttctcttttttttgcagcattttcttaaaaaaaaatctgaaaatgccaaaaattaataaaagcttaatagtcttaaccaattattccaattccaatgaataaacttttcctgccatttcaggcatg

SEQ ID NO: 117314 - DNA, 82 bp, Heterodera glycines
agtctgttgccgtccaccacaatgcacagaacaagaaattgtcaaaacaaaacaaaaaatcagtcgctcgtttgttaagatg

SEQ ID NO: 117315 - DNA, 210 bp, Heterodera glycines
ggttgataagatccataaaagaaagggcggatgtgcctcggtagcttaatggtagagctgcccacggaaagggtgcatgagtgggttcgattcccacccgaggtttaacattttgcccatttcttattatatttaaaaatgtgtaaataatgcgccaatttaattgaggtaaattactcaagagcatccatcagactttctcaggcaatg

SEQ ID NO: 117316 - DNA, 787 bp, Heterodera glycines
tgtacaagcaattgggttgttgaatgaagagacgttccgttgaattgcgatggaccaccaatgacgatttatttgaccatttatcagtcactttgtttttccgtttgaaggaaacgaaaaatttgttcaattgtttcgctcaattatttcattttgtttaacaataaattagcaaatgccaaaattcctttctatctgtattatcttaatttatctcactgagtaaaatcactaaactgaatggcccgaatcaaatcaagaagcaagttcttaacgtgctgttgtggtcgttaaaaactccattttttcaaatattgtttttaaacgtttcgccaaacattacgtttaatttctttggctaaaataagtgaattggccttttgttcatttgttatgattcgtttgcttacgtttgttttaattttgatttttggcacttaaaattcgctttcatctttcccaccatttagcgaagtttcctttctttttttttctcttctcctcccatttcactctcttatggtggaactttcgccaactttggtttttgtggcgattcttttttccgcccctctgcagttttatctctccgctcggtccacctccgacgcacaattttacctgcacgagtcagcaaattatctttaattttattgcattaaatttaaataccgaaataaaattctaaaattggtttagatttgtgcagcaagtcagagaagtgtatggccgttatttcagcgccattttcggcggatgggaccttttcgaggaggaggacgaaatg

SEQ ID NO: 117317 - DNA, 347 bp, Heterodera glycines
tcgcctcttcacagagcgtcttcagcgacccgtacgctcattttttgacatttttgcctcttatagcagtacgtccccccacccccgaatcaattcccccaagtattcctttccccccccccccctctcgaaagtttttaaacaaattttttataaaaaaattgaaaaattttctctaagaaaatttcaaaaacaaaaaaaggtgccgtgacaaaaaaatttgtgccgtaatttcattcgtcgtttttttggcctaaattttcacatattttttatactcgctcactctgccatttgacaggaatggacaattcatgcactacagtgcgtcctccatttatctgatg

SEQ ID NO: 117318 - DNA, 294 bp, Heterodera glycines
ttttcattttttcaacacttttttaacaaagaggaagctgacgtatgggcaaagtttaacctaaaaaaacttttctttttaagtccggaaattgacttaactaacataaattaaccatttaaagactatgatttattatattttatataatttttatttaattaaaatattttttcctttgtttggctcaaatccgacggaaatggctaccgaccgatcactcccaaataaaattgaaaaactcagcttagcaaattgaaatgcctggggataattaagtgattgatataaatg

SEQ ID NO: 117319 - DNA, 294 bp, Heterodera glycines; identical to SEQ ID NO: 99762

SEQ ID NO: 117320 - DNA, 202 bp, Heterodera glycines
  unsure (1)..(202): unsure at all n locations
cagagagttatcaantatgggatatacgcctgatctgattatatcagatntaaagatataccaaataaaaattaaaaaaataattttcagagacttttggcttttgtcgcaaaataaattagccgatttacccagaacctttggattaaaatgttcaccaaaattatattttccgcataaatttaattcagaaaaaattatg

SEQ ID NO: 117321 - DNA, 106 bp, Heterodera glycines
tctaaaagggggaagagatatttaaaatgatttaaaaataaataaataattattaggcaattgtccattaattggttattaccagcagaatgagtggcaagggatg

SEQ ID NO: 117322 - DNA, 204 bp, Heterodera glycines
taaagtaaccaaaagaaaataaaataataaaattgaacaactttattaaaaattttaagttagttaattgaaacttttttaattatctttcaatccaacttaaacatatgtaattggcaaacttttcggctgtatatagatttgtgtggtaattttgtaagtgtatttataaattaacagattttcatcggaaaaataacaatg

SEQ ID NO: 117323 - DNA, 129 bp, Heterodera glycines
ttgattatttttccgtgctaaaaaaaagaaaattatatgattaaatcggggagggataaaatgggtcaaatgtgtgcaacatctctatataaataaacaggaagttgcattaacatatgcataaaaatg

SEQ ID NO: 117324 - DNA, 102 bp, Heterodera glycines
aagatgccttgtttttgtgtcttattattaaaattttgcggttgattttagccgttattgcctaattttgttaatctaagtttagttggttagtttaaaatg

SEQ ID NO: 117325 - DNA, 108 bp, Heterodera glycines
taataaaatgttttatataccgttttgttaagctaattgttgtctacaaaatagtatattgattttgttcatatctcaatttgcaaattttttatagctaaaaaaatg

SEQ ID NO: 117326 - DNA, 336 bp, Heterodera glycines
tggttatcgtgcggtgttccaaaatggggtcacctttaataagcaacattccaaacacacttttgtaattattttgcttagatttttcgaaacattccccaaccgtacgcttatatggtgagcacttggcttctccccaatttgcgcagtgcgcttttcagatgaatgttctttggattcaactgctgctcttcttcatggtctccaccaccacccaattcattttccgctattttctcctctcccggtccattctttggcatttaaatgccatttcaatcatccgttgccaattccgtgccccacagagacggccgaattccggccaaagcgatg

SEQ ID NO: 117327 - DNA, 78 bp, Heterodera glycines
ggtaggcgggggaggaggggcggaaaattggccaattcaatttaaattttttttttcaccacccaggctcacgtgatg

SEQ ID NO: 117328 - DNA, 538 bp, Heterodera glycines
tttcaattatttaaaaacataaaaaattatattatttaaatttgggataaaagggtgctaggtcgatccacaaaaaagctcagtgtgggcgttccacaaaaagctcagtgtgggcgttccacaaaaaaagctcagtgtgggcgttccacaaaaagctcagtgtgggcgttccacaaaaaatgctcagtgtgggcgttccacaaaaagctcagtgattgataaaataaaataataaatttaaaataataaatttaattattgtattggtaacatccacgttgaaatcaataaccatcaatacatataattttgggctaccactgaaaatgtaaaattaatacaataaatttttatatgtttaataaaattataatttagaaaatgaataagacttttatttttatttttttgttatttcgatttgagtattcgacctctaccaattccggttttgaagaatttataaaaaatcacaaagctatagaacttgtcaaaagctatcgaaattaaaacattaaaaaaactccatgaacaaatg

SEQ ID NO: 117329 - DNA, 902 bp, Heterodera glycines
gtggtcaaaccttcaccagttcattccccagtccgatccccaccaagccccaagcaaaacacaccattagtcggtcaccgaacgcaaccacaagaacggactgatcaactgcaagaaacagaacaacagacgccggccagcgacatgagatcagggatcgtgattaagattttttaagagggagaagtgttgtattattgtcattctattttcttggcattatgttattgacacgtcaccatcatcccacacaccaagatcgcccataaatactgctctcttccctccttcctcgcttcgggcgtcattcattctcatttatcatttgcatttcaccccacacactttgtctctctcttcacctcactttatttatttgtttattgattatatttcttcttgttgataaacgacacaacaaattggcgcagtcagcataggcttttattttaaaaatacaattcaaaggaaaagactattggctttacaagctgctaagtaggcctctgtgaacacacattaaaggaaaaacgaatttgggaacacgtaagtcaaagcgaccgctgcgtgcagttaaaattcgcaattcctctggccaaaggacacttaaaattactcaacaaatcaccgaattttactgccaattaaaatccaaatcaaaattatcactgacggccaaattctattcactttctcaattcactgtcattcaaatcaatcattctatcaccccggagcaactcaaagccattttggctgatcaacaggaacagttcatgaaattgttgcaaaacattcaactcggcaaagcaccaccgcaacaaaatccgtcacaatccaatgagatggacttttttgcaaattaagtgcacaaatttcggaatttatttacagcccggatg

SEQ ID NO: 117330 - DNA, 113 bp, Heterodera glycines
acagtttcctgcacggcggtttgggcggcacatacgaagtgggccgcgatgtgctggccacgcctgcccggccggtattccaacgcgcacaacacgacacgccgttggccatg

SEQ ID NO: 117331 - DNA, 84 bp, Heterodera glycines
cgtgacaaattcctttacaattttcgtaatgcactgaaaaaatttcctaattttccacaattcatcaaagttcgcagggatatg

SEQ ID NO: 117332 - DNA, 1003 bp, Heterodera glycines
agtcaaaaaattattcgaatttctccaattttgagtagataatattcccaatcaaattatcgattgattttcgatcgataatttgagtgtgtctactttttttctctgacatccccttccacaaattcaaacctattggatggtctcctcgagagagagagagtacattctatgatttctctgactaatgaaatcgactttaatttaatttgtttttttaaatttattaatcgataattttatttgacccccccccccatacctattggatgatctttgatcccttcaaccgaaacctattggatggacttgtgcgcgagaatttaattaatttaaattttaattaattaatttaaacgagcgagagctgcgcgactatttccgataaattgtggaaaatcaaaaacatggtcgcggtctcgaaccgttgagagtggaagcgaggagcttaaccacttggccacaggggcagttgaaaggtatgggataattgttgactttatgatgaaaattccgttaaaatttattaatcgataattttatttgagcccccccccccaaaaaaaaaaggcaaaacatattgtaaggactgtacacaaataatcaataaacccaagcctattgcatatatcatatccgaagcagtaagtaaattagcaaaaaacccttttcttccggctgggctcgaacccataccaacttactgtgctaaccaattggccattttatgccactgggaaagcaaaatccaattcattaaattgtaaaaaaatgacgtcatcatgaaagtaaaaaatactccgccccttttcttgttggtcacgcccattggtttttgttttgctttgctaagaatacgactccaccttttggctttttagtttcttttttccgcctccattttttttgctatttaaccacagtttttctaaataaaaatcattcgtgttccattttttaaaaaattccatcctccttcgttttttccgatcttcctgcaatg

SEQ ID NO: 117333 - DNA, 597 bp, Heterodera glycines
ttcctttatggtattataatagtgaatttttttgaaaatcttcatattataaaacaggaaaaagagccaaattataatatgcggacatggaaatgagctcagacaaaccgaaccaaaaagtaagaaaaaatagaaattatgaatttaatattgtatcttatacatattaaatagaataggaaaatttaaaaatggcagagaataaatccattcagtttttattcgtttttttgtcaacgccaataaattaacggcaaaattatgaccccaaaaagagagatgaacaaatgggagaaatttgaatttaaaaaacggcaaaattatgacttaaaaaagaacaaatggaataaaatttataattttaaaaacggcaaaattatgaccccagaaagatcaaatttggatttaaaatgtaccgaaacagcaaatttttataaataattctttttatccatgtttttgtttaatgtagaacttctaaaaacatttaattctcccattttgataattcatctaatctattcggtttttttaggttagtgtgtcctatctgaagcagtaattcattaatttgttaaattaaattgttggacaatg

SEQ ID NO: 117334 - DNA, 727 bp, Heterodera glycines
ggcgctaggacttttcgacagcggacctttcgacagaaggacttttcgacagcggacttttcgactgtaaaggacttttcgacagtgaaggacttttcgacagcggacctttcgacagaaggacttttcgacagcggacttttcgactgtaaaggacttttcgacagtgaaggacttttcgacagcggacctttcgacagaaggacttttcgactgtaaaggacttttcgacagtgaaggacttttcgacagcggacctttcgacagaaggacttttcgacagcggacttttcgactgtaaaggacttttcgacagtgaaggacttttcgacagcggacctttcgacagaaggacttttcgactgtaaaggacttttcgacagtgaaggacttttcgacagtacactaacaaatcaaatttttcattaaaaacaaataatttctaataattaatcttgtttttttattttattatttgtgaaataagaatttttaattaaaaaatatatttttataaattactggtttataaaatatcttaatttagcggggtttaagaaggcattttagtttattgcactgcatttttggagttctcatgaatggttttcttatcaataataaataatttatttgtttgacctccgtttctcgaccggcccaaaaaagagtgaccatgccattcataactattactgaaaatatttttgaattgctgtgaaaaatg

SEQ ID NO: 117335 - DNA, 97 bp, Heterodera glycines
atgccattcccattccccccccaaaaatgccattcatactctcattaactttttcttcattcagttgactttttttgccgctttcatggccatcatg

SEQ ID NO: 117336 - DNA, 237 bp, Heterodera glycines
atcgtaacagagaagcatgggcgaaaacttggcacttttacggaaaaagtgccaaagaatttattggactccttagcggaatggcaatttcaatacttgtctattgaacggcttttcattttttgtatcgcattagagaatggaaagcatagaaatatcggtagggattttctgaaaaaaagacggtgacttaataattaattttttatcgatgttttttaaatttatttttagatg

SEQ ID NO: 117337 - DNA, 122 bp, Heterodera glycines
tctgaaaatcgattttaattatttcatttatcgcataaaggtcgctatataattgactaaattgcattgagcaacaataggttcttgagtgaattcatgaatatttttattcttaaaaaatg

SEQ ID NO: 117338 - DNA, 172 bp, Heterodera glycines
ccactgaaaggggcggaaataaattcgaaaagtgatcggaaggagcaaaaattggaatgatcagagagacaataaaagaagtgataaaaagcaggaggaggagagaaggtgatcaaaaaagagataaggagaaaaggagaaaaaaaggaatgatcagagagggcaaaaaatg

SEQ ID NO: 117339 - DNA, 134 bp, Heterodera glycines
  unsure (1)..(134): unsure at all n locations
ctgctcactgtccgaggatggcactngacagtgggggagagacactcgtaaaaaggcaaccaaaaacaaactcaaccaaaccaccaaacgcaacagactgaggaggtcaaatcaatgccagaaagggacaaatg

SEQ ID NO: 117340 - DNA, 416 bp, Heterodera glycines
  unsure (1)..(416): unsure at all n locations
ccccccccctcgtcattcccaccgaaaattaaaaaaaaacagacttataattagaattttcaacaaaaatcttaaacttngagaatattttttaactttgggggggggggggtgagaacgacggtgggaaatgaagtgcaccatacatttcaatttataaagtggcgaattttcaataatttgggaatttgtgataaaatttggaggggtgcaccaaccattgaaatatctctctttgtttcttattttcataaaatgaaggatttttttaaatcatttaacaataagttcaaaatgaaaataaaacaacaacaaattgagttaaattcgggttaccgccctgggaaaaattttaaatttttagcaaaatcttgaaaaattggttgatttttcaagttcttttctctttcttgatg

SEQ ID NO: 117341 - DNA, 135 bp, Heterodera glycines
attttcagcgaaatcagcaaattgctgcacgaaccgttcagtttccgtttgatggaggcaattaaatttttaatttttaccaatttaattaattatttaaattttttttcccatttttcagattaatagcaaatg

SEQ ID NO: 117342 - DNA, 1003 bp, Heterodera glycines
ggtccgcttgtaatatgaaattagtacacaaaaagagagataataaatatgtttttaaataataaaaatgccgaatgcaaaaatatatgcaaaaaattggaaaaatcggaatctttatgcataaaattacaactatgttttcgcccgctcaagaacgcgaaattactaaacacgtaagtgcaatttttctacaactttttatagtcaaaaaacataaaacaagataaaaaaaacttttttgcggcgcctttttcaaagaaactttttgaggcgtagtgcgacatttgcggaccgacttttgcgggtcatcatttctggatttaatttaaaaaaatttttttttcttaaattggatgatcatctgaatattgaattttatatgtgatttttcggagttaagcaagttaatgcgaatgaaaatatgaaaaatttataaagtttttccaaaaagttcttttttcaattcctcttggtgctaaaaatttgatcacttcatatcatccttaagtagtgatctgatcaacttgtgcaatgcattagtttataaattcctgatttacaagaattatattgtcattgataatgtgagtaattcatttaattttgctttttaaagatatatatttttatatcttttatttgttcttgatattaattgttaggtatgcctgatcaaaatctaagctctttaaactaaggctagtaggtgaaacacgaaaaattttgcgtgctatatattttgtgatatgatttttgtataaagcattttttaatcaatttgcctaataaactatatgtaataaattcgtttagttgtgggtaaattttccgattaaagaaaaaaaagtatgtcgaaattgacatagcttatttgttagagcaagaagcactattaaattatcatcttcagtcattatttcaatttggtgattacgaaaaattatttgaaaattcattttaaatttttttttctttttttttgataattttttagtcacaaatg

SEQ ID NO: 117343 - DNA, 1003 bp, Heterodera glycines
ataaattatgtttattaaatattaaaaaataaattgaaaccaattaaaataagatatccatttttaacatttcgcttttcttccaatattaaataatttattttgtgaacctctataatttaatggtaataatttcggaagaaatatctttcctcaatttttttttcacaattatttcttatatgttacaaaatttcaaaaagacgaaaaaattaattagttcattaataaattattatttcttacaaaaattgaacaagatgaaaaaaagatttttaaaataaaagttttcattattcaatttaatattttcattttttattgttactcttttcatttatgtttcgtttatttaattaaatattttgcattcaaaattaagaattcctttcttttattattctttccttaattaattaataattatttttctattatttgattttaaatgaaaaagaatatttaaattatgtgtattaaagtggtaaaataaaattctttatttgtttattttgtataaatttttgctatccattatttattttattccgtgttaacttattaattagaattttttttttgattttaactattgtatttggtcctatttttatattttccaattgatgtctgaagttattttttgttaaatatttatttacagggattccatttttatgtaagagaaaccgcgaaatatgtactaaaatatatattaaaaaatttttaatggttatttttttggaaaaaaattttggataaaaattaaaataataacaaatcagaggatatgcttaataaattttgatgttcttttctatttttctaaatataattgatgttttagtccacttaattctttttttaattttatttttcctttctactttcattttataattttatatcgcttattattttaaatcttttttcttttaaaattattcttattctattaaatcttcatatttaaatatttttatttattttataatttagaatg

SEQ ID NO: 117344 - DNA, 1003 bp, Heterodera glycines
tcactggttagccactaatcacccaattaaaatcgaactcaattagtcccatttttgcttactcaaatactaaaaattttatgttacacaatcagcaatagttttttgattgtttgtttttggacggtttttgccttccgaatacaatttaatccaaggttcacagttgtgtggctttatcttcattttaggctatttttgcgagtcctacagactaaaaaatgaagctttgagacttttgttgttttcctgaaaaaacccttcaaaaataggcaaaaaatttggtcaaaatctgtttaaaaaaatcgcattaattccataatttttatttttacatgtgattaaaataaaattgataccaaaatcttgctatttatacgcatggatttttatttacaaaatccgtcatctgctgtaattactatgttttttttcaattagggaaattcttttacggggtccaaatcgccgtaattaatccgtaattgcgcccagccctggttaatatccgttatttctgaattaattgctaattgtcactaaacaagcatttaaataatttaattttaaattttatattaaatcaaaatgattgcgaaattatgcaaatattgaattgcagacaaattaatatattgattgaaattttattaaataaattgattacaaaaaatcatttcgttatttacttatttatcagttgccttaaaatatttttaattaattaaacctattattttcattattgaaattttatttaatttctataacaaaatttacttactttttagtgttccaattattaaattattacaatttttacttttattttagtatttatgaaaagagtttaacttatttcctacaaaaataaaaataaatttatacaaagctaaaaattacgaacctaaaatcctcatgcattttctgcgattaactaatgaaaagctaattgactaattaagattaaaaggaacaattagtgtgcacttatgctgcaatg

SEQ ID NO: 117345 - DNA, 307 bp, Heterodera glycines
acgcacaagtgagagcctgagctggaccgaactggttgctggtacgtgtcgcacgcgaccgccaccgacccccagctcgagtcaacacggacccgaaaaccattgcacaattcaaccagagtaaacagcactcccccgatccgggtaccagaccccaaaaggctggcctcaagaccgagctcacgcagctactccgagcatctcagcgcactccgcctgcaaatgccccattcgccactgaacagaaggacagcaaaccccagtctggaggctagcagtacaacgtacagcaacaaacgggtgaatg

SEQ ID NO: 117346 - DNA, 1003 bp, Heterodera glycines
atgtaacagccccctcccccatttaattgccgcccacgtaattgccgatcaaaaggcaacaattagcacttagcaactgtttttaatctgttttcgattaaagggcgaacgcctcaaaaatctcactatttaaagccacggcgttcacccttaatttgtcagtccactagtcagtttaccaacccgcccataatcagccaccaatcaccccacaccgcccaaaaaatcatctattcactgtattttttggtgaagcaaataaattggatttggaacggcattttctaatttcttcaaactgaaccaagcggatcccgcccagactgcttgattcatttggggggcaatctgcagctgaaccaggtagaatttgtgcctttttcattcaaaagtcgaaaattggaaatttgaaaaaaaaacggtaaaattgtcaacggttcgaaaggaccagacaaaagtcaaaaaggtcaaaattcagagtgaaagtgaattgtcaattgtgtaaaaagcgcgaaagcgttaacacaaaagtgtcacaaaatatcaaattggtaactgtaaaggtctgaaaagaccagcagaacaaatttggtaaaaaggaaaatctgaatagtctgaaaagactcagataaaactggtaaacacaaaaggtacaaaagtaccaaattggtgaaaggtcgttaaaattttgctaatttgagtccaaataagctgaaaagctagtggggtagggggtaaggctttctccaagcgccaaacatctcaccgccgccacctcaccgccgaccaagacagcgccagccaactcagcgccgccatttcagcgccgccaactcagtaccgccatttcagcgccagccaactaagcgccgccatctgagcgccaagcaaatttgaataccgactaactgagtaccggcgactcaaattttgcaccagaaaaggcatttttttgcgcaaaatcggatagtttcgacagcaaactcctatttcactccaaatg

SEQ ID NO: 117347 - DNA, 58 bp, Heterodera glycines
agtgcgttgacgaaggcagcccttcaaaccaccctaacattcttacttagataaaatg

SEQ ID NO: 117348 - DNA, 388 bp, Heterodera glycines
attgcaggtgctagttcgtttcataaaatccgccattttaaagatttttctgacaaaacatggcatatgtttatttaaagcaatcaaattatacattcttggtagcattcgatggcccagctttttctctattagtatggaaaagttaaaaaaacaaatttggtgaactttagaaaatttatatgaaaacaagataagtactattttgatgccataacttatgttaaatttgtaaattttatatgaatttttccaagataatagagtaaaagctgggctatcaaataatacccaacaatgtaaaatttgattgcttttaagcaaacttatgccatttttttgttaaattttcaatgtggccgtgagcaataatgcttaatcaaaaatg

SEQ ID NO: 117349 - DNA, 344 bp, Heterodera glycines
ccttttagaaaataatgtttgctcaattaaacctaatcatattttccatttctttatattttcaaatggaaattgtaaattcggaaaagaaaaagtgccgaaatttccaaattagcgaaatgaaaacaatcaaatacaaaagaagaacaaccgaatctgaggaggtattgcaagtgaaaatcgcaataactgaaagaataaattcaggaggctcaggacaagtaaaaattttatatttttttaaaaatataaaatttttgaacaaaaaaattgtaaaaggaaaattcggcatattgagaaaataaaatttaaaaaaagttgttcgtacaaaataccttattatg

SEQ ID NO: 117350 - DNA, 79 bp, Heterodera glycines
caacggcaccaatttggccaacagcaacaacagcggtcgtccgccggcccgttctcgccacccgccacaaaacgtcatg

SEQ ID NO: 117351 - DNA, 59 bp, Heterodera glycines
tttttttcaacgaattatttcttataactgaaaatatttttattttaaactcaaaaatg

SEQ ID NO: 117352 - DNA, 402 bp, Heterodera glycines
gcttaagtcgtcaggaatcggtatataaactcgccgattttgcctacagatcattccattattcatcaacagaatttctaaacgtccccgctctgaacaaataggcgcgcgcgggctgcttctccactaaatttgaaatttatctgttcgctgtgcgctttgtatgcagcgtgcaatccgctatttgactgacagttacggactgagcaacattgacgagctctacgcttaccttaaggaggagataaaaaattgtccaacaggagacggccagtcattgtttccgaatccgttgcgtgcagtcgactgtgtgcatattgcaaacactgagcacagaaaccaaccagtgtacgtggaagggtcacttgaccttgtcgagggactcgagctttacacaacatg

SEQ ID NO: 117353 - DNA, 306 bp, Heterodera glycines
  unsure (1)..(306): unsure at all n locations
ttgatttatgttttttcaattatgttatgttatttgctcaatttataaaagtattttantnaattcattanctagggatcggatttttaggctctaaaaaatgccaaaataagcactaattttaaaaaagaatttaatttggggacgaaacgacttaaccttataagaatttattttactggttgttttctacataattatgccttctgatattcgtgtttttgggaaataagttgcacagaatttgattttgcaaatcataaatgaattaaaattaacttaatttaccccatctttcagaaaatg

SEQ ID NO: 117354 - DNA, 68 bp, Heterodera glycines
cctgaatcagaaaaacaaataattaaatcgcataattgacacacttttctgagtcttcttcccgcatg

SEQ ID NO: 117355 - DNA, 119 bp, Heterodera glycines
  unsure (1)..(119): unsure at all n locations
ggggaaatttactgtgcttttaattcgatcattttgtaaggtatttatttagatagttttggctttccgtttttcaatttaaatttactttcnnccattcatttaatttttanagtatg

SEQ ID NO: 117356 - DNA, 207 bp, Heterodera glycines
ccgtaaatttaaatcgaattttttaaatttttctatgtcgtcctagttgccaaatgtcctgaacaccccccccccgtttcggaacagttaaaaaactaaaataaatttcctgtcaaataaaataataataattaaacaatttttccattgatttttttgtaaataattttaaaaaatagcatagcaaataacactaaagaaaaaatg

SEQ ID NO: 117357 - DNA, 300 bp, Heterodera glycines
agccgtcctaataactaagaggaaacctattttttgtccggtatttagtatttttttaactaaaaattttgttgttaaacctaaggcttcatgaaaactaatacatagtcaactcgaacaatggcttagactatgcctgacaataatctttaggtttaatctaggcttagacttttttttattgacggttcgagaaacagtttttgtgacggtaaaatgtcatgggacgcgtaaaatcgactagaaccaaaattttaatgtttttcaggaaatttctttacactgaaactaattacgatg

SEQ ID NO: 117358 - DNA, 713 bp, Heterodera glycines
  unsure (1)..(713): unsure at all n locations
aaacaaaaaaatcgatnntttttcaagttgtccgtttggggtactcaaacatttatggggagcaaaaatccaacgcagaattaaagtacaggctatagggaagctattccggaaggattcggtctccccataaatctgggcgcatcggctcggggggactgccccgaaaacaaaaaaatcgattttttcaagtgtccgtttggggtactcaaacaattatggggagcaaaaatccaacgcagaattaaagtacaggctatagggaagctattccggaaggattcggtctccccataaatctgggcgcatcggctcggggggactgccccgaaaacaaaaaaatcgattttttcaagtgtccgtttggggtactcaaacaattatggggagcaaaaatccaacgcagaattaaagtacaggctatagggaagctattccggaaggattcggtctccccataaatctgggcgcatcggctcggggggactgccccgaaaacaaaaaaatcgattttttcaagtgtccgtttggggtactcaaacaattatggggagcaaaaatccaacgcagaattaaagtacaggctatagggaagctattcccgaaggattcggtctccccataaatctgggcgcatcggttcggggggactgccccgaaaacaaaaaaatcgattttttcaagtgtccgtttggggtactcaaacaattatg

SEQ ID NO: 117359 - DNA, 277 bp, Heterodera glycines
gcgcatttaattaaattttcctattataaaaaatttaaaaaggccgcggatcgcggttgcgcctcacccctgagacctggtcttatggacaaaaaatcaaaaaaaaaactaagcagtttaaaaagtataaaaaattgaagaaaaagataattaagcactcaataagcatcaataaatttaaattaagtatactacagtctgagtgtctttttttgacgagaatcacagagaaaagccaaatagcattattttatttatttttttgataaattgcatg

SEQ ID NO: 117360 - DNA, 1003 bp, Heterodera glycines
attttccagtatttttattaacaatattgacaacaatatttttttttaataaaagattattgaacgcatttttaataattcttgagtttaaatataaccaatatcctctccaactttttattaatgatgttaatctatcaccatcttcatcttttttacctcaacgtctctttatagggtttaacaccaacccctcttgaatatattttttatataatctcaaacaacgtattttaattctattgtaaatttgtttttttctatctttttcgataatcattgcaccataatttcattaatctttaagaataaaaccaaatttataaacaccacttttacttattgggtgtctttttaaaaatcctaagtatttacaaaatactgtggttcctacacgtatttctatatcatgaggaaaatataaaacttcaacattttttacatataacctatttattagtggatgtgatttatcacatccaccacaaacaatttctcttttatctcttaaaaaagttatctttttaattattgtttcaatatttttattcctcttattttcgatatttttatttttatcaatattattcatattttttactatttataatatttattatatataaatattattataaaactataataataaaaatattgataaaaatagcatttatatataagaatcagatacattgaaaacaaattagatacaaggttttgggaatataatgacatatttaaaatatggtatgttataatattatgtcattaacattaacaaatcaatgtgtgagatgtgcgtatttccgcagtatgaaatgtaaaattatgagtatttggtgtatatttgagtatatatttggtgtatatttgagtataggatggatatatgtgtgttatctgcaacgcccccgcagggtttcgcattaacactaaatagtgagaatttgtgcgcgcgacacgaagctctttgttgaacaggtgctgagttaccaaaatg

SEQ ID NO: 117361 - DNA, 126 bp, Heterodera glycines
ttttctgtttttcaccttgctcattttacgaatattcttgtcttccttctctcttaagatttaacaaaaattaattccaacaattcttttaactccttcgcccgcgggcaagaaacagaaaatatg

SEQ ID NO: 117362 - DNA, 414 bp, Heterodera glycines
aaatataaataaataaaaatattattatataatgttaaaatgaataacaccaatacaacaaaacccgacatacaaattttgaatcccccagaagagcataatgaaactcttttgcatgtactgcttttttctcattatcttcttgcatttcctgtgtttttgcttttttggttcgttttaattcggtggcttaaaagtcacggtcacctctctcccagcgaagccgaaacagtaatggaagaaatgaaaaatatccctcgacaaccaccaatatttttcgcaacaaaatgatgcaaaattagagaaaactgacaatgaactctctcttcagtatgacaaaatagataatgactcaagctgatggagcattctcaaagctactcattctttttcatcattcattttacaaaaatg

SEQ ID NO: 117363 - DNA, 285 bp, Heterodera glycines
tttgttatttctgttataacttttttggtaattgtcttatcgctaagcaataggttagaaaaagcttctaaacatataaagctttcgaatgataccaagattattagatttggttaacaatgaaaaaagttgtagtccaaaacttgggctggcaccgaaccgtcccctaccgcttttcacatccccatcacttttttaatagtcgtcaaataaaatttgttctgattctcaatttcattgccaggaaaaattatcaattttttactctacaaattccaaaatatg

SEQ ID NO: 117364 - DNA, 1003 bp, Heterodera glycines
agtgaattttattaggcatgagaggacaattaaattaattgcattactcactcacttcccccccccccccccagcaaatgcatcgacggacgtccttgggggccggtgggacgtcattatcaaacgctcgtcctgcttaactggcttggctattgttatttctgccgctgtcccattctctccaaaaaatttcccccccccccctccattacataattgggcaatttaatcggctttcatgctttatgtttaaaaatgggacaggtagaaatttggcagcttaatccgtttaaatgcatacgctgcgcagaattttttcatgcgtgagtgatcggtcacagtgatcggactaatgcgaagagactgatcagacccatgattaaattaattcggaaaactgattagaaaagcaaaattaatgaggaaacattgatcaaataagcaaaaacagattagacaaaccacgaatatggagagactgatcagaacacaactgatctatcacgccactcatggtttaatcactgcgaatgagtatattttggaattttgcttgtaattgtttgccagatcacgagagctactgagaatgaatgatctaagcctgatcaagtgaccaatgcatatcaaacaagttttgcataattttcaagtgatggttacttgatcaggcactgatcaagtgatgcccgcaaatattgccgatttgtgtttgcagaattgcaggcattaatctaacacaatttacaaaatatttctagcattaatcaacacatttattatagatcaacaagtcatttagctgaataattttttgttttgcaaacccagttttttgtaattatgttcatttccaataaccgcatttcttagggttgtcaaaatcacaaaattttcacaaaaaaataaaaatttttattatgacttcaaacatttttcttgcaataaaattagatttaaaattattaattgataaatatttcttagtaaaagaccaaaaatg

SEQ ID NO: 117365 - DNA, 520 bp, Heterodera glycines
tgttggataattaaatcaattgatcgtgaataaaaagtgattaaaaaccattcattttataatttttaattttaaatattctccaatggacgagacccaagtcatactgtccccgattcgtactatatttcgacaataaaagcgtcacaactttggtcaaaatcgaccaaattaaacatttttgtataattcgacagctttaaggttctttatttcaaaaatttcaaaaaaatttgaccctgtttgaaaaaagttatgaacggaatatatatatatatatatatattttttattaactttttcatccttaattttttattaaacatgataaaattttcttgaagaaccttaagggctatcaaatgataccaaaaatgcttaatttgttcgactttgacaaaaattaggactatttttttcgaaaaaacaatacgggctgaatttttactgtctttaacaatgttttaattaaatttaattttttaaatgcattttcagatatttttaaaaaaataaaatg

SEQ ID NO: 117366 - DNA, 102 bp, Heterodera glycines
ttttgttgacgaagcagccgctttatcatcatcaagatcaacaacagcggctttatcatcaaaatcatggtgtgccggtgccgccgatgtgcaacaacaatg

SEQ ID NO: 117367 - DNA, 246 bp, Heterodera glycines
ttcttcgcaattgttatttatgccgttgatcgacgcaacccaattttggattctcgaactggcaattccttttggttcgatgagctttccctcgtcgtttgtgtccatttcctcttcttaattttcctctctttggtggttaatccttcgaacattgtcagcgagggactccatcagccgtttagcacttgcaaagttacatttttattttttaattcgatcattaaaccttttttcagtctgatg

SEQ ID NO: 117368 - DNA, 250 bp, Heterodera glycines
atgaaatttgataattaattagagtaatcgaaattcttaatttagaatcagaaaataacagacgtttaatcatttcgctgagttttattatgtcaatcggtctcatctgctatattggagtaataatattattattttcattatgattatgtttgctaatgaaaaaccctaatttaataataaacttattcacaattactgtacattacagttcccatttaagaatactgtgttcttttattgcataatg

SEQ ID NO: 117369 - DNA, 138 bp, Heterodera glycines
atgctaattgctcagttttatggtcatttctgataggtgacaaaccgtggccccagtgccatttctggcgccgttttggacatcgtttggccctcctattcggagaagggcaaccacttcctgtatttgatcgacatg

SEQ ID NO: 117370 - DNA, 323 bp, Heterodera glycines
catccaaaacattaaagatgtaatgttttttcataatttatctaaaagcatgaaatctgagttgaattttcataaaattccttattttaaaatagccaatcacaggaaatgaacgatttgctaagttttgtcataagatttttaagaattttatttatacattaaataaatctataaaacttcgcataataattacaaaatttgtaatatttttcacgaaataattattattaaaaatccagaaaataaataatttcaattgcagagattttgaaatattttctacataaatcttttttagactgagtcattgcataaaaatg

SEQ ID NO: 117371 - DNA, 1003 bp, Heterodera glycines
cattccaattttttcatttcacttttttttataatttataacctttgttaagcgttgctactttaataatttaattaaaatgatgacctcccggtaatttggcgtatcagtaacggtcggcgattgcagcgatttacattaaaaaacgagttcaaaatataggctgctcaaaattttgaaaatttaagcaaaattaattaattatcatcagtcagctcaatgacccaaagataattcaaatcccatttaaaaaaataataaaattgaaaattctgaatgtatgttgtttaaagtcattcgtagcaatttaaaaataatttttcttgataatttttttgctcccttcacctcttccccataaattgtttttttctgttattcatcattatttttagattttggatttagggaagttaaaaataattatgcgacaggtgaaatgtcctgtggtaagtggtgaagaggtgaaaaaacaatatgcgacaggtgaatgtcctgtggtaagtggtgaaaagaggtgaaaaacatttggaaataggtgaaaacaggtgaaaaaccaatatgcgacatgtgaatgtcctgtggtaagtggtgaaaagaggtgaaaaaacaatatgctgaaatgtcctgtggtaggtggggaaaagaagtgaaaaccaatattcgacaggtgaaaatgtcctgtgttaagtggtgaaaagaggtgaaaaacaattggcaacaggtgattttcagttataagtggtgaaaagatgtgaaaagtctaagaacattgatgaaattctagagaagtgatgaaaagaggtgaaactaaaaatggaaaagtcaaatatttcaagaacagaaaatacaacgaacgacgctgattttcgtgttaagtgatgaaaggcaaaacagaacagtagttgagatagaagctattttaaagtggtaaaaaggcaaagaaatgttcgaatatgtaaaaatataataaaagaatttaagagatttacatttataaatg

SEQ ID NO: 117372 - DNA, 958 bp, Heterodera glycines
ttttcttaatagcaaataaaatgataatttattatataaataaactaaaatattatttttaattataaattaattgtattagcggtgatgatatatgctatatttttgtaagagaattaatttatcgatgtaattttgaataaacaatttttatatgaaaaatttataagaattctgtaaaaatcattttttaaagtgatttgtaaataaattgctttataaactcagctaatgcgtggctgtgcttattcaacccaatttcacatgataaatttgactttgtttgtatgtaatgagcaaattaggcctaaaattttcttcattaaaaaaccaaaaaaataaaaataaagaaaatcaggccaataatagaattactggggagggggacagaagcttttcaatttatcgcagacattggcatttattgaaaaaataaaatgccgaaaaatgggaaatttacgtcaattaaagatgctagattaaaatctgaagtattataaaagaataataaaaaaaagaataacctttcctattctttgtacctttttatcattaaattacaagtgatttttagcgtgattttaattattctcagcaaaaaaatatttaaatcaaaaattataaaagttttcaaattaattctgaatcaatttaataacctaattgtcattttccatttgaatagatgttaattttcctcgaatatttggtcacatttaaaatgacaaattgatgaatgttaaattgcaaaaggttgcatttttcgtcatttttgaaagctaaacaaatttaaaaaatcatttttaaaaattaagactcaaaaatttaatcactgcaactaaaattcaatacagaatttctttataaaacctattgagttgttcgcaaaatcattcaagaaaaaataatcataattattttaaacattatctccattttaatttaaataaaataaatg

SEQ ID NO: 117373 - DNA, 282 bp, Heterodera glycines
  unsure (1)..(282): unsure at all n locations
cgagagaattagagtgaacggaccgcgaacatttnntaattcctcttatttatttgacctatttatattttcatagggaacatatttcgcgcatttggggcatagccagaaattatcaaaaaatgatgtaccgaaatgcaaaagactgtgttttttacatctcttacaaatctcgtaatgacagggacagtaatgacaacacttaattttatgcgggcagttcatttttcaatttaattttatttttggctactatttatagaaggggtatataaagggatg

SEQ ID NO: 117374 - DNA, 164 bp, Heterodera glycines
aaaaaatccctgatatggtttaaaaatgatgataatgatgaggatcataaaaaaactccgatatataaaccgattattttgtgagtgttttattacccaattaacattatcgcgaaacaaaattttttttttttgaattcctgtaatttgtattcagctaaatg

SEQ ID NO: 117375 - DNA, 345 bp, Heterodera glycines
ctgcaaatgattccaaaattaatcaaataaattggggactccacccggcccgtagaatttcatttcagctccaaatttttgttttaagcatatgagataaatggtatttggagaatgaaacttcactttttatggccaaaaagcctgatcaaacaattaaccaaattaagcttaatgacgtgcgaatatgggtctcttgaaaatttcaaatactgaaattaatcaaatttaaatgatgcaattaaataaaattaaaatgcagtgctcaaactataattgtatagaattttatctaattagcatttcatttatgaggagtatagtttcttaataaacagggatatg

SEQ ID NO: 117376 - DNA, 431 bp, Heterodera glycines
ttctgaaaaagtaatgcaattcatgtttaatttgtacctacaaatttaaaatcaatatcaaaatgtaaattccaaaaaattgtctaaaatttacattttcatccaatttttttaatggctaaaattaataattcataaaataaaaaattaatcgattatttaggctgtattctgtcctataaataggtgcccataaaattttctttgtcaggcatggatccaattctaataactgtatcaagcaacccaaaactctgtgccgacaatctgacaaagatgaagcgatattgtataataaaaatagccaatctgcaaatgagtgacgaaataatttccactaaattggaaatctcacgagaaacgctgataaggtggaagaaacaatattctaccactaatagatcagtgattttatatgatcgatcattatg

SEQ ID NO: 117377 - DNA, 109 bp, Heterodera glycines
aacatttgacaatattgacacaatttagaaaatctatgatttcaaaatcaatgatagaatcaatgatttttgcaaatctgatatcatattctgattttagataaaaatg

SEQ ID NO: 117378 - DNA, 125 bp, Heterodera glycines
atgacgcagtaatggcacttatttgttcggcatcattgcctctctcttttgttgaagaccaagccttgaaaaatttattgtcaattttagctccaatgtacaaaataaggtctaaaacaaaaatg

SEQ ID NO: 117379 - DNA, 123 bp, Heterodera glycines
ggtgagaaagaagtgaaaagcgattggacttggcacggctttgccttttccttctgctaaatcggcacgtgcccacccctctccctccccccccccctttagcaattcttcaaccaccacatg

SEQ ID NO: 117380 - DNA, 349 bp, Heterodera glycines
  unsure (1)..(349): unsure at all n locations
tgatgagaattaaatttaaataaaaaaatttatggtaaaaagaaaatgatggaaaatttaactcctgaaaatgtacaaccgttaattgagcggaaaaatggaaaactttgcaagaaaatgtntagtgaaattggcgtcaacaaattagcaggcaataatttttcttattcgtttttttaaattttttattttgtttctatttataagattttaattttaaataattttttattagaaagatagatgttaaatttaattttttttttaatttttagatttgctggatgaatcaattttcaaaaagatttttgaaaattttttggaaaaacattgggaaccccaaagcatg

SEQ ID NO: 117381 - DNA, 1003 bp, Heterodera glycines
tattttccgcttatcccaactcatccctcaaaagcaaattttccattttttgctttacttttgccaatttctgttttgccaattgcgtcgtttatgtcatttccaaatttataataaaattttatccaaaaatacaaaataaatgtttggatgaagggacattatgctaattgataattaatttccctaaaatcatttaaattaaaacatgtttaacccttgcgaatgttctcacagttcgacctgcacttgaacaacaaccaacaaccggtcttccgtctgtctttttctgctgactctgagatggtccccctttttccccatttccccccattttccccctcagtcaataaaatgcgtacaaacattccccaattacacttcacaattagacagccatcacattctcaatcaacacaaatgcttaactaataaaaaataaatcttctttttggtccattgccatagccaacgcttcatctcccaaattccatcggcggtgccattctccgtccgtctccccccccccccctccggtgctgcttttcctctgctcttccgctgatctcactccctccccaccgtttggtcctcaattatttctcattagtgccattttatgcttattccttcttctctccgcttcatcatccgctgtcattcttcagctgctgctgagtgttttttgccttcgttttcgtcccttttacaattgtataattctttcaattgagcaactttggcattatttcctcctccttgtttgttagcatttgaattagccgaggttcactcggttctcagccagcagaatggccaactccagtggccatgacccaatcgcgcggtggctcactcggctaaggcctcgttcgcgcatcgctttggtcattttcggcgctgtgatgatccacctcagcatcggcacttaccacaccttcggtttgattggaaagcatcttacaaacgcaatttgcagaaatgaatttggataggcaatatg

SEQ ID NO: 117382 - DNA, 672 bp, Heterodera glycines
tcttgaaattttacgctataaaatgtaattaacccactaaaagcaacgtaatgattatgaaaaaaggcaggagtccgtacgtttttttgtgaatctctattttcgaaaaattaatttaaaaaatttacattttttcatatgaataatgaatgattaattcgcaaaaatgcacatagcagaaaggtggatttcgaaaatttataaaagtagaagcaccgcaaaactcatgtcaaacaaaacctcataaaatctgttaaatacagtcaggtgcacttctgaccaattgttgaacaacaattaagcgcttttataaaatggagttaaaatgaaattatagcttaattgtttatgaagcgggaaaactggacggaaaattaatttaatttgctttacgctttagctaatggaaatgtccttataaaatttgattaaaaatatttgttaatatttgcgcattgggccaaatcaaagtttaatcagtataaataaaaaattgtcaacaatggccattgaccactgaaatgaaagttttttaatttaaacaagctgatattgtaaaacaaataaagaaatttagaaaaaaaattaaatatgattttggtgaataaataatttgcagcaatgttaagaaaacttaatttacgtattgtatatgaaatatttgcaggaatg

SEQ ID NO: 117383 - DNA, 698 bp, Heterodera glycines
taattcaaaaccgcaaatattaaaatgtgttatactcagccatcgtccaattgaagaataattgtctatcagcagcaatcgattccttttccttcatcagacgttagccaaatttatttccgtggtttttcctctcaaattctcagtttgttttgcttttcctcttccactgctgcgcttttcgttcctcgcccacccatcgctaattattcttcagattagcattcgttcggggaatggctgaacattcctcgtcaccccatgcgctttttcattccgatcactgatcaaaatccccccccccccatttgatccaattattccctctgttgcttattgttagaggtcactttcctcgcttacccttcaaacaataaacattcgttttgcctctctctccccgtctctctttctgttcacttttccccttctttctttcctccttaatccatcaattaaattttgcatttcttagaacatttttctttttctgtcgatttattaaatcaattaaacaatttttaaacgaaaaattcattcatggcattctgccatggcattctgttcgtttttacatattcatattcgcttttgcgtgattattttttgccaatggtttaattttgccttagggtattccaccgaatttgtttctttctcagccgccctctcctttcccctcttctcttctcgagatg

SEQ ID NO: 117384 - DNA, 658 bp, Heterodera glycines
cctgaaaatgctgttggccttctttcgttggcggagtaacattttaatttattttttaagaatttaaaaaatttggcgctggttaaaaagtggccttttttgaaaattttttcacttttttttggtcaaatttttttttgttgtttgttttgatacagaatttgttttttttaaccgatggaactaatgacgaaaaatcaacaaaaaaagtgaaagattttgaattttattaagaaaccaaaggggtggaagacccttttgtttttctaaaatttattgaaataaataatggaggatactacatatgtatcgctactaaatttggtgagccgctgatcaattacaaattatttatggacgatcaaattttttgaaatttttttaagtgcaaaagtggtgggtgtctgcaaaaaattttcaccgggtttaaaaaatctaggaaaattagtaagcatttgtagtgctccgatacgtatctctgcaaaatttggtgagccgctgatcaattacaaattatttatggacgatcaaattttttgaaatttttttaagtgcaaaagtggtgggtgtcttacagcttaacaaggcccaattaagcttatttccagaaaatctcgcatgaattctcatttttaaattttttatagatttttaaatg

SEQ ID NO: 117385 - DNA, 88 bp, Heterodera glycines
ggtcctttttctttatccgttcttttacctcatacttttttgaattatattcctcaaaaacttattttcaatttcgtgtcttaaaatg

SEQ ID NO: 117386 - DNA, 882 bp, Heterodera glycines
ataattcttagagtaccccaaacgaacacttgaaaaaattgattttttcattttcggggcagtcccctacgaacttatgcaatcagatttatattgaggccgaatccttccggaatagctttcctataactatttctttaattatgcgttggatatatgctcctccataattgtttcagtaccccaagcggacgcttgaaaaaatcgaattttttattttccgggcagtcccaacgagctaatgccaacatatttattttgagattcagtggtcaccaaattgacacttttggcattttccgaaaatttaacgaaaccgtgcgtatgcggcaccattagactcagttcggcgagctgagtaaaacggtaccgaatacgcgcagaaccgttcactttaagacaaatagcaagtgtcaaaaattttttttgaaaaattcagtggtcaccaaatttacagtttcggcatttgccgaaaatttaacaaaaccgtgcgtatgcggtaccattagactcagctcgctgagctgagtctaacggtaccgaatacgcgcaaaactgttcactttaagacaaatagcaagtgtcaatttttttttgaaaaaatcactggtcaccgaaatttacgctttcggcatttgtcgaagagtgaacggttctgcgcgtataaggcaccgttttactcagctcagcgagctgaatctaatggtaccgcaaacgcacggttttggcgactttaggacaaattttttgttgtctttgtgccaaaaaggggccttcattttcaaatgatttttgcctaaaaccaaattcaggccattttttaggttctttgcttttttttgcaattttatattttaatattttcagcaactgcgcacaatg

SEQ ID NO: 117387 - DNA, 175 bp, Heterodera glycines
acaccgcaacagcaggtgagaaattggtacctcggacctttaactctaaaatgccatgaaattcacttaaattgccatcggcaaaggatttcggcaattattggtcaaccaacgcccatttcagagaccaatggacactcatcaaacagaagggcatttactgaaattaaaaatg

SEQ ID NO: 117388 - DNA, 457 bp, Heterodera glycines
cctgtgggacctttttcaaattttgaccactttcatttatactcttgtagttttttgttagcacaaagcatttagttttgctacaacttaacgcatccaatcaaccattaaaatttgtaatttcatattttctaacctagaatttaaaattttttttggcactattgctgttttgggggcccccgaaaaaaacccaaagaaaggaaacttttgttttgtttttttttttgtcctaagtcgtgaaaactttttcacggggttttcgggataactaatcaagcatcgacaacaaaaattcattccaaaatatgtttttttttttgaaaattacataaatcacaccctgacagaaattttggcaattaaaacgcaaaaaaaaaaaaaaacagatttgtgccaccaactgcaaaagtacatggattcgtttttttctttgcataccaatgaagacataatg

SEQ ID NO: 117389 - DNA, 97 bp, Heterodera glycines
tccgtggatgtaaggaatttgaaggctgtttatgttcaggctcgtactgtatcttaacccgtacggtagctaaatgttacaacatattgtacaaatg

SEQ ID NO: 117390 - DNA, 919 bp, Heterodera glycines
agcaactttttaattaattattgacgaaggtaaataaaaaataattgattgatttgtaattaaaattgcaaaattttcatattttttttactaaaataataaatttcatttgaatgaagggggtttattctatgttgtaattaattatttagaatgaagcaaccaatcctatctttagccttgttcgtccaattagcgctaattagcactcagtgccggcttttggcgtttttcgaggttgcagtacacttaacactaatcatctaacacttatttatttatttttttattaatttggaatttttgactttttccatcaattattattatttttttatcaattttcttgaattttcataatccatttaaaaaaataataattaaatttttgttttaaaataatgaattaacagatggttatcagtaaatatttattcgaattttaccaaaatgaggtttgtaatttgctaaaaatttatgagacgcccaattaaccggaataaattacgcgtcatttaatatttgagcaatttttaattaattattaatgaatgtaattaaacagataattatttgttatttgaaattgcaaaattttcattttttactaaaataataaacttgaatttccgtgatggaaggtttttattttatcctgtaattaattattctcatcataaaattgaataatgaaataagaaacaaaatttcgttgtgctgatcaacgtataggaatgtaatttgttgaattgggttaaaaaattaaattttttatccattcattttgtccatttggcttttttgctctaattaattagtagttaattggccgcaaatctttctatttaaaagcaaatgattgtgtttaattgggaatctttcaaatatttttttagcagcaaatttcacactgaaaatg

SEQ ID NO: 117391 - DNA, 73 bp, Heterodera glycines
caattttccccaacttttcgccttctttttcagttacacttttttggtccaatatgccaagggctttcgcatg

SEQ ID NO: 117392 - DNA, 294 bp, Heterodera glycines
tctacaagaacgtatggaaagaaaaaatagttatttctgggactttttcagaaatcagaattaattctccaatgtggcccaaattttaggcccccagccacagccccttgcttctcccagttttaagtcttggatttgtcaaataaattcaagacttcaaattaataatcaaaaattctcttaaaatttttttgaacccaattcaaaaaaggaaaaaaatttgcagtcaaaaaattattcgaatttctccaattttgtttccataatttccgaaagttattcggtatcataatg

SEQ ID NO: 117393 - DNA, 108 bp, Heterodera glycines
tacttatcccaaatgacttttcaatttattttaactgtttgcatttgcctttagactcatcgtctcgaccatcacagggagtgtttagcggagcacgaaaaacaaatg

SEQ ID NO: 117394 - DNA, 160 bp, Heterodera glycines
aataataaaaattaatattaaagtgtattaatattaatttatacatatataattattaattaaaattattatcaataaatgtttgactttttctgttccaaatgaccacaaaaatgtggtgccgatcagtgatgtgccggccgaagcgttcaaagcgatg

SEQ ID NO: 117395 - DNA, 97 bp, Heterodera glycines
tatcccggaatccgatcccgattttttcaaaattctcggctctaagaccaactgaacatttaatttttttaaatttctaatttaaggtgacagaatg

SEQ ID NO: 117396 - DNA, 379 bp, Heterodera glycines
  unsure (1)..(379): unsure at all n locations
gcatcgacgaaaggataaaacccatagaagtnttgtatacttaagcaaattctgaatgtaaaatttgacttagttcgaaatgttttggaaagaaaaccaaaattttagaaaacaaaaattttcaaagaaaaatcaagtacttgatgaaaaatcattgacgaaaacaatgattttgcaaaacccgaactcggattcgtgatcagctcattttttttaacctaacaaaagtgattttgtaagaaaatttatttgtttttttcggtcgggataccaattccgaaggattacccatttttgtgctggtaaatactgttcatatgtaactaaactaattaataatctgcatgtttaagaaacaattatataatttataaaaatg

SEQ ID NO: 117397 - DNA, 317 bp, Heterodera glycines
cattttttgcagatggattgattttattagagaatggcattgggtaattaaaactttttaattgtatcatttgggttgatttgagggtgatttcttaacagattttcactaaaatgatcaattttgtgattttaagccaatttaagaaaaaattttggaatttttaatgcatttttattaagaaatttgttcaaattttcatcaattgaccgaaatttgagttggtcattagtttattactataaattgcccctttttatttaaatgaaatttggcacaaatttgggcaggttgagccaacccgtcgccgattgatg

SEQ ID NO: 117398 - DNA, 611 bp, Heterodera glycines
cgtttcgagtacatgccgaagcaagtgaacccgaacattgcggcccatttgatcgccgagctggcgcccgtgcccagcgaggagcgcgtggtgcgctgtgacgggggccaccgcgagttgggccacccgcgcgtttacatcaacttggtgagagcggacagtgccagggggagggggtatttactactaattaacccattgaaaccggaacgaaattttctactctaaaagcctcttaagtcattgaaattgcaattttggtaaataaaattaaataattcggtttatctttttttatgtccagaatccgctcattccgaacaaaaagagtccggaaacttggaatgctgggacataacgctgccgcagaacaaaaaaaaatcgaattaggctggctgaaattttttgatattttttcttaattttatgtataaattttttttgcggcgccgttttgtccctcctaacaataaattaagatttttggatggcactcaaatcattccaaaaagttatacattgctaaataatcattttgggtgctttttaaggacaagccgggcacgcatgcttgtggttactgtggccaacgcttttacaatgtgcacatg

SEQ ID NO: 117399 - DNA, 71 bp, Heterodera glycines
attcgtctaaagatttaagagttcaattcaactcttaaaaagtaaccaatttttagtcggtctaagcaatg

SEQ ID NO: 117400 - DNA, 171 bp, Heterodera glycines
atccgccgatcagcagtgatcagtaaatgatctgatcacccttgcattgcctcccggcgccgagtgggcagttcccccccctcccggctcctttgaatggccctgacattagacaaagggaaagcggcggaaaaagccttttttattcttttccaaaaaaggcacaaaatg

SEQ ID NO: 117401 - DNA, 175 bp, Heterodera glycines
accggggtttttcatagttgaacctatttttgaggtttttaggacctaatcctattttgacagttttaagacctaaagatagccctagttcggaccgctttttaccgggactacccggcccattactcaaactcatattattattattattactattaagacaaaaaaagaaatg

SEQ ID NO: 117402 - DNA, 220 bp, Heterodera glycines
aagcgcttaaagtgctattttttgcggcagaatttaaattcattttttaattttccatttactaatgctttttttttgtcttacttaattatttacattgggagaacaattttttaaagtgcactaaagggcgaaaatttcaatcaaaaaaaaacttaataagtcaattaaaattagcgctttagcccatttttgtgagcaacagcagtaaaaaaaaatg

SEQ ID NO: 117403 - DNA, 369 bp, Heterodera glycines
aaatgcaaatttcactgcttttcttgggagttctgtttttgtgcttcttcctttgtttgcctcaacacatttgccgtgatggtcagccggggctttcccggtaaagaaaaaaatataaataaaattggaattttaattttgaaaggtgccagggaaatccgccaatttgcacggacacgagggcattgggctgcgagttggacacgcgagacggacggtcgtactgttgcgcggcgtattgtgacgacgcggtgccaacgcgggtggcacttggcacccaaaatggaaggtgaaaaatctgtctaagcacagtgctgctaccgagccttcgggcaagaaagtcgggatcggagagaagggtgacaaatg

SEQ ID NO: 117404 - DNA, 161 bp, Heterodera glycines
actgaaattcaaaaaatcattatgccattttaaaatttaaattttttgccctttcaaaaataaaaacatatagattctgacacttcctaaactcaaactcaaatatccaatatacttttttaaatttttagctggtgcttcttttaatgtctgaaaacatg

SEQ ID NO: 117405 - DNA, 209 bp, Heterodera glycines
taaattcgaaaccatttggatagtcgcgccccagtggataaattaaaattttcttgaaatccttaaaaaattgtttttacagttttttctaaaatttgggcctcttcaaaataaggacacaattcttagaaataagaacatatgggaactcaaaaaaaaattaaaaatttattataaaatgaatttattgttttatttattgcagaatg

SEQ ID NO: 117406 - DNA, 410 bp, Heterodera glycines
acgtattacactaaccgcattgtctatataaagacatgaatgtagaaaaaatccaaaatgtatcaatttagtccttacgttagggaaaatacagatttttttaaaaagcttgcggccactaggtctgataaacgaaaaaacgagctactacagggagcatcagcagaccaaatacttgcccttgtggaaatttgcgcaaatattttaaaatttaattttcgtttaaattcaagccagaagcgacggttgtcacaatacgcggactattacagggccatagcacgcgctcgcagtgagaactcagctcggcaaaaacttcaacaagggagcggaattgcccttggtgctattcttgtgcctgttctcagtgtcttagcccaacatttgcttgaaaaaataacagcataatg

SEQ ID NO: 117407 - DNA, 81 bp, Heterodera glycines
agaggggacgctgagaaggaagaacaatttgtacgagagtgtgctgagcagtttggcatcaacattgatcctgcaaaaatg

SEQ ID NO: 117408 - DNA, 1003 bp, Heterodera glycines
tgctgggcagtgaatggacgggcccacggaaattccacaaatttgccatcaatgccaggggtgttattttacctggtaaacccggcatttgccgggtttttggggtccgtgccgggtttttgccgggtttttgaaattgccgggtttttgccgggttttggttttttgaccgggtttcctgttctatactcatttatttgaattttattaaacatttcaccaaaattaagagccaactatagctaacgttcattattagggttgtaaattatatggattaacatattttttctgcgcatatgctatgaagaaaggggcttaaaaatagcatttctgcgttaaaattttttgatttggtgaaggtttttagtccatataaatccatattttgggggttttctggaataaatccatatttcgccatttttgggtttttagtccatattttggccattttttggaaattttcacaagaaaaatgaaaaaaaaacgaaaaatacacccctaaagatcaactttttggaaatttttaaaaattacaccccacaaaacacgaaaaatttgagttttcgtcgtcattttggcattttcaataaatattttcgtcatttttttgcgaacatttctttttttttaatgagaattttttcgaaatttggcaaacttggaggtgtttttgatacaacgaacaacaataaaaaatatgcatttttaagttttaaaccccattttttggttgtttattgtactttttaggtttatttaagcaaatattaaatatgcacaccttttttgggatttttgggggtttacaacatatattttggcattttttatccatattttggtccatatttggccatttttggcctttttagtccatatttcgggcttttttagtccatatttaatgtccatatttcgcgttttttagtccatataatttacaaccctattcattattctattttaatcgatctctagtctctagcttagcagaatg

SEQ ID NO: 117409 - DNA, 654 bp, Heterodera glycines
tttctgagaaaattaatttttttgttaatttataactttttttctttttttttaaactactaactagagttgtacgggaccgggaatttttgccaaaaccgggaccgggacttgccgggacctgagaagccgggactgggaccaaccgggaaatttcccaaaaaaaaatacaaaaaaaaattaattttttgtttggttttttattttataaaacccaaaagttaacgcaaaactaaattataatatatttaatcaatatttcaaaccaaatttatttcaattatttcaaacaataatcatttttggactaaattatcgaataatattagaaattcagatttgcttttcacatcactttttcggcgcgctctttgcaaaaaactttttgggaaataaaagcgttccggtggtgccgataggcgccgccggaggaaattttgaaaatttgagtgtgatttgttaacagattttcaacaaaaaaacactgatttttgagattgctagcttaatttgcacggattttcttttaaaatgataaaatatgtgtcaattcaaaagaaaaaaatgaggaatcatattttgtcgataggaaaaccatgagtataaggggtgtaggagaaggagatttttaccgggaaccgagaccgagaaatg

SEQ ID NO: 117410 - DNA, 367 bp, Heterodera glycines
ttttccctgctttaatagtaggaaaattttttttacatattttatgaattacagatattgcgattgagaaataattttttttaaatgtaccctaaaaattggtttttcaaaaaaaagatataccaaaattaatttttacaatagaaatacatgaaaaccattaaaaagccataaattcatttcaacaaattttaatttagatggttcaaatcgtttcgcatttttcactgataaaaagggtaatctctattggaatttcaagaaacatattcacaccaataaattaatcagaaaccgatatataaaccataatttacatgaaaaaattaccattctggtggagaaagggtccgataagcgaattatg

SEQ ID NO: 117411 - DNA, 236 bp, Heterodera glycines
agtacccaaaacaataagaaaattcaaattttaaactttggctcacaacgcatgaaattattataaattaattaattatctagcgaatattttaaattatgaatttaattaaaataattcgttttttcgcttttattttgatcactttgtacttttcgttcttcgctcagcacgctcataaacatatgaataattttttgtcaaaaattttctatttgatggttttttgagtaatg

SEQ ID NO: 117412 - DNA, 657 bp, Heterodera glycines
  unsure (1)..(657): unsure at all n locations
cagtagaggcatcatttgatgtcccaattccaaaaaacncaatgatgtgccaaactcaattgaaaggaacagtttgtctcttccatcacctactcaatgtcncactctcttttcaatcaaccgcagggctcacgaaaacaaaccatttggcttgcatcatttntaattaaataataataaattatntaagtaaaaaatagattgggataattccactgatgatcaatcgcgatttttaaatattgcatcataatttaataataataatatatacaaattatatgaagaaaatttataaagtaaaaaattgacttggataattctactgatgattcaattccaatttttaaaaatatataaattatattaagcaaacaaattttgctacgtttataaggctgtatgatttccatctccgttgttcatatttattaaaaacatttttaaattcacttctacgtaaataaattgaaaaaataattaatgggctttaattttatttaagaaaaataatgttttattctttttccataatttcttttattattattatgaatcattttttaattcacattacaactgcaaatccatcggttagataatcaatcagggtaattaattttgtctaatcattttaattagggagacgataaaatg

SEQ ID NO: 117413 - DNA, 554 bp, Heterodera glycines
cctaaaaaatttgtattcagatcagttctgatcaaaaagaatttttaccaaaaactcaaaggggattgccatgggggtgtacccaaaattagtgcaacaaacccgtaaaaatatggaaaaatacaagacccggaagaagctattttagtatcagttttttatgctcttttcaattaaaaaaagagtttttttaaatatgcaaataaaaaaatttattatcaaaataatattaattaattttagtaaaaacactgaccgaaaattgtaaatctacagggaatttgatttttattgtagactgttgtttttaattttcaatcatctaatatgtaagtaacctcatgtaaatagaaagggatcgtgccgggccgaaaatagggcttttcccgaatttgggttccccgggataattgtgattttcccccaatcttcccattccattttaattgtccaattccctttaaattaattctccactctttacactcccacatccttttctttggcttctccattatccaattaacttgatcgatttatttattttaaaaatg

SEQ ID NO: 117414 - DNA, 937 bp, Heterodera glycines
ttaattaaattttaaaaagtcgtaaaaaaactcaaaatttgtttctcctgatatttaataactcattcgaaaactcttttttggcagagttttttacgatcgaaaaactatgtaccattgccaaaaacagaaaaatttcaaacatttttaaggttttgctcagcgccattcgtttgagtctcaattcggtccatttgattttgaattttgacgagattttgttcagaatttgccattattccatcaacagaagtgaaatttcgaatcgaagtaatcagtaaatctgtagaacctgccaaagggaaattcggataaaggataaagccaattgtaaaaatgtaaaagacgacccgaagtttgttgaatgcttgtcatggcattgccaatgtcgatcacgagttccttaaaagaaagaaaatcatcacgtgggatttaatttttgtaaattcgagttgacctgcactctctgcgggagtcgagttctgccctccagcgttacttttttagttgatttttgagtggacatttcttaattcaaaaaacacatttttgcagtttaggtagtttcctttttttctttgaaaaaagctgggggaactctttcatttttttgaatattaaaaaaaaatttgtaattgaccaaaatttaaaaaattgtaaaccattagggccccctatggcttttcattgtcaccaccaaggtacctaaactaaaatgccaaaaaaggtagtaactccgttgggtatttctgcagtttagatagtgattgttatttttctgtcttttattatattcgagtttttggggaaaaaaatcgagaagactggttttgagtataccaatatatatatgtatatgaaggatctacatataattgtgacagataaaaacattctacaattttaaaattttgttttcccattagataaataaatg

SEQ ID NO: 117415 - DNA, 1003 bp, Heterodera glycines
cccggcggcgcctatcggcaccaccggacccatttctccgaaaagtctttagaaaaagcgcaacgcgaaaaaaaagatgttttaaatacaaaaaaaaagataataagaaatttttgatcgttttgaataaaatccactatttctatttatataatttattttttgaaaggtaatttctcaaaaaatttcctttttgccacaataatactttaattaatagaataaattttttaattattaaaggaaaaaataaacagtaattttcaaaaaaagcaatatgcgttttataattatttctatacaaaaatctacgataaaaaagaaataaaaaattaaagcaaataaaattattattatgaaaattaatcgatccttacatttgtctcacaatcaccagaggaattttttggaaaaaatttcgccttttcggtttttcgctttttttggacatttcgctttcgcctttttgctttcgctttttatttttctctttgcaacattcctggttcttatacaatattgacttttgtactacaatactaattctacagaagcttttttcataatactgtattactgacgcatttgcggctaattattctccgattagtctcgacccaattccaatggcattccccgttctcgactccaacctccgaataataattgtgccaacaacagccccaatgagtcatcgccacagcctccgcaagtggcggtgcaatgaatgcgccgaaaaaggggggaaatcagagaaaaaggggaaaatggaaatggcaaagtaaggccaatacatgcaaagagagaaaggcggaagttggcagtaggacaaaaacaacggacagttgagggcattgtcacggcacaaagccaattggagggagggaaggccgggccgaccggtgccgagcagaagtgccaacagaagacggggcagagaggcgctggaaaaaagaatgccaaaaataaataagtgccaaaattaaatgcaaaaaagagaatg

SEQ ID NO: 117416 - DNA, 528 bp, Heterodera glycines
tgaaatttggggaaaagatagattgtgatgtggatgaatttgaaaattttaatgagattattttatttaaaagaggtgtaggagggagaaaattttgtaaattttttgttattttttaataggaattttgggtttggggttaaattatgaaatttaaatgaaatttttgaaaggttaaaatttgtttaataaaattttgtttttattttaatgaattggtattggtgataaatattttataataatgtggagaaatgttttgtaaatatagggaggattgtttggaatttcttggggtgttatgggaagaggggtggatgataaagaattaaaagaatagagagatgaaaataggtgtataaaaaaaatatggttaatgttggagtttgataattatataagttagttttttatattaaaaagtttatatgtattttatggaataattagagagggattatgccaacagaatgtttgaaataaattgcatacatatatttttaatttcacggctccgtccgaaccatg

SEQ ID NO: 117417 - DNA, 231 bp, Heterodera glycines
cgccgcaatgcaacaaaacgtaattatgtaagagttaacctttaattttgctttgtagaacataaaagattacactagcccattgggacttgaactcacggcatttccaaccgtggaatgctctaagcaactgagcaatgggcactccctttagaggttccaaacagttttgtccatatttttaaaaaacttaaacggcacccctataaaaataaaagttgtccaagaatg

SEQ ID NO: 117418 - DNA, 482 bp, Heterodera glycines
tgtcatgcttttgataaaacattagtggtttgttctgtgactttagtgtgacacaataatgtgtcttatgtttttgataaaacaatagtgtttgttctatgaatttagtgtgacacaataatgtgtcttatgtttttgataaaacaatagtgtttgttctgtgactttagtgtgacacaataatgtgtgtcatttttttgataaacattagagtttgttctatgacttcattatgaaatttctttgcaatatgttaaaattaaccaaatataattatttaagcaatgaagtgtgtactgactgggctgaccattggatctcttcaaaagaataatgattttgttattggttaactgatcgtaaatagtaaaattttaaataaataataaattttatgttatgaattttattcatctgattttcatttcaaatatcttcaactttttttattttaaattaatttttaggtatttattattatg

SEQ ID NO: 117419 - DNA, 530 bp, Heterodera glycines
agatgaaaccctaaaaatggacaaatatagaacaataaataatatgacagtgaacttaaaaagtggtatttaccaagagcactgagcgaaaacttgaattttccaaaattgatgccaatacgaagccactaaaaagtaaaaattatgtagaaaaaacatccaaatttaaacatttaccaaaaggaaaaggatgataagcggcgaagcacacaaaacagaaaacatgtcagaaactagaacagatggtcggggttcagggctgcggaaggtgtgagaaatttccggcagaagatcgtaattgacatgagacgattttggcgacatcgaagcaacaaaaataaatgtacgacctaaaaatgccaaaaatcacacaagccttattctgacagaaacactaacaaaaaagtacctaagtccaagccaaaccccaaaaaactacgtaggttttattttcagcctttcgcagatttaaataaaaatacataatgccacattaaacttggcatttaaaagaagcactaattcaaatg

SEQ ID NO: 117420 - DNA, 1003 bp, Heterodera glycines
attttttataataaatattaattggaaatgttttttttaaaaattggtttctgcaaaccaaactattgattcaatcctaatgagaagacgatgacatcttatttgaagatgtctgtggctgatgatacaggaattttggaaactgtggcattttttgggatgcgtggaaagcagaatgggatggtaacgaatttttaaaattcgcatatacattttaatttaggaagaggtggaaagtttgtcgggcgccgtgtgcactatgaaaattggggcaagggtgaaagaattcggagggaagaaggggatttattactctttgatcgatattgtcagcctttaaatctataaataaacttgttaatttttttaaataaaatgtttttcttaaaattatttttcctctttatcatagtgaacgcggcagaaagttgctgctgcatttcaaaagaagaaaaagagtaattaggcaataaccgacgaacaattgaggccgtacttgaagatataattagattaacaaaagaggccaaagatttttctttatcggcacataataccatggttgaagctcaaaaaataaaagacaaaaatcctagtgctcatggggtaaaattttggcatgaaaagcttttaaatggggtgagaaaaatccatgttctatttgataaaataaaaaatgaagagaataacattaaaaatataaaaaaaggtatggaaaaatgccttgacagaaaagatgctgaaatgtgccaagaactagcggatgaggcaaagaaatcaatagaattagcaaaaaactatagacaggaaattgggcaaacatatcggactgcttactcgcagcccgatttaggcattggagacttggccaataaattaaaagaaacaatgcgagaaaagcaaatagatttggaaaggccgagacctcaaacagaatttagagacgaatttattgcatataaaatataaaagaaaaatttaataaatgaaaaataaaaaaatg

SEQ ID NO: 117421 - DNA, 296 bp, Heterodera glycines
attaagcggcgaaaaaagccaaaaggggaggaatttgaatggaacgcgcagactctgtgacggcctctgcaaattgggagggaaagtttttgagggcattggcaaacggaaaagcgtaaagagagggagggataaacgcactattttaaaatttaggggatgaaaatggcaaatgttgaggggggggggggttaatggagtgggagaggcgccggacggagcgacgatgacagtccgacctccccccccccaccccaccaatgccatctttttttacgccggtggcaccaaaaatg

SEQ ID NO: 117422 - DNA, 920 bp, Heterodera glycines
taatatttttcttctctaattatgtgccgtttcccttgcctctgactgccttttattcttttaattcaattctctaattatatgttattttccttttgtttttctctctaatttattcctatttttctcaatcgatattcctttgcttttcttctcccttgtgctttcctttattcattctatttggtgttcacaaaatttggacctcagacttttctcctctaaatattttgtgtgtggactcttaattttcgtcgtcttcgcattgaatttaaattaaataaattgaactgtccccgactatttcgccgtccttaattaataagcattggccccgtttgtcctttctgtgctaattaattatttggcccgagaagaggaaaagccgaacgaagcaaagcaaaagagacgagcccctccgacaaattggactccaatttttgcacgtggcgctcctggtcaactgagtaagcggtgccgggaatttttggtttttcggaaaagggcgagctcgggaacaaaattggaagggagaaatttgtggttcacgggaattcaacaaaagtgaagtagtccgtctgtcggagctttacttagttgttcatcaaagcgaatagcccgtttgccggggttcgttatctcgccggttattgcttgcctgtctgccaggggcaataaagcaacaaagtgaggacgaggagcaagggacatttcagaaaaacgcatagctgcgattctgaataaataacgcattgttgcgcttttcttcgagttgaatttgtgtcccacaaataacgcattgttgcgataagtgtggacatcgacaaatcaccgacaaatcgggccgtttttcgaggatcgccgtttaactttgtttttgttttgttgagtagtacctctgcggtagctcaaacaaaatg

SEQ ID NO: 117423 - DNA, 93 bp, Heterodera glycines
tttctcatattacctagggatagcgagagtctcggttcccggtctcgggattttagtctcggaaaacgagaaatttttacactgttaaggatg

SEQ ID NO: 117424 - DNA, 54 bp, Heterodera glycines
atcaatttcggctacgcatgtgccatttattttttggacgacccgccagaaatg

SEQ ID NO: 117425 - DNA, 160 bp, Heterodera glycines
  unsure (1)..(160): unsure at all n locations
catttatttgttgctcaaaggctatgtatatgttggaagaaaggaggccaaaaatagtatctcntgtgaacaaattttttgaattgtgaaagtttttggtgcttttgtggatttttgagaataattcatatttaattatttttaaaatatagaaaaaatg

SEQ ID NO: 117426 - DNA, 183 bp, Heterodera glycines
tgtgaatgactgctggaaaaaactttggacgaaattcagcggagaaattttttacttggattttattgagagggaaaggataagactgacagaagaaactgaggtcaaatgaggacgaatagaatggattagaaaaaaattcaggaaaaattgaacgaattggcaaatgccaacgacgaaatg

SEQ ID NO: 117427 - DNA, 110 bp, Heterodera glycines
  unsure (1)..(110): unsure at all n locations
ccgacgccgcggctgccactgccgcttcgaaaacgccgnccaccggcacaaccctcgcagcgaagccatcaaacataacagtgcttgacacgtccggcgggactgaaatg

SEQ ID NO: 117428 - DNA, 62 bp, Heterodera glycines
ttgcaagcaattgggttggcgaaagggcaacgtcatagtcagcggaaccgcttgatgagatg

SEQ ID NO: 117429 - DNA, 596 bp, Heterodera glycines
  unsure (1)..(596): unsure at all n locations
taagtaaatgatanaataaatnnatcggaataagataaagaaataattaaaaattntaatgtatatttttattaaaatattaaatgtttatatatttactaaacaatctaatatcggtttgtgcaagaaaaataatggccaaaaccaaaatcctcattcttaaagtatctcggacaaatgtatcttgaaaaataatatattaaaataatttaaattaatatctttatcgtttaattaaattttcatacaaatttcccagtttacgagatggaagaaattttattcaaattaattaaatcattaacaaaaattaaccaaaaataattgaataacagaatctatatgtataattgaacttatataaaccaaaataaataatagaaaaaataatctatattctaaatgaaatttttatattcacaaaataaatttgctttttaattcaaagataaattttttgtatttatttaacgtcacattcattaaaaaaagaatattcaataaaaatttaatttttattttagtgtttgaaatttgggttttatttatcaaagatgataaattaaaatgtaatttaaaaaacttaattaaaaatg

SEQ ID NO: 117430 - DNA, 307 bp, Heterodera glycines
ttttgtgtgaccatgaaatttcaggaaaattttttagccaaaaattttttatttgatgtttacatttaatgagttgaaacattcattttacttttagcaatccgaaaacaaacctaaaaagccagaaacataataaatttgtggaaaaatggtcattttttgggttgtctggctaggcaaatgtctcagaatttatgattttcatttttttttctccacaaagttttctgattttctaggcttccatcgtatggcccaatgtgcacggccgtgaggttgagcagtttcgccaatttcgtgaacaatg

SEQ ID NO: 117431 - DNA, 482 bp, Heterodera glycines
ttttcctaccctttgtagatggagggatggggtggtaattttaaaaaatccaaaaatttcctaacgaatttagcctttttggatgtgcttcttaccaacagagggaatccataaatgaaaaaagcttagaaaaaactaaactgtaaattgtactaattttataaatggagagaataaataattaagtggttaatgctaagtcgggaattggaagtcaggaaaagagatgagtgaggaaagaatgagtcatcaaaatcgagtccctgagagaatcatcccgagtggggaaatttctttaaattatggctctaaatttcgaaaataatttggctttttatgtacgtaaatggattaatggcatttgcctccctttttaggcattttccgttcacaatgccaattttggtctgtcgctcgccgtcatcgccaccatttacgtgtcctttttttctgccaaaatcatcaaaatttggctcaaaatg

SEQ ID NO: 117432 - DNA, 716 bp, Heterodera glycines
tcgtccgtcttcggtaattgtcgtcccatcattttccatttgcttcatttgtcccatttccgttaacatttccttcgttttgcttttccttttcctcttaatgctttccgtccttttccgcttttccccattcgttcgcttaagcatcattccgttccgctgatgccttccgccgactccgagctcagtcggctggcttattgggtgggttatggcacttcgcactgcaaattccctttcccccaccgcttttcccccattaaccctttgatccttcccccaaaagttggcgttggatgagccgagcggtgcgcgagacgatgaagagagtgtggcgggagaggaggacgaggaacaaaaagaggagggagagagtgtgggagagagagggggagagggcgtaagtgacgggagagaagggccgtgtaggaagcggagctcagttagcgcttcttttcttctttttttttgctagtgatactcgggaacggactctcgacaaaagcggagggattctcgagactcgggactgaaattgccccccccccccgagacgaccctttttcgagaatgagttccttcccgagtatcactattttccttttcgtttgcgcttttcttttcttttttaaattaatttttggaccaaatttaattcaaaaattaattaattaacaaattcaatgctttttaactgcaaaatgcttttcaaaatg

SEQ ID NO: 117433 - DNA, 82 bp, Heterodera glycines
tttttatttgatgacttttttctgatcagtttggcgaccgtagccaaaaaagccgaaaatttacaatagcaaatcgaccatg

SEQ ID NO: 117434 - DNA, 407 bp, Heterodera glycines
tccgccttttttgcttttagtttcttttgtcccgccccttttttttgctatttaatcacagtttttctacataaaaaaatcattcgtccattttaaaaaaattccatccacgttcgttttttctgttcttcctgcaatgaattctctaaacgctttcaactcccggagcaagggacacgacagcaagaggagttggattccgttgaaccaaaaaacatcagcgatgtggtcaacttcaattcggccggcgttttttatgttttgggaaaagtgacaaatatgcagtaccgtgtttacaaagtccaaattaaattaattaattaaattattaattttttctagtttaggcatgcccatttcgttccaaggggctcatttgccgccgaaaattgtccgatgataacatg

SEQ ID NO: 117435 - DNA, 699 bp, Heterodera glycines
cccccccccctccttttgttttcggcattttttgcttggtgtgtgacccccccccccctctaatttattatttatacattctgcttttctttcctctctccactgacctaagttttgttgttaaaactcctttcctccatttgaacaaaacacccaccgcttcaccccccccccccttaacatctgatagtgagaaaggctaatgagtgcttttctttcccaacagcactttgtagaaaggcgtcaactaaggtcagaaaacaacgataatggcatgtccaattttgatagatgaaccagaaggattattatgtgttttaggaccgcaagtcaagtggaactaatttaacaaatagcacaaaggaattggtgaattttcggtgatatataatattaataaatcatccatcctaattatttgttttatttttaattttacaaaatacaattttttaatatctccgcttatttgaggaatgaatgtgttgtttgtttatgtttagcgttgattgggaattaaaggaaaagtcagcgcggcgtcgaaaattgaagcaaaaaattattaaattgtgccaatttgatgatcgcacataaattatgccattcgctcagtcattaatttcacttgggaaagtccgaggggctgcccatttggcagcataattgtgctttcccttaaaaagtttgtttgtcccaatg

SEQ ID NO: 117436 - DNA, 1003 bp, Heterodera glycines
ttcatttttatgttcattctgtacagaatgaccttttttgatcttgcaaatctttgtgactaaacctagcttgtttgaatcaatttagaaacaaaagtgagaatttttaggtttcaaatttttgttcaagcccgggtccgcgattcgaaattgctcaaaattaatgtcatattcgtgataagcaaccctaaaacccccgtaagcatgttttcacgagttttagaacaaaaaaaaatttcaaaaagggcgggggagggggggggggaccatcggcagtgttactgaattttcgtttgttgtactgtttcacaactcttcggttttgcttgaccgtttcagtgatagttagcgtgtatcacactcaaattttagctaatttcactttaacgccaaaacaatgaccatcctcagcttcttttgcaagagaaattttttaaaaattcccgagataaatggacactcctaagtcgttggattgcctaaagtgcgacagagtcaaaattgtcaacacaatgaaatgtgtccaacggtcaaatggaaattttttgagctttagattttttaaaactaaatggagggatttttagcgggacattctcaaaaaaaaaattttaccaatgcaacctagccagaaattaccttcaaaaaaaaatttttgttttttttcactttttctgcaaattgctttggaaacaatctgagtgatcgttgccgtttttggtcactgtcgatcagccttttgataattttcatttaacttggaaagttcaatgagtgttcctttaaattcctatgttatacggagtacaagcagtgaattctgatcagtgttccattgaaaataggtagctaaatgtcacggtcaagttcgccatcgctgtcggattcttctggctcgttgaagccgaatacggctattcactctggctggaataattgctacccatgccagcatttctcatcattcaaagctttcaaaattaagcgcatgtcacacaaaatg

SEQ ID NO: 117437 - DNA, 292 bp, Heterodera glycines
aaaaaaaaatgtttttttgattttattaatgatttaaaaatatgaaaatggtcgaaaacgatcaccgaaagttttaatttttgtctttaactcgaagtgaatgcctgaaatagattctacggacctaaaaaccattaaaataactttacattggaaaatttttgaaaatttatcatggacacgtatttatttgtaatttatgattttcgtttttggttcaaaaatttattttttgtttttctttaaaataattatctaatacacccatacccattagtgggtgccgataatg

SEQ ID NO: 117438 - DNA, 128 bp, Heterodera glycines
gcaaaagtattggcaggccaattgtgtcaacttgacgaagtcatcgtgaaaattgcagaaaccccagcggaaaaggcatttttaattcgtttaaaaaattttaattaaaatttctatttcagaaaatg

SEQ ID NO: 117439 - DNA, 153 bp, Heterodera glycines
cccccccgtacccaaaaaagaaaaatttcagtaaatttttttgaaattataagcattttcttaacaatttgcataaaaatactaaaaaacaattttcccggcggcgcctattagcactgccggacctccatttgaccatatttttgaaaaatg

SEQ ID NO: 117440 - DNA, 93 bp, Heterodera glycines
taaatgaaactaattacctaaataattaaaggtttttttttatttaacacgggtcattactatttcattttttcatttctacatttgctgatg

SEQ ID NO: 117441 - DNA, 451 bp, Heterodera glycines
aattgaaagggaagcattggcattagtgtatgcggttaaggaattctcgccatatatagttgggtctggggttacaaaagtaatcacggataatattaatgaaaatttgattgccaaaaatgatgaaattttgaatgaaaatccgagaataaccttaaaaacagtgattgaggcacaaacaaaggtaaaggaattggccaaaattttctacattttaaaaaccggaaagtgtccaagtgatgttctgaaatggaaaagagttgtttctgattatagcttgataaatggagccatttatttcgtaaaaggcaaagaaaacatggagaaacctaaattaataatccctcattctttaagacaaaaactttttcttattttccattcagagggccattttggattcgaaaaaacttggcacgaaattaaagaacgattttattggatcggaatg

SEQ ID NO: 117442 - DNA, 1003 bp, Heterodera glycines
aaaatttaagtacattaaattcacagtaaaaattgcttataactatgctctaaagcagccgagtttttaattcttgatatcattcgatagcaagtgttctctatttgcttgcacaatttcaaaaattagttaatattcaaaaaagttatgacgaaaattttcaaaaaagaaggaaatttttttgaaattttgcagactgatagagaagaagagttagtgctatcaaatgtcagtcattaaaaacaaaactattattctaaatgctgaacatcagctgtactaaaatccgattcccgagatttttgggcatcagatttccgatttcctttttgaaaatttttggggcctcaaatgctttccctgctgatgaaaagtagagcaagacttatgtgtcttgggttcttctccatcccgaacaaaaggaaaagaaaattcagggggcgactcagaatttttcctaaagataaaaatagcactctcaccgaatttgagtgtaacaggcgacattcacacatccccgatcttaaggaccaattttactttaatcacttaaaataccagtagtgaaattagtttcttacaaatgtaaaaataagatgttaggcctaaaagaccaaaaacaaagttttatttagttttcagtcccattccatattttcagaaatttttaaaaatttctttacgaaattttttttattttttcccgaaattgtccgcaaatgtccgtccgcaaatgtcccactgcggattttacgcatttttaattgaaacagcgcagacgatttttcacttgattatcgtctaatccagacaatcttggtatcaaacgaaagctcttaacatgctctattagccttaccaaatcgaaaggattttcaagcctagaaaaaattttattaagaaaaaacttcaaaaatttcgactttttgcaattttcagtgtataacttttttggtaattgtctaatcgtgaagcagtagcttagaaaaagcttctaaacatg

SEQ ID NO: 117443 - DNA, 160 bp, Heterodera glycines
tttcggaggtcgctttgacaacattatgctgtttcggcagttcttcctctacggattttgcccgtagatgatccgacgtggtaacaaattatacgaaatgaaaattgcgaggggcgaaaaaaatccggaaatcatcgtaagagacagctggaaccttatg

SEQ ID NO: 117444 - DNA, 322 bp, Heterodera glycines
tttttaggccattaattttccctgtctggtgctattaatcgaaagcttaaaagctcaaactttttaaacacaaacaaaaacggtcagtttttgcaaattgatacaaagagtaattcgaatttgatcttccaagtacacttttctttttaccttacaaattaatgccagaatatggctaaaaaatctaagttttgattgataacaataagttttgattgataacaaaggtaggattagccattttctattttaaaaaatagttatggcttgaagggaggtggtggtactaaaaattggttggacgcgtataaaaagcgatatg

SEQ ID NO: 117445 - DNA, 500 bp, Heterodera glycines
tacctgcaattagcgctacctagaagatgtatattaatgtctaattgaaaaaaataaatgctaaagtgcgggagaggaatgtaaaacgttatgaatttatacgaagtcaagttgtccatccagttgtaagtgtattaggctgcgagatcgcgaaaatgttaatgagcaacaaataaatgagcggatttgaagacggaatgaaaaatttctatgtgacttcatttctctctaccccttcgttaattttactacacactactcgattggtaaaccaatgtacatgtgctgaatgaataagtcgaatggaaatacccggaagataaccactaccccttgacaatactcaaagttttggatgatttctttagaaaatttgatattctgttttgcccgtcaaagtgaatggtaggctctgattctctttatttatgaagtgcaccaaaaacaatcaaaaaggcaggatagacgtaaatacatatgcaaacacaaacaatgagatg

SEQ ID NO: 117446 - DNA, 449 bp, Heterodera glycines
atttttaacccccgcggcacgcacaattcagtcgaatttttgttgaaataaatcataaatttatgtgtcattttccaattatgttttatttgccattccgtcaataaaacagtttcttctctgctcgaggcaatgacttgtcaaatgacttgcccctctccgttcccctttcaattttctctcaattaaatgcgttcccacgccccccgggggagtgtcttttcttagtctttcctttccttttcccttcgtccgtccgcccctctttttttgctcattcatttattagccccgtttctccctccgttcctcatttggcagtccgcccccttttttccaaattgaatttgtctctcctttcattccattcatttcctcctcctcctttcccttccttcactcattctttctcccccttttttcttttcttttttcagtcccttaaaatg

SEQ ID NO: 117447 - DNA, 237 bp, Heterodera glycines
attttctattcaattccattcttctgttgccgaccccctttatcaactgtggctttaaatgcacaaatgtttcaaattcgcaaaattatggctgttctgcggagggaaatgttttgcgcttttttgtcatcggtgacatcggtggggaggagtatacggtagagggcaaacagcagcagtgtacggtggaaggacacggtaagttgaagagggagaacaaaataacattttaaaatg

SEQ ID NO: 117448 - DNA, 392 bp, Heterodera glycines
ccgcttaattatggcaaattcattcagagaaagaaaaaaaattgaagtgaatatttcgacgacttaattacaccaataattaatttaattcttcttcataaatatgctgcactttccttcctttcgtctgatcattttatttttattttttggtataatgccaattattcaaaattcggactcagacagagaaaatgagaagcaaaatctttggaatttgcgggggaatggagcaaaagtgaatataaaataatgacagaatattttgggaatattcttgacagaatcctttcgtgccgggcatttttcaacggaaaacgataaattcgttgatgaacagaaaattgaacattttccgagaacgatggacaaatggtggagaaagaaaaatg

SEQ ID NO: 117449 - DNA, 58 bp, Heterodera glycines
gtgatcaatcgggatcgggccttaaaagtaaacaacgaaaatttgtaatcaaaaaatg

SEQ ID NO: 117450 - DNA, 1003 bp, Heterodera glycines
agtatctatttatcttttttttattatttctctctctctctctctcacacacacacaccctctctctctctcccactctctttctctctctcacacactctctctctctcctctctcaatctctctctctctcacacaactctctctctctcaatctctctctttctcactttctttctctttttctttttactttcattctttcatacataatattttgattcattatttgtttaaaaaaattaagcttttctctcaaaaattttaataaaaaaaacaaaacaatataataattaaaaaatgtacaatttgaattaaagtttgtggattagaattttaatgttaaatagtagtatttaattaatttaatttgaaaaagataaaagtaaataaataaaaagaaaaaagtgatgaaaaatctcaaattttattattgcataattttcttaaatttatttacaaaaagtttttattggcattatgtttattttcgcgttaatttgaatcgatattttttgtgacggaatgacacgacccaaatagtatatttagatttgaagaaatttagagacattacacccttaatttggaaaatttatatgcatatttttcactttttatgtgcatattttgccatttttggtgcatattttatgcgcatatttttggatgccctagttatgattagaaaagtcaaactctctttttgtaaggcaatttcatcatagtgatactaaaagaaacgggtaacgggtagccaaacccgcagctgcgggtgagcccagcgagaacccggtaacattcatttagtacgggctgagggtgagttaaccgggttaagttataacattacctcgttcttttggtacgggccccgccggacgctgtgtataagattaaaaaggaacacaaaaacccacgaagacttttgtttttgttgcattctttttgcaaaaactattcatttattttacctatttatttttcagtttattttgaaatg

SEQ ID NO: 117451 - DNA, 262 bp, Heterodera glycines
taagcctaaagtttttcgctcgtttaaaaagcaattaaaaatttttagatttttattcatctccctttttgatagtgaaagcatctgagtgcctaaactaacctgtaaataaagttttgtgtgtttcagagcacgttctaaaaaatatttatgaattaattttgcaaaataataaataattaatgaaaaagtcagaatttcgaaaaattttaaaaacaacaagcgttggcattttttcaggttaagttagtcctttacaatg

SEQ ID NO: 117452 - DNA, 291 bp, Heterodera glycines
aatgggtttgtagaaattatgaaatagaatattgaattcatttccatagtttgtagattcgccgaatatttgctctgccttttctccgtaaagaagaaatttcaaaaatgtggccacatttgccaaaattcagaaatgattttgaaggaattcttagagaagatatggattcttttgtagattatatgaataatcaatggatcaaaaaagttggactaagcggggaggggttccagacggaccgcgcgatgcaatgaaataactaaccgcttacaaatacgattgacaatg

SEQ ID NO: 117453 - DNA, 62 bp, Heterodera glycines
tggattttgctaaaataaaaattgtgcgctcttattccttaatattaaatttaattaaaatg

SEQ ID NO: 117454 - DNA, 1003 bp, Heterodera glycines
aaaaagtgatcggaatgtacaaaaatgcatatacctacttgctttaagataaaaatatttatataaaaattctttattaaaggaggatttttaggtcctaaaaatcgagaaatatgtgactaaatagttgctaaaaactgaaaaatgccaaaaaacgtgaaaaaaatgccaacaaatgtgtgatgtttccaaaattgccttattctttttccatttcggttgcacaattgtaaatgaaacataatttcaagattttcaagcgaaaaagttttcgattgtccgccaaatcatggccaggatatcaattcttagggggatgtattttttgaaagatttttaggccggttcgcaggttgaatttttattttttaaatacatttttcatcagaaaattttttgttctcaaacaagaatagttgaaaaatagtttttaaaaaatttcacaagccaaaagagttggcaattaacaaaaagcccaaaatagttaacactgttgctactaaaaattataattcaaaaaattgttggagaaaatgtgatgattttcgtgcttctctcatcaaatgctatccgcaaagatcctagccctaattattaattaaaattttatttcctacatcgccttctttaaaatgggaatttgtttatttttaattagccagggataacgcagttttaaaaatattctatgtcgagaatggaaccaggcttctgtttttttaattagccaagaatgacgaatttttagaaatattttatgcgaaaattgaacacggaatcttgtctttgttatttttgcttccatcctccatatcctaacccgggtattgtttgataatatatcccgaaaaaaccacgatttcaaaaaactctgaatgggtgcgtttcctgaatccaaatccatttggttttgcttcaccgaaattttaatcgacaagaaattgtccaattaagtgatagtccgattaagatcgcaaaaaatattattttctaattcgacatg

SEQ ID NO: 117455 - DNA, 776 bp, Heterodera glycines
ataaaaaataaataaaaaagaaaataatattaattgtggaccccggaaatctggaaagttttggacaaatccctgaaaagtgacacctccaaattttttatttataccaatgcctcccgttatttcgggctcccaacagttccccatcaaagtgaccccgacttttcatttcaccctaatctttaatacttgtggactctaaaaccgaaaattttagaccaatcctttcggaaaatttttgataatccctgagaacttacacctccaaatcgcctcgaatatctcggaccccccatttttcccatcaatcttatgcgagcacaaatcttaatctttcttcctaaattaacaaattttttgcaattttattaaattttcataaaaaaaacccccagaccaacgcccgattgttcgccaaacattgtggcttgttcgtcatgctgaacggcttgacaacatatctaattaggggcaataatttaaatgaattggaccaacaagacacacctttgtccaaaagaggcattgaacaagcgaaagaacttggaaaacggtaaaaaatttaatttatctaattttttttgcggattttatgtgacaaaaataaattttaattttttttttaactttagagtgggttttatataacagattagtttagtgaatttcataatcttttgcatctttgtgagcgatttttttttctaaattaaaatttgtacaatttctgtactttttcataaacattttttaaatttctctaggtattaaaaatg

SEQ ID NO: 117456 - DNA, 357 bp, Heterodera glycines
ttgctcatcatttgctttttaaattcatctctcttctgactctatgccaatttttttctcttcaaaaacactgaaaaaagaaatgaaaatgtttcatttcgttttgtttcgttttgcttcgcaatttcgcaattttctgcgtctctttctcaattatgtgtatgaccattttgtttctttctctcatgcaatttcttatttaaaaaaatgcatgagccaaattatgtaaatctttttttaaatcaaatgacttatctgctggctcgaagggcgcatttacgaacttaaatttccatttttatccctcttaaaggattttattgtattaattcacttttacgaaagcttaaaaagatg

SEQ ID NO: 117457 - DNA, 156 bp, Heterodera glycines
tttctctattgcacacattcaagaaataaattgataaattaaaaccctaatcgaccgtttttctatctgcaaaaaatgctgcaattcgaagaggtttgtcctaatgtcgtcggtgattcgccatgaaatctgttcgaaactttcatgcaggcaatg

SEQ ID NO: 117458 - DNA, 86 bp, Heterodera glycines
ttttggggaaaaagtcggaatgtgtggaaaatggcagtgtaaagggaatgcagaatgagactcaaaggggaataatacaaaaaatg

SEQ ID NO: 117459 - DNA, 612 bp, Heterodera glycines
  unsure (1)..(612): unsure at all n locations
attttcgataattttaaaatttttatgaataccacaccgtatcatatgccacatatgatttttgggtgatntattcnaacagaaattttgcgtatactatgacggctacccgacttttgggggtttgcaacttggggaccgacatttgggaatccgacttttggagattntaataaacattttntaatcccccggaaacaagcagcagttgacctttctctattcattttattcaatttttacagttccgtccggcctgttaacagcggacgaagtggtcggcgtggaacaataccgaaaccatccgaatgcaacgatgccctttggcatactgtacccctaccgaaaccatccgaatgcaacgatgccctttggcatactgtaccccatgcaatttccgataaatgagcgaatttggaagacaaagggaacacttattatggagattgacaattttttggaatttgcaccagaaaaattgggggattgcaaattcagcgaaacaacgcacatcagcaggtttttcagccatttgctttgcttaaattcaagaaattcatacaaaatatctttagaaaaaggataataatgaatagggatgtcaaaaatatg

SEQ ID NO: 117460 - DNA, 59 bp, Heterodera glycines
tgccgagtaccaacaacaacagcggcacggtggcagcaattctagtgccgaaaacaatg

SEQ ID NO: 117461 - DNA, 339 bp, Heterodera glycines
ggttagttgccaaaaatggaattagcttgaaaatttcgagttcggaattttgtaaatagggaacggggactgaactgattttggacagtgagaagaaacccagttttaccgggggccccgccgaaatcggggatttacaataatcaataacatggtcaaaattgaaccagcgttttttaagtgattgagaaaaacgaggaaataatacgatggtttttcttttttccgaaattaagttttttcaattggattttcaactttacaaagaataatttctcaggtagagttctttcgtcctttcgcgatccgaccaatttgcaagcgaatacccaaagcatg

SEQ ID NO: 117462 - DNA, 496 bp, Heterodera glycines
ttgcgacgtcattatgcccaatgccatggcattttatgcgcttttcaaccaaataaaagtattatcaatttttaaatctaattttttttgcaccattcccccccccctaaattttaggcactgttcaagaatgtgccgctgttctgctccgtcgtgattgggccaacactggttttgatcgggaattgttccagcaaattaattcaagtattttttttttgttttgttttgcatttacgagttatattaaaattagcattttctccttatttaatgccattttcggcctccaaaaagtcaaaaaacgccaaatttagctcattttttgaaatcaaactcactcatttgacatcatttattttagtaaaaattggcattttcagccccccccccaaaaaaaaaaatcaaaaaatgccgaaattttgctctattaaaaaaaacaaccactcatttgactcgctttcctcctacaataggccaaccgcctcaatgcatg

SEQ ID NO: 117463 - DNA, 162 bp, Heterodera glycines
gctcagagtgatgccgagactaagccaagaaagacgcagaagagaaggctgaaaaaggatgccgaggctacagccaagtaagacgcagaggagaagactaaaaaggatgccgaggctacagccaagaaagacgcagaagcaaagaaaaaggaggaagaaatg

SEQ ID NO: 117464 - DNA, 821 bp, Heterodera glycines
tggcatccgctttgatcgtgatctatattgttaatacattctttcccaaaattagaatacagattttttttgctaattctaatacttcctatggtcgcatcgggctggacatttaccaagcctacgagcccaaattaaaaaaaattaatttatttaaaaatatagattctattttaaataaaatattgcttcaaaacttctgttaaaaatgataagtagggttcgaagttgtatacactaaaaaatgccaaatacatgaatttatataaataaatttttttcaaaaatttcttactaaaagttaaaaaattttcggtttttaagggtttattttttgaaaaattcccaaaaaagtcgatatagagaattttggccaaactcttcgttgatggagatcattcaacacgagattttttacattggtaagaatgggggagtgggctgtgagaaaatattttttttaattggttaagaggaaaatttagttgagaaaaaataataaactatattaatatagtcaagcggttaaacctccagtctttcacttgtttttgtcttacaaattagttcgatccccacacataataaaattattattttttattagtaagtaaaataaggatgttttcaaatttttaattttttaaatttaatcaaaaaccagcagaaaagtgatcattttgtagcttagtggctatattgatcattttttttagggaaagctgttacatttttcactcaaatttttccaagcggcgcctataggcaccgcttgacccctctactcaacaaaattattacaagaaaatgtttcagaaatg

SEQ ID NO: 117465 - DNA, 70 bp, Heterodera glycines
ggtcggtattggcaaaaaatgcgaaatggggagaaaccgacgactgaaaaattgtcctctttagacaatg

SEQ ID NO: 117466 - DNA, 719 bp, Heterodera glycines
gcagttaaagttcagatggttcccttgataagtgccgtacttcatttgccattttgaaaacatttaatggattttaaatgtatagcaaaaggaagtaaaaaagttttacagacgggatttgttcgaaagataaaagccgacaaagggagcaataaagcaatgctcatacgaagaaacactttaaatttctcatgccagcctaattctacggaaatttagaaatttaaaaacagtaaaaatgttctctcagctttaattattttggccgacaatttgatttcgttgattatgaagatagttctccaaagtgcatgttgataaactatttctttcaggcccaaaaaaaactttttgccctttccccagcagcagtgtcaatcatcgccttatttgtcatttatggccattttaatcattttgtgtttaaccgagtgattttcgccatcataaatactaaagtgccgtttaatttgacacagtgttaataaaatcttttttgacaattaggtgttaattataagaaacttatatttttccgtagactgactgtagaaggcctgaaattcatgaaaatatattagcttagtttgaagcttatagggtggacttttattattttgcgattttatatacaaataatcacagatatatgtactaataaatcaaaataaaaattaaattaaattaaaatttttttatttgtagctttaaaaaatatg

SEQ ID NO: 117467 - DNA, 670 bp, Heterodera glycines
caactgctggccaagctttgaccaaatggttacacactccgagcaaagatggacaaccgaagcgattgcatcgcaataatttgttggtccacagaatctcgaatcggtcaacaacttcaaagaggtgtgtttggtcagattctcataaaatttggctaatacttataaatggtattccctttttcgaaaaatattttaaatgagtcaatatttcaaagagatggccactttttcattaaacgactgactaattggttgatttttttggtattttaggcaacattttcaaacttattttttctttataaatcttcaaaatatgtaaaaaaaaatgaaaatgtgtacaaaaatatttgccgaaattttggattttttttgcggatttccaaaaatttccttaaaaaatactcaaaatatgtaaaaaaatgaaaatatatatgaaaaaaatccaaaatatgtacaaatatgtaagaaaatcccgaaatatgtaaaaatatttaaataaaagtcccaacttttgttcacaaacacaaaaaagaaagtgcttttcctactattaaaagcatggagaatccaggaaaaaatatgtatttacacaaaattggcagccctatttatgggtatataaagaggccaaaaagactttttgaatgcataatatcacaaaatg

SEQ ID NO: 117468 - DNA, 315 bp, Heterodera glycines
tagaaataaacattaaaattctaaaaattaaatttttatttttatattattttattgtaattcataaacaaaaaaaaaatggagaaagaaagaaagtgaagactgaatgaatgaatgcatcaaatgaaaacaacaaccatttattactcctaagccaatattttttgatttccgcataggaaatccggggggaattaatcaatttcacaataaatcactaaacatttgcgtagcaatttataaattatataatattttatatgtttaagtctctgagaaaataatttggaaaaacaatcaaaaattttagcaatg

SEQ ID NO: 117469 - DNA, 403 bp, Heterodera glycines
tcctttaataatagacaggtcatcttttcttcgtctgagcagttggacagtctcagtttcctgcttcacttttatgccaatttgatctgacgaactttatcgccgtttgaattgatacgtcctgtttaggcaatgcgtcaaattgacaaatttgataggcaacttttccaaaattaaattaaaaatggatgtcagagtactttcaacaaagacgatcacttttttctcttcgcattcattctttttgcgatgatttctacaaaaatgcttgctgtttctgcaagaaggtgcacaaattcagggcgatggcgaatttgtagttttatgtaataaaaggaataattatcttcagtttaaacacactaaaatttaacaaattgccacaaaatttgaccataaaatg

SEQ ID NO: 117470 - DNA, 457 bp, Heterodera glycines
  unsure (1)..(457): unsure at all n locations
cgccggacttgccgagatgaacaatcactacaagggcatttttaaagggaacagaaagngaattgncggccgccggagtgtctctaatttcatccttagcgacgaaaatttaaaattttatgattcatctgtttaaaataattttacgccaaattcataacctttgtgattttaagccttttgttatattagtcagcatttttacatttaattttctgttcgcctatgtaaaatttgccgtatttaaaccattgcaaaatcaccattttttatcgttcaatcgttcattaataaatatatttgttcgatcaaaattcactaataaagtgtgaaatataattgaagtattgggaaatccaataaaataaatttaatttaaataaattaaatatttaaattaattcttattgactatctgaaaaaaggagtcaataaagtggtgccacgaccaaacatg

SEQ ID NO: 117471 - DNA, 198 bp, Heterodera glycines
ggtaaaacaaaggggagggggctaattaattaattagggggataaaaattaaatgaatcatttatttaattaattagggatgcattgggagaagggatttttcaaaagcaacaataaaattgcattgattggctaatcagttgttcactggaccattctctgatcagtgaggtgacctacgagaaggagggaataatg

SEQ ID NO: 117472 - DNA, 1003 bp, Heterodera glycines
tcaaattttgtggacgttgttcaaaaattagtactactctacataccagcagtttgggtcctggttttatgtcaacatttttctctccttaatttacaaaatttgctcaaaatcgcaaaatttggtcatttttcggacaaaatctgttaacaaatcgcattgaaaattataaattttttcccggcggcgcctatcggcaccgccggccccacttgcgcccaaaagttttttgggaaaagcgccgcaaaaaaatcaacttcgtttttcatgttcagaatcccaaaaaatgcttatttctaacaaaaaaatgctcaaattgatcatggacgatcaaaaataccacaattgaacattttaaacgtgttttgaataaatttgtgaaaatgaggtttttttttgcatgccaaatgaggcttttgaaaattttcatctgcgagtcagttttttgaggttttttggccataacttttttgtgtgtcaattaaattttttgaaattttgcaggctattagggactatcaagcgctttaaaatgatatcaagcttatttaatttgaatgagaaataaaaatgttatagcgtttggcgccaaaatggctggcgccaaagtggccggttcccaaaaagaatacttcttactgtcttatgcgatgcaactctgggtacttccgtgttttgctacccccccccccccccctcgaaaaatttttaaaaaaatcatatcttggagttttcaaggtcactctgactatgaaaatggtgtttgtttttcgggcctatctatgacatctagtcatcgatttaataaaaatatctatgattttttgaaattaaatatccaactctgctagctttaaagctattaagatagtaaaacaatagccattttcccgttctagcaaaaaaatgtattcaccccccccccccctatttccattaacaattagactgaattaagctttatcaatcaaatttctcattttaaatttcgtactaaataatg

SEQ ID NO: 117473 - DNA, 510 bp, Heterodera glycines
tttttttagatttttaattaattattaagaattaatattattgtaaaatccgaatctatgtttgtatgtgtttatttaattccttttatacacctttaatttgatggcctgaaaagatgccaacataatttatttgcttcatttcgacttcctttaattacatcatcatcattttttgccaattatttattttattatgcctctataatgttaaattttttattaaaaaaatataattaaaaaataaataacattaaattactaggtgccattctcttttttgtcggatatcattcaaaacaattatgttggcaaacataaagatgatgaaattcattaacatcgatagacgaaatattataaatttgcaatgacattgcaacgaaatttggttggcaccatttccgctaccgatttatggcatatttaagcagcaaacaattaataataaaagtaaaataatttaaaatatatttttatctaatttaaattatttatccaataaaaatg

SEQ ID NO: 117474 - DNA, 1003 bp, Heterodera glycines
gaatacgtcaaagatggattcaaaattgtaaaatattttaactatttttccaaaacttggccaaatttaatttgaaaaatcaatctttggcactgcgtgaaacgaaagaatggaacggaatggttaagaattttgggaaaaaataagaaaaaattttccttttttagagaagcctctcccatattaccaggctttgctattgtaatagcgccaattaaattatcatttccaattaattttttaccaactcacagatcactattttctcggaccgcgaatttgaacaaacgacgagttacggaccggcaggcatttttctgatatttttgccaaacacggaacgatgggccaaggaatcgttcgccttttgggcacaaattgaaaggaacgaattggcagaaaaaactggcggtaaaattcggcaattttcgcttaaactgcaatgcctttgttttggtgcagttcacctcatttcgggatattgccaatccaatgacaaagggtggatcgaagagcatgtgatttttaattatgccaattagccttaatttgtttttactaacgcatttattgaggctgatttaatgtccgacattgtgtatgactggaaatggttgaccgatcaccaattgggctcactattcgtcaaaccgtacaggtggtctcattttacacatctcattttaccagggaacctggctttgttcagcagggtgaccagggtattatattatttttctgtgctagagaagagttggaatgtcgcttttcgttatccaatttctgacatttttcagcagtcgaaattcctattgccaattgccggattatttttagccatcggaatgccaatttccgtacttttttgaggtagtcggcacacatccctggtctatgccatattttaccgcatatttaaaaaaatattaatttggcatttctataacttgcgtcctactccatattgccccctccaagctttacgcctcatttttcagctatg

SEQ ID NO: 117475 - DNA, 844 bp, Heterodera glycines
atgtcattttatacggatgcaaaatttagaaaagatttttaaaatatgaaatataaaataaaatcacttttattagaattaaaatgccatggtcccaagactcgagaccgagacttgaccccgagaccccaaaaacccgagacttttttcaaaaatttttcttatttgcttaaaaatctctttaaaatcgttgaatttttttgagaccaatttttggtttttttgattttgattcaatttccaaaaatccaaaaaatgagcacaacccactggaccacgcaggtgctaacgaaattgaacaaaaaagtacctaaaatttataaaaatataagtttaccaaaagccaatcattttctaatcatcatttcatatttcattgtgcaaatcatcattcctcatgtattcataattgaccattgccgtgcaacagaaagtacaaattttttcatcttttattcactctcaacatttctttcattacatttgaattgtatttcaaccttttatttgcgtgggaatattttttattgtacataaaaagtattatgaaaactaaaatcttaattaaacaaatagtattattttatttaacagccgaagtccttttccgcaatttaacttaaaatttgaattaaattttgaatgactgaggcaacaacaattaatgaagtttttgtttttattttatgtgctttttctattacggtaacaaataaataaacataaaacttaataattttttaaaattcatttagggaaacaaaaagtattttaatttatgcactgtttctgcccatctttggtctaatcaatgtaatttatatttattcacaaatttgtgatg

SEQ ID NO: 117476 - DNA, 488 bp, Heterodera glycines
agaaaaaatcagttaataaaaattaaattaaaaaaaaattaatgtcatttagaaacccttcgaatatataattttaaattcggaattgagacaacaaatttaataaataacaaatatccctcaacttttttgaaaaaaaaacctgtaaaattaagaccctcgtatatcatgactaacttaattcaaaaaagagaaaaaaaatctaattatgtttaaaataatatctagtattttaaaaattaatttcaatatttcgtttattgaagaaaaaatgtctcaaaagcccaaaaatatattaaaaaaaaatgaaaaaatctgcacgaaaaaaaacatttgatttaaattaattaatttatttaatgaattcctaattaccatacccttaattaatttatttaatgaaaccctaattaccatatcccctccccccatacagtaactccgtgaaaagcctgttggccaagctgaatgtgcggcttgcggacatg

SEQ ID NO: 117477 - DNA, 749 bp, Heterodera glycines
aaacggtcagataagaaaaactctatcataaaatctcagccgaagaattatgattaaattaattcttcataacgatgttttatatcgtcaaaaaaaagtcaaattctccaggcgaaaacctaaccactgctcagggttaaaccaaaaaaagcaaacaattacaaatggacggactacgaaacaaatggataggatttattgctcatattttattttattagcttcatcaatgaaaaataaattaaaaaaatgatttctcgccttgtctgatgtaaatgttgtccttgcttttgtattcgctaaatgccatcaccggcagcggttttgaaatgcgttcgccatgttgccaaagcggtgaaatttgggcacaccttgaaaaaaaaactttaaaaaaattgaaaatgccatgcaaaaaaaagtgccaaaaatgttacgcgtttgctcacctttcagtcaatgaaaggagtcgcgcatgcaattgttggatgtattcactttaaagtataaaataaaatttaaaagattaaaatgtaatcgcggtttggattttggcatttttagtatagccagcttaagaggatttaaagcagaaagattgttttttatcaattttggagcggttcggaagaaacaaagccaaaggcttgttaggattttgtatgaatttgttattttaatcaacaaaagaaaattcaaaaaaagtttcaaaataaaccccaaaaaacagttaattaaattgaatgaatatg

SEQ ID NO: 117478 - DNA, 104 bp, Heterodera glycines
ttaaaagaggtacaacagtgattagaagaggtgcaacagtgattagaagaaatacaacagtgattagaagagttacaacagtgattagaagaggtacaacaatg

SEQ ID NO: 117479 - DNA, 124 bp, Heterodera glycines
agaatttccttcctctaccaccccctctccgtctgatgttttctttttagaatgcggcagtgcgtctgtttgtaccgtctgtcagcgtcaaaatattaaattgatcaaggtcaacaaccaaatg

SEQ ID NO: 117480 - DNA, 1003 bp, Heterodera glycines
  unsure (1)..(1003): unsure at all n locations
cacattaattaactccattaaaattgctgcataaaaaagtatgtgttttgtcacgaatttgtcccttttggcaacaccttggaaacaaaaacgcaccccgacaaaacgtgtacgtgcacaaatcggcatttaaaattgtcatttttttttggcgtaatgatttctttcgtgacttttttttgttcctccgccgtccttcccgctctctcctgcaattcattaagccattatctaatatggcatttcaaatctatattgtccatttttcttttcaatttcttgaattgggaagcgggttctccattcattcacctcattcaaaagggcgcgagcgaccaaaacaaaacaacacgtcaaacaaaacgccacagatttttgaatgggcacagcggaaggaattttgggggagagaggggggggggacaaaagggtgaaagaatttggggggtcaaagaatgaatgaatgagtgggaggggnggggggcagacaatgggccccgaaatgatcaatacattgggcggttctgctgatgttttgtgccctttgtgtggcctaaaagttgccaagaaaatggtcaataattgagagttacataaatggcaaaatgtggattttccggaaaatttaaaaaaaaccatttttaatgcattttttggtttgccctgaggggactcaattggtggcattgtttccaaattaaggtgccaattattacgcaaatttattgtgttgaggacaaaaagcgttacatcatttgaaaaatagggctgctgttcctcgtccccgacaattttttcgtttttgttattttcggggaatccctggaattttcaagaaaacaatcctaattagaaagcattacgaccttttgtataccgtattttttatctctttttcttgtcctttctttatcaccgtaatttccaattatactaccgtaaatttggcaaaatgtcatttcaaaatttccaaatttttcagcatttcaatttgatggcaatg

SEQ ID NO: 117481 - DNA, 615 bp, Heterodera glycines
attttagtacgttgaggaatggaaggcctctttaaacaattagcaggcgataatgagccgtcaattggcgttgaacgacttgaaattgctctaagggaatacggtaggtatttgtcactgatattattatttcagatgttagtttataggctaccgattttctgccgacgtttattgtgaattgttgcgcaagtatgatcgcacaatttcgggtaaaagaccagagctgctgtttttaaaataatcttgtatttaaattaagctcggttgcactttgacgattttatacatctttgtattgtactgcagcaattgactacaccctttcgtgatcgggactttggccaaaaaggacggaatagtgttggtaagtattattcatcaaaaaataatttttcgaatttttctttaaggctttggaaactacatcgctatgtttttatccacaatattataagatttgctcccatctgtatttttattgttcattggcgtgacattacgcatcattatttactctcggttcagtgtcgctataatcgactttgagctcattttcagcataccagtccgcttttccctgtcgctattctttccactcagtgtacgaagatg

SEQ ID NO: 117482 - DNA, 396 bp, Heterodera glycines
ttattttccaaatttccccatttcttcgctggaaattccacaaaaatttattttatgtattgattttttcgtgaaattttttttttaataaaaaaatatatattttgcatgatctattgaaataattttttgacgcgccaatgggttttccgttttcggcattaggaaaatcataatttttttttgatcacaaaatttcaaaaataatctttgacgaaaatttttctctgtttaattgttatttaacaaaattttttttattatatttgataaattaaataatacatacctttatttattttaaaaaattgttttaataatctttaatttttaaattttataaatattttaattttagattttaattgctataaggaattttatatttttaagatg

SEQ ID NO: 117483 - DNA, 644 bp, Heterodera glycines
  unsure (1)..(644): unsure at all n locations
ccggggacctctagagtctcataattttgcgttgattgatggtttgttgtactttctttaagagaaaaangagnccattcgncngnncgaggccgaccctttcagaaaagannnganaagncaacgncacgaaggaaaaggcgcagggcaccnaagaggcaaaaagncacggagacagcccncagaaaganannnncggccaaanangncgagggancgcgnnaaanncgngacgagccgcagaaccngcgcncanacncgcaaaccacgagggaangaaccacccangcaaanngnnaaaagnncngaaccgnnggaacnngnnngccnngacanccncncaancggaccancggaancacaaaancgcnananncccgnnancanagaccacnngaccaaagaggnggncacggnnccggnnccaaanaaaaacagngaaacagncgcaagggcannngncaacgagnnngnncnaannnnnggcactccaaaacgcatccacagcgaccgaggaggcgaatttgtaacgaaacattgacagaaattacaaaaatgcttggcgtgaaaagacggtaacgtcaggttacgaccctcaagcaaatggcgtaaatgaaagggcgaaccaaacaattttgaacatg

SEQ ID NO: 117484 - DNA, 372 bp, Heterodera glycines
gccgggaaaaattttgaaaatttgaatataattttttaacagattttcactaaaaaaattaccaaattttgcgtttttgtgtcattttactattaaaaataggagattttggggcgcggctgtgccgataagggccgccgggggagaaattggaaattttgaccatttttaaacatgttttcactgaaaattagtcaatttatttatcaaattctgaaaattttagggcaactcatccctcattcttaggggtgtaatattcgcgtttcgtgccaaaatgtgaaacgcgaaagcgaaagtacaaaaaaaaaagcgaaatatgcgaaagcgaaacgcgaaagcccatccctggtgtggaggagctaaaacatg

SEQ ID NO: 117485 - DNA, 482 bp, Heterodera glycines
tcgattgaagcggtctcacatcatccggatagtctgtcgcagggatcgggagtcgtaacccgtgatcgtcgagtcaaaggggtccgacaagcccttccccaatcctagtcggtggtgccgttaagcaagcagcgatttgctgcacaattctctcaagcaccaatccaaatttgtcacccctcccccctcccattctcgtccccctttggcgctgatcggatcggtcagcagcatcagacccatcagaacgaacggcaaaaaagggtgcgcttccctttacgacaagcgaacggagtgagcagagagagaaagggacgagagcggtgaagaggagcgggaaccaatcccgcctcagcttggcccaccccaaccccaagcgcgcggcggaaataaaaagattggcgacaaactggtgccgttagcagggggtctccagcgaaacatttcggtcgacgaacagaacaggcggaaacgaaaaaatg

SEQ ID NO: 117486 - DNA, 464 bp, Heterodera glycines
agtaaatagcagaaaattgttggttttttgttcgaattttggcagaggaattttggcacgctttggagcaaatgtagccattgatggtacctttaaggtaagaatgcaaataggtactgatcatgggcgtagccagggggccgaggccccccccccccgaaaccaaaattttaaaaaattaaaataaatattttgtaaaatttgttaaataatattatcaattttaaaagaaatcccatagaaatcggctttttaaaaaacgaaaaatattcccctaaaaatcgactttttgagttgccccccccctcgaaaccaaaataaatatgttggaaaatttgcatttggtcatatccctggaatcttagacttgtccggcaagttttcaacaagtttacacaattaacccaatcgttgatcatgttgccattcccgctgtttatgctttgctaccatcaaaagaaatg

SEQ ID NO: 117487 - DNA, 398 bp, Heterodera glycines
ttgtattttcgggtgtaaaataattagtgtcgagagtgagtcgaaaatagcaaatcccaccgttgtattctgccaaaattcggtgacgactgactaaaatcgccaatgaatgaatgacctttttccgggccgctgcacagtttaattatgcacagttttgccaagttttgtgagccaacacagagggcacctgtgggcgaattgtggcatttttgttgacgaatgacattttggggaaggcacagtaaaactacagtaatttctgttaaaaaaaaccatcctttatgagagtttatgtttatagaaagctgaggcccaaattgcataaaaataaattagttaaatagaatttcaaaaaatatatataaaatttaaatttattttttagatttaaaatg

SEQ ID NO: 117488 - DNA, 88 bp, Heterodera glycines
cggaataattaccccatggggtgtttatcaaatgctaaaattgccttttggcctgtgcaacgcaccaagcatttttcaaagaacgatg

SEQ ID NO: 117489 - DNA, 544 bp, Heterodera glycines
  unsure (1)..(544): unsure at all n locations
gctcgctctcttccctattcccccattcggtccctcctgctgctttgttgtggcgcgtttccgtcccatagtgacggtccgtcgcgccaaagtgccgagaaggtgtcaaccccccccccccccccccccccctccaccctgtgcacgcccagccccataacttccgtaaatctcgtnccctcctgctctttggtccgggattggcaccacatttnctagtccataagcaaagcacacaaaaagtgttgctgctctcgtatatttcgaaaccctttccatctactacctnactgcaggctgaaaaattaattataattttcgtatttcttcggggctcaatttgtcaccccctctctgagaaaggaacatttccactagcttggtactgcctgaaaaataaataataataatttacgctcccaagggttctattttcacaccccgccccactcgaaaggtgcgagcgtgggctctaatagaaggataaggaggcttcattaaaagaaatacggtaaatttggggttttttagccaaaagaaaatg

SEQ ID NO: 117490 - DNA, 957 bp, Heterodera glycines
  unsure (1)..(957): unsure at all n locations
gtaaaaatcaccnatttgacacacaaaaaagaagactcttctgataggcgccagcagggaaatgaaaattgagaggcacttattatcccaaaaatgatcaaactcacgatttttaagcaaatttattaaaatgaaggaaaaaattaaaagaaaaaatgtgaaaaccatggaacacagggaattgaactaataacgaacggcatacacaaaaaattacagaaaattttagcagttgaaattgtacaaatttccaaaaatgctttgagttaaaaacatgcataataaatagtaaattttcaaatttatggcatttttgatgctgaactgcggggtcttgccggtctagtacgaaatcggcgcaagagtatcatctgtcggaggtttggtcctattgtgcgccaccggaaataattttgaaatttagtgtatttaattaatggcagtatttgttccaaagtggtgtttgataaattgtttgatcaacaattcactcattgaccccatctgttgccctgatcatgaatggttttcgccaaattgtgtgcaattaaccgaaggcggttgttatttttagaatcaaatgtggctgattttttcataactctttttaaacgactgttgtttgtttcattggtgtttaatgaacagagtgggagaaagattcaatttgatcgagtacaattaattaattaaccaattagtaattgagtaaaaaaataaataatttccatttgtatcgctcactcatcaactgctgattgaatcctttcagtttttagcgaacatttacctaataagtttttttcgtacgtcaatcatcgtcatgaactgctgctctttatgaacaataaattggccacttttttcactattattttacgctatttaagcactaaatttgcagagggagcgatcacttttcatttttccaattaaatttaatcagtgacaaaaatg

SEQ ID NO: 117491 - DNA, 481 bp, Heterodera glycines
aaaaaaggacggagagagggaccaatgccaatccaatgccaaagacaaagaaatgccaaaatgcgcgaaatttctctactcgatcgatctgctttcgtaaagacggcatccccagaaaaaaataaattttattcaatcacctaaattgtaataaacggtaaaaaattgtcacaataaattgatttatgtataataaataaataattattcgtaatttgatgacatcttcgatcactcttcattcactttcatttctctcccctttcactcttttttctttgccccattcttttggctgtcaaattattggcatttgccgcgttggcaattccaccaatgcttcttctcatctcgcccactttgccttccaaatttcctttttcattttatttctctaattttctcatttcttcctttttacttttcctttattttaaactcaatttctaagtgtttttttctttttacaaaaattaaaatg

SEQ ID NO: 117492 - DNA, 1002 bp, Heterodera glycines
attagccaattaaagtttttcacaattaaaattttaattatatgtattagtgacagaaactagaccgggctaggcgagatttttaactaggtatccggaatctggctttttaatcgaataattttataaaaattttgaaaatcaatgagtcaggccggcggattttttatttctattctagcattacgccaagttgcggtcgaattacgccaaaatgcacaatttgaattgccctcaggccaacaatcatttaatcctgacaattttaagcaaaaagtgaaaaacaaattcgactttgtgataagaacattgaaagaaatggagaacacagaaaattatgagcaaatttggaattggtctgagatttttgagcaaaaattttctggtaaaatgtgccaagggcaatttcatcccctttttggcaaaatttttcaatttttaattgtgaaaaatatattaacctaaaaatttaaatttaaattttcgaaaaaatgagaaaacttaaaaatatgtgtatgtatttcaaaaaatggtatctaaaaaataaataattcaattttacgaaaaaaatgtgaattaaaccagggctcgcattcgtccttgaatgacaaggatgcccttaaatttggttctctcatttgaaaatatccttgaatataaaatatccttgaaataagcattcaaaaaaacactcaaaattttacaattttttaaaattttacaccatattttgtattaattattggcattatttggtacaaaatctattgacacaaattgcttcaaaaattcattcatttgacaggcgaaaatgcaaaccatttgaatattgtccattgcatatgacaaactttttaagtgtccttgaatttaaaaagttaaaaaagagatacgttgaatataattttcccgttttgttgtccttggaaatctcctttgaaatgcttccaatgcgagccctgaattaagcaaagcataaaatttttcaaaaaagtggcgatg

SEQ ID NO: 117493 - DNA, 411 bp, Heterodera glycines
ttgaattacgttgttgttagcggcggcgatgaagaaaatttgggcagaaaatggcgaggaataaaaaggattgaatagcaaatttattgggcaaatgattcgcattcgtgaaaaattgtccttttatacaaaattttctttcccctcccacatttttcgcaaattttttttttatttatgaaaatcatactaaaacatgttttccgaggttttcaggctcgctaatcaaaaatatgacatgtatttcggccaattctgaaccccgaacccgaattcgaacaaaaagctttttaatccgttatttttcaaaaattgcttttgctaaatctcttttttctccgctataaaagcgccttcgtctcccccatttttttgcattaacattcattcattcacatttctcccactatg

SEQ ID NO: 117494 - DNA, 546 bp, Heterodera glycines
gggctttaacgatttcgaaagcgatttctgattaaagattgtttattagcacgctaaaatacccgttaaaaatattttcagctaatttaagtgaaaaaatttttcccactcaaaaaccatgtggtccctcccccctttggtcccaaattctaaaatcaaattttctatttttaaagctttattctaattaaattgaaccactttaaaatgagttatgaatttcaaaataggtaatagcccaaattcccgagggccaaatgaaaaattttcaaaatttaaaaaattcaaaaattccctatataagaagtttctacccatgatccaagcataaaaatgaaaatctcgtgtctttttgagagttacggggcgggagtggtgtcattcaatagggttttggcctgcctataagggaaaaatacgggttttctaaaacgttcagaactgttcgaactgcgttcggaaaacgagtcaaaatttgcagtttttttggttgtcctatttttgaacgctttttgcatgccttaaaagtggtcaaatcaaaaaatg

SEQ ID NO: 117495 - DNA, 359 bp, Heterodera glycines
attgttcagtgatatgtgggtgaagaaggactcggtttttgattcgagaactttttatttatctgtctcacttccttagcctaagaaattttttcaattgtcatgaatcaaattttcaaattctttaaaaaattctcactcaaggaaaagcaatttacaagaattttatttaaaaaatcaaaaaaaataaaccttaaataatttttcgcttaaaaaatcatattttttgattagctcgtcctgccgtgcctcgtccgccaccaccgccgcttccacccaaaccatcttctacttttggtgttgccattgcatcatcatctgccgaacaatcggcaccatccttaaatattggcaaaatg

SEQ ID NO: 117496 - DNA, 640 bp, Heterodera glycines
ttggcgcattgttcacttttattttcattaacttttaatagtgtctaactcttacagtgtctgttgtttcttcgcaagtcttgttttttaattttcgtttcaataatcatttttttttataatgttaggcattttttgtcaaattgatgatatatgagcctgtgaagttggattcatttctctgtcctattcaaaacgaacgaagaagtgaaacagagagagagaacgcagagacagacaacgaaaggaaaggcgagagaatgcagagagtgccgttccagtggaggaaaagcgagaacagagaagcaaagacaaggagtgttcacgtgagaagtaaaagggaaaaagcgcgacactgcggcagacacacaaacaaaacccctccggggacgacgaaaagcgaccgataaagaaaaatgaaagagagatagagagggtaggagagagaaagagagacctaaaggcaatagatagagatcgtagaagaaagtaaaggaaatgcaagtggccatttcttctgcttaaacgagcaaaacaaaatccagtgccggtgcgacgggcggcgtcctttgactgacgttgaactaactacctaattaaccccaaatcacaaaattctcccttgcttctcccaacaatg

SEQ ID NO: 117497 - DNA, 167 bp, Heterodera glycines
  unsure (1)..(167): unsure at all n locations
ttttgggaaaacgccgcaaaaaatcaacttcgtttttcatgtcaggatcccaaaaaatgcttattctacaaaaaaaaaatgctcaatgnnatcattagggagtccaaaaatatggatataaaattgcaaaatatggactaaaaatcgcaaaatatggacataaaatg

SEQ ID NO: 117498 - DNA, 225 bp, Heterodera glycines
ggtgggagtccccggggggttgttatggaaactgaaaaggcaaaataaaaacaaaaataaaatattaaaaaatgttaaagcaaaatgcctataaagattcaattctaaatcggaatttttttcggtcgttttcgagttaatagcaactattttctagttttttatttttagcacgtaaaaaatttatgaaaaaactattttttaactaaaaaagcccgaaatatg

SEQ ID NO: 117499 - DNA, 113 bp, Heterodera glycines
gttaaggacattttcgtccccaagtcctctaatcattcgctttaccgagtataactgcttaacgagctccagctatcctgggggaaacttcggagggaaccagctactagatg

SEQ ID NO: 117500 - DNA, 221 bp, Heterodera glycines
cgtcaagaaatttaaattttcaattcaaaaattaaaaattcaaacatcttggtttttttttaaagaacgaaaggcctatacatctgatttttaaatgcttcatgttaagtctcggaatttgaaagcatttaatgccgaattatacttatttccatgtcgattaatttaattgcttgccattgagatgggctctttgtccctccccgcttcgtttggtcatg

SEQ ID NO: 117501 - DNA, 1003 bp, Heterodera glycines
tactccattctttttttggatattttcttcctttttgctttttttttcttttattctataattttttcaattatttctctttttttgagttcatttcgtttttcttcttctttttcctcccatttttctccaaatatttcctcaaatgttttttgttgtaattttttattttccgttccaccaatttgatcaattagagtaatcaaaaataaaaataataaaatacagaatttcattttcaagattttattttatttttcttcaattaaatggcaattcattttttgaggcatttaaatgatttttttctgattaaaaaactgaataaatcattattttacttaataaaataaggaaatcctgtttaatttcaaagaaataataataataattttatcttaatgacaaaataattgccaattgttaaattaatgattaaataaaattttattactttcttctggagctcattcgaaaataataaacatattttcaataaaaataaaataaattcacaatgtaaagagattttagaaaaattaatgcaattttcgaattaattttactccattcttttgctgaatattttcttcctttttgcttgattttctcttttattttataaaattttgcaattatttctctttttttgagttcattcttctttttcttcccaattttctccaaaaaaattgggtaatcctgtattttattggtcccataaaaaaagagattaaaaagggttctttatgcaattcggagtagtacccgggggttttcggggtcgctgatcacgaatatgatatcaattttgacctatttcgaatccggaacacgaattcgaacatttttttaataaaatattttttttaattgttaaaacgcctttcttaggggtttttcggggtcgctaattaattttccttatccgaccgacccataaacgcaaaattttttgattattttaacttccacatgaaaattttctaatttttaggagatg

SEQ ID NO: 117502 - DNA, 483 bp, Heterodera glycines
tgatcacactcagcgaaagcatcagacgccgtccattttcagaaactgaatttgcacactcaattagtaccactaattactgaactaaatactaattgggagcagtgccactcactctgcgctttgcgccaccaactgatcagccaaatcagcacatagcagcatagcagcaaaactcgccgaaatacatgcccaaattcaatgcattgaagtagtaattgttctccgggtgtcgtgccgggttgccgagacggcacattacaggcctagaagggaaggggaggccaattagggtccggtcagattatccaaaatcagcaatgatcgcacatttcccattgctttggcatccacaagtaaaagttgcacacatcgaccgccgccaaaaggcaacaaagtgccaacaacaatttaaaaacgatatacttgccccggcctttgtacctgcgaacgaaacgaaatgccaaacgaaaactcaaaatg

SEQ ID NO: 117503 - DNA, 70 bp, Heterodera glycines
attaattaactatttaattttaaaattaatcttttaaatgaatccgcagaaaactttggacgaagaaatg

SEQ ID NO: 117504 - DNA, 191 bp, Heterodera glycines
acaaatactccgtctgttttttgccaaaaaatgtgatgaatttatttctgtttcaaaattgtttttgcgttctttttgctctctcatttttcccaactctctctttttaagttacataacaacagagttttgccttgccttttttgacacaccaatcaattggaaaaagggaaaattgagccacaaaaatg

SEQ ID NO: 117505 - DNA, 526 bp, Heterodera glycines
gcgtttgatgtgtcagcaattgctgaaccaattgttgctgttgcgtcaatgtgtcaatcaattgttgaattgtcgcgttttggttggccattttcgtcgaataaccgctcctggcgaaacctcaaccgcctaggtttcttggtttttgtgtcgaataaaaccgcgcctggcggaaaccgcaaccgtattggtatctgggtttttttgtagaaattccacgattaaccgcggctggcggattaatcggatcgacgaatttggcttgttgaaaataaaggtgcctcctggccgaccttttttttttgcagacaaattcaataaattgcactcagcaatttattcaaataggcgctgagctcaaatgtagggcgtcgccaatttgttcggtcctcgaaatgtcgaatggacgaacaaataaataatttattgatgacaaattaaaataacaaataaataagtcggaggacggcggaggagagcaatttgggaaatgtgaacacaaatatcaaactgcatgaatgaaatg

SEQ ID NO: 117506 - DNA, 314 bp, Heterodera glycines
ggactcaccccaccagcatttcaaagtcatcccaatctctgggactcaatccaccagcatttcaatctctgggactcaacacaccagcatttcaatgtctgggactcaaatctccggcattccagacactgggactcaacccaccaacattcaatggcattgcaatctctgggactcaacccaccagcattccaatctctgagacaacccaccagcatttcaatctctgggactcaacacaccagcatttcaatctctgggactcaaatctccggcattccaaacactgggactcaacccaacaactttcaatg

SEQ ID NO: 117507 - DNA, 141 bp, Heterodera glycines
ggtgagtaaaaatgttgtggcatttccatatttaaaaatcaattttggcacatttttttgtaataggtgggactcaaacgacgacgacagaaacatcgcccattccgatcattgaagagccgtcggatgatgatgaaaatg

SEQ ID NO: 117508 - DNA, 242 bp, Heterodera glycines
  unsure (1)..(242): unsure at all n locations
cggcgttggtgtggcgttgtgtggtggtgggagaaagatgactgacgtgcaaattttcctgccccgtcnccctgaggggacaaaaaaaaatcnggttttggtgcgattgtgtttggcattctgtcagccgccgccgctttccctgcccccacccctcgggggatgaaccgcgcgactgtgcgtccgtaaatgcaaaattgcaccagccaacgacgacgacgacgaagaggaagaccacgatg

SEQ ID NO: 117509 - DNA, 139 bp, Heterodera glycines
tgagattaaagttgttaactttgccaaatgcgtagacaataatttgttaattttgcaaatcatgacatttatttttattatttgacaacctaaatttactgcattttgcaatttattccttaaagtatttggcaaaatg

SEQ ID NO: 117510 - DNA, 1003 bp, Heterodera glycines
ttgttttttgtcaacttttatggctactgaaatcctaacaaagcgtggaagaaaaaaattattgcatgaaggttttttgtatgtcttcgaaaaaccaaacgcacgcggtgacgtcaagttctggaaatgtgaatttttcggaaccaaagacatcaaatgcaaaagtcgtttgcacacagatatgaatgacaatgttttggaggtgcaactattcaataataatgttaaatatgtcaatttttaggcaatcggtgtgcacaattgtttataggattcttatttttgggagagcgtcacacagtgaatgggcggcacaaattactgatgttttcgtagatggcacggcacgttcgtcattgctccaccgttgttttaccaagtttacgctgttttggcaagttggagttagcagtattccgtcaaacttaataaattatcgcacttatttcggcgtagagaacgatgggtctttccacgttgtatatgcactacttacgaacaaaagtgaggggacgtattccaggatgtgggccgtactaaaagaagcctggcctgaattttcaccccggacgttttcagtcgactttgagatggctgcaatcaattcaattcgtaacaattttccggaagccgaaactcgtggatgtttatttcatctagtgaaaaatatgaagaaaaaactcacagaaaataatctttcgcaggtctctcacgaatgaatgtgatttaataatcaatatgtttttatcgttatcaaactgatccaattttcgcaactcagtcacgctggatcacatcaatgacatttatgccaatcggagacttaacgtacgctctaatcgcactggaaatgcatctgttacctgagcttcgaccaattctcttttgattattttttgttatagattgaagtcgacatatttataggttcgccacaaactacactggacgtgttcggcgtgctgacgggactcgaacgtaccaatgttttcccccaattatg

SEQ ID NO: 117511 - DNA, 232 bp, Heterodera glycines
aaaattgatataaaagggcggaaaatgcccaaaattctcacttattccatttccttcaattcacgcctattattttcgacacgcctcgcgcctaattactgaggtgttcaccatctcccgttttcccctcaccccctccatttgcacatcactaattttttttccccttttacagtgatcaacaacgctctgccgcgcatttcaacctcaacgcacacagcaaacgcggatg

SEQ ID NO: 117512 - DNA, 312 bp, Heterodera glycines
ttgggcaggactaaattggaagcataatgatgtaagagttatattggcggggagatggaaagctgtggaggggaggagaatatgctgagtggagtgaagatgagatagtgtgatagagagaaaagagagacggagggggggggggggtaatgctcgtcgctcattatataaaaaaaatgctggcccatcgattgtgatgaccaccgaacgagtcgttggtcatctccccaaccccattttatttatatatattttgttgttcattttttttattgtaataatattttttttccaatttagcaaaaaaaaatg

SEQ ID NO: 117513 - DNA, 100 bp, Heterodera glycines
atttcgggaataaatggagtaatgtacgaaataaaccgcttctccaaaaattttcataagtgaaaaggaaaattatgacgaccaaaacgagttcagaatg

SEQ ID NO: 117514 - DNA, 473 bp, Heterodera glycines
tagcagtttttcgaatatctgtaatttgtttttcatatattatgggttatttggaaatagtttaattatcaaaaaactatcataaaaagttatggtccaaaaaatcccggcgactcttcgacaagcgaccttttggggtgcatcgcaagaaccgaccttcgatatttaaaaaaaaatttttaatttagttttttgtcattttgttgacttgtagtagaattgaatgaagtaagacactaacgctaataaaaaaaacaaactttttatgtgcatagattatttctagttgaaattgacccggtgcgggattggatcccgcaagggattttgcgggattccagtccgcagattgcgggatttatccctgctggatccctattttgctggtttttttgaaattgaaaatgaacccacaaaaataagcacttcgaattcatatttcagggaggcgaattaaatttgtgctaataatg

SEQ ID NO: 117515 - DNA, 260 bp, Heterodera glycines
aatgagaattttctggatttttgactaaaaccctcatactcaaattatagtagaattttcaaattttgaggtcggactttgttttaataattcaaaattaaattaataaacggtaaaaaatacaaatatatttaaggactcatgctcaatggtctaaaaccaatttaaaaagactttgaaattactaaaaaatctcattaaagaaaattcattaacaacggactaagttacaaaaatattttacagaaggtgtggacatg

SEQ ID NO: 117516 - DNA, 117 bp, Heterodera glycines
tcgcaacggcgcacagcacgacgaaaatgtgcaggacggggatggtcccgtcgcttcaacgaacgaagagcaacaaaaattgccagagtaaacgaagcaacgagaggaagcaacatg

SEQ ID NO: 117517 - DNA, 86 bp, Heterodera glycines
gctgtaagaaaaaggccagtttttgatgccacacccacacacccagcagaattagccttttaattaattacccttttcacaaaatg

SEQ ID NO: 117518 - DNA, 219 bp, Heterodera glycines
ggtaagcgcaaaagaaatgcacgccaaaattacgccgccaaatttcttagtgatttttttgaaaaattctagaaaaaacggtaatcgttcacatcattggtcccataaaaaaaaggaaaaaaagggtcgttttttgcgattctgagaactaccagggggttatctagggcgctgatcactagggcgtgtaattatatggatataaaatcgcgaaatatg

SEQ ID NO: 117519 - DNA, 660 bp, Heterodera glycines
acaattatttgtaggagagagagagaataagaccatagagtgaaagaagcaaaaataccaaaaaaaagtcctggtagcaaacgaataaggaccaatttataaaaatatctgaacgattgagaagcaaaaaaaaaagagagagagagagagaagaagtgagacagaaaaaatagaacaattttttttgagcagagcaaaaaggcccgggctgataaccaatcaaaggggcactattttagctaattaaaaagagggaccaataaaaaaaagaaaattaggccctatcattttgcttacagtatgagatacagtttttacaaattccaaagttcattttatctctttgttttctctcagttttcacgccataagaatattcacgtaatcacgtgccgccgcatttttcattgggcgagatcattcactttaaacatttttgcggcgcctgagaattgttaattgttcttgttaggcgaagtttaaacggagatggagcagataagcccattcctggaaggcgttcgcatccattcgattacccgctatcattcattaatttttttttctctctcaattaatgcataatgggattaccaaataatttttttttttttagcaaaataaaacaaaatcttattacgaactgaacgacttcgaatg

SEQ ID NO: 117520 - DNA, 1003 bp, Heterodera glycines
cggcactcgggctcattccgcaaaaaataaaatcacttttcttaagaacccatgggtgctctatccactgaccaaatttcattctgaaatcccacggacaccctaggaccttcctttgtgaatgctatcaacaccacctcacatctaattactgtaccaaatcgaaaaagtgcaagaagtgcggtgtcttgtgggactttgaacggaatacccgtgacggaagaaagggacacgtatgcgaggagaaattctgttggacttgccgcaattaccatgacaaggggcggggttgtttcatcaagaaactcaagccgaagcatcccaaggcattccgtctcatcgccttcgactgcgaaacaacgcaaacaccattattggcccaaacaaacgtgcacacatcgtcaactttgtctcagcccacgtggcctgttcaatttgcatcaaaggaaacacttggcgtcaatcactgtccggccgtacggcatgcaaaatttgcggtgaattccgcaccatcacgttctcacaccgtgccttcaacaacactcaagtggactcaatgcgtgtgtgcgaatcacagatgacagaatttgcgcagtggcttctctcgggatttgataaaaagtgattaagattttcctaactaatttttaataatttgctaattaaatcaggtatccatcgtctattttctcgcactttggtggcagattcgataacgtcatccttttccgcgaattcttcaacttcggaatatgtccagaaatggtcagaaaaggcaacaaaatgtacgaaatgaagattgggcgcacgacaaacagcccggaaatttccatccgcgatagcttcaacctcatgccagtggcgctcggcagtttacccggggcattcggactacaagtacaagacaaggagttctttccgcatcttttcaacaccgtgcaaaactacaacaacactctgccccatctgccccccaaaagaggactacatatacaatggaatg

SEQ ID NO: 117521 - DNA, 94 bp, Heterodera glycines
  unsure (1)..(94): unsure at all n locations
aanatagttttttttaaataattaaaattgcactaatttttattaaaattacaaaactaaagtttttttttctgattatcggcctttttagatg

SEQ ID NO: 117522 - DNA, 1003 bp, Heterodera glycines
aaatattaattacaattaatgatttacatattatttttatataaaatatcaataattaagagtatataataaaaattatttttttcctcgcgtgtggttgaaatatattaatatttatctaacataatgccaaataccagcttaattatattttatgtgagcaatttactgagtttaatttacgattaattgattgttttgttttacaaatgcttgaagaaacagagattaaaagataaaagagttaaaaagataataatttaacttacaaaaaataataagtttaaaataggaaaataaataattattaaacaaatataattttttaaattttattattaattacgcatttaaaacaattgaaaagcaaatattgtaatagttttaaaaaataattgatttgaacttgatggcggataaacgtctgatagtcatgagattaatggaaaagcacaaaatattctgttgttgaacaaaaatataaacaaaatcaaacgacaaattaaaaaaatcatttgataatttgtgtacagatttttctttgaaaataaataaacaaaatccaatctttattataaatttaataaaattaatttacttttatttttttaatttatgcaaaacctttacaataatattttcaaattaaaatgaaatacaataaaataatctttagtcaatattataatcaaattagtaaaataattttaaaaaagaaaattaatattacataatgatttaatagcaaaaaaacataatttaaaaacctttatgtttctacaaaaaaagaataatataaaacataatagaaaagttcattatttaatttgagcaactttcagcaatgtcataataaaaatgaaatccatcggaaaattctatgtaaatccaaagattataaatctattaaaaatgtataaaaaatattattaaatccattaaataaatgtcgctgcactcagttttttcaatttcttttgggctcccggacatttgcacaatg

SEQ ID NO: 117523 - DNA, 419 bp, Heterodera glycines
tttggttctgatgtgcttaaattagcatcaacattccacaaatttcgaatggccattgagagttaacccaactgactttggcgggagcggcaccggcgagtgttagcgatcaaagcggtgattaatttgcctgccaatggcatcatttcgttataattttgcctttccgttttccttttaaattcctccaacctttgcttggaatttgcgttcgtttttccttttgcttctctttttggccatcggcagaagagtcggaagtgactgtcagcagtcgaatgagctgttcttgttcttcttcttcttgttcccgctgatgttgatgattcagttgggactgatcagagacattttgggccgaatttgtgggaaaaagtgaagcgcaagaaaaagaaggacgggacgaaggggaggaaatg

SEQ ID NO: 117524 - DNA, 60 bp, Heterodera glycines
agtgagttttttttaaaaatttaaccaaccaataaaaatttcaaacaattttaaggaatg

SEQ ID NO: 117525 - DNA, 243 bp, Heterodera glycines
ttaaattccgtctataactatctaattaatttttttaaattatggatattgaattagggctttattaattgtgcctattaatggttaattaatggttcctcctaatcaactgattttggaataatggatagccagcattcattttgttcagccttttatatggcattttcgactttgtgtgctcgtgacgtgcaaacccccccccccccctccactcatttacttaatgagtggaaaattatg

SEQ ID NO: 117526 - DNA, 1003 bp, Heterodera glycines
tgtatttttcgttttattgcatttttgttaacaaattttgggcaaaacgccaaaataggcaaaaaaataggctaattcaaaattttttaggctttttaggtgctaaaaataaaagcctagaaaataggcactaataactcgaaaagtagcttaacaacagcccaaaaaaacatgtttttcgtgcgtttcaggccacggggagcacaggaaaaaataggcttttgcttaaaaattgcatccctagttgtcactacaacaaattgtaaatattttgcttggcatcatgtgtttttttgttgtcttttcaatgaataaaatattataatattattaaatttaaaattcgaaagcattaaaacaaaaagttattaaaaatttacaattaaatgaaaaaacatttaaaaaaattttttttttattaccattggtatgagaagaattatttatttttttaatattaaaaaaataattttttttttgtaactaattttttaatttaatttaattttgattaaaaataataaattccttttgcatttacttttttttgttttccttgaaattttagtttaaaagaaagaccgcacaactcgtctcattaaattctctgctgatggaaagaggtcaaccaacatacgcaagaaagtgcaatcaaatcatttcgcgcactattaattagttaaattgggtattttccacttttaatgtcttatattatttgaacaaaattaagaaatgtttaaacaaatttctaatcaaattaattattcactcgtatttaaaatatgttaattaataaattattaatttattaaactctaattagcatcatgcacagtaatttgtcggtatagaattaaatgagtccataaaataatcaaaaaatttcttggtgccagcctcaatgctatttcatttaaaatttgatagattttgaaattttaatatattaaaaaaaataatttaaaaaatttataattttagcgtggaaaattttaaaatg

SEQ ID NO: 117527 - DNA, 794 bp, Heterodera glycines
ttttatttatgggcgatacctttaataaaataatgtttttttttaacaaatttaggtccttttttaacagatatttaccatcaaaatgactaattttgggcaaatttttttttttaataattatgtcgcattgtgtgattattattatagcactttttggcattaaacacaaattcagacgttaaatgagataaaacattatcgcttcctgtccggttgccaaataatccgagtgtcgaaaaatttgaatcagaagccagctgtttaggcctgggcatcgtattaggcctcaacttaggctggcttagcattgggattacgaaattttaaatcaggacccgattgacttattagacattcgaacattttttattatttgaattattaaggggagaagatagaaagagacagagaaaagagtgaggaatatgagtgtcaaaaaggataaaagagaaatatgaaaagttttaaaatttcagaaactgcacaataaatttgtctttttaggaaatttctatttatttatttattaaaaaattttggtgccgaaactttggagccgaaacgatgccggcccattctaactctaggttggtagccgtactcatattttgtgtatcatcgtgctgaattaagatttaatttgaaaaatattcaaaataggaaactcgcacattttggcgcactgcaactgcacacaatgcaaaaaaaaacgtccaaaatgtgtataaaagtcgctgttgtgatgcatttttctcatattttactaacgggcgtaacacaacgagaagatg

SEQ ID NO: 117528 - DNA, 123 bp, Heterodera glycines
atcgaagtcaacggctgccactggaacgcgcacgaccatccccgtcaccgttttcagccccaaacagtgatggcgaacggcaaaatggcgcagcggatacggtaggacgatgcgcgacggatg

SEQ ID NO: 117529 - DNA, 1003 bp, Heterodera glycines
acctaaaaaatgagcgaaccctcttcggttctgcgtattatgccaaagtctgctcggacaaagtcatttgagtcgggctgccacacaaagtaacgaggtcgaaaaaatgaaaaataaagttataattagagaccgaatttgagggcatatgccaatttctgcgcattagttccgatatattgagcataaaaaacacattttccacttggtttgaagcttttacgttgacttttattattcttctttttttttttgcctttttcgagattttcgttaaatgccttttttggcattttgccgttttggtgttgttggataagggaccacaccgattattgattatattttccctttcactccctctcttattgtctctcgccccgccccttgaccagccccataaatatgtctccctttcccccactccgggcattctcccattcattccaccatttcattattttatttatttattccctgctgtcctccattaataaattatttatttatttatttgacaacatttgttttggtcgaagaccaaacatttttattgttgtagtaaatacacaataatttggcgcagtcagcaaaggacctgctctacatcttcgggtgagaaaaaggcatcaaattttgttttaaggaataaaagccgagacggcaaacaaattcaccgaaaagccgggattggctgtgaattgttttaaagcctaattgacacattcctcaaaaagcagtcaaagaaactgctagacgtctaaagccgagtcggctcatcaaatttgacaaaagccggtcggctcatcaaaattcgtcaaaagccgggtcggctcagcaaaaattcgacaaaagccgggtggctcgtcaatttcgtcataacgcagtgaaaagaaactgcttattcttctaaagccgggactgctctcaacaaaatacaacaaaagccgagtcggcttgacaaattcgacaaaagccggttggctaatcaccaaatttgatg

SEQ ID NO: 117530 - DNA, 887 bp, Heterodera glycines
  unsure (1)..(887): unsure at all n locations
ctttttctttataatttctctcactttggcgtactatctctttattttaatgtgtgtaaaaacaacactcacttcatcctgtttaacttttttttctgtttgttaaatccacaccaaattttgcaaatcgatagagaaaaaaattctgcatcggttaataggtcaattaatattaaaataggtcgaattgaaaagttatggaataataaaagttttgcatttttttcctctctttttggcgtactattttcatgtctctaacacattaaaaatcatgaaattcgcaaattctattaatttttgttgatacggtacaaaatctgttggacatttagaatcaatagaaaaatgattactttccgcattttggttgaaatcagcagtttaagacttgagttataacgtaataaagatttgaaactcccacaacttttttctaaaaaatcaaattgcttagttttcgcttagaaaaagattctccttttcaaaaactttttttaggtaacaaatttgttcagtttagttgggaatgaagtgagttacgtctgattaaaataaacaatacaaaaaaggcttttaccagtgtaaattttgaattaacgcgcaaaaatttacgccaaatgcgctatttggcgttatgagcaattttgtctgccttcttctttaaaagaagaaattgaaattaacacacaacatagggaggacttgaacctgggacccctcttttggtgactaactcacagaccactaagacgaaaaatccagcatagttgtacttggagcccanaattgggccgctgtgttaaaaacccaaattcaaattaaatgattgtcagatcatcatttcaaaaaaaatcctcattgacctatcaaaaagccacaaaatg

SEQ ID NO: 117531 - DNA, 1003 bp, Heterodera glycines
cgtcccagcaccattcaaacaaagggagaaaaagagtcgagcaaaatggcgcggagaaaagtccacatgttttgtcaaatgtgccacaagtcgaaaataagttcttcaaaaatcttctctgcgttgcctatcggcactgccggatctggccaaatctttttaatttgctattaaaagcgcttcaaatggttggattattgactatcaaaatttttggaataaaaatttgttattgaaattttttcattaaccgcaatagccgaaaaaccgaaaccgtggggtccaaaacatgcataactgaaaaccatgggtaagctcgtgaacaaccctaatataaacaattaaaaacaaaattaaaaaatacaataatccgccggaaacgatagacaccgataaaaatttcaatgatccgctgaggacgaccataagggatattatgctttatcctcgggatatttttgtattggatttttgattgggaattggcattgacagtgtgagtattggttggcttgaaagggccgatgtggttaacgatgaatgacgattgattttcggggctttgttggtgaatggcaccggactcattagatcagattttaatctttttttatgatggcttggtaatggaggatatggaaatatgtaataatttaataatatttacatctatggcacttccattgcaaatggaaaagcaatttgctttactttaatcgattaaaacaaaaaacccaaaaacatgtttgaccgattttggaattcggttcactgtttttaatctttgtttgaaaagtaattaatactcttgaaaatatccaaaaaaaacattttatctattgttatcagtaggtagcagggatggcacggaattccgatttccagcttccaatttacgacgtttttgggatcggaattccgatttccaattccaatttccgaaaaatttttgacccccggaattccggttctgattaccgaaaatttttggggcctcggaatg

SEQ ID NO: 117532 - DNA, 843 bp, Heterodera glycines
attaagactttttttctattaaatttcaaaattatgggtcagagattgaccattgtattttttagcacttaaatgttgggtggacagcggcagcaagaatttgtttaacaagaacaaaactgtatgccgagcagggttcaacttttgctacagggccaactgcttgagaaaaggtagtgtttttgtataatgcacatttcgccaaaaaatttaaagcatttttaaagctcgtaaatagggatgcgatttttaggtttttacctatttttttgctgagctctccgtggcctgaaacgcacgaaaaacatgtttttttgggctgttgttaagctagttttcgagttattagcacctattttctaggtttttattttagcacctaaaaaacctaaaattttttttttaaaatttattttcacctattctggcgttttgccgaaataaaaacaaaaaatgcacccctaagaattgatcttgatcctaaacttttaaaatatacccctaagaattaaaaatatctcaaaaaatcatctcaaaaatttttatagttattttcttgatgagaatttttgattttacacccctaaattcggactttttggccctattttcccatttttagggtgagttttttagaacctaaaacctaactattttggcattttttagcacctataaatcgcattcctactcgtaagataaaataaatttcaataataattttaaaaaaagaatgctcgtcgaagaaaaatttgcatttttgttcgcaaagtttcatgaataatttcacctcggattctcattcttaccagtgcaaatttttaccggctattattggtaatg

SEQ ID NO: 117533 - DNA, 58 bp, Heterodera glycines
ggtcaaattttggcacagaaaaaatgtcgatatttatcgcattttcaggtacaatatg

SEQ ID NO: 117534 - DNA, 86 bp, Heterodera glycines
ttgcgaaccgaattttcaaaggtggacagattcaaatttttgttaaaatttgaaaaagctagttggctagcaaaaattttaaaatg

SEQ ID NO: 117535 - DNA, 914 bp, Heterodera glycines
atagtaattaagatatcgattgataccaagtaagaaaaaagttatggcataagaaactaaggattcattcatgggacgcataatatttgatgggacgcataatatggcatgggacgcataaaactgactagaaccctaatttttgtcatcattggtgttacatttttaaaaatttagataaatgaaataaccaattctgcgatacagtaattgcatagttttatcgtattttcagaaaatcatcataatcattttgtcaatgtttgctgggtttagtgcgttcgacgtgtcatatgcggcggtggatgatgcagaggcggtaattaatggattttgtttgaaaaaaaaatctcttttgtccacattaaaaaaagtcaataggcgcatctgatcatttgctgggttaacaaaacgcataaaaatgcaacaaaaaaaaaatctcgtgtgttttgggttttttgaaattcattttttcaaattcaagtgaaggaattcttgaagggagcagctcttttcctccccgccggttacctccccgagaaattttaaaaaattttttttattaacttagaaaattttcaagaaaaaagcttagaaagtttttaataaggaaattctatgaaaaaaaaattttttgagaaaattcagcgcttttttggaaaattttttaaaaatcttagtttaaccacaaaaatttttgtttagaattttcctatgaaaaaactttctaagatttttattcaaaaatttctaatttagtattttttaaagaaatttctcggggggggggaacgatgcggggggggggggacgtagtgcacccttcttgaaggggtaacataggcaaaacagaaaatatcagttatattttttctttaaagctttgggtaaacagtgattttgaattaagaatg

SEQ ID NO: 117536 - DNA, 552 bp, Heterodera glycines
  unsure (1)..(552): unsure at all n locations
ttagcatttcaaaattttctttattatttctgtgccgaaaatagcctaatcaattcttcattaatcgtcaccggatttcgaactttattgctggtacttactcaactgatggaaaaaagtttatccccaaacacctccaanatgtatttgatttgtaattgtgcggacgaaaacgataaagaatgaatttcttggatttttatgcataaatacacttagtttttccaattttgagcatatattttggctttttttgggttttggtacatatttcagcatttttagcacataaaaaccccagacctaattattatcttttaaattttatcattagaattcattcttttaatatttaagggtgaaggaattagattttaaaaatttacaggatcttacttatgtatcaataaatcaatgacgcattttccgctagcgtatttccggtcacatttgtgaaattatttttcaatcattttttgtcatttaataatttgtttatattcaaatcattaaagaaaaaatttcaatattttctattttaaattaaaaatg

SEQ ID NO: 117537 - DNA, 209 bp, Heterodera glycines
  unsure (1)..(209): unsure at all n locations
ttaagataagatgacttaaatttnttaaatcctcatttcgaattttcattttcaataaatggtcctattctaatacttatacttaaattggaggctgtttaatcaaaaaggaagttgctatgtaatcaaaataatttcttctttctaaatgtagaagctggcaatattacaattcaagccagccattgtcaacactcgttgatcaaatg

SEQ ID NO: 117538 - DNA, 138 bp, Heterodera glycines
ggttccaaaaggccgcgacagtcaaatgaattcggatttgatgattatttattttagcatggaattagagagctgaactctctcctgcagaaccatgacattttgaacataaagccggagggagcggacatccggatg

SEQ ID NO: 117539 - DNA, 598 bp, Heterodera glycines
tttccacccaccgacaaaattgttcaccaaattcaatcgctcaaaaaacaataccctcatcttttcaacaaatagttctaccagacctccaacaatttcttcaaataaaatatccctcaaactttctctaaaaattttactcaaaaaaaatttaaaaaatttttcctcttctaaaacccctaaaaatgcctttcttttggttatttttatttttttttgaataaatgaattttcttaaatttataaatacagcagtgttggtgcatttctttaactgaactgataaacttatattttttaattaaattagaacgtaagttttgtttgtcaaacaaaacttcttcttatgttttgacagattgagccttaaaatgatcaattatataataaaatcaattctctatcttgaaaaccttagttcttaaactaattaaacaataaaaggaaaaagtgcgcttgtttttctcccatttgattcagtcgattagtctcgtttttatttaatgcattttcatacggaattttattcaaaaattttgagacctgtgaaaattatattcaagagattaaattaaattaaaaattttcagaaatcatg

SEQ ID NO: 117540 - DNA, 362 bp, Heterodera glycines
agtgtgtcaaatattatttaattttatattgtaagtaagtctctcacattatttctatgcatgaaattccgttttttattgggatgtcatatatttaaaaaaaatttcataatttttaaaaaatttttcaccggatgcccctgtcagcatcacgccaccaccaaaatttaagggtatttaaacaaaacaaaacaaaaattctttcgtgacaaatcgtagttatattatttatataatgggtttttcactttatttaaaaaaataaaataaaacatgaagccttattaaaaaacaaatattattattctttatttaaattaaaaatatttgtaaattttaaagatcatgttattgcacaaatg

SEQ ID NO: 117541 - DNA, 374 bp, Heterodera glycines
attacctattttataacagactaataattttgctaaatagttcattgcatttaatcaccatttcatattgttctaataaatttaaatattaatccgtgtgtcttaattttttgcatcccctttggtgtttgaatatacccgtaaatgtgacaagcgcatcgccggttagcggcatgatgcattagtttctcttttgtgccgatgcagaaatgccgcacatccctttgttatttgaatttgaccccgttcgcatcggtcaccgcagcgtcggaccttggctacacagatggccacgatcccgcctcatacaaaagggcccatgggaaagtcgccctctttttttcaccattcatttaccctgcaaaccaaaaatg

SEQ ID NO: 117542 - DNA, 365 bp, Heterodera glycines
ggaaaatttttgaaaatttgattaaaaatttgttgacagattttcactaaaaaatgatcaaattttgtgatttttatcatttttctaatgagaaataagagttttggcgcgccgctgagaacagtttttcatcaaattaccaaattttgcgattttgggccattttctaagaaaaaataggagttttgggggcgcggcggtgccgataggcgccgccggggaaaaaattggaaattttgatcatttataaacagtttttcactgaaaattagccaatttataggtaaaattttgaaaaattttatgggaatttaatccaattcttaggtgtgtaaaagtcgcatttcgcgccaaaaagcgaaatg

SEQ ID NO: 117543 - DNA, 326 bp, Heterodera glycines
  unsure (1)..(326): unsure at all n locations
tagaatccgaacagaattcaggtccgggcttcggaattggtcgaaatgggtatcagattcgtgatcagcgaccccngaaaatccccccctagaaatttttatatgtatgatttataatattttttttgtggtctgtaaacggcgtaagtacccgaatatgacaattatttgggcctattccgaacaccgaaaccaaattcgaacaaaaagttgaaaattcgaatttttgaaaatttgcttttatgttagaatctgaataaaaaggatcattttttggtgtttcaatgatttgtgacttctttcagctctttttaatcaattttatg

SEQ ID NO: 117544 - DNA, 516 bp, Heterodera glycines
  unsure (1)..(516): unsure at all n locations
gaaaagcctcaaaataatttntggaaatttatagaatcttctaatgcggttgcaaattgaacaaaaaaaattttgaaaacagtctcgtgtttttgggattttcagtctcggtctcgaggtcatctcttgaagtctcgagaaattttcggtctcgaacagcactacttcgttcgaacgattggccaagccaactttctccgtgattgtgccaccgaaccttttacagccccctcccccttctcgcgggcacattaattgaaaaagctccatctttcaaatttatgatttagtagtcataaatttagaccccatcgccccaaacattgtagcacttggccaaacaacgtttccatcctccactccgggttttggcaccacaccgctcgtcccatcgcagcagcaacagcagcagtgtgtgctcggcatcggcgggttggcattcaacggacgaatacagtactccaacggggcactgttcggaccgtacccgccgggcacaaccgccacattgacatg

SEQ ID NO: 117545 - DNA, 214 bp, Heterodera glycines
agtaaattttgggaaattgcccggggcaattcacacaaattgaacatccgaaagttctcctgctttggtcaacggactgcgaagcaaatcgttgcattaaattagctcaatttgttgtagcaattcctccaaaagtgcaattgaaattttcgggggggggggaaagatcaaagaatacaaacaaattgaattttaaaaaattgttttaagaatg

SEQ ID NO: 117546 - DNA, 640 bp, Heterodera glycines
aacaactcagcgcagagaaattttattggccgacgggttcgagtatagcttttaagctttgagccgaattgcagatggttagtctgatgtattttattggcatattacattgcattttacgctccaatagagcattttggcgtccatgatcaccctctatttctatgactagggatgcaatttatagttttttagaacctaaaaactaacgattttggcggttttagttactgtaaatcgcatccatacttatggcataactaagtttacttttgattggacacctcaaaatgcatttggccagtaaaatgcagtagcgccgcgttttgatcataggcattgaaatttatcgctgcatacaccgtccgccttattgtcctggtcgaatacatgtacgtgctgctgtacatcacgacaacactggacgcccatacaaaattaggggaggtctgcaagtttccgacaggaaatgtggaatatgagtgaaaggtgaaagtggaaatagaattttaagaaacaaaaatttagagttaagcaaaatttaatgaggacaaataacagcatcgaggggtggcatcgctctttcaatagccaattccgcttccttcatccgccattaagttattttgtcaaaaaaatg

SEQ ID NO: 117547 - DNA, 344 bp, Heterodera glycines
attggagtccaataatccgtataaaaaaaattgctattttgctttttagttaattataattttgaaatatttaaagtaacaaaatttgtcttttcaaataatttttgaatatttttataaatttttaaatttttttaaaattataatgtttccgtggtgtttaaaaaatattgcttagaaaataattatttttttattttaatatttttcaatctcttctatcttctcttcattcatttttaaatttagaattttattttaattttgatgaaaaattattttaattaatttttaattaaactagtggataaattaatcatttaaaatatgtttttatttagatg

SEQ ID NO: 117548 - DNA, 519 bp, Heterodera glycines
acatatagaggactgaatgatgtcgaaaaagattgtgtatttacatttaaattcttctgggtacgaataacaaaatactttttgtgggtacgaatttttgtttattgatataattgatgtgtgtatgagtaaatgtgatatatactatacacttaatgttaccgttgccaagtcaaactaatattaaaaaatcattttttgctataaaaagcatagtgaattatagctaagtaaattatgtcacgtgctgatgaaataaaaaaaaatgccgagagcttcaccgttttcgtcttgtgggtacgcagcgtgctggatgttggcactgcggggatgaccatttgtgttaagaaaaataagtttaaatttattttcttagagggttcgaaagcatgctggaattgcggcaagaaaggccacctagaaactagctgtcaccacacgccgtttcggtttaatagaatattaaaccaaatcatattgtttgtttagttatgtccctgtgggttcgtatccaaaatg

SEQ ID NO: 117549 - DNA, 459 bp, Heterodera glycines
atagacaaaagaaaatgacgaaatagtacaaaaaatgggagagaacggcagacggacagggagttgaaggatgggaaatcaatcagtggataatccgtcagtaatggacggacaatcaccagcaaaatttattttacgactctttttatcatatgattttgtttcatagactttgtctatgactgtatcatatgattttgtctatcatttcgcagaaatgccttaaaaagcaaaaaaaaattttgaaaattcttaaaaactcgacttcgagtgtccggcaaaggatctcgccgcttttgaaatgggttggaaagatagaattaggggcgcgcttgcccttttccataatgtgaagagatcaaagtgcttcgaccaggtcttttgctagtatggtgatggatgtattaatagaacaggatttaggttcgattttattggtctatgctgaccgagataatg

SEQ ID NO: 117550 - DNA, 190 bp, Heterodera glycines
tccattttcagggctagttgattcggcaggtgagttgttacacactccttagcggattccgacttccatggccaccgtcctgctgtctatatcaaccaacaccttttatggggtctaatgagcgggcactttggcaccttaactccacgtttggttcatcccacatcgccagttctgcttaccaaaaatg

SEQ ID NO: 117551 - DNA, 849 bp, Heterodera glycines
tttgctgcctcacttcgcttggtttcgcccccgcttaacaattgtttagtgtgcaaaaaacctcctgacaattaattcaggaaaattattgtgacataaattaatgataattattgcaaaccttataaaccaacgcgttggcaaacacggcgcctcgcgccacaaacgaattggcaaagttgcgcttgtttatgcgcttaaattttttttccaaaaattatggttaatacctgaaaatataaataaattaaacatattttaaaatatggtataaacatttaaaaataaaaacaattctacaaatttattaatcatagtattgatattttttagccgggcaaaaaatagcacaattaatttatttttaatggctaccgatttttctctatttctctaacacaattcttttcattttttctctctctctctctctcacttttctatttttctatcgcacactctcctccctcactattttctctctttatctaactaccgtatttgatctaattatcccccatgggggattattttttaacctcctcatagactggggataattggagactgtgtgattatgatagagagattatttttcaaacgcctcctagactgggggataattagagactgagggattaatggagattggtgggataattagagcaaatacagaattttctctttctcaaccccatccaataggtttgggtttgtggaaggggatgtcagagaaaaaaatctccaatcaaattatcgggcgaaaatcaatcgataatttgattgggaatattatctactactaaccaaaaatttttccaaatccctcacctaattgacttgaaaatg

SEQ ID NO: 117552 - DNA, 146 bp, Heterodera glycines
atatttggatcttctaaaggggacgcccgtaactcatcagtccgttatatcattccatagattggaaagaccttacttttcaaattgaattgaatgattataattctgattttaaatttaaaaagcaattaattattatctaaatg

SEQ ID NO: 117553 - DNA, 93 bp, Heterodera glycines
  unsure (1)..(93): unsure at all n locations
catttgaagtaaaaatattacncattttctttaattactgttttttaaccgttaaagtcatgcccgcggggatttgctcagttgtacacaatg

SEQ ID NO: 117554 - DNA, 67 bp, Heterodera glycines
ggacaaatgcgaggaggaccaaacaaattttgcatatttccaatcgaatgaggacactaacggcatg

SEQ ID NO: 117555 - DNA, 337 bp, Heterodera glycines
ttttacaggaaaaaataaataagataacaaaatacaatattaaaatgatgaataatttattttatgcaagataaatattaataaacaattcttaaataataagtaaatgttgttatcatattacttagcaaaacatacattttttgaaacgaacgagcaatgcactgatatacatttgggctcgagataaatataaaatatttaatacgtaaatatttatttacaaaaataacaaaaaatatatggaacattttgtttgaatatattttcagaaaactgtaaattcattaatacgtttgaaaaaattgtgtgaattctgaaggcgagttcgcgcatg

SEQ ID NO: 117556 - DNA, 1003 bp, Heterodera glycines
  unsure (1)..(1003): unsure at all n locations
aaaacaaaatagaattcgatagagggggtcaaactatgggcctatgcaaaatttgaagaaaatttgaacatagggaaaaatttttcaactaggtgaaattttcaataattttaattcttttttagccaagtccacaatttaagggccaaaccaaataaaatttacaatattctccagaattttcccttncaaatgagcataanatggttttatttgctctagtattcaccaagttataagctanaaaaattccataaaattgtcgatgctgtacgtaactaactcttattgaaaataattttttttgacacgaaaacttttattaataaaaaatatttctgcattcttctttaaaagaagaaattgaaattaacacttgcacttggagatcaaaaccaaatcgaaagtgattgttttttatttgtgtgcatgttttagtgaaaaatacctacctaaattgttttttcatgagtgaaaggggatgagatttgaattttgttaaaagtcgaattgatgatataacaaatattttgatttttcatttgtttattctatttgcaagaaaggtaaaattttgtgattttgcttcttaaatacggaaaattaattttctccctgctaaagggttttatggatcaattaatgaaattttagcaatttttagggggtgtcgtaaacatatgaccatgactatccatgagggttttaatgaagtgaaacaaggcccgaagcagccgagaaccccccccccccccaaaaaagacaaggaactctaataaataagaaagaaatgctgtaccaatagaaaacgctaaatattttgaaatagaaagacgattaaaatgataaaacacaaccgtccgctagtaataaaaaaaggaggtgattttgttttaaaaaaattttgtgtcaattcaaggtgcaaatcgtacaaattttcaaaaatttcactgtgctgcttgttggcaaaattgcaataaaagtgttaattaattatcgaatg

SEQ ID NO: 117557 - DNA, 1003 bp, Heterodera glycines
tttcgaggacccttgccatttaaggacgaatgggagacctcacatactacctatttaccgcaagtctttggtaatagacggtagtagccagtccccctctccaatttttcgaaatttttttttttcataaatcagaaagaattttgagactgacacagattttaacccactgaacattaagggtgtcgggaacggcaaatgaacattggcattgcacaggcatttctcaacaaagtgaaggtcggtttctgtaccgccagttccgtcccaggcatgtttaaaacatcataacttttttcacagttggccaaattttataaatttggcatcattcggaagctctacatatttaaaagcagtgataagctatttctaagcgattgaacaacttttaaaaaggttgcaacatgaattctgcaaaattcgattttgcatatttttatttacaacttttttacatgtaggtatatagttgtgatttttggaaaccaatagagcttgttaaaagctctcgaatgatcccaagttttttgaatttggtcaacaaagaaaaaagttatggtgctttaaacttttaatctttctgtctattttcataaaatatacttttgaaaattaaaaaaagacgaaataaaatacaatccgagcccctgataaagtaacaaaaattttaaattagatacctaaatggaattataaacagtgacttttcgcttttatacccaaatttatatgtgccgacaaattttccgataattcattttcctttttctgtgaaaatcacactcaaaaagtgtataaatatggccacttttcggctcaaaaatcattccttccaatatttttttttcattttaatttctatcgtcaattcgtcaatttttcttctaataatttcacccattcatttcatttagcgttcacacattttgccatctgtcaaccaatcatcatcatcgtcaacatcgtccgtcaacagttcaacaacaaaacgttcaaaatg

SEQ ID NO: 117558 - DNA, 332 bp, Heterodera glycines
atatttccaacctattaagccattatttatttgctttacttgagagaatttatgctgggcatcacttcatttttgggccgattcgatgcctcgccaaattaaataaattcagagcaaagtggtctttgcacaccaataacatttagcggcccattatttgggacaatccatcccgattattatacatatgtttttaattaggatggattaatggctttttgatcaatccgtaaaaatgagaaatttgtttagccatgaaaacatttattttgttaactttaatttttctgaatttcattctgaactgctgtgccgcaaggcaattaaaaatg

SEQ ID NO: 117559 - DNA, 328 bp, Heterodera glycines
tccgccacaaaagatccgacgaatggtgggacgtgctgttcactagtgatgctcgagagtctcggtctcgagtctcgactcgagaaaagtctcggggttttttggtctcggtctcgggttttaaagtctcggtctcgattttcgagactcgagaccgagacttttttacacccctaatgattgggcttttcataataaaaaaatgagcttatgaatatgaatttaatattgacattatgccaattttaaaataaagatgaaatattttattcgtttcatatacatattatatttgtagtccttaattttgaacttttttagagtaatg

SEQ ID NO: 117560 - DNA, 823 bp, Heterodera glycines
tttcggataattcggcgctctttaaagttgcaacttattggtcattattttatttatttacattgaaattgaaattaaataaactgtcgacagttttcatataatttatttttgaataaaaaacggttttttttgacacgatcattttttttttgtgtcgattttccaaatttttgaatcttctgagccttttatgaattttttttatggcaccaaattttatcttgcattatcattcgaaagcccatagaaatgctatcaaatagtgtgcttttttggtgaaagtgaaaataaaaacaattttattcgcttggcattcccatgccgctttttctcttcccgtcgcttttcacacttcaaattgccattgcaggtccaacgtatacaattaaaaatgcggcgatcaaaaagcattgagcattttcaaaatgtttctctttttgccccattcgctttctgtccgtcggctttcacaccgctcaccaaaatcaaagacaactgaaaaagtgtttgtattttcgttttgtccattcttttgcgtatgacaacgccaacaaattcaacacaaaattccccgtcgcttccctcgaatttcttttctgcgccgggcggcgcgtctgctgcacttcccgacagtctgttgcggaactgtcccattccgcttcgattgaacaaccgaataatttgcaacccaataattgggcaaggggagaacgaacggcgaacatccatagcagcagaggatgaaaatctgcagagcattctgaatggcagtgcagctgagcaattggaattggttgacgaagtgacggaggaagaaatg

SEQ ID NO: 117561 - DNA, 290 bp, Heterodera glycines
tttttagcggcgggcagagaagagaaaaatagtaaggaaatttgagagaaaaacttctctcaatttaacttgatatttccaaattgggtttaaaagcggaaattatcgcatcgattttttccataatgttccttttttcatttatttttattctcaatcgagccaattttttttaatactttattttcattcaaatttagaattttgcctgccattgtttattttacattgacgaaaatgccgacactttgatcgaatcggagggatttttgcaaattgaccaaaaaatg

SEQ ID NO: 117562 - DNA, 333 bp, Heterodera glycines
ttcaattacagccccgactcacctgattacagctcataaagcatgtaattggacgaacggagatcgtaattaaataatgaaaaattcggtaaaattaaaacgttgaaaatatcagatcgaatctaaagaaatctttctccgactgaatgtagtatcgaagttccaattaattaatcttttaaattggtattattggaacccttagatattaaaaactgtttttgatatgattgataaatttaaaaataaccccttatcatttcaattttgtagccaaacagtcaattatttttcgtttgattataattataatttaaactttgtagcccaatg

SEQ ID NO: 117563 - DNA, 676 bp, Heterodera glycines
atctaattttaaaattaatcttagtatttaaaaaaatacttttcaataatttcaaattctttatgatggttatttttcaaatatttttcagtaggaaataatctcggtttcgattaaaaaaataattttttttttataatttttgaattctacgaaattaattgagttttaaattctcattctgttggatagtgaataatttgaatttatggcgatctgacttattgactttatttgttatttctatgtccatccgccccctccctcgtccataaaagtggacacctcctcccactttttgttcttccctttcatcattcatttatttatatttccaatttgccctccgaccgaatcaataaaattatttatttatttctttttctttgtgtgttctaagtggaagaacacaacaaattggcgcagtcagcagccattcttcatcactgaggacaaggacagctgcaaattcaacaaaaaccaatagcacccaggtggtgtgaggtctgctaagaagcagtttaactcaacaaaaaaaccaatagacctaagaagggtgaggttccgcaagaagcggtttttcaacaaattcgtcagcttagcaccaagacggtgtaagcatccaccaggtgtggattttgtggaatttttcaacaatttcaattgacggacaatg

SEQ ID NO: 117564 - DNA, 213 bp, Heterodera glycines
ttaccctcagctgattcgatcaaccatcgcgtttttcgttcacttttttgtatcatcacagtgaatattggaggctatttgatctgtgttttttttattgcgctgatcaagcatttcattccgtctccgatcactgcttggtttgttcatgagatcaccgcaattttattgaacattggcgcggcatcaaatggacccattctatacattatg

SEQ ID NO: 117565 - DNA, 527 bp, Heterodera glycines
  unsure (1)..(527): unsure at all n locations
atttcgattttgaattaattaatttttattaaaattttacaattgaaattatntttttcaaaaagttccatttatccccccgggggataaatggagacggggcgataattagagataattcagtatgcctcctaaatagtcagcttgtttttctttttcgtgtccaatttgaacttggtcttcgtatttgacccattacgcatgagcaaagggcgtctcaggccaacgtcccatataccaaattttcatacgtgggtccaagtttttctctggccactttatatattttttgcttttcacatcattgctttttcaaaaaaaaacttgttaatgaggcatagagggataagcgctgcctggaaaattcattgaaattttagtgcaatttgtcgataaattatttgactggaacattactgttttgggcaaaaccccaggcctggctggatccacgcataatcagttccacgttgatctcttatatagtaatttgctgattcagtatcttcgctgggaaacacaacatg

SEQ ID NO: 117566 - DNA, 429 bp, Heterodera glycines
ctttcatttttatgtatattgccaaaacggacaaaatgatcacgacaaaatccgacatgataaaagtaaactgctgggccataaaaacaaaatttaaaaataatgattaagggtttatttcaattttccaatccacgtgaatttatggcaatattcaataatttgtgatttttcatttttcaataacaaaattttgtcctttttgccgtctcgcagaattatgggtaattattgcattcattaaaatttcaatttgtttcaagacggcgcctgttgagtattacggccgtactcaaaattttttaattttgaccaaaaaaaaccacaaacatatttatggaaaccgtcgatttcatttaaaattaatttttaatggtaaaataatttttttttttaatcatttttgcagcttcatgttgtccctagatg

SEQ ID NO: 117567 - DNA, 1003 bp, Heterodera glycines
tgaccggaaaattctgaaattttgcccgattttttaaacaaatttttcaaaaatgtgattttggatcaattttgaaaatgttaaggaaattttgggccagaatgtgccgaaaggcgcagccgggggaattttgagatttttaatgaaatttcttaagaaaatagtataattttttggaaaattttcccattttaattaaaaaagctacagaattaatatacaaaaccatattaaaaattattgaaatgcgaaaaatatttatttacctatatatttgttgttaaatttgttgttaaaaaaattaaatgcaagccgcaggattcgaacctgcgccctccgaagaggactgcgacctgaacgcagcgccttagaccactcggccagacttgctgatgaaaattacgaattacccttcattaaaaggcaattatttaattcatcaagataattaaatcagcagagcataatgaatgaataatgataaataagaagcatataaagaaaacaacttaatttgccaattagtggaagaaaaattgtaccagaatttagtaaggcataatttcctgggaataatgttttaaattttttataaaattttaaaatctcagaaagtttaaaaaatactcggaccatcggacaaatcggacatcccttaagaaaaagaatctaaattttttattatttttgatgattttgcataaattagaaaattaaaattattttaaattgtaattttttatggtacacaacaagaatttttaaatatttctcaattaggtaagttgtttaattataaataatagaaaagtatttaaataaattttggcagaaaatgaaaaaaattgattttccaaagcaaatcccgataatcccgagtttttaaattgtcaaaacaacaaaaaataaaattcgttcacagaaaaaaaagtggctcaagtacagtttatgcgtccattcaattttttatgcgtccaatcaaaatttttatcaggtggctatg

SEQ ID NO: 117568 - DNA, 238 bp, Heterodera glycines
aaaaaccatgacaaaatgttttcgggatactctccgattaaatagtgaagcccgagattttgctgctgcttctcatagggcaattacggaggccgaaaaaattaagactcgtcatcctgaggcaccgggtatgaaaacgtggttcggtaggctattagaaggggtgagaaaggtacaaggaatttccgaaaaaattaacgaagaaagacagaaaatagggcacattagaaaagaaatg

SEQ ID NO: 117569 - DNA, 249 bp, Heterodera glycines
tttacccaaattttagtaaaaaaaaaattttttttccattccttgagcgggattcccgttaattgccatcggtctgtgccttccgccattttcgtcattttttccaaattttcgaaaatttataggcctcgtttcttccgcgaagtattggcatttttgttgggcgctcttcagctgtgcaaaaatgaggcgaaagaagtgccatttccgtcgatgaatttcccaatttcgctgccccatcgccaaatg

SEQ ID NO: 117570 - DNA, 704 bp, Heterodera glycines
tcgttcattctgtcatttattcctcccattgcacttcccttcgcttgaccatttatttattatatttgtgctccaaataaatatttgtcttttcttcatatctgttgttctcggacacaacagattttggcgcagtcagcagagcagaagcgaactgaagctgagcggcgaaagagctgagaagcagcaaaatttggattgctaattccgagttggaatagctgtttccaaaatcgtcaaaaaggagaggaagctaattccgatttggaatagctgttcacccaggtggtggcactctcaatttatggtgttaatccgggacggataacagccagcgacgaatcgccgaatttggaggaattgaattgtaatccgggaaggataacaatttcaattactgatcgaggccgaacagagcaagagaaaaatttgattggaaggtaagactggaaactgagtggcattgttaatccgagttggataacattggccttcatcgattttgattgttaatccggacggataacaattaattctcactgttaattcgagttgaataacagttgaccagccagcaccaattttcattgttaatccggtttggataacaattgacatcactgtaaatccaagtcggattacagttaatcagcagcatcttgaatttgatccgagtgggacaaattaagaaaagtgaaagaatg

SEQ ID NO: 117571 - DNA, 657 bp, Heterodera glycines
aaaaatgtctatctctcttttctcttggggagttgaccgcaaacatggtgccaacactttccttctctagtctggctctcccaaacactctcacgatatatgaaatgctaacgaaaaaaattctcgcccaaaaaatggctatctcttttttctcttggggatttgaccgcaaacttggtaccaccactttccttctctagtctggctctaccaaacactcacacgatatttgaaatgctaacgaaaaaaattctcgccgaaaaaatggctatctcttttttctcttggggatttgaccgcaaacttggtaccaacatttgccttctctagtctggctctaccaaacactcacacgatatttgaaatgctaacgaaaaaaattcttgccgaaaaaatggctatctcttttttctcctggggatttgaccgcaaacttggtaccaacatttgccttctctagtctggctctaccaaacactcacacgatatttgaaatgctaacgaaaaaaattcttgccgaaaaaatggctatctcttttttctcctggggatttgaccgcaaacttggtaccaacattttccttctctagtctggctctaccaaacactcacacgatatttgaaatgctaacgaaaaaaattcttgcccaaaaaatg

SEQ ID NO: 117572 - DNA, 384 bp, Heterodera glycines
ttcattggagggttttagcccccccccccccccttagcctagtctccctcctctccctggatacacctttgtttcggtgtcggtcagaagtgagttgttaggttttcagatggaagttttggtcgggcgcgagaatggccgcgtcgaccatttcaattctttgactgaccaattcaatgcgctttttgctttaccacagccttccgaactcaaaggaattcatcgcatcgacgggtttcgatttcggacagcatttaaaacttgtggtaattaagtgatcggattctgactgctcaagaatgtggcactttggctgtttggagcgcttctggagaacggcaaacgaccgaaaattggacggcgggagaaaatttgttgacgatg

SEQ ID NO: 117573 - DNA, 122 bp, Heterodera glycines
ctgatgggcgattgcacataaaagtcaagggacaagccaatgtgaatggcggtttaatgcttaagggcactgtgaagtggttgagttttgctatgttctttcttttggtgtgtcaaacaatg

SEQ ID NO: 117574 - DNA, 60 bp, Heterodera glycines
actgaattaaatatgataacggtttgataaagcatataaaaattaacaaaagatacgatg

SEQ ID NO: 117575 - DNA, 463 bp, Heterodera glycines
tttttcttcgacttttctatgaaaaaatttttctaagatttttttttgaaaaatttctaagttagaaaattttttccccggtggagttatgtctcggcggagtttcggctggcggagttttggggtgcaccggttgaagcatgcgtgtgttcatccctttacataatcggaaaacccctattaattcgccaaaaaaaaacgaaaaattaggcttttactttgcgtgaaggacacaattttggctgaacaaaggcggcgccaaactgaaagtttccagcttctgcttgttttgccttgtctttattacctgattaggctgttcatttgtatttgtagctaaataatgtagatttttagaaaacaaagggtcccactttggttttaaacagtaaaagtatcgaatttgataattcaataataaaattgtcttaaaattcttatcttcagcgctcgctaaagcatg

SEQ ID NO: 117576 - DNA, 331 bp, Heterodera glycines
aaatatactttgtttttcaatttgagtctgttggcgttttgttttacgccaatcattttttggcaatttttttccttttttcccctccatgggccccatcgacaaaattacaaattataaaagccaaaagttttttgaattgaaacatttaattacccattcgaataccttatgcaatgcataaattttgtgtcggcttttactttatgaatatacattttaactcatccgcatatttatgaaattgacataaacaatttgtcttctcctccccattatttttattgtagatagagaaccaaatcccactcactgtaaacggttaataatg

SEQ ID NO: 117577 - DNA, 1003 bp, Heterodera glycines
ttattttaagggcgaagatgtaaaataaagatttttaagggcgaacacccaaaataaggatttctaaggtcgaacgaataagggcgttaaaacgcaaaattttcgaattttgttcgaattcggttcctgtgttcgaaattgatcgaaatggggtacttatggttttcaggggcgctgaacacgattataacatctatttagaccaatttcgaaccccggaaacggattcgacctaaagtcgaaatcccccaaaagtcgaaaattcaaactttttcaacaatataatccttttctggagttcgaaattggtctaaatatgtatatgttataattagggccgcaacttttagtgaaaaaactttttttttgctcaattgttttgaagaaaggagctcaaaaaacgcatttctgcattaaaattttttcatttggacgtcacttttcgtcactagaaatcactattttggcgacttcgtcactaaaatagttaaaaatcactattttggcgttttgtcactattttttcactatttcgacattttttgaaaaattccttaacaaaaatgcaataaaaccaaaaaatacacccctaagaatctacctaaaaaaatttcaaaaaaatacacccctaagaatcgagctaaaatttttcaaaactcctatgaaatgaaaaaaaattttctcaaaaatttacttggcaaaaatttttaattttaaaaaatttttaggtaactattttgggttttttggtcttaaaaatcccagtcctactcatttgcaactgcaatcagtgaataaaaattatttttgctcaatttttggctgaaaattatgtcactattcgtcactatttcggactttttgtcactgtttcttcactattttgggatttttactcactattttagttaactatttcgggatttttcgtcactaaaagttgcggccctaataatgagtagggagtgtaattaattatatggatataaaatcgcgaaatatg

SEQ ID NO: 117578 - DNA, 577 bp, Heterodera glycines
ggtgagtgtgttcaacggggaacgaacgaagtcaggccccgtagccaccatagcgaaatgaaaaaatttaaaatattttttttttgaaaaccacacggaaaaaattaaattgcggcataattgattctttgaatttcacgtatttcttgtaaatgatgtcggatcaaaaaatgccgtatttcttttcagtggttaaaataagtcagaaaaaatattaaaaaaaaattccggtacttgtgtagtttacctgatacttttagcatacattttttaaatgcctataaatgtattcatttacatagcttttttaagcatttcaacataattaaaaacagaattataatatttgttctcgaaattttataaatagatgcaacttgagaccaaaagtgataaaaaacatcgggccttggaatcgctttcgccataaaaattcttccacatgcgaattcaataagcttctgtgtgttccatatctttttttgtgttctgccttggtcacgaatattaaattcttttaataattccatgctaaaaaaacaatgtaaatgaatacatttataggcatttaaaaatg

SEQ ID NO: 117579 - DNA, 145 bp, Heterodera glycines
tatttggagatttttagcatgtaaaatcctttcctttttcaaaatgcactttcttttttctctgcctcattgttttctttttttctgcttaataaatgatttttaattaatttccaaagacaggcaaacacaaagtaaataaatg

SEQ ID NO: 117580 - DNA, 268 bp, Heterodera glycines
  unsure (1)..(268): unsure at all n locations
cttttgctcggcatacaaaatgacaatttgtgggcaaccctaaagaggcgcacncaaaannnngnaacncccgngaaagctttatagcanccagnngcaaaaaagnnanngccagaaangcacaaaaaagcgacnnnggaaaacnnnnacggacaagnggaanccggannnccagnggggaaagaaagagcannnagggggagcgaananancaagagnnncaaannggnnggngangaaaaaagagacacggnnaaaagtcaaaatg

SEQ ID NO: 117581 - DNA, 284 bp, Heterodera glycines
cttgcaaaaccatttttcatgcaaaaatattttccaattggcgcttattagcaccgtctttttgtttcagtttcttcccaattttggactttggtaagccttcggcatcgtccaacgccattgtcaaagtgggcaatgacggcaagcacaaattttacgtcaacaaagaagtatgctttttttgtgggaaatggaggggaatgaatttaaatttaaacaacaacaaaaaaaaatttccacttaaatcccgttttaaatgctcttttttgcagttgctctcaatg

SEQ ID NO: 117582 - DNA, 1003 bp, Heterodera glycines
tttggaaaattggctatctcattttctgctcaacagtaataggaattccaaccgcattctcagaataattacgccgatactaattgttctggaatttgtttctcggcgcgtttgtttgggaaaaatttggaaaattggctatctctttttctgctcaacagtaataggaattccaaccgcattctcagaataattacgccgatactaattgttctggaatttgtttctcggcgcgtttgtttgggaaaaatttggaaaattggctatctctttttctgctcaacagtaataggaattccaaccgcattctcagaataattacgccgatactaattgttctggaatttgtttctcggcgcgtttgtttgtgaaaaatttggaaaattggctatctctttttctgctcaacagtaataggaattccaaccgcattctcagaataattacgccgttctggaattttgtcctgtgctcaaagctcatcaagagctatggaattataccatatttgttcggattaaatcctttaaaatcccccgtatttcaaaaatggaaaaaccgatctgtcggcacatgcaaatctgggcttttaggttcacccccttcaaaaaattcagctcttttaaattattttttttttctgtcagacatttgttaaaatattacaaaaaaatggacacggttgaccaactgtccgcttctggcaccgcagcacaaagtgttgttgacccacatgcagccgctcttcaagaaggcaagcgattttcaattaatttgcggcgcgctttaacaaaaacggggaattggggactgctgaacaggctggtggcttagctgccgccatgggatgggaaaatcggaatcttttggccatattttgaataaaatactaatttttggttagataattggtcttgaatgaagcgatgaaattaggccctatggggaaagatttggaaatttaccgaaatcgttaagataattagtacattttcaggaaatg

SEQ ID NO: 117583 - DNA, 140 bp, Heterodera glycines
gccgcgacatttgcccgttccagggaaaaaaggcatttgcgcctctgattaaaattaaatttatgtgctttattggataagaattgatagatattcattattaattcctttttcgaagcctgtcatgtcaattccatatg

SEQ ID NO: 117584 - DNA, 138 bp, Heterodera glycines
cccctcccccctcacattcatcccattttctgcgtccgttcactcaaaattcaaacgaagaaacaattggaaggagggaaaacgactgataactcatcaaaagtgattgataagtgataagagaagggacggcgaatg

SEQ ID NO: 117585 - DNA, 324 bp, Heterodera glycines
ttccgtgttgctccgtctgttcggaaccgtccaatggcactttttatttttacttttttacctttgagtgtattcaatttaaactgaaattattttccattttggatagttgatttttatattaataaatttattaattttggcattttagctgacactttgcactaattactctttcccatatgcagtcttcttcctcttctttctcctcctcctcttcttcctctttctcctcgtcactcttctttctgcccaataatacccaatcatcccattatgataatgggtcgagccaacaaatgatcattagtgcttttgaccatg

SEQ ID NO: 117586 - DNA, 51 bp, Heterodera glycines
atcaaatattttcctttaaatgtttttagaattaaaatcgaaaataaaatg

SEQ ID NO: 117587 - DNA, 476 bp, Heterodera glycines
aacggattcgttgcgaaagattttcaaaattaataattttaaaatgtgagcaatacgtttttgtctagttagtgatcttctctttgtatgtcgcagtgtattattatattatgtatattattattatgtatttagttaaaattacttttaaaatttgataattaatatacattcccttttgttaccattttgatgctaattaaatctttgaaaaatgcatgtatttattacacgaaagttagagatgcttacaaattgattaattgctttgataatgcgaagattgagcattaataaataattatttggtgttgagcctgatgagaaaaaccagatcaaaaaaagacgattgataggtgcgtcagcgatataaaagcaattatgctatcaattaactgtcactttttcacagagcaattactcaccagtgaatttcagctttatacattcccgcatccaaactaacagcaaatatg

SEQ ID NO: 117588 - DNA, 1003 bp, Heterodera glycines
tttttgtggacaaatctgttaacaaattgcaatcaaattttagatttttcctccggcggcggttacaggcaccgcctgactccaaaaatttatccttttcattaaaatttggcaaattcgcaaaatttgccatttttatacaaaatctgtgcacatattgcactcaaatttttaaaaattcgacgcccctgctggacaccctatttccaaatttttggaaaattttaccacaaaaaaaaacagtgtaaaaacaaaaaattcgccgacaggaaaaaatttaactcaaaaaattcacggtcacggtcacgaaaaccgtgaattttacgggttttttggatcacggtcacgattcacggtaccaattcacgatcacggtcacggttcacggtaccaattcacgatcacggtcacggttcacggggtcaattcacggtcacggtcacgattcacggttcacgggttttttcagtcacggcgcatctctaccaaacacagaacagccagtgaaccctttcgtgcaatatgactgtgcagattacaaaacgtgtgctggtactgttaattctctaattacttagtaatttaaattgctatttaatcatttagacagacatacaaattgtaagcaattatctctaattacttattaattcaaattgtatgcgcttatctctaattatttactaatccaattgtatacattatttaataaattcaaatttgaatctaattattccgtaatcgttttatcattgtaaaataaagattttctttgcatgtgctcttttgtatggccaaatatgaaaaaaatcaactaattaatcaatttattaaacaatgtaattaattagtgtttagtgcttttttaacttttaaaatttattgataattaaaacctttccgattacaattaattaattaattaaacaaaaatttaactattattacatgaatgaaaatgctccatttaaatttttatttaaattactcccaaatgtaaatg

SEQ ID NO: 117589 - DNA, 53 bp, Heterodera glycines
ggtaacacaaccaaaatgccatgatcacttgatttttcaaccccccccccatg

SEQ ID NO: 117590 - DNA, 1003 bp, Heterodera glycines
tcatttccaaggacgtccttggcatccaaggacgaatgggagcctgcagtatttttgacgaaaattttcaattttacttattgatatcccctccaaaactcccctcacccaatttcccaaaaaattctttacattttccaaaaacagttgaaaattgttaaaaaatggtaaaatttcaaaaatttccccagcagcgcctgtcggcaccgccggaatcctcctgctccccaaaaattaacaaaaaaaagcgtgtcgcagaaaaggagtgaaaagcaaaaaaaaaaaaaaggtcgtccgtcaccagtggcggtgccccctcgaagccctaggccgaaattccctgggcggtcagtagggctgggaatttaagtcaaataatttttttttgttgcctttaaatgaccttaaaatgactcaaaagtgttctacactttgtttgaagcttcttcattttttggtgactttttttttgacttttttaaactttttgggttttttatgattgaagaaaattccgaaaaatgagtctatcttcgggaagttactgaaatttcttataccattaggattcaaataaagggattgaaaaataaaataaaaatctggcggtgtaacaattttgaaatatttttatttcgctaaaactaattggttttaaattacttttttgtgttactttttggctatttttccatttgtgccatccctttttccctccaattgttcccattgtgtcgtctctatttttccccttcggggggtttaattacccaagtttgagcctaatgataaattggattatttctgcgcactgctccttgggtctttatttcaacaacttgctctgaatactctgatatcctctcgccccgacccccaacaaaaaaccatttagtaataggtaaaatctttcctaaactgttaagcttttaaatgatataatatgcgaaaaaaatacctatatttatttttacaattttagcaaaaaaaattctctaaaatg

SEQ ID NO: 117591 - DNA, 62 bp, Heterodera glycines
aatattatgtttattttaacaaattaattattttaaatattttaaggcaataaattgcgatg

SEQ ID NO: 117592 - DNA, 428 bp, Heterodera glycines
  unsure (1)..(428): unsure at all n locations
aaaaaggctccccttagtttttataaaaatcaaaatctgtcgatttnaactcgcgccattatttcttaatgccctgcaganttgtcagtgatntagacaacgnnattanaatttcaaaatntaaatttttattcattttttccatttgacaatttttattgcttattcacgtgtattttatgcagaatttcggccatataatttaatgtgatggaattgttgaccatgcatgtaaattgcgttaaaccaattagttcaaagattttgtgttacatattttgatgaacaaacaaattggaagatgcatagcaaagttgtgttggaattagttgcacacaataaatgatggtcaaaaatggcagtaatatttgtcataattcaaaaattgtatttattcaaaaaattattattattcaaaaattctcatg

SEQ ID NO: 117593 - DNA, 379 bp, Heterodera glycines
  unsure (1)..(379): unsure at all n locations
ctgcannggtcctttttccagaaattttcagcggatacccccctccccccccccaaaaaaaatttttgtacatttttgtggtctcacttaattaataaattttgtacagagagagtacaattttatttaattacgttcattagatgtagtaattaattgcgacaatatgttattttacaagcgtttttttatcaattggagaaaaaaaacatgcaaaaataaaaatgggttgtatattttaaaatggtcttatcaatttacaataaaatgggaatgaaatcccattaatttttggtcactattctgacaaaataaattcgtaatttgccaaattaaaaaaaaattcaaaaataatttttcagccgtgccttcctcgatg

SEQ ID NO: 117594 - DNA, 895 bp, Heterodera glycines
ctagggcgttgaattatatgaaaatccatatttttttcctggactgtgggaggcctgaaacgcacgaaaaacatatttttagcttggtttggagcttctaggatggatttctatatccatattttccatatttgtccatattttggcattttccagaaaacctctattagaacggcccccaacagctaaattgacctttttgaccccaaagaccggaaaatttttcaaaaaatcaattttttagcaaacatttttcgagaatttgaatacatttaaattttcttaaaaattggtaaatttatgtcaaaaataaggaaaataaaactgaataaattttagctttacgtgtttttttttcttctaaaatgattattaacaatgtatttagcccattttaaagacttttactttagaaattttgagaaagtaaatccttaattttgaaaaatttatgtatgtccatattttgccattttatgtccatatttcgcgattttatatccgtataattaaacgccctaattattaccatacatgaacaaggggtgcgccggcgcaccccccccccccccccccctcgttcgtcgtaaggggggcggctgtaaaggaggggggggggggtcgtcgtggtgggggtcgtaacgaagggggaaaaagttaacatttgaacaatttccgtagccgaaacccatagaaaattcaaaaaattttcctggcggcgcctatcggcaccgccgggaccgctccacccctttccacaaagttttttggaaaaaaacgcgccgcaaataaaggtggtttgaatagcaaaaaaaaaataggggccgacgtatgaaaaattggtcctggcgctaattagtattaaccaattcgtttttttttagatgaattcatg

SEQ ID NO: 117595 - DNA, 702 bp, Heterodera glycines
attctgtttctgtgtttacatcattccctctccttctcctttaattatttaggccgttttcggaattgctcaatcattttttgttgttccttttacataatctttttcggcattataattttttcgtttccctattttctgtgttgcctttctgattctttctcgaatattgtttcttttcactaaaaatttttttgatctttacttttcggtgttatgacactcgtacaataatttttaccattttttaaatttttctaaaaaattaaatgaatattttaaaagttttttattagaaaaattatatgacttgccattgtacgagttgctctatttacccttgcttctcatcccatttcttctctgattaataaatttgtgtaattgttctttcttttcggcacttgtcctaacaaccgaccaaaacaccccacaaaagtcccatttgaccaaactccacgagtctatccgaggcaacagctgcaaaacgaaagccaagacctaaacaaccgctgataatccatcccatcatcacacggctgaaaccctcactaaaattacccgtggggatggtttttagaagaaatcgttgggaagtgatcaatgaaagtgtccacctaatgggactaattattagggagggattctcaagttgatttatggggcctttcttaaattgcaattttcgagaaaagccaaatg

SEQ ID NO: 117596 - DNA, 120 bp, Heterodera glycines
acaacataaaattattacttctaatgccataaaacaatccctaaacagcttaaaaaattgagggtcacattaacattaaacccttttggcgttctgttaattgttttccaaattcagatg

SEQ ID NO: 117597 - DNA, 73 bp, Heterodera glycines
cgttcgttttaaataataaccattttttcttcctaaccctaaacttgaattttaaaaaatatatacaagaatg

SEQ ID NO: 117598 - DNA, 286 bp, Heterodera glycines
ttttcgagatcaacgtccctaaaaccccaataacatgttttcaaaacctttttttccaaaaaggggtggggaccatctgcagtattaccagatcagaaatcctctaacgtcgtctaaaatctgtgaaaattggataaaaaattcctatgctttttttaatgcgcgattcgcgtactgctaccgcggcacccttaaccttcactaaatgaacggatggatgaaatggataagatattccttttttttctaaaattcatatttatagaaaatttgttttgtcaaaatg

SEQ ID NO: 117599 - DNA, 75 bp, Heterodera glycines
ttagaaaacaattacatgctagggaatattgagacttgtgcaattaaattaattacccatattataagaaaaatg

SEQ ID NO: 117600 - DNA, 915 bp, Heterodera glycines
ggatcagaaagtggaagaggaatagaaaaggaaacagaaagtggaagagaaagtggaagaggaccagaaagtggaagagaaagtggaagaggaacagaaagtggaagagaaagtggaagaggaacagaaagtggaagagaaagtggaagaggaacagaaagtggaagagaaagtggaagaggatcagaaagtggaagagaaacagaaagtggaagagaaactggaagaggaacagaaagtggaagaagaagtggaagaggaacagaaagtggaagaggaatagaaagtggaagagaaagtggatgaggaagataaagttaaatagcgaagctatttcaattaaaaaaataaattaaaatcaatttaaataaaaatatcgcatttaaattaaatttaaaacaatatcgtttttaaattaattatttgttcatttccaaattctcatattcctaaactatgaggatcgcttagcggccaatagatgctttttgcacgccccaaattatatctcccactagagccagcgttgaaagcgcccccggcgctttcacagggcccgcagggccctggttatgaaaaggaataaaatttaccagtaaatttttttattgccaaattcttcaaaccctatttaattctgcctcatttactcaaaaaatatcaaattattattttttatttagggatttttcatttgcatacaacccttgccgcttgatagttaaagacattggcaatgcaactttgccggatgtgccattggcacaaattattgtgtgggcatgggacgcgcaaggggcacaagtgatcaaagaagtgacaattcaatcaatgcctatgcctaccaatgatttttatcggaaaaatgaattctagacaaaaatattgaacacgggcggcacactaacatttatg

SEQ ID NO: 117601 - DNA, 217 bp, Heterodera glycines
ttgttgcggttctacactttcgcgttgcatcgaacagaacaaacgcattgttgcggttctgtggtctaacgcattgttgcgactcaccgattttgccccacaattaacgcattgctgcgaaagtgtgggctcgccgcttcatcaaataacgcattgctgcgatttgaaaagttttgttcgacggaacgacgaaatttgaaacaactcatttgtaatg

SEQ ID NO: 117602 - DNA, 1003 bp, Heterodera glycines
agtattttcgagaaaatttgaatttcgctgatgcactactgcctttggcccagtacttttcacatgactggatgtacatattttctatataatttgctttttcacattttttcaaaatatttgaaattcctgaggctaagaaaaatttttcataaatgtcaaaataaaaccaaagtttcattcgggtccaatttaggaattagtcgaaatggacaccagaatcatgaccagcgaccagaaagccctttgaaatatattttcagattttttaaattaaaaaatatttatttcaaaaaagtggggtaacaacggtagtattaccgaaatttgttatgcttgcaaaatcatacttacccatccaccagttttaaatgtattttttatggctcaaaaaattataaaactttgaaggtattccaataaaagaaaagtaggagaatcaccaattatgcaagtacatatacaatacagtacatttaaatggaattgatcacattatgtaaaaaaaaagatgtcagaagaagaaccaaatgtggaaagaattagtttaggaatgaaattttgaaaaaggtaattaaaataaattgtatatttgccctcacccaatttttcaaaaagcaaatttttccgggatctctgtgatcaggaatattgtgataatttcgattcaatttatttctaaaagcccgacattttatttacttttaaaactacacatccatatgataaatttatcgaaaggccaattttgcagaacggaatgtctgtgaaagaatgtccgtttttcatggacatatcgccaacaaaatccgtttttgaaagaaattttcagcaattcattacgaaaaatgggcattgacaaactttcctataaaaacagaaaaagtgatgatgatcaaaatgataaattgtctgtggaatcatttccgatcaatgtggataacgaatgtgtgaatgaacgtcgtcggcaaatgccaatccgctgatcggccatcagccaatg

SEQ ID NO: 117603 - DNA, 370 bp, Heterodera glycines
atcacgaatctgacgttaatttaggcctatcccgaacccccggacccgaactcggacaaaaaggtcgcacaaactcgacataaaatcgatttctaaaaattcgaatttgcgacttgtttgggttcgggtccgggattcgaaataggcaaaaatggatgccatattcgtgatcagcaaccccaaaaaaccattggtatatatattacctgttcgttttcacatcatgtgaattttcacctaactcgctggaaacatgttatagctaaaaataaacgtcagattcgtgatcagcacattaattcagcttagaaaaattaaaaaaaaaatttcagggggggggggtgacaaaacctacaagtaccgcaaaatg

SEQ ID NO: 117604 - DNA, 280 bp, Heterodera glycines
cgtatggttattaatattttgggaaatatattatattttaatatggattctggtggtttaaaaaaaaaataaattttataattttctaaaaaatctcatcaatttttggaccaggaaattgaagtgaataaatgaatttttaattttttttagataattacagaaattttggtgccgaaaaaaaataaattttaaaggaaatattttgcggaaatttccggtttttatttttttttgttaattcgccgattacttttggttatatttttttagttgcatg

SEQ ID NO: 117605 - DNA, 110 bp, Heterodera glycines; identical to SEQ ID NO: 101859

SEQ ID NO: 117606 - DNA, 965 bp, Heterodera glycines
tacatttcgaagtgtttgtgggtaaaattgtctttttttgataaatcatttctataaattgaaagttccagcagagaacttcgaaatccaatgacgaattaatgaattcgagatttcattagtttctacaatcgaagaaaaaattttttaatttgaaaattatgttaataattaggaaaaaagtcgatttttaggggtgtatttttcaattttcttgtatttttattgcaatttttctcaaaaatgccaaaatatgtgcaaaatatgtgccaaaccccaaaatatgtgctaacatattttatgtgacaaaacgccaaaatatgtgtttttatgtttttataagtcgctctaaatcaaaaattgttcggagaaaatgctatttttgggcttctctcgccataactaagccgcaaaaaaaatatgttaaaacataaaaatcctagccctaataatgaatgactagggagtccaaaaatatgcaccaaaaatggcaaaatatgcacataaaaagtgaaaaatatgcacaaatatgcaaaatatgcacatggaaatccatcctagaagcttcaaaccaagctaaaaacatatttttcgtgcgtttcaggcctcccacagtccaggaaaaaatatggatttccatataattggactccctaataatgacaataattaaacgacataataaataacaaaatttaataaaataacaatttatttaaattcggatggtaaactctcccctattaattcaaatgtttattattgaataaatacacaaaaaacaaaatatgcaaaatttgtcaagaataaatccgaggggcttaaaagaaataaaagttaaaacagacaaaaacatttgtaaataatttgtttaaatatttttttcaacaggaaaaactcaaaccaattttgaatcgcgtgaagaaattgacgaattaggccttttgtcaagaattgacggaatg

SEQ ID NO: 117607 - DNA, 701 bp, Heterodera glycines
agtgacaacaaaagacgaagcagcagcagaagactaattagagttaattaaccgacaaattaagacggattttgggcatttgcaacagcaaatgaatttgccattcaaattaattgcgcaacgaatccgccagcatagagacaaaaaagggacgaaatgggccgaatcggaggacggtaatttaaaaattaaatgagaaaaaacgaataaaacaacgaaaattaattaattttaaaaagcagtaacgaatcgattcgatgtgctgatggaggaaaatgagcagaacatcgaattggaatttttgaggcttttcaaatccgcgcgagcattggcacgaattagtggcacaaatagtaaaaaaaaataataaatattcaaaataaatttataaaatgcttaaaaaactttttccaaggcgaattaacggacaaaggcaaaacggaaagcaatttgggtaaaatcgggcattttgaactgaaatattttccaataaattcagtgccgcccttttgcgttgacttttcttttccctcacaaattgcggagacactccgtcctcagcagagacaggcgaatcaaagtgattttttgatttttgcgcattttatgaggcgaatcgcaccttaaatcatttttcattttttggcactttcccctgccaaaatcagaagggaatgtgcgaaaattcacctctaaaaatg

SEQ ID NO: 117608 - DNA, 567 bp, Heterodera glycines
tttggtcgttgcaaatcaatgcaaatgatggtactttgttaaaagtttctttagctaaaatttataaaatgaaaattaaaatcatgacactaaaaaactcataaataggtaaattatatttgtcaaatagaaagatcggcaagaaagaaagaaaatcacggtatgttgccgataagagaaggaggaggtaatgctaaccagagaccgagatttcaaaatgccggacttgactgattttttcagaagcaaccggtttccgaacccggtctctcaaaatctgtaatccaaaaaaccggtcaatccaaatttttccaaaaatcgctggactggcttccggatccagtaaaaaccggtaccggtcctatccgtctctaatgctaacgaaaagaatttaaatttttatgccttggcattttttaaaaatcattaagccaaatagcggttaataatttatttgaaatacaatatgtattaggtgttctggtctctaaaaatctgacgttttgctgataatcaactttgtcattcatttgatttttgtaaaattccgttatttgattacaaatg

SEQ ID NO: 117609 - DNA, 654 bp, Heterodera glycines
actagaggccgagatttccaaatctgccggaacggaccggactggtattttcaaaaagtaccggattctggatccggtatctcagaatccggtcaatccgacaatcccgtcaatccagattttcaaattgccggatccgtaaccggattccggattggtaaaaattaaaattttcacatgttagtttgggaaaaaacccgcaaaatatgaatatcatcaattatatgtatagattcggtgcaccagaaatgtcgcggtcgaaaagataaccgtaaaaaaaataaaatttcaatttctcaagaaaaaattttaaagtttttatttttgaaaacctatgttttaataaaaaaaaaataataatcttttttcgcggcgccctttttccagaaaaaaaaactttttgggaaaggggccggcggtgccagtaggcgccgccgggaaaaattttgaaaattttaggcaatttgttaacagattttcactaaaaatgaccaatttttcgcgattttgagccaattttttaagaaaaaataagttttggaggcccggcggtgccgatatgcgccgccgagggaagaaattcgaaattttgaccatttaaagttaaaaacattatgccaaagagatatttttcaaaggaaaacgaacaaaatg

SEQ ID NO: 117610 - DNA, 484 bp, Heterodera glycines
aaataaataaaattttcacttttcatgtttttcattttttggaattgttgatatcttcaatgaattaaatcacaattgaacacagtaattgagggaattaccgtatttgctctttttatttgcccgggtatattatttttcaaccccctcagaaagggggagataattagatacgggggataaaggggagggggggattatttttcgacagatttatttagtggaaaatttttcaaatttatttttaatatgtctccagaaaatgtcatcgcgtcaaaaaaaaaaagcatttttattgcatttttgttaaaaaatttctgaattttacatgaaatattcgaaaaatgccaaaatatttacacaaaattgataaaaccccaaaatattgaaataggaatatgaatgaaccttatttgcgtttcagaaatttggaattttttaattttaaaaattttttcatttttttgagcccgggaaatttatg

SEQ ID NO: 117611 - DNA, 288 bp, Heterodera glycines
tagggagaggagggattgtaaatcaattaaattgagtaaagacagaaacgggtttattcctcggcatataaaaatattaacatttaattaattaaatttttatttagcattagaatgattatgttttttcactttgtcctcttcattgtctactcggcaaaaacgcattgtgtcaaacaggtttatacattttgtattaaaatatgcaaaaagggggtgtgataaagaaaattaaatatggatttgttttactgaccctgtctaaatcgggtttcccttttcaagatg

SEQ ID NO: 117612 - DNA, 228 bp, Heterodera glycines
tgaagcagcagcgttcaaagtgatgctgagcttcatttacacggaagatttgagttaattgaacggattcaatgcaatggcagtggttttcgccggtgaaattaatttaattgacaaaaaaaaaacaattaaattatttaattagccaaaaagtataacatccctggcctgttgaccggtctttgcaaattccaatctccaaattgcgcaaagttttcttggcttatg

SEQ ID NO: 117613 - DNA, 138 bp, Heterodera glycines
  unsure (1)..(138): unsure at all n locations
ccttttcatgactataaaatcttttgtttccgctttgactctcattaaaaaaataagctttccacgaanttattattctgttcttttgtttgacatcattcggaactcgtccaaaattgtgctaatgncaaaaaaatg

SEQ ID NO: 117614 - DNA, 1003 bp, Heterodera glycines
ccaaaccaattttgggcggatgttgtgacctgctggggcaaaacctttgggctattttttggtgcggttaaaaaagtacagaaaacaggatgatacccttcactatttatctttatttatttatttatttttataatttcattaaaattctcttcaaattccatactatttcttccataatatttttgttgaaaaatagttataaaatttaaacgatttgattcaaaatttcagcgatcaaaatttcagcgattacattttttcggcgttttttggcctagggctcttttgttaacaaaatgaagtttttctttagtttgctaattcatttgatcgcttattttgggcggaggtggggggcgagaggaaaatgttgctattgcaatgtctccaagcagctgatcaccgattggaacggagaaggggcgccattgtaggtacaaaaaatgctcatttatttgatcgccgattttgggaggggggcgagtggcaatgttgctaaagcaatggtcccaagcagctgatcaccgatcggaacagagaagggcggaattgctaaaaaatcttccttaatttgtttccaaattcatttaatagatttttcggcgattttttggccgggggctctttgctagcaaataaaggttttttgtattttgctcatttatttgatcgctaattttgggaggggcggggggagcgaaaggcaatgctgctaaagcaatcgccccaagcagctgatcaccgatcggaacggagaaggtcaccatttgcacgtacaaaaaatggctaataaaatagagtggaatgcgatcattttgtcattttcaccccgggattgagccaattttcgccaattttattactatgtgacttccttatttaattcaatttaatttaattatttttaaattattttaattcattttaaattataattattttaatttaattcaactattttttactgtgaataatattttattatttcagttccaaaatg

SEQ ID NO: 117615 - DNA, 216 bp, Heterodera glycines
tgtactacagtaattatcgtggttcaaaaacccgtaccggtactgtactcatagggaacactggcaaatataccagtacaatatgcgtaaggtactgtgggaaacatatcgtttagtatgcatacggaactgtgggaaatgatcgtagaaaccaggttgtttgtactacagtaattaacaacggctgacatacagtacacaaaaaacacacagatg

SEQ ID NO: 117616 - DNA, 352 bp, Heterodera glycines
aggcgaatttttttgcaattttttgacaaattaataatttttgatttaattattatttttagcacaaatatcacgccgattgcatcacacgatggtttgttgaaaaattgttttttttgataactaatttatttgaatattttaggatcgaaagtaaacaaatgctgcggtgccctttgtgtttgaccgacccaaaattaattattgtaataagaaatttaattgccatgccattaatgcttctcgtgtcttttccctacaaaaggtggccgattttgcgccaattttcttcgactcgtcccaaatttatcacaaaatgtacgtcaatccaaccgcgcaactgtttaaaatg

SEQ ID NO: 117617 - DNA, 473 bp, Heterodera glycines
  unsure (1)..(473): unsure at all n locations
ttttaatgattaataaattaggctttctatccatattctaaaaatattaagctgcttatttaggattcttaatatgcccaaaatctaaaatccagctctatacgtattggaaccaaaatttataaaaatatattcatcctcttttagaatatgcgcctgaaatttggaatcccgacatacaaaanaagatataaataaactaaaaagatgccaaaaatattttacaaaaattcctttatttaaatgcagacttccttacataccttacaaacaaagacttgatttattcaaacttcaaactttagaagaaaggagaaaaacaattgatttagttcaggcattcaaaatcattaatggtcttacacatcttaaaaggaaatatttcctcaattttctggtcgaatcccctacaatcttagacgtaaagttgtgttaaaatcacaatccactaaaattcttttatcaacagaatg

SEQ ID NO: 117618 - DNA, 731 bp, Heterodera glycines
tatttgttgatcgcctcgatactatttcttttgacataaattgcacagatttcgactaaaaagtaaccaaaatttaggggttggggtcatttccctaccgccaattccctaccagccatttccctaccggccacttccctaccagccatttccctaccgccatttccctactaaggcatttgggccatttccctaccaaaaatttggcgctatattaaaagtgggtctttttgaaacaaaaggggggacccttttgttttgcaaaatttttttaagataaaaaaccatgataattttttatccggagttttaaaggtcgctaatcacgaatctgacatgtattttgactaatttctaatccctaacccgaactcgaatacaaatcggaattttgaatttttcaaattatgattttttgttcaaatttagattaggaaatcggaattgatcaaaataattgaaagattcgtgatcggggaccccaaaaacttttaatatagcgccaaaaatttttttgaaattttttggcaaaatttcaaaaatagaaagggtattttcaacattttgatgtttctcgtgaattataagacaataagttttttgtttaagttatagattagaaaatgcaggcaattctaacacaaaagaaccgtacaaagcttcaaaaaaaaaaaaaatcgaattttcgaaaattttagcgctatcaaaatgacccgacattcgcagaaatg

SEQ ID NO: 117619 - DNA, 157 bp, Heterodera glycines
ggtaattaggcagcaaatgaatgggtgagccaggggcaatgaagctaacaataatatatttttaaactccttgcaatttaaaaggtatttgtgtttgacccaagtgctcgtcctccgcgacatttccatccaagtccgaaagcgttttccaaacatg

SEQ ID NO: 117620 - DNA, 218 bp, Heterodera glycines
ttattattactttttacccgaaaatttttattatatgcatataattatttttctttaaaagaagtaaactaatgaaataatccttatttttaataaattcaatagaactcctaatttaattaaaacttgagaaaataattttaacgaaaaaaatctaataaatattattaatgtatatattttaacaaaaataaaatattaaattttgcaggaatatg

SEQ ID NO: 117621 - DNA, 159 bp, Heterodera glycines
ggtaagaaaagcggtcaatggccatgaactgagacgcatggattaatgacgtgggtggggggactttaccggtgctctttattcgagtaaaatataatgttacttttttacacttcatagggaatcttccaactgtacgtgttgaagctgctgaagatg

SEQ ID NO: 117622 - DNA, 89 bp, Heterodera glycines
ggtaggggcgaaggcaccggcactttttttaaacgtttcggatttcatggcatttttactttttcgcaactgattcagacggcgtcatg

SEQ ID NO: 117623 - DNA, 354 bp, Heterodera glycines
  unsure (1)..(354): unsure at all n locations
aacaaagatgctgttttgaacgaataaagggcataggcttctttgaagaagngncaaagaacatgcagnaataagnctgccttatctaataagtggaaaatacatgagtatagaatttatttaagaaagtgtccacagacttttggaaaaatatatttgcaatttatcaacaattttgagaagtgagttagaaatgataaacttcacgattcaaaccaattttcgttgctctaattaaccgcgataaaaacattcgaatcaattaaatagcttctgagataataatgtttatcataaaatttcatttaaaaataaaccctcaattattggtatgaacgatactttccaaacatg

SEQ ID NO: 117624 - DNA, 1003 bp, Heterodera glycines
agaccgatgtttttaggcattttttaatttgtggactatgatcaatgttttcccaattttcttcaaaatatttttagctttgttgtttttttaattttaattttaattttttgctatttttaagagattttctttaaatttaatgaatttaaaaaattgaaaaatttatatgcatatttttcaccttttaagtgcatattttactattttagtgcgtattttgcgattttatatgcatataatttttggaaaaggcgggatttgctggattaatcccgatggatccggacccgaaaattttttaaaattccaatccagcagagggatccacaaatttggtttttttctgcgaaatcccgccgaatccgcattgcattttttgaaaatctcaaagacggaatgccaaatattttccaaataattttatgcatgaaaaacaacattttgtccaggaaggctcccggacatttcgacaatgaccgtttcgccaatacctttcgacaatgccgtctcgacaataaaattaaatatatatttttaaataaaattcaaatttctctaaatgatatgagatagtgctggtatgggatcaatataaaatagttttttttcgtttttgttcaaaattgcattatgagaatggctttagttttcgaacctaaaaatcactaatttaatttttttttcgccacttacaaataagataattaggccattatttttaattatctaattatttttggatttttcgccactaaaaatacccaccctaatacataaaactgctattctttgcaaaatataataattatttgcaaatccaatatccctttgcgatcaatattattattttattattactattcataataatggaaaagatttttagatttcgagaaaattctagaaaatcaaatgaaataaaatttgttttatttaacatttattgaaaattcgtagcatttaattaatttattcttaaaaattattttctcgctgaatg

SEQ ID NO: 117625 - DNA, 1003 bp, Heterodera glycines
tcagcagagagccaccatcgttttgattttgatggcactatttgtcaacaaaattatggcaaaaaatcgaagaaaaaatttataattaccaaaacagcggccgtggaacaaacaccgaccgaagcaaaagcaccgccgaggaaaagcaaacgatggcgaaacataggcaaatagcgcagaaaggcggacattatttatataaatgtataatggaaatgggaggctaaaattgaaaaatcggtgcctctttacagtgttattattgatagctcctaattaggttcacatgtatgggggtaggccgagtcgggacagggtccaattcgagacttatggactcggtcttcaaattgtctgaaaattcacaaattccttagcataggacctctctctatttgcaaaattttaatagttttttgttcggttctggaagattttataaaaatcctcatacattcgtcaaaacttaaaatgctaaattattttcagaccctcccccatttaatgtgtatttataattagctggaattagaagtgcagaatctatctccataattacgaatgtttaaagacgaaaaatgaaaaaaagaactttatgtattattattatcccaaaagaaatgaggaaatcattttttaaacaattctacgagacaaatactggacctcctatcagttagacaaaatatgaacgtttgttgtccaattgagagcgctttcggaaatgataattgcttgaacaggtaataatgagaatgtcattttttaaacaattctacgagacaaatactggacctcctatcagttagacaaaatatgaacgtttgttgtccaattgagagcgctttcggaaataattgcttgaaccggtaataatgagaatgtcattttttaaacaattctacgagacaaatactggcctcctatcagttagacaaaatatgaacgtttgttgtccaattgagagcgctttcggaaataattgcttgaaccggtaataatg

SEQ ID NO: 117626 - DNA, 616 bp, Heterodera glycines
  unsure (1)..(616): unsure at all n locations
aaaattaaaaaatgtagcgggggcaaagtcctcatcaggaaatcgaaaaagactttaatcacttaagagaccagcagcatcttactttgaccattgaaatgaatattagaagttggaagatttttgctcatataaaaaagggaaatgacggaataaaaaattatacgtgaaggaattattaaaaatgaaagttcaaagttcaaagacgggaggcataataaatgaatttgaaaatataatctgtgactgaaattatatgtaaatggcatntaatctatcactctgctggccaatgaagagttgaaatttgattttgagtgctgaaaaaggcacaaaatacttttgtaaggaacatttgttaattctccaatcaatgactaatttttttcgagtaataagaataatttttttttgttccctttagcccagaatttaagtaaacaaaaacttatatagactttaagcttccatacagttaatgctagagaaatttttgttttatgcgtgtctttttcctagtcttgggaaagtcctccgatttaaaaatttttccgtttttaaattttaaatttttttagaaaattaacaccttttaacaccctttttttaaacgatg

SEQ ID NO: 117627 - DNA, 501 bp, Heterodera glycines
tagtgggagaaatgtgaatgaatgaatgttaatgcacaaaaatgggggagacgaaggcgcttttatagcggagaaaaaagggatttagcaaaagcaatttttgaaaaataacggattaaaaagctttttgttcgaattcgggttcggggttcagaattggccgaaatacatgtcatatttttgattagcgagcctgaaaacctcggaaaacatgttttagtatgattttcataaacaaaaaaaaaatttgcgaaaaatgtgggaggggaaagaaaattttgtataaaaggacaatttttcacgaatgcgaatcatttgcccaataaatttgctattcaatcctttttattcctcgccattttctgcccaaattttcttcatcgccgccgctaacaacaacgtaattcaatgtcttcgtcaacaaataatgatggagcccaaaacaacgccaaccccaacaacacgcattcgcctgggcgttcatgcaactcgcacaccatg

SEQ ID NO: 117628 - DNA, 514 bp, Heterodera glycines
  unsure (1)..(514): unsure at all n locations
catgtcaaagaaagaaagtaattctttaaagnaaacaaaaacactttttaaaaattatttaagtgatgtggagatggtactgtatttattagagctcgacaatttgaaaaaacctggacttgagctggattcaatgttggacctgattttcatgcacaaaaatgcaggtccaggaaaaatccaggcttggacctggattttttttaatcttaaagcaaaccacatgtttgaaaaaaataaattaattgcttaataggaacatctaaaagtatctaatagacaataaaatgcgtttacccagcaaaagccaggcctggaccaagtccatgtcgagttttagtttttatgtaatttacaatttctgctcaaatcactttaaaagcacttttattgtatgagcataatttcgttttgcttttataaattttgggttttttgggtacggtgccaaaagtgatcagaaaaaaaaccgataaggggtcaatttttcatttatacaaaaatatttaaaatg

SEQ ID NO: 117629 - DNA, 727 bp, Heterodera glycines
ccggcaaactgactgctcaatgaacaagggcatgcgggtcgcttgtggggccgggtaatttaaatttttagggatttttcattttggtaattgaatttgcttcattaagattataggaaatttcgctctgggctaaataatcgtcgaaacggtcatcttaaacaatgctttgatcataaaattcattatttgaaattaacaccggaaatcctcgaaatatatttgatttgcaattttgagaaatgattttcgttttttaaagactaggttggaataaaagattttgactttaaaactttttttaaaaatgtacgtttaaaaaattttaaatgcctattttcatgccttttcgattgccttttttgcaatttttggtgcctattatagtgccttttcctcgattattggtgtctttttagtcggtctaaaaataatttataaataaataatattttttagtttaatcaaaattttttatcatgataattttactcaaatcgcatcaaaatttatccttttttgtgcctgccacttggcccccacgccccccctccccgccgcgcattttacgaagggcgttttgcgccacccccacccccgccctcctcccgtgtgtaccagaattatcaaaaacattctgacgtttaccagaattttcagaacaattcagatgtttaccagaatttacagaaccattctgacgtttaccagaattttcagaacaatg

SEQ ID NO: 117630 - DNA, 419 bp, Heterodera glycines
gcattttttgaacaggtttaattttaaaaaaaaattttttttcgatttttggtttcaataaatcactcctccagtttcccaacagtcgcccatttcccaagaccacatttccaaaaaaaaattcacaattccgctactcttatttttaaacaatttttttttgacaattcaccgcctaattcaaaaaaattcccttccggcttccatcgacaatgcccaaaattcgcaaaaatttttaagtctattttcgggggtttggaattggtcaaatgaattgttagtacggcatgtacactccatgtccagttggccaaccgtgtgcctaaaatgcgttccggcgtgcctcaaaaaaaaatttacataaaaattctgtcgggcgtttcttccgactttttcccaattttcttattaaacagatg

SEQ ID NO: 117631 - DNA, 680 bp, Heterodera glycines
tttttcataatgttccttttttcacttatttttattctcaatcgagccaattttttttaatactttattttcattcaaatttagaattttgccggccattgtttattttacattgacgaaaatgccgacactttgatcgaatcggagggatttttgcaaattgaccaaaaaatgttgtgcgaaattttggaacgcgacgaattgcaaatccgtgaagaaatttcaatgtggaatgcagtaaatttttttaaatttaaaaatgttacaaatttatttttaaaataagtctgaatctttttttaatcactaaattgttttgaataaaaaaaaataaaattttctcttcaatttccttactattttctcttctctgactcgtcgctgctaccatttttagcggcgggcagagaagagaaaaatagtaaggaaatttgagagaaaaacttctctcaatttaacttgatatttccaaattgggtttaaaagcggaaattatcgcatcgattttttccataatgttccttttttcacttatttttattctcaatcgagccaattttttttaatactttattttcattcaaatttagaattttgccggccattgtttattttacattgacgaaaatgccgacactttgatcgaatcggagggatttttgcaaattgaccaaaaaatg

SEQ ID NO: 117632 - DNA, 181 bp, Heterodera glycines
ggcattgttcgaacatgaaaaatactgtacaaaaagtcggattgccagttttgttaataaaagtgcagttgaatcctcgcatgtatctgcttatacctaatctattttatattttatttgaaattactcattttcatttagagtaagtatttgtttcctcctcctcccactttttgccatg

SEQ ID NO: 117633 - DNA, 104 bp, Heterodera glycines
tgtcgcgctggccagatcagatgagatggctttttgtgagcatcctggtctatggccagccgagtaatgccatagaattgtggaacaagtacaaagaccaaatg

SEQ ID NO: 117634 - DNA, 444 bp, Heterodera glycines
aaaattttcaaaaaaccattctttgggtattttctcgattattaataggtaaaaagataactttctgaaaaaattcaaaatgtatgccaaaaatgagtcttttttggggcaaaaattgaatatttatgcaatttgtgcccaagttgcagtacgattttattcagtatgctaaaggaatgcactaaatttcaagaaaataattttaaatcattccaactatagtttgacaaaatgttgaaaaaggtaatcaatcgccaaaagaaattaatcattaaatttcaaattcattatgatcgataagattggaattcgaattttagagagaatgatcaaaagttattttttgaataagagagttttgattaatgatttttggaaatttttctttttaactcaaaaaaattttaaaaaaagtcatttaagtaaataggccaatcaaaaatg

SEQ ID NO: 117635 - DNA, 1003 bp, Heterodera glycines
tgctatgaagaaaggggctcaaaaatagcatttctgcattaaaattttttgatttgataaaggcttttagtgcatataaaagcatattttggtgggtttttgagaataagtgcatatttggccatttttgcgtttttagagcatatttcggttattgtttggaaattttcataagaaaaatgcgaaaaagcgaaaaatacactcctaaggatcgactttttggaattttttaaaaaacacccttaaaatcgaaaaaaaaaattaaatttttgtcagaacttttggaaaaaaatttatgtatataaaaatgtaatttgttttagcatataataaaaatttataaatttggaaattcaatatttttgcaattgtctaaaaaatgctccttagccattcgtgtgcgaggaatggcatgaaaaatgcttatgaacaaattccatgtgttttttattagaaataattttcggatgatataataacttactaacatgaattaaaaaagactaactaatagaagctatttttatatatgtaatagttaattaacagtcatttttaatttctttttaaagtttcattttttagtaagttaggaattgtcatttcttacattattaattaaaatgtatttcataaatatcttatattttatggtaatgatctcaaaattgtattcaataatgaagttttttcatcttacaatgtgtacaattattatcaaactcttttcaccgtcgagaatataagaattattaaaattaagaaatatattgaattataaatttttaattttgtttaatattttaaaactgagcaaaaattactgcacaatttttgttcgcatcatattagggctttataagaaaaataaatatttataaaggcacaaagtttcaaaaatcatctaattttgcataaggttggaatttaaagtttgtggaaaaaaatgtattatttttgtatactaattttgaaaaagagaacacgacaaaattttcagatg

SEQ ID NO: 117636 - DNA, 561 bp, Heterodera glycines
tttccttgctttgtgcgcttgtgatttctttgtccgcacaaaattgctcaaacgcggtaggccctttcacaaaggcaaggaatgcgttgtcgtcagtctaattagagataatttaatttttaattagtgtgtgcgccgtccccatcactcaaaaaattgacttttttctgatcattttaactagggttaacccaacatgtttcggggaattacgaaattcgtaaattgcacttgaaataagatggaagtatctttaaatgagtttttaagacttttttgttctggactttttctttttgtgtttttttagactttttatgaaaatttcctccccgacgaaggtgttgctccccgacatttttttaatttcttcagccatccccgacaaattttttcggggaatttccttcccgttccccgacattttgctccccgagggtcggggcttaaccctaattttaaccacaaatttttaatggaaagtctcgaaactaaattgtattttcaatgtaaaattccttctaataattaaataattgaaaaagtgtatagtccacgatg

SEQ ID NO: 117637 - DNA, 459 bp, Heterodera glycines
ttttttaaatttcagcttcgggcagaaattacgggtctgttttttgttgcagttgtccttgtgtcatgtttcagattgcttttgcactgtctttccacttcccgttctcttccttttcatccgttttcctctcgagtttgcctttccatttcttttttcccaataaatctgtttcacagcttcacattgacgttgtttacgagcttctcaagtggtgttcgtcctctaacttttgtgtcaaaaatactgccgaatccgcactttctcttttcgctgaagttcaattttcaaaaactcggaatttgagttcatcgctttgttgtaaattttagttaaatggtcatccgaacgtttgtctgttactccaatgccatgccgaacaaattgtcttcaaactttccatggattctcgcgacttttccggttaatgtctcaagtttattcacaatttcataaatg

SEQ ID NO: 117638 - DNA, 209 bp, Heterodera glycines
ttgcgcgacccgcgtcggtgacatttttgcattgatgaattggggatgagtgagttgggcattgatgaattgggcattgatgaattggggatgagtgagttgggtatggatggattggctttagtcccccctcccactaaacatttcctctaattgtactctgctctcttgttgaatgaataaatttttagattttaaattttttaatg

SEQ ID NO: 117639 - DNA, 695 bp, Heterodera glycines
aatttttttaaacatgcattttttaaggattaaatgttcgtaaaaatttttaaattgcgcaaaaaatcccatcggagaagctaaatagtagcaaaaggcagaataatgttgagattttgatagttctactgatgaatccaatcaacattataaaatatttgcatcatatttaataaaataataacaaattaaattaaataaaaaataaatttggtaattctactgatggaataatttcatcattatttaataaaataataacaaatgaaattaaataaaaaataaatttggtaattctaatgatgatcaatcaacattgtaaaataattgcatcatttagaataaaataataacaaattaaattaaataaaaaagaaatttgataattctactgatggaataatttcatcatttaataaaataaccaatattaaacataagaactgatgttgaattccttttttatttttttttatttttttcaatcagtttttaattccatttcaaaatgcaattctatttgggagttaattaattaattaagacataatgatgtttaattcctttattccttttttatcattattttccatcagtttataattccattttcaaatgcaattccatttgtgagttaataatcgagaaattaattttactaatccgttttaattaattagaatgaggacctaatg

SEQ ID NO: 117640 - DNA, 969 bp, Heterodera glycines
gcttgcgcggctactttaagcagtttaataatggattctgccccacctaaagtgttcattcggccgcttcgcggcctcattttttattattcttaattaattaattttaactaatatttattctaattaaaacattaaaatattatgctgttttaaaattcatttaattaaatataaataaataataacaacatatgcaaaaataatctaaatagataaaagttacttaaaaatgcatgcacttttaaatttttctttatttattttatagaaaaattattttcattttttaaaaattgaattataaaaaataacaaaaataattttgacttaataattagcattaaaatatagcaaaaaataaatcaaaaaatgatttacaccgtccgggttcgaacctgaccaacgcaaaatgatgcctcagaatccccaatcacgcagggattctgaagtcttaacgatctctaaagtgaaatctgattacatattcgtgatcagcggcccaaataacccctaaaatcattttttggaagatttttggtgaaaaaaattttccacacaaaaatcatggtcacacccctttgatcccgaatccaaaaatcacttttatttctataacttttttcaaaaaagtgataaaaagctaaaataaaatttataaaatagagcaaaaaattgtggattttttgagtttattatttttataaaatactttttcagaaccgagttctgaattttattatgaaaaatcgaaaatttccagaatttctggaataacttttattgtttgcaagatcgaaatcccaaataaatctcaaaaaattctccctatttttctctattttttaaactttaaatggactgaattggacctttttgatgggagttatgaattttcaaaatgtagcttaaattttcaagggccaaaaaattttaaaatttcaaaaatttttaaaaaattccaaaatg

SEQ ID NO: 117641 - DNA, 171 bp, Heterodera glycines
ttttttcattttataattgtaaacatataattttatccattactccctccggaaatgtttttattgcattccttcgcattaaaaattataaaagaggataatttaaaaacatataatgtattattgtaaattaaaaaattccaggcttattcataacattgagagacaatg

SEQ ID NO: 117642 - DNA, 67 bp, Heterodera glycines
tggtgaagaaaattctctggaaaaaaattaatttaataaaattttcaggttcatttttacgacaatg

SEQ ID NO: 117643 - DNA, 309 bp, Heterodera glycines
ttgtgaaatgattatcaaatgttgttgtttttcgtacttattttaaattttattttattatattttccatttttcccttcattttatacactttcatttgacatagttttcataatacttcctcatattcatgctggttaattttctaatattttcatctgtttgcttatttccttggcacttccgccggaaaaaaaatacgtgggcccaatgtaatggcaaaaaattaaatattcaaatggaaatatgccaaaaaaaattattatggcggaagccactataaaaaatcattattaatttacagggatg

SEQ ID NO: 117644 - DNA, 75 bp, Heterodera glycines; identical to SEQ ID NO: 114819

SEQ ID NO: 117645 - DNA, 982 bp, Heterodera glycines
cctcccattccattccaaccgacaaaaaagtggatggatagcagcgaggtgcgttttgttgcacaatgatggacggaattgtgccctgctaggcggatgggtggggtcggtgaagcaaagcaaaggaaagggacccatccccgtgaaaagacccccccccccctaactctgcacaactcatcattctcttaagcaacaacaacgcgtctgttgtaactcctttctttcatcctcttgtcagcgtcaaaagtgtttctacttatcagcgagcactttggttttgcgccattgactcaaaaaccagtcagtccttaggggaaataagccgatttttgtatccactcaaggccaatccttaaagagacgactttttgtacaaacaacagaaaagtgtttactcatacatataaataagtgaaagatgaggagagaagttggaattaataaagtgaccagcacaaattattacgattaaagaagaaaagcattaaatgaaaagacaattaatttaacacgccgtactttaatttgctgccaatgttcggaattgaactcaatgattgttggcaaagacaaataaatgtttgagggctttttacataggatgtaagttaagttcgcgcacaatttgttattggtataaaaattcagtaaaacgtaatcataaaaaaattaaacaatttcattaatttatttggatgaaatttaatttttaatcattttaaattttttatttatttaagaaatgtaacaacactccaataatttatcccccccccccttctcctcgccacttttcgtcgtttggtgtccgttccaatcgaatggtataatttatgtgttcgtttgtcgttcgttgtcccatcctttccatccaattcttctttcttcacttttttcttttgtcagtgtctttttataatcggtgtttttttgtcgtttcttctaaaatggaaaagtaatttcagtttcttttgtgatg

SEQ ID NO: 117646 - DNA, 89 bp, Heterodera glycines
ttgtgagcgattaattatcattttgaatttatcggattcacattaaggctttctctattctgatcactcacaatttgaaacttttcatg

SEQ ID NO: 117647 - DNA, 204 bp, Heterodera glycines
ttgtggggctgaatcaacaaaatgagccgttcatttcccacatggacgtggtcggtagcgtaagtgagcccgaagactacacggtcggtggcactggtggcgacttgtcgatgtctctgtgtgaaggtatttattgcatatctggttcataatacagcaaaacgaatatttctatttttgttagctctctggcgacccgatatg

SEQ ID NO: 117648 - DNA, 508 bp, Heterodera glycines
atgccttagcttaggtctgagctgaagtctttcttcattctctgcctcggttcaatcccccaaaatctttattcattttcgaaaaaatgattacaatatgcttacgaaaatttgaccgcttttggcatggtttttcaatagtgaagaacaaaattatgattatttaaaaatttttacacatatctgaaaattggggataaatattggcggatttaccgacaaacaaatgagtcaattttgaataaattcgaacaaaacattctttagacttacataggatatattggcgaaaatgaagaaggcatcgaaaaacaatgcgttttaatcagaatttatgggagcgaaatcgaatatttcgataaagaaggcagactacattatgaaaaaagcataataatctcaaaaaagttgaaggaaattgacgcggcaaatgaacactttgtcaaattaattgactagtaaattaaaaaaaaacaaaaacaaatttaatttaaataaattaaaaatg

SEQ ID NO: 117649 - DNA, 731 bp, Heterodera glycines
atcggaagaaaaagggaacgcacataagaggaccaccaaatagaaattgaccaaaatggaaaaacataactcgtactgtctttcgacaaaaaaatgccatagttttgccctaatggacttatttaaatattcttggtataactcgatagccctaaagattctctgtatacaggcaaaatttcaaaaaatttgatgaagattgaaaaaaagtcatgtacgaatttttttttacgatttttggtcataacttttttgaaaagcaataaaatggcggtgccgataggcgccgccgggaaaaatttttgaaaactgatggatccgttaatagattttgtccaaaaaattataggtttttgcaatttttagagaattttttttaataaaatttacgaatttttgggccctgcgatgccgataggcagcgccaggcgaattttaaaattaaaaaaaataaattaaaaaagaaaccgtcaacctgaatcgaactcacgacagtaagtaatgtcaaggttgattcactaaccactacaccacactacacatcaatgaccaataataaaattaactttaattcataaaaaattttttttaaaaagattcgatcgcttgctggcggcggctagcaggggaagggtactgtagcttgggatgggtttttgtaacaataatatactgtagctagttggcatacagtaagcggtgggccttttggaaaaagttgctactggatg

SEQ ID NO: 117650 - DNA, 173 bp, Heterodera glycines
  unsure (1)..(173): unsure at all n locations
aagtgtccagaaaattaattttctgggagcccgccataaatggtgattttggttgcaaattattttaatgtttaaaattttgcgattaattttttntaatttgtcaattaatttaaataaagaaattgcaaaaaaaaacaattatagaatttatcaaatatttattcaaaatg

SEQ ID NO: 117651 - DNA, 110 bp, Heterodera glycines
  unsure (1)..(110): unsure at all n locations
aaaaattcgaaacaaaatactcctgagatttgtaatttcacgtccaccatggctttaagtcccaccgcgagggggcgggcagtccaaaaattttgtaccacattntaatg

SEQ ID NO: 117652 - DNA, 363 bp, Heterodera glycines
actttcacatgatttagcaagcgaacattaaaatttttacctacgattctcatagcagccgataggcaccgccatggaaattttgtagttgtaatgctatttgttaacagtttttgtctaaaaaatgataaatttgcgattttgagacaatttttaaagaaagtttaggattttggggtccggcgatgccgccgggagaaaattgagaattttcttcaaaaattgctattttgagtaactcaacaaagggaaatcatactaaatcccattcttttattcgggttcgaagtgattattcttttgttttcgtttagtgttcacggcgacgcttttccgcttggaaatgcgctgctacgagaaatg

SEQ ID NO: 117653 - DNA, 200 bp, Heterodera glycines
  unsure (1)..(200): unsure at all n locations
cgttgttctgttggtgaattggattaattaantgagctaatcaattaattaattaatgggtagtttcgccaaataaacacaaaaatgggcaaatatttaaaaaaacaaatgaattaattgatttgtaatacatttctattttaaaattattctcttccaagaaaaatatttcaacttttctcaagaggccttatcaaatg

SEQ ID NO: 117654 - DNA, 1003 bp, Heterodera glycines
gcaaaaaattacgccaattatattatttggcgaaatgatttgtttgtctaacactgctgggacactatgggtcaactccactgtgcagagaaaagcctagtactatctcgtcgtttctctttttctttgtaatttctctctctttggcgtactatctcttcattttaattatgtaaaaagcaacattcacttcatcctgtttaacttttttcctacttgttaaatccacaccaaattttgcatagcgatagagaaaaaaattctgcatcggttaataggtcaagttaatattaaaataggtcaaattgaaaagttatggaataataaaagttttgcattttttttctctctttttggcgtactattttcatgtctctaacacattaaaaatcatgaaattcgcaaattatattaatttttgttgatacggtacaaaatctgttggacatttagaatcaatagaaaaatgattactttccgcattttggttgaaatcagcagtttaagacttgagttataacgtaattaagatttgaaactcccacaacttttttctaaaaaatcaaattgcttagttttcgcttagaaaaagattctcctcttcaaaaactttttttaggtaccaaatttgttcagtttagttgggaatgaagtgagttacgtctgattaaaataaacaatacaaaaaaggcatttaccagtgtaaattttgaattaacgcgcaaaaatttacgccaaatacgctatttggcgttatgagtaattttgtctaacactgggcttgacccatagtgctgggacccattgtgtggccgttgccgcagagagttgaccgcgataatgtgacctcccaatttttatactacgaaaattcagattttaaatatgcataaattcgttctcatttctattgcgcaattattgcatttcttttgtttggtttaattttttttaaattatagaagtaaattgaaacccaaaattttcatcaaatcagcaaatg

SEQ ID NO: 117655 - DNA, 135 bp, Heterodera glycines
agtctctaatgagttgagcagctccgccgtacgtttctttctttgctcttccacagcctctgatcgatcattgttttactgcgcgagcgcgagtcgttcacgtggatgcagcgtgagacgaactgcgcgaacatg

SEQ ID NO: 117656 - DNA, 340 bp, Heterodera glycines
atttaaatgagaaataattttaaaaaggaatttctaggttgtccaaatttgctccaaattggaagtatttttctgcaaatttcgtcaaaagcgggcaatgaaatttgtgatgaaaaaaattgtaagccaatgaaattaaaaaatatattaaatatttaattaggtaatttaaatatattttttatttaagatgagaaaaaatattatcgaaaagatttactgcaatttttgaaaatggaaaacataaaaaaattatttgaaatgaatggaataacatttaatgaaaatgaatttgtgatgaataaaactgaaggaaaagagaagagtatgggacgaaatg

SEQ ID NO: 117657 - DNA, 323 bp, Heterodera glycines
ttcccccccctcttccggataagttattttgccctcggcaggtgtcggcaactttccatcgtgccaagggtattttgtccgctgtcggccctcggcggcgggcgtttgtgcctcgggcacactctgtcacagtcgggcaagcgacgcccactgctgccgacggcacgcggacgcgcagtgtccgagcgcggacgaactcggctacaactgtcggcaggcaaacccagtgaattggtgtgccgaaatctttttttttggaaatgccaatgcatttgtttgtccccctttttggtgtaatgtgaataccgactgtgccgcaaatg

SEQ ID NO: 117658 - DNA, 631 bp, Heterodera glycines
aaataaaagaaaatttgaattttatttgtttaattaattaaaaaagcaatttacaaaatttgttggatatgaagccaattatggtcaattaattattttttttgaattatgtgcccaaaaaaaaaaaatcattttgagtaaattgctacactttccttttaatttattttttccataaaataaattattttataaattattattttttgcaataattatttcttaaaaaatccgagtaaaaaaattgttttccatattatgtatgaattacgtcgtgaatcacatattaatttttaaaatattgttgaaaagaaaaataattgcgtaataacatttaatgcgaataaaacattaaataaattcatttaatgcaataaattcaatttccaaaagtaaaaatgaatttgtggcatttattatttattatatttttctttatttttgtaattaaatccggcaaaatccaaccaaattttgaagaaatatttggccaaagatgggacaaaaatgaaagtgaagaaattgtgataataaaaattgaacaaaatgaacgaaggaattggtcgtcataaaatatacaaatggaaaaaagaattaaatataattaaaaagatgggaaagagtttttatg

SEQ ID NO: 117659 - DNA, 353 bp, Heterodera glycines
tttgaaatgacgtcagactggctttaagcaactaatttttgtgttattactcaacgctattccttctatttatttatgacctaaccaaactaattatatattttttggtggcaaaaaaaatcaggaaaaaagtggaaatattttgaaaaatatcggaattatgaagcatttattttcaaataaatattcaagtttttaagtaatattttttgaattttccaaatctgataaaattcagtagaaaagtgaaaaatattaccgagcataaatttccaaaaaataataaaaagcgcacaaaaaatgaaagttgttttaccaattttttcaaaaaatgccaaatctgacgaaaaatg

SEQ ID NO: 117660 - DNA, 237 bp, Heterodera glycines
aacccgactaatcagcagacaatgccgatcaattcttagaggggtttgatcagccaaatcatttttctgatcatcttagtagaacaaatgtattatagagtgatctaacccaaccggtgtactgatctttgccgttctgatgctgatcaggcgaattaatgatcccaaaacgggcttccgacttgacttaatgtagaacttggtaaatattgatcataggccccaaactcaaaaatg

SEQ ID NO: 117661 - DNA, 853 bp, Heterodera glycines
ttgagtggtttatgtatgatttgaagcctaaaaattctataattgagccatgcaaattcagtggacccgattgtatgcgcatgcctgattactgtgtgagttggtgaggacttggcttggctggcgctagaggggcggaggaacatcttttttttgtttttgtgaattaattcgtggatatgtgatctgtttgcttggatggaaaagaaaacggacagacgacgacggcgacactttctttcccactctttttcctccccctttttttgtgacaaaatcaaaagcaaagccattttttttgtatttttgtggaataaatacaggtgagagaaaaaggagagtcaaacggtaaacaaatatgcacacagattcattttaatatcttggatacttccgcttttttccatatcgcaaagctaccaatttttggaccaccaaagtcggcacgagcctaaaaacaaattggtatggtgccgagtaaaaagccgcgccgagaaatttaaagaaagtttttttctaacgtttttaaattttatgatgaattatttttcaaaaaatcggcgaaaaaagcttccatgctattttgtgaaaattattaaacaaaaaatttcggttttcagtctaatcacgcttcaatttttagctttttttttgtcttttaccatgaaattgtgtcgcaatttgcggtccaaatacattttgcccatgtttccatatccgtccgggcggctgcacttgggccatctgcgcgtgtacacactgtccgacgtgatcagtcgttaccacaggttgaaaggacaccaagtgatccatcccattggatgggacgcgttcggactgccggccgaaaatg

SEQ ID NO: 117662 - DNA, 499 bp, Heterodera glycines
taattttttgttatttttcatatgcatccttttaaaattatacatagacatgtgaatttgtattttattaatgtgaatttcacattgacaaatttccgattggagccaaacggcgataaaaacgcataaaatgatgtaattaaaaaatatattttatcaaaacattaagggaaactatcactctttctatgaaaatttatgtctttgtgcaggatgacaattagcagtttcaacaatttttatggtgctgatccgaacctaaaaaagttattcaatctaaacaattaaaactttttgtgtcctctactattttatatgtttttgcaaaaattttcaaagttgtaaccgaaattgtaaaatttagactgaatatttgtccctaactttttttaactcaataaaaaattttagactttaaccaattatcgagaaaattttgagctatcaatacatataaaagaaaattaaaattgtttgtttcagtaaaaaattacgcatg

SEQ ID NO: 117663 - DNA, 240 bp, Heterodera glycines
agattttgcaaaaatgagccggttcgcaattaagcgcagtagatttacatttaataaaattacaaacttaatgattgaaactttttgaggagggatattggaatcgggagggaaagggaaagaatgtaaaggaaaatacattcctatgcgtgccgttcaatagtgttttctgccggtggctagcaacgaagataaatgccatgcgattcccccacatgccaacgttggaagtgccgaatg

SEQ ID NO: 117664 - DNA, 469 bp, Heterodera glycines
tgaaaaaaaattggcggtgatttctaaaaaaaggaggataacaaaaggagggaggaggtgggatttctggataaagagagatgaaaatgagagagagagagaggagcgagaaaggaagagagggacaggaaagtgagaaagggggagagagacaagaaagtgagagggagaggggaaagagagagaggaggaaaaggagagaaagggtgatgaagttggagagaggagagagagagagagaaagagaaaccagcctgccttggtggttgtggtaattgatgtgattaatgatggaacgaacgacggatgcgacacgggacggagaaagagaagagctgcaacagcagcagcctatttggtggaacattctatcggcaacttattgcgtcgccttataaatcattcagcaaaagaattcttagccgaaatcaattaaatttcaaaaatcgaatttcagaaaattaaaatg

SEQ ID NO: 117665 - DNA, 192 bp, Heterodera glycines
acaattgcatactacctaataggacacatagaatatgtaaaaagagccaaaatacgatattcattcaacccatcccaaaaatccttaacaaaacatagtcatattttctaatttatataattagagagtgggaaatttcagggttttcccattctttggcatcacgccaatgaacctgaagagagggaaatg

SEQ ID NO: 117666 - DNA, 162 bp, Heterodera glycines
ttttggaattaaatggggaaaaatatacgaaaattattttggttttaaataacgctgtccaatgcttttaaaccccccggtgaggcgggacagttcaaaaatttggtaccccattttactgtggaaagtccaagtcccttatgggacaactacgtgtcaatg

SEQ ID NO: 117667 - DNA, 62 bp, Heterodera glycines
aaatcattattttatgaccccctcatttaaggacggcaccgccgtctgtaagtggagaaatg

SEQ ID NO: 117668 - DNA, 440 bp, Heterodera glycines
  unsure (1)..(440): unsure at all n locations
gggctgtgtgcggtgcggcggtgcgctgcccgcccattggccgcgccgcttctgtccgcagggaccgcccattntggcacggccgaccaccgcatttaagcgctgatcggccagcgaaaaatcattcatttccaaaaaaatttccagctaatattaaatagaattcaattaaaattggggaagggaacagaaaaagccaaaaagaaaaagcattttttaaatgggacagcgattagaaaaattgaatgatttttttggaattatttgaattttcgcactgaaatttgagtttgattgataataagaaacctttcgatttaatatatttttgtgtatttaattttgctataaatttaagaatttaattaatttattttccttatttctaatcccgaagaacaaaactcttcaaagcaatcacctttccataattcaacatg

SEQ ID NO: 117669 - DNA, 303 bp, Heterodera glycines
gtttcttttcctccgcttactgatatgcttaagttcagcgggtgttcacgtctgagttcaggtcgaaaaatcaaagcaggaatgccagtaatccaggcactccgccacagcatgcaaagcattggtgcgcccgagttacggtccgtaaaacgcgaattagaaccacaagttcgcgccagcacaccaaaaccccacagccgagctgagcaagtaacgtaagaacacgtacaagtacatgatcccacgaagcaacgcacaagcagtgcattttatggtaacgaccctgaaccaggcgtgccaatg

SEQ ID NO: 117670 - DNA, 372 bp, Heterodera glycines
  unsure (1)..(372): unsure at all n locations
ttttaattatttaattttgtagtattatttgttcattactacatacatataatactttttgatgaataaaattgtctataaagtaaaatgaaattgttttttntatcgatgagtaaataacgcggatgaattaattaagaactatttattaatttaattaatttttaatagactaattaattatcgtttttaaagatcatcctttgtttggcattaacaatttatcaaacgcttgttttggattcaatgttttcattaacaaatatttctgtgggtctttacatcggagcaatgattgccagtttaatagaaatttttgtaagataaaatttaaagaatttttctttagatttttttaaggttttttcaatg

SEQ ID NO: 117671 - DNA, 452 bp, Heterodera glycines
  unsure (1)..(452): unsure at all n locations
tggacgcatttcacctcatggcacaattgtgatggacattgaaaaattgtccgcatttgcgagagaagctgtggggagtcgccgatacagcaaaacagtgcaaataatgggatttggatggagaattgtggcagaaataagaattaatataaaaaccaaaganaaaatttttgggctttttccttttctgcaaagcgtcaaaagaaggttaaaaaaagcatttgtttaaattgcctaatgattgtttttttaaggttcatgcctttgctcggcaacctttcgaattgtcacacaaaatgccgaagctgagaattgcattgggaaatttaatgacatcatttttaacaataaatggaactgtcggggcttcgtcaatttcattaaattgacagttaagatgcactttaactttcacttaattgttctaattactactaattaaggaattgatg

SEQ ID NO: 117672 - DNA, 742 bp, Heterodera glycines
attttatacaatcaaaaatattttattaaattcttttttttcattatttaatatatagggattttctaatacataataagattaaattttgtttaaaaaaaacaaaaagccttcacttaacgccaaaaaacgaatgttggcataccgttgccttgcttcaaattatgttgtaattaaagcggagaattgtcgatttttatagtttttttaaaattttttattagttctcattatgcacctattccttcactaattctttagtaaatctcttaaacattttcgtaaaaatttcattttttctttaatgcattttttatattataataaataattcaaaatcatttagcaatattcaagtgctggcaaattagtcaataaaaaagacttaaagccatatcaaataaaattttcataagatatacatgcatatgaatgaaaatattaaattattataatttccaataaaatattttctgaaatgtatacgtttattaaaagaattgcttaattttatacatttatatatttgcttattttttcagaaagtaattctcaagagaaaaaacaaaattttggcataccgttgcctttttcctttaattatgttccaattagagcgagaattgtgtagattttttatgaagtttttttaattatggcttttcgagttcgagcgaaaacaaagtctcagaccaaaagcgatcggttttatttattatttttttacagaaaatttagaatg

SEQ ID NO: 117673 - DNA, 630 bp, Heterodera glycines
  unsure (1)..(630): unsure at all n locations
attaaaaaattttaatatttatttaaaaatttcncgattcttctatttccaatgttttttggtcggaaacaaactttttttttgatggcttttatttataacgacataactccttcgaaggttgcaatacatagacttatgggatttttaaaaacatcctatttaaaggaaaaatatttcaatttggatgtcaagtttaggcaaatttttttttgtgtgttctgtaaaatcgaaagagtcgagtgtcatcttatctatgttagtaccgattttttcatttccgaaaaaaccctagcagatttaaaaaattttttaaaattgctttactcattttttagtttcgctaaaagcgaattgaataaaatatattttgcattaaagattagtagaccaaacttacacattgttaagctaaatttagcaaatttataatacaagatggcatctagaattttcaaaaaaaaaaaaattcatttagccaaatttttgggaattttgagaaatcatgcaaaattaaaatataaaaaaacaactttaatttgctgacaaaagaagctgatgaagacgttctcaaaaagcgtgcacatgattttttgagtagcttcatctcccgacttatccgcgaaaatg

SEQ ID NO: 117674 - DNA, 187 bp, Heterodera glycines
atgcaaacgctcaataattattatgtattgtctccaaatgctttattttattttgtttccttttaaattatgcggcaaaatggacttttgttttaagaaagttttttcttattactatttttaaaatattttccttttaaaatataattaattatttttgtgctgaaatattgtagacattcaaatg

SEQ ID NO: 117675 - DNA, 61 bp, Heterodera glycines
tctaaatattacattgagaaaatctttacttttttaatatttaatattttatagaaaaatg

SEQ ID NO: 117676 - DNA, 1003 bp, Heterodera glycines
ttcgctctttcattttcaaatctttcctacgacatgggtctttgttatgatgtaaaaacatagttgatgtgcgtatttgttgccttgccgcaaacgcttcgataaaaggttgctgtgaaaagacaaaaatgtctctgttcctataaaaatagaggatgacgagtcatttcgtcgtaggaattggacatgtttcccccctggcgttaccgtcactgtccctaaatattccgtcattgtcaaaggcattttttcctttaggagatggacttggtggttttccctgtccgcggcttctgttttctccgtttccccagttacacaaatgccgagccgataatcccgggattaaaattgcgtttggttgattccctttcacggggttcctttagccattcattcattgacttttgccaattcttcgctttttaattgccgattccctcgggcgcaatgcttttgctccgtttcgatggttatttgcttatttgcctccaatgtttgccaatttctgttcatccgtccaatgttcgtctctttggcgttgtcactttattttgtccatttcaaattcttttttttctccccccccctttcgccccccctttttcagtcattggcaaatacaaattggtggtgaaaatgtgctaattaattaatggattagcttactcaatataaatttgttacgcgatgagagcgaaacaaagaaaagaaagggcaaacgattggaaaggcaaaggaattaattaggagcaaagagagagagagaagaagaagcggactaattaatttcgctgcgttgtgccaatgcgaaggaaatgccatcattgagcgaacgattgcccaattccattcattccttctctgtctctctccacaaaacaaaggacaattttcgcctcctcagctcctcctattcttcgccttaattaattctcaaagaaattataaattaaaaaagtgaccgatcgatcgaaaaggactgatcggaaaggccaaaatg

SEQ ID NO: 117677 - DNA, 595 bp, Heterodera glycines
atcccctcaatgggcagcatttgcgaagtgccacggatgacgagcaaaaattggaaaaacagaaagtccaatttattcacccattaaatataaaaataggcagacaaatgaaataaatgataaaaaaagaaaaagcatattaaaaagtgagagattccaagtgacatgaaagcttaagcacttttggtgaattccatcttttgctgctgttgttggtggcaatttgaagggagaaacggctccaaaagttggacgggaatgcctccgacagtccgctgatgctaaaagcaataataaagggttatataatagcagttacacccagggacggtttcagagggggacgtacattccccggtccactaattgtaagtccccgccgtttcctccagaaaatttttattatataatcttcgtccgaagcggtctcccttttccgtgcctaagtcctgtgactatccgtccccaactccaccttcaactgccgtttattgtcaggaatagacaacacattggcgcgtccgttgcgatagtccgagacaaatgccaaaacaattggttcactaacttctggtcggtcacagacgacaaaatg

SEQ ID NO: 117678 - DNA, 556 bp, Heterodera glycines
taatacattttcgtttttcccatcattttttggtggcggattaaaattcgaaaaccgtccaatttgggaaagaaatatcattaaagtttcaaatttatgcttactgatttatttttttgattattttttcttaaatgaaaagattgcctttcaaaatttagcattaaatatatatttttgtttttgtttaattacatttttgagttagtccggctggattcgacgaggtatttaccggaattcctgtcctttttccggatcatttcgcactcccgttcccgactcccggtccgcattttaccggtctctagtaattaacaaaatcttaaatgttgccaataaaataattaaatcattaatgcattaatgcattaagcattcatttaggcctacgtgactttttttaatgtctattattatttatcgaacaaaccacaaggtgctacatatgcactctaacagtggcgtaaaaacaaaacataaaaaataaatagtttaaaaataaactaaatttgacgaaaaaacaattataaaaaatgtttgaccatacgaaatg

SEQ ID NO: 117679 - DNA, 628 bp, Heterodera glycines
tcaacaaaaatgggtggtttttgcgattattaagctcaatcggtaggattttcatttaaaaaatgataaaatacgtatcaatttaaaaaaaactacgaggaatcatattttctttataggaaacccacgagtatacaaaaaaaaaaattgaaaataatctaatttctgtagatggatgaaccaggagaaagaagaagggaaagtcaaggagaatagccactaggccatttgcacacttgggcagttttacttttaaagaatatattaattattattttttatttttccctttgactccaattttcttcactaatttttcactcataccctcattcttaccagtgcttgtttttcccggatcccggttgccctaccgggaccgggacctgagcttttcaaaacccgggaccgggacctcggatgaccgggaattcccggcccggtcccggtcccgtggcactctagattataccaatatatttatattttttaaaataagcttttagtttcataaatttaatttttttgcccccaatttgagaacataatgggcgaaatgagcttccgttttgtaatgctcctaaaattaaaattttaattatggcagtcttgtgccatcaattacatg

SEQ ID NO: 117680 - DNA, 1003 bp, Heterodera glycines
  unsure (1)..(1003): unsure at all n locations
tgatgttttggtgatgatggtgatggccttcgattataatcgacaaacaatccccgtcgacggtgtgtccccgtcctcgtgttttatttgtcggtgcgatgtgtgtgcgaatttttcttgtctcaaccaaatttgccccctctcccaattttgccccgcacattttttacccccaaaaaatgatccccaaatttgcggagaaaaattcgtattatttcccgtttcactccctattaattttccatattgaacgattgttttcactcaatttgtctaattgatcatcgccaattatggcaaaatatataatacctaatagtaaattaaagaattaaatttggtaattttatttgatcaatccatgtgaaattcatagcgctaaacattaccaaaatattttgtaagtaaaattataatataaattttctttatgtatcattatacttctgtgcctaattagtcgccccaattttgcctaaatttgtattgcattttaatcatcaaaatttagggttgtagggtgggctttttaacgagagggaattttgacagtgaaaatatttttgacagtaaaataaagacctttcatgtatttttaattaaaactttttcaattaagttcaaattaaggtcaaatattttttcatttaatatatttaaatatttatgaaaaatttttatttcaaatntaataattttttaaataaccaaaaattctttcatcggatcactgtgaaaatgatagacaaaatccgatttgcactttttttcgtttttgaaaattttatctctataattatgaatattaaattttattatcccaacttgtgtattttattattcttttacttttgaaacaaatttaaattagttttcttcgaagtcaaggtcaagcaagaacttaaattcctttctcgactaattagcgaaaactctcgaccaaaaccattccaatcattcaaattcaacacgacatatcacattctcaatcactacaaaaatg

SEQ ID NO: 117681 - DNA, 1003 bp, Heterodera glycines
tttaaattgtgaatgggcaaactttgagccaaacttcaaattttgatttgactattctctagaggaagaaatattttatgatcattgtttaattttgttgattgattttatttcttttcttttcataaaaaatccctatcaaatgtgtgtaattaattctaattagttaattattaagggtggcatttaaataaataaaaaattccacattattggagcttctggggatgactttccgacctgaactctgaagtgtccatgtaatgggctatcttttaccattaaagaaaaattataaagtgtttttagatttttctggttttttctaccctttttttaatatttaaaagttttttgtgcagtgtgccgatctttttctaatggtgagaaaaatggcacgtaccataaaatatgacaaaaatatggcgattttttgaaagccattcaaaaattgttaaaattcaattaaaataattaatcgcttttttcagttttaagtaattgaggcgagaaatgaacaaatcgaaagttcgaaacaattaaattaaactcgatattgagtttgatttcataaaaatcttttatacaagcttcttttatttgtcagtgttaattatttcaatttactagaaactatttttgtgcaaaaaaaaaaacatgaaataggcacaaaatttcttcttaggtgtatatttttgaaaattctcagttcaattcttagggtgaattagcaatgcgtcattatttcattttatgcttcatttcggtgccagcgcgtttgctaaaactgccagaacgataaaaatataatttatatattttacattttaaaatattaattttaattaatattatatttaagactgacgtattataataaaagaatacgaaaatatttgccaacattaaattatacatttaaaacgattgataaatgaaaattttatctaaaacatatatcctatctttaataaaaaatattttagcaatttctttataaatg

SEQ ID NO: 117682 - DNA, 394 bp, Heterodera glycines
taaggaaattgaaaaacgaaaaaattcctgtttttttttaattttcgaggagagaccaagggatgtaaaacgcacatgtacacactccgtggtgtaccacgtgcatccttcgtttaatttttaaccgacaactttctcctccctagcgtgggtttctttgttttctggcgcaattattttatttttcacgaaagcataagttcatttagacaaaggttttttatggctttatgagttggaagggctacatggaaattttgtggtttttggatccggattttcgagtcataacttacactaattaattggttcatcgtttttcaggaatgtgttggtcagtcatcagcgttcgaaaaagcatcgtcaaatggtggaactgttgcgtgcgcacatg

SEQ ID NO: 117683 - DNA, 501 bp, Heterodera glycines
tgtcgccgagaaaaatgcaaagagaacgattgaaattaaatggtatgctttagatggcgggctctttttgaaaaaaactgttttcagggtcggagaatacgaatccggcatcaatttcgtcctatactatacccggaatcgaacaaaaagatcgtaaattcaaatcctttgaattttaaaaatggtttaatgcccaccatttaaagtattattaccttaagatttatactactaaaatatttagttagaagattttggtttgttctgtttatttatcattttatttttatcgtatcgtatttattccaatttcaaaatttttatatttgtttttgctgaaaagattgcttatttagtttactttctttttattacaaggaaagatttcctctgattttgaatttgcaattttccatgaaataaatgtgaacatatgtcttcttcaagaaaactttttataaaaaagtaatcatttttctaaatttcagcaattggaatatg

SEQ ID NO: 117684 - DNA, 353 bp, Heterodera glycines
aaaattatacaataagaattaattgaataaaaataaaattaaaatacaaatatttttcctgcaaaaaatatcttccaaaatatacatttaaattttataagtttattttatttcttataataaagaaattatcttacatattttctgtataatgaccaaaaaatctcaagaaagtaaatggctcagaccaaacaataatcaaaaatatattatatatttaataaatattaaagtattatttttattatatacttactcattgtccgtttatcacataattttggtatttttatttttcatatttttgcagggcttctgctcctccacacaatttaaaactgtttgccgaaatg

SEQ ID NO: 117685 - DNA, 245 bp, Heterodera glycines
ttttttgaactctttaaaaatttgtaaaatttttatttggtaatgatttatgcagaaaaaatattcaccccaacaatttaactgtttttacgacgattttcctcctcttttagatgatatctgctggatactgacgggccggaaattaatcccaacgcatttccggccttggaaaattaattattcatttttttcaacgaattattttttataatggaaaatattttaatttaaactcaaaaatg

SEQ ID NO: 117686 - DNA, 94 bp, Heterodera glycines
cgtaagttttatcacttgaatttcataaactttctcaacaccttgcaataggcaaacagcccggcgttgcgatcggacgcctctgtgacaaatg

SEQ ID NO: 117687 - DNA, 927 bp, Heterodera glycines
tgttagtttaggcactctgatgctttttctatcaaaaagggagatgaataaaatttttaaaaatttttaattcctttttaaacagcccaaaaagtttaggcttaactttttttttcagaaacttatcagaagcgcaccaaactttgcagggatactgaaaggaagagaaataacctattttaaatattatctagtcagttcatttaaataatttttatccaaaaaatttttttttgggttttcggggcagtccccctgaaccgatgcgcccagatttatggggagaccgaatccttcgggaatagcttccctatagtctgtactttaattctgcgttggagttttgctccccataattgtttgagtaccccaaacggacacttgaaaaaatcgatttttttgttttcggggcagtccccccgaaccgatgcgcccagatttatggggagaccgaatccttccggaatagcttccctatagcctgtactttaattctgcgttggatttttgctccccataattgtttgagtaccccaaacggacacttgaaaaaatcgatttatttttgttttcggggcagtccccccgaaccgatgcgcccagatttatggggagaccgaatccttcgggaatagcttccctatagcctgtactttaattctgcgttggatttttgctccccataattgtttgagtaccccaaacggacacttgaaaaaatcgatttttttgttttcggggcagtccccccgaaccgatgcgcccagatttatggggagaccgaatccttcgggaatagcttccctatagtctgtactttaattctgcgttggatttttgctccccataattgtttgagtacccctaaacgtacacttgaaaaaatcgatttttttatttcataaatatttttttcagaaagtcatg

SEQ ID NO: 117688 - DNA, 292 bp, Heterodera glycines
tgctgagtcttaccacggacgacagcaacgcttgtaccagcctggtttcttgctcggcagatggatagcgagttttcaggtacttgtttgtctctaacttttgtatcgtaaatgataggaactaagtcatgctgaagaagaaaccgcagtggccgttgatgaaggaagacaattgccagctcgcccgcttgaattaactcttgaattggacagaggaattgcctcagcgaaggcggatattttggcttttttgaatacggattactgcaatgatgaatttgttgaagccatg

SEQ ID NO: 117689 - DNA, 118 bp, Heterodera glycines
gccgaggagttttatcccgtctctattttttcattttttgtttttttatcccaaaatgcaaaaaattgtgcggttttgtcggttaaattgtcccgcttgcacaggtgtggacaacatg

SEQ ID NO: 117690 - DNA, 388 bp, Heterodera glycines
tttacaatattatatcaacaattaacgatctgattgctaatcaaacgtgaaaaagttgtgcatcaatcatgtgccgttgttttcggttcgatttggcattggtcggcttttgcccctcctcgccttccccccccccccccggcccgtccctctcctcggcccccatcattatcacttctccccaacctttgcccgtgttttgctttcgctttcccttctcataaattggatttgcttttccttcgttctgcaaaagcaaaaaacattttttttgttgtgaattagggacaaatgaaagtatttgtttactgagaaaaacattcggagaaattcgatttttcattttacgattttttgagcattttttgagtgaaaaaggaggaaaatg

SEQ ID NO: 117691 - DNA, 327 bp, Heterodera glycines
gtgggggggcgaaggcccaccacgaggccgcgaagagaccgagtgagtaccttcggtgcaggaaaattattaaattttttaattgctttataaatatgccaaaaaatgtaggcttaactttgttagtgaaaattcgatcactcatattttttgataattgagcagaagcgtaccaaactttgcagggatactccccggtaaaggactaacatacactgaaatgagcgccgagctagctggctcaaaaaaatttttcgaaaatatgagtctttcgtttttatttatttgcaaaattaattcataaatattttttcagaaagggttatg

SEQ ID NO: 117692 - DNA, 87 bp, Heterodera glycines
ttttgctccccataaatttttgagtacccaaacggccacttgaaaaaatcgattttttgtttcataaatattttttagaaagtcatg

SEQ ID NO: 117693 - DNA, 203 bp, Heterodera glycines
atgaccaactcgggcagtcagaacattggcaatgtgatcaggtgggaattgaaggggacaaaggcgaagtgatcaaagagaaggacaaagagacagtggaaaacgattgactgataaggaaatgattcaaaaacataaataaaatgatcaaagaaacgtgttaattgatacgatttgtcatggttttgctcttggcacaaatg

SEQ ID NO: 117694 - DNA, 408 bp, Heterodera glycines
ttaggaaatgcctaaaattttaattgatttatttaaataaaaaatataaaaatcattctattatgtagaatagaaagaggaattcaatttttaatttgaacgtttgtttacctcaagaatttcctaattaggaaaaattatttggcttatcgtttttcgtaaatgtttgattttccgattcattgcgcaattaggaggagaaagaaaacaagtttcgagaaaaagataaataaataatcattttggaatgcacaaagtactgaccaactcacaaaattaaacagtaaatattataaacacattctgagcatttaaaaaaagacaaaaacacgcggaaagagccgagaaaacgccggaaatgtttatgtaaaaaataattgtacttaaaaaggggagaagaaaaaaatg

SEQ ID NO: 117695 - DNA, 179 bp, Heterodera glycines
atgaaaaacacttttgaggacaaaatgtcacaagacaaagtgtcaccatttgatgatacgaatgaaaatgttaatggttacaaaatgtctacaaaaaatcgggaggatcaattgtcagaggaaaaaaagtcgacaacaaattttacgatacagtgtcgttcgctgtatcagagaaaatg

SEQ ID NO: 117696 - DNA, 355 bp, Heterodera glycines
ggttcgtttgagggtccgatttgatttgtgtccagaagtagaagaaattgggggtattgaaagacaaagaccctatcctgcccgtaaaattcgtgcattgcccacctttgatatttcgacaattcacgttgaaaaatgcctttcctgtcccatatgcatgtgtccttttgtgagtggggagtgtgccacctcactccattgtttccatatttttcatgccccatgtattgtaccatggcttaggattcagcgctcatgtcctgtttgtaaatttttattgccatgaataaattttttgttgttctctgttaaggcgattgaggacagtttcgtcattgagcgcaccacgcaaatg

SEQ ID NO: 117697 - DNA, 663 bp, Heterodera glycines
ggttgttcaagaattctttgctaaattttgaaaaaataaaataatttaaatgtgaaaataataaagcgccgcccgctaacttctaaaagctctggagaggtataatcaggggtaattactggtggttgatcagtttcacccactccattttcaacaaatgcactgccttaattaaaatataaatttaaaaaataataataatcgaagaatggtgactaatagatagggatgcgatttttaggcacaaaaatcgcgaaataggcacctaaaaaggcataaaaaatcgcaaaataggcattaaataggcacaaaaatcctcgaataggcactaaaataggcaaaaaattatttttattatattaacgtttttaggtagtaaatcacgtaaaaattaatcaaaagacttacttttgcttatattccaattgttttaaagttttttcgaataaagacaaatttttagccaaaaatttttatcatgaaaaaatattaaattcggtgatcaattttttgaaatttttttttcaattcttagcggtgtattttttgaattttttttttgggtcatttcttagtggtgggtttttcgtttttattgcatttttgttaaggatttttcaaaaatcctaaaataggcacattaggcacaaaaactccaaaatg

SEQ ID NO: 117698 - DNA, 714 bp, Heterodera glycines
ttcactgaaatcgcaccgatattttgttgatgaaaaatgattattattattattattattaagaattatgcacctattaaactttataaatttttttattggtattattgttctattctattttaatattttaaaattaagaattaattttaacttttataatataaaatgttgcattggctaagaaagaagaaaaacttcttaaataaaataattaattaatttttaaaaacacaaaatagaccatattcattaatattctttttatattatgttttctttttttgtttccttaactttgcttaaatttattcttaaaaattaactgctatgtattaaattgtatgtattttcttatttccctgcatttttaatgagttttttttcacgacctctttgctgaaaaaaagattcttatccttcgcaccttgtaaaaatttttttggcgctgtgaagcgcaaatttaattattttaaaattataggttaattattgtatttttgagcatttttaatatgttcctattaaaatttatttaaatttctcttgaaaatagtcttatctataaattcctttacttaactgctgtctaatattattttattttttaaatacaaaattttttatcctaactagcggggaaagcgccttcggcgcatcccccgctaggtagtacgatgtattattgagctatgaataataaaaccgaaaatg

SEQ ID NO: 117699 - DNA, 783 bp, Heterodera glycines
gccggccctccttgtcccccaaaagtcttggaaaaaacgtgccgcgtaaaaagcggtgttgaaagcaaaaaaaggtcattgatttacattaatttacatggccggagaccccttcgcaaaattggaaaattggctgctgaccccttgttttgcaataatctgaattttgaggtctatatctgaattttagtgttctttatcctgaatttgaaaaaaaaacttggtcaacctgaatatacatatacttctgaacaattctaatgctaaaaaacaggtactcgcgcgaaaactgaataaaaattttgtatttggaaaattttgtccaaaaatttttatgttctaaaattaccggtttttaccggtaccggtaccggtaccggttgaaaaagttggtaccggtaccggtaccggtttttgcagtaccggtcagtaccggtaccggtttttgcaattaccgattaccgctcaactctagattaaatgtatcaaaaaataatttaataaaaaattagttcctacattttagacactaaaacttacaaaaaaaaaatgaacattggttttggcaacctaaaagccaaaaacatttattcaaaagagatgacataactcttaattttaatattaaaaaaaactccaagactggtaaagaaacgagagagtacagagaagcaggaatatatttatttatttatttattaaatttaaaatgttttaaattttattattttatttaatgttcagataatcaatctgactattcagtggatattacaccaaatg

SEQ ID NO: 117700 - DNA, 297 bp, Heterodera glycines
gttataatagcaaataattatttttaaatcatacagaaaaatttgttttataattttttatttttgccaaaagcatcatggaaatttaatgaataatgtgtaatttatcataaatcacatttttatttaaattgatttatttatttaaattttaaattattttgacgaaagctcaggcaaaaataaagttacttaaatgactttttgtttagttttttttaaatttaatattttatttatatttacataagtgtggccagtgatgtgtggagtttgggcatttcattggctgaaatg

SEQ ID NO: 117701 - DNA, 107 bp, Heterodera glycines
aagtaaaaaaaaagagtaggggtcgtttcggcaccagcctaagaaattttaatttattttgttaataatcattttaatttatatttagtgacgatgttcattttatg

SEQ ID NO: 117702 - DNA, 1003 bp, Heterodera glycines
agcgggataatctaccttccctgtaagtttcattcggaagtcccaccgtcacttgggtacctctcctttgtcagggcttcgattgaaaatttcacaaaattagaaaccagagctcaacaaatcagatttaaagcgaaaatcaaatattttgcaacttgcttcaaatcgttaatttttaactatcaaaaataaatcaaatatttatatttgcctcatattattgatgggcggggagtttgggtcaacggcacggctccctgaaaacgcgacactggaaaatgcgacaccggccgaaaatccgacaccgagagagtttttcaagaaaatgcgacactgagaaactccctcccgcatgccccttatgtaattttcaaagacttagaatccaaaaatcttccgtatgaaccgctccaggctaaggcatacgaatgaatgttcctttaaaaaacatgaaatccaaggacatttaaaatttttattatttgcaatgaaaaatggttaatatttattcaaatggcttgttgtcgcttaagctgttaggacaaaggggcgggcaaagggtgaccacgggaatttgggctaagaatggacaaaaggagcagagggaacggcaccgaatatgggcagggtgaagaagggcgagacgaatatccaatttaaatatttattttaaatgaaaggcacaaaggtgagtgatgattgagggattttggtcccttcttatagcagaaaaagaaacgtgggaggagcacttttggggaacaataagtgggaggaggcgtaggtggagcactttttaggaaaagaggaaaaaacatgatgaataattggacagaaaaacagaaaggacagaaaattattaagaaaaaaccaaaaatccacaaattcaacaatctcccaaaatcgatcaaagggcaattagccaattcagtttttttcgtcggccactgtgccgacattcccggcgtcaattgagttcccggcggaggaagctgagacgatg

SEQ ID NO: 117703 - DNA, 300 bp, Heterodera glycines
tttcttagaatacggagaataaccaaacaccacaaaattttaaacttcgtgagcctaattttgcgtataatcgacaaagtttaatgggagttttggggtgttaccgctgataaaaacaataacaacaacaacagtctctatatattacacaaaaagttaacgaatttttaccccctcccccacactaagttttgtgcgtatttcacataaattctatcttttatttattatttgttagatacatatttctttaaaaaaatacgacagttggttccatcgtcttacaatttttttagaatg

SEQ ID NO: 117704 - DNA, 145 bp, Heterodera glycines
cgcgaaatacttgagagtctgcaaaagcgagtaaaaaagcctcgcattgctgcaaatgaagacagcgtactgaatgttgaggacgcagaacaacaaattgaaggcacttcaaccaggaacaatttgggcgtcgcttcgagtgatg

SEQ ID NO: 117705 - DNA, 253 bp, Heterodera glycines
ggcgcagaccattaaaagtcttgacaatttctcgtactctttgacgctacaccatatgtcagagctgagaggaaatgccggagcggacgaagtgaatgccttttttcgccagttggacgcagttagcgaagattggcccaacgaaaagcgcttaagcacattaaaatcgaaatgttcgggtagggcagaacgcgcatacaattccgccgttgccaataatcccttccggtatgaaaatatccgaagagcgatg

SEQ ID NO: 117706 - DNA, 205 bp, Heterodera glycines
aaattgttgctatcattcgaaagcccttcagattctcttttatcttgcataattccaaaaaatttcatcaattttgaacaaatttatggccataaaagttggaaaatctggttttttaagttgttctggccataatttttttgaacctttacataatttttcaaaattttgcaggctaatagaggacatttacagctttcgaatg

SEQ ID NO: 117707 - DNA, 985 bp, Heterodera glycines
actgaaaatgggggagggttgattggtgcaaaaaaatcataaaaatcccaaaaagtagaaaaaagtcaaataaaaatgcatgttagaagcttaaacaaagccgtatttttaaagccatttcaaagctattttgagtcagcagaaataacaaaattgaaaaaaaaccttttccctcatataaatgccattttcatgtggtgtttgttaacaatgagtcggatcggggttttcggtagtaaaaatttctcatcttgattttcataaaaattctcgcacatctttaccggttaggtgctatgacgaagcgaaaaaagaatggatgtgagggttctgaagggaagtgccgtttctcaattaaatttaattattttagtatattgattgataaatttaatatcactaactgatttattttattatttaatattcgatatttgtaaaaacataatgggtaaatccggggggcacgtgaattattgaagtttcacccggggtaaaaaggtggacccggaaaagttcctgaatacggattcggagccctgaaatctaactaattaaatttgattattcgagctgaaacggcccttccccccaaagcctgttcatccatactttttacaactcttcgcccatacttttttctttggtttggaaaccgagctataaaacacaaaaagaaaagtcccatcttccgatcaattcttaatttgacatttaatccgctgagttgaaccagttttgtgcattttaaaaccaaagattgttcggacctcgccttgtttgctatgcgggcggaagatattgcaaatgaaatggccgatcattggcctgttacactcatttcgttatgtgtttggcagccaatcgcgcaattctctcgaagaatcgttgttcgtcggtcttcgctcgcccccccccccgcgctttaaaagggcctcccgcaaaacttcgccggcaattgaaccacaaaatttctcccaaaatg

SEQ ID NO: 117708 - DNA, 362 bp, Heterodera glycines
ttttgagttgggtaaacaaaggaaaaaaaaattaagacgaataaaatatattaaaaaaattatcgaaaaaagtcttggtatcattaaatggccctttaggttctctatctacttaaaatgtttccaaaaaaatatgagcaaatattgtaaaaaaaaatatttgtccaaaacttttttttgattcataaccaaattttttggaattttgcaagaaaatagagaagcttaaaggctatcgaatgttttgtaatcctcaaaaagaaaaataaggcctagcttatggatatatattgtggaaagagtttttcttttacatataacctcaaaaataatggattcttttcagcttccggcgacacatg

SEQ ID NO: 117709 - DNA, 736 bp, Heterodera glycines
  unsure (1)..(736): unsure at all n locations
ttttaaattccgatttataaaaaaatatattttatgcatacatattatgaatgaaatgcatatgaattgtataggaaatcaatttattaatttttttatcttacttaaacatatcaaacgcaaaaatntgcttcattttttataattttatacaattttgataaaaaatttatttatatntaaattgtaaaattttttntaatgaaaatttttaaaatacttcgataattaattaattgctttatttttttagattagacaatccaaatgtttattttataatcttatatgtaaagattttatagtaaaatttatttatttaatttaaaaattgttatttaaattaaaacgcatttaaaaaatttagattaattaattgcttgattcttaaaaaatgaacaaaattattattgtgttgtcagcttttttaatgttcacagccattaacgcgatggaaaatgggacaaaaattgaagaagtaaataatttaatttaaaacttttttaattcatttcaattaaatataattaaggaaagaaagctcccgccgataataatccgtcaaccgtctggaaaagaagtattaaaaatttatttgaatttatttttaaattttataagatttattcaagctatggttattgaattttcaaaacatttatttttgcaaaaaaaacaccaaaaatatttactaaaaatcgcaaaaaaaaaaatttatcagccaaattccgaaatg

SEQ ID NO: 117710 - DNA, 1003 bp, Heterodera glycines
atgaggaggagaataatgcccaacaaatgcaaaagtcgagcaccgaacaattccaattgctcaacgcattttaaacgcgaaaattggtctttgtatgtgggaaaaatgtaagaaaaactaaaggaagtactttttaaaattgacaaatgaagggaaaatcactcggaaacggcgagtaaaaagtcgtaaaacttatcgattaaatgtccaaacatttccaaaaatgaggaaaaccgcgcgtagaattccctttccaattgacgcccctcctttaatttgcgttaaagaaaattcattttcgtttttattacctcgcttccctcagtaaatttgtcaaatgaagcacggttttcgaagtaagaaaagtcgattagcaatttattaaacgcacttgacgaaacattggcaaaatcagtcgggacgagaaatgacagcctatgaatttccgcaattatacaatggctcgtaaatgttaggtcctcaacaaatttcaaagagccgtttgcaattttatttggcaacattttctaaaaaaagaaaaagaaaattaagttcacggaaaatggttcatatctatcctaatcccctactcaaaactagagcccggacagagccgggacctaggattttgccgggctcccggtcctgttcatttttaagttcaaaccccgccccgcagagggacccgcaccgaaaactcggcttttgtgcgcatcccgcggcctgaattgcatcaaaaaacagaatgccaaataatttaaaattatgtaaataaattttcattcaaattccataaaattttcctgtgggaccatttttgaaaattttaattacctctgagaacccccctcccaatttggttttttgaaaaatcggtcccaagaaactagaaaagtaataacgtctcaatcataaatattggtcctctaattaaattgtataaatccacatcacaaataaacaagtcgcgcaaactttactacatttattctttaagaaaatg

SEQ ID NO: 117711 - DNA, 200 bp, Heterodera glycines
tcactcattcagttgaacatgccgagtcaacggaaaaaattgagcagcagcaacaacagaagcaaacgatctttggcaaggagaaaacaacgccaagaagaaaggaagaagaggaaaagcaaaagagagaagcagaacaacagaagggcatttcggacgaattggagaaacagcaaatgcgaagaaaggagggaaaaatg

SEQ ID NO: 117712 - DNA, 108 bp, Heterodera glycines
aagcgggatatttttgccgaaatcacctacgcgccgattcagttgtctattcaattcgaggggcttcgaatcgctacggaagaggacctaacaaaatgccatgccatg

SEQ ID NO: 117713 - DNA, 73 bp, Heterodera glycines
ttgcacattaatcaacagaaatgggaagttcaaagacaggaactgaaattattcacaattatttttaatgatg

SEQ ID NO: 117714 - DNA, 677 bp, Heterodera glycines
attatgacccctcgaaaatggtagaactttgggcgccatggtgccgataggcgatgccagaaaattttgattttcattgaatttagttaagaaaatgttgcacgcactttgaagtcataaaacgaaattttttgcgatttttcaagaaaaaatttgtttgtttttttaaatttttaaagtttttggtagcagttttgcataaaaatggccagattagatcattttaacaatcattctcatacatatgttttccttttttcacatagaattctcttcttatttcggttttgattttagcttacaaattttctacaaaaaattttcatggatttggacgcatttcttcgtttcttcgctggggtttgcaatttattttaatgtttgtcttaaactttttttttgtccagccgcgcagcagccagcaccaatgagtatttacgaacgctttaacaaggaagtttgcgaaaaaaacccttgagcgtaaatctaaaaatgtacatttagttcttaaaaaattggttgcgatcaaatactgtggagtcaattaacgcaagaagcgttgaccacggaggaaagacgtctttgatttgcgccatacagcgtgaatgtttgttgttttttctatttaaaaataatttttatttgcacttttaatagcacctcttgcgtgcacgatg

SEQ ID NO: 117715 - DNA, 621 bp, Heterodera glycines
ccgaaggattcgatctccccataaatctgggcgcatcggttcggggggactgccccgaaaacaaaaaaatcgattttttcaagtgtccgtttggggtactcaaacatttatggggagcaaaaatccaacgcagaattaaagtacagactatagggaagctattcccgaaggattcggtctccccataaatctgggcgcatcggttcggggggactgccccgaaaacaaaaaaatcgattttttcaagtgtccgtttggggtactcaaacatttatggggagcaaaaatccaacgcagaattaaagtacagactatagggaagctattcccgaaggattcggtctccccataaatcaaccgatatgtattcgattcccgaaattttttggataaagcgtgccgcaacaaaagcggttttgaagaaaaaaaaactcgcaaaaataaggatgatgcattttttagctatttcttggacaaaaaaaatattttgtaattaattcatcataaaatttttcttacaattagattttttttgataaaattttgtgtctagggatggtgatgtgcctgctctcctacggtgccggactcgacgagcaggcggacgacagtgacaaaatg

SEQ ID NO: 117716 - DNA, 129 bp, Heterodera glycines
tttttggagcacagtcagcccctcttcgaccgcgtggacatctttttcaaatgcgacggagccatcaaagggcgtgggaaggaatttgtccaaatttggccccttttccgtgccaacatcgtcaaaatg

SEQ ID NO: 117717 - DNA, 65 bp, Heterodera glycines
  unsure (1)..(65): unsure at all n locations
ttntgggaatggagcgacaacgataaaaatggacaaaatgcctaaggcaaacggtgccgggaatg

SEQ ID NO: 117718 - DNA, 100 bp, Heterodera glycines
ggttaatatgcataagagataattattttgcaattccaacccccacccaaattttgctcctcttttaagtgcgtggttctttcgggtattctttacaatg

SEQ ID NO: 117719 - DNA, 339 bp, Heterodera glycines
aataattttttattttattaaagtaaactactatttaaatacttattcaaatattgcaaagtatattttttataatttatttttttgaatatgaaaatttattttgtaaaaaatatttaaaatttaaatcatatttttatatttgagtgaaatctataaaaattcgtctccgagggttcaggctgagctttacgacttaaccttaattttaattacaatgagtaattaatatgcttttaatgtaattttttcaaaattataaaattattttttcaaattatatttccataggactttggcgaaaaacgcgttctgggccaagaaggtcgtccaacaatg

SEQ ID NO: 117720 - DNA, 176 bp, Heterodera glycines
attagctgaatctccaacaattttttttctttatttctgaataaaattcgttgctaattgagcttgcccaatttatgtcctctgaagggttgtacgccccatatttcctccttattgttaatagatttggctattttaatttatatggtaatttctgttagagactaaccaaaatg

SEQ ID NO: 117721 - DNA, 711 bp, Heterodera glycines
aacgaaggcaaaaataaaaatattattctgtgcatatatgataatatagttagtacaaatgtatatttttgtagtaaaatcgagcctgattagaagttccaagaaaaatttcaaatttgaataaaaatttgaaaaagaaaagccaaaaatgtcattttttctgattgggaatgaacgaaaaaagtaaaatgggagaagtccccttctgtttgcaaaacgtttttgaaaatgatgttttattacatgttttcatgttcgcaatttcttgctgattgacccagctagactcaaaattcgggacctaatctcgaattcctgtcttggctccatgcaattttattaattatgattaattgttttttttgtctgctgatgacgtactgctcggaaatgtgggtgattcccgtggacaaaacattgtttaataaatttttgtgttgtcatttcttctgtcgttgttggccattaattggagtgattggcaattcggggggaggggggagaatctgtcggtcggcggcgagtgaattgtccgagtcgttcgttgtccatccaatcgcattgtccccccccccctttcgatgggcccctccgatcacttcccctcctcccctctgatcatcgtcacttattagtccgtccttccactgaatttcgttcatttgtccctaaattcgcattttgctttcccaattaatttctccaaaaatg

SEQ ID NO: 117722 - DNA, 355 bp, Heterodera glycines
tcgagaaaaatatcgggtcgggtttcgggtcgagaaaaaggccgggtttcgggtaacccggaacaaccctggtgggcacggcctgccaaaattgcagaaatttttctgacttggaaacaagtcatgaccagagaaattctaaaaccagatttttcgtatgggtttcgtcgacgaatttttttggtttcgccgggactggggttaattattcaatggtggcgttaaggattgcagtcgggattagatttttgtatatactttaattaacaaatcttgaatcttgacccttaatttatgacgggaaagaattaccacgatccaattaaatgctattgtgttttagataattcaaatg

SEQ ID NO: 117723 - DNA, 252 bp, Heterodera glycines
ggttggtcggaaaatggtataaattgaaatcatcatgattggttttggttacggtgttttgaataaaaaacggtcattatatgggttagatatttatggggatggcagaaggaagcggagtgagggagaaagtgggataaaggacatgggattgatcagtcgattaaaaagcattccacgctatggaaaaaccgtgggtactagtccaccgggccagttatcttttatgtactaaggatttattaattgatg

SEQ ID NO: 117724 - DNA, 440 bp, Heterodera glycines
tggccgctttgaccacgtcctcggcgcattgcacgctttgctgctgcacgtgcagcaatggccacaggtagaaacagagactaatcagaacagcagcagagagtggagaaataaatgagtgtcggcggatgcctttcgattgattataaaaaagtgattgatcacccaaaaagtgattaaatgctggaaaacactgatcaaagcgaaggcaaaattccgtaatccttcgtcattaattaagtcccaagaggggcaattaattcagaattctaaccatgaaaaaggtgccattgtttgctgtggacaatgaaaatgtcctcactgtgctgccggaggtaaaaacagaaaacccacttcccttggatatttaaaattcgatttgaaaaagtgctaattaatttcgctaatgattgctttccgtccgatttgagggggaaatg

SEQ ID NO: 117725 - DNA, 119 bp, Heterodera glycines
ttatggtttctttgctaaaataaaaaaatcatttttaaaaaggtccaacattttttggaaaatcgccaaagttttcggttcaaatgaaatcggaaaaacaaaaaagccattccaatatg

SEQ ID NO: 117726 - DNA, 102 bp, Heterodera glycines
gaaagtggaagaggaaggaaagaggaagagaacgagaaataggaagagaacgagaaagaggaagaaaaagaggaagataaagtggaagaggaacggaaaatg

SEQ ID NO: 117727 - DNA, 126 bp, Heterodera glycines
gacagtgccaatgcgtcggatggccaagcggtggccaaatggcttttgtcgcctcgtccggacggtttgccgaagttgctcagatgcggattccgggggaatgaggagcaatggtcttccaaaatg

SEQ ID NO: 117728 - DNA, 107 bp, Heterodera glycines
aaactatttttttatggtctgtaaacgacattagtaccgttttatttttggtgattttgcagcatcagcattaaattttccctttctcccattttgcggataaaatg

SEQ ID NO: 117729 - DNA, 83 bp, Heterodera glycines
tctaattgatttgataaaatccatccaaagctcttaaatgactttttgtctcttcgattcagccgtcccacgctttaaaaatg

SEQ ID NO: 117730 - DNA, 219 bp, Heterodera glycines
  unsure (1)..(219): unsure at all n locations
aatcaagccctaacgagttaaaagctgaattgaaatgtccatctaggccaaaaatttaatttccgaaaaatcaatattttttctaaaaatattaccaattaatagagcttgaaaagttttggcttgaaattggttcgttttccctgggaattcattgaaaataaataaggttcaaaaaccaaaaaanatgataggcaagtttcgacatctacaattatg

SEQ ID NO: 117731 - DNA, 410 bp, Heterodera glycines
tttttctctatatttaaaaattagcttattgtttacataagctctgtactaaaattatagccgcaagatttttttcatcccaactacttcgcgtggggtcaaataagctgtttaccagtcatacttccctaatcaatattaagaacgatataaaaaatggaacagttaaaagggaataattttcaataatttttttcgataattttttaaatgaaaattgtcctaaattgctgtaacaaatttatagcatcaagttttgatactaaaaaattcatactattgtaactttttatctcatcaaaaaatcaattgcacaaccatgatctgatcctttcaggatgacctgaaaatttatcttggtttttctctaactaaaaaacaaacaaagtaacaccagaacgccccttatg

SEQ ID NO: 117732 - DNA, 716 bp, Heterodera glycines
tgattggtcaattcggcgccatctgctcccacttggccattgtcgtttgtgcgcaatgcattcccgaagggccaacccgcgcgtgggctattttgggatgccttttggtgtttctcgtctttttccaggccagcattgggcccgtcacgtggtcagagttttgaaaaagaaaagaggggagaaatttaaagagaaaaaaggagggttttaattccaaataaattggccattagccgtggaattttaccctaaaattggtgccttctatttgccaactattttcgaatttctctcattactgagttcgaataatgaaaatgaccaaatgcccatcgacccaattaaaatattttttttaggcttttgcttgccgaaattttcccgcttgaaattcggggaattggcatgggtttgtcgactttggccatttgggtaaggaaattacgaaaatattgaaacctttttaaatatgaacaaaaaattcaatataacacaaaattgaaatgataacactttttgccaaggtcacgagattctgacaaaaataaacaaataacccgaaaatggactctttttttgataagactcacaaatcatttgcttttggaagtttaacttaaatatttaatcaattcctttttgattttgtccaaatgttaatttgccatttgctaattgaggtcactaattgtgccgaaggcctcctctttccgatg

SEQ ID NO: 117733 - DNA, 1003 bp, Heterodera glycines
taaaataactagaatataaaaggcgactcgttagttcactcgctcataagaaaaattaaaattattattattaaaatgacttcctcaccaaaaagtaaataataataaattttattttatttttcaatcaattcctttagcttccctctcccgtcgttcacctacccctgagattgatgagctagatgaagtatccgcatggtatgacatgatacaaacggacgacgagaacgtaaacaatttttttatattaatatgattttttcgctcattaagatacttaattggttcacacctaagatggcccgagttgtgtgccaggaggttatcgaatttgctcagcaacgcaacatgccgtgtgagaaggttgtcaagtggaagaaaattctggacaaaatttgcgcacaacttgcgcaaaagaagtgatcactttccaaaagacgcaaagaatttcctgttacttttttaattaaataaaagatttactcagtgtaaatggctttctttgaactgtcaaacgggactcaatcctgagtgcccacccaccgttccttaatgtttaaagtgggtgtgagatactttagggtcatgcgggagctgtatataagtagctggtcaacttgtccttcatttcattcttaaatattttgaaaaaaaaaatggcaatcaatatttgcgacaagaaatcgctcgtcaaccaaatcctcgggcaggcggacctcaccataacaacaagcggcataaccgttagtgggcctcgtctgtccaccccacgatttatacccttcgaagagtgtgggcgctgccgcgcttgtaaggctaccgaagttgaggttgacacaatggtgaccaaagagggggtcacattgtggtgtagtcggatcagcaaggcccaattcgtcccatttgatgtcgcacaactcaaggagcgcagaccgatgagaaacaggacctgaaacgtaaagcgaaggtagctctagacttggtggaggcaggtctaatg

SEQ ID NO: 117734 - DNA, 271 bp, Heterodera glycines
atttgatatatcaaatgtgagcaaatcctaaaaaattacaaaattggatattattttgttacaagacacctaacaaatgtataatgttttttgcgatgagaattttttacattgaaattacatattagaattaaattttctatttttatggtattttttaatccattgaaaaaaattagtaaatttccaacaaattctctattttttaggtctgtcttgacgaagtattatatttatatagtatttcataggctgtatgccaatcgccatg

SEQ ID NO: 117735 - DNA, 570 bp, Heterodera glycines
aaaaggaattaaaaatttttaaaatatttattcatctcccttttgatagaaaaagcatcagagagccttatttaacttttaattaacatttggtgcgtttcagagcacgttctaaaaaatatttatgaattaattttgcaaaataataaataagtaatgaaaaagtcagaatttcgaaaaattttaaaaacaacaagcgttggcattttttcaggttaagttagtcctttacaatggagaaggcctgcaaaatttggagagattatatcgattttagtgcgctaggttcgatgaaactttttaaaatataagcctaaactttttggcctgtttaaaaaggaattaaaaatttttaaaatatttattcatctcccttttgatagaaaaagcatcagagagccttatttaacttttaattaacatttggtgcgtttcagagcactttctgaaaaaatacttatgaattaattttgcaaaaaataaataagtaatgaaaaagtcagaattttgaaaaattttaaaaacaacaagcgttggcattttttcaggttaagttagtcctttacaatg

SEQ ID NO: 117736 - DNA, 113 bp, Heterodera glycines
ggtggactaattaatgaattaatgaatttgatattaaaattgggctaatttatgttattttggtcttaatttagtgacctaaaacaatagaagtgatcacacgttacacaatg

SEQ ID NO: 117737 - DNA, 455 bp, Heterodera glycines
tttcggttgatattttatcattttttaaatgaaaatccgtacaaattgagcctagtaatcccaaaatccagccttttttgttgaaaatctgttaacaaatttgtattattttcacttgaaataaattaaaatttgaattttttaaaatttttttgaatttttttaaaaattccctgttggtcccggttcccggtcccggacgaaaatcgaggtccccgtcccggtcccggcttctcaggtcccggcaagtcctggtcccgattttgccaaaaattcccagtcccgtggcactctacaaaaaataaataatttatagtttaactctaaaaaaatttaaggaaaataaaaatggtttaatttaaaaggaacaataaaagaaattaggaaaagccagaaaacccattgaatttcgcgaaaacaatgaatttttttagaggaaccgaaagcaccacatg

SEQ ID NO: 117738 - DNA, 216 bp, Heterodera glycines
tttttttaaaattttttttattttcagcaacttcgaaacgagttcaacaactcggaaaatatggtggatatgttgcgtcgtcagttggaggacgaggtgctgctgcgcactgagctggagaatcgtctgcacaccgccaaagacgacttggattttgcgcgtcgcagtcacagcaaccaaattgaggagatacggcgcaagcgccaagtggaaatg

SEQ ID NO: 117739 - DNA, 363 bp, Heterodera glycines
taatctgtaaaaaatcaataaattggcttgggtttcactgtgtgtttgaattggcgccctttgtatctttctctaaccactacactctcgtctatgtgtttgtggatgggcgtggcctatcgattaaaagggacagcccgtctggaggtcgctgcgcgctaaaacccctctcactatcaatcaataattacgtgttttttttcgcaggttcattttatgcttttaacaattataatcataaactattttttaatcgtaatggccccgagaaaaatcaatgatcaattggtgtttgagaacaaaagtaatcattttttgagttttttataataatttcaaattttttttaaatttaaagaaatg

SEQ ID NO: 117740 - DNA, 520 bp, Heterodera glycines
tattaaacttaatttgtacgggtttatttttgttgtctttttagtttttgtaactcatgcgagcgattggtgagcaacatgtgggcagtataaaaggccataggagaaaattcattgttcacttcctcactcattggttttgatcaggtttcactttctcaatcattggacatcatttttctgatcagcgtttagccccatttctactgaccagggttcactctcaatcatttggtcccatttcttctgatcagtgtttatttcctcactcattgggtcccattaaaaaggcagttcaattgatcgctttctttccatttcttctgatcagtgctcatttcctcactcattttgaccaattttttctgttcaatcttcacttcagtcagatcactcactttcaattctttgttttctcttctttcccgctgatcactttcaattcctctgattttatcattttccaattatttggcccaatttcagtccgttccttccgctcactttcaatttcaaaatg

SEQ ID NO: 117741 - DNA, 331 bp, Heterodera glycines
aattgatttgttttgattgattaatgcgattattatttgatccaattgttggacttgccatttaattgttgttgtatttgttttgcttagaaatccataaaaaacgagttaggctttaccaatacttagtacattcaaaaatcattacaggaaattgtttatttaatgacttctttcatttgattctcccaatttgtccgtcattaatcttgatccggaatcgtcagacacaacatttatcattttaacgggctaaattttgaattaccaattcattcattaactgtaataattagagtaaatttttttagttcgtcttttttaattcatg

SEQ ID NO: 117742 - DNA, 1003 bp, Heterodera glycines
aataatttaaaattataatcaaaaaataataaataaataaatcccgctaaaataagaaataaaaatcaaaaacgaacaacattataacaaattgacttaaataatatataatacattgattttatattaaaacgattagacattggcatttaaattaaaaggaaagtgcatcatattatggaattattaataccatacactgatagtattttaagctttttgaattaattttatctataatatgctttaatttttatttaatttcataagtgttatgtcaaaaaaaataataaaaacaataaagtatttgtatttgtatggtgagaacaacatataaataaattaaatactacaaactaggccaatataaataagtaaattgaatttattttttttaattttaatttctattagctttgtactgcatgaatttaatgtgaacattttgacataagcaatttgataactaataaataaaaatatttaaaatatcataaacaacaatcgaacaatataacatgtaaaaatatttttatttaaatttttatatttgattactttacgaatacaaaaatcaattgaacatatctttcgctctctcctctctttctcttcctctctctctctagtatttatttttctctaatttctcattttcattttttccattttctcttactcaaaagaacaaaaaacaatcaaagaaactaaataaataaacggcaataacataatgcaagtgaagggcactctaataattcggcataatattttgattgaaattttttcctaataccccaaacgtttttttcctttataagtatatttcaggattttcagaaattccttaacacaaatacagtaataagttgtcttcttacaaattttaagaaacttatttttttaaaatttcatattaaaatcacttcaaattttacttttattaacttttttatttttcgtgcctttaagcatttgctaattgtaagttatttaggaaatg

SEQ ID NO: 117743 - DNA, 148 bp, Heterodera glycines
tttattgaagaatgatgagtgggagcaaattgaagaactggttggggtgttaaaatgtgctgaagaagcaacaaaaaggttcactgccgagccaatttcatttgtcctccctcaagcacgggcactacatgatgagttgtacgaaatg

SEQ ID NO: 117744 - DNA, 272 bp, Heterodera glycines
atgatcagcagtaatgaatggttaaagaatccacatgctcagcctccaaccattcaattgcaaactgtttcaattcatctgaaacaattccgtaaccaaaatggcaaaaccgatctgctggaagacaacaaaaaaggcgaacaattaatgggggaagtgatgaccatgagcagtttaatggggacaaataccacgggaaaaagggatgccatgggctgggcagtttaatgggacgagtgccacggaattccatgggcattcatttcggcatg

SEQ ID NO: 117745 - DNA, 1003 bp, Heterodera glycines
  unsure (1)..(1003): unsure at all n locations
cagtgtttgagtgttgttgttgtctccaattgtgatgacgtcatcatcattttgaggggaaaaattttcccgtttcgactcatccatttctttaaattaaaaaaatttaaaattattataaaaaacncaaaaaatgattacttttgttctcaaacaccaattgatcattgatttttctcggggccattacgattaagaaatagtttatgattataattgttaaaagcataaaatgaacctgcgaaaaaaaacacgtaattattgattgataatgagaggggtgttagcgcgcagcgacctccagacgggctgtcccttcttaatcgataggccacgccatccacaaacacatagacgagagagtagtggttagagaaagatacaaaagggcgccaattcaaacacacagtgaatccccaagccgatttatttattttttacagactatggtactccctctgactgccgccctatccaaattgctaagctgtaaacccgaaaatttatcagaatatttgaacaaccccgaggcggtgaacaaagcgaacgcctacctgtgtggcaaaaaactcaaaacaacctatcagggtcctgattgcaagaccaaagatgtcaaatttggcacattttcgctgaaacctgccgcggaaacctacgcctttgagggatttcttggcaagtttccgaaaattctgtttcggtccaacaccatgcgttcagatgtcaaagtccaacagtatttctacataaaacaccggattcgcctactgtaccctcagctcaagtgcattgttgagtaccacaacaagggccattgcaaatactacccattgggtacaaatttgtatccgaaaaaaataaaataaataaaccccattaagagttgttggccattgaggagggctgttagagtgcacccatcgaaaaacctgccgctgaaacggactatctggactacttgaactttcgcagtgggtggcaatcagcactctactgatcaatg

SEQ ID NO: 117746 - DNA, 69 bp, Heterodera glycines
ctgcaatttttttcattttgccaaaataaaattttcacccccaatttgcaggatgtgaaagcgttgatg

SEQ ID NO: 117747 - DNA, 637 bp, Heterodera glycines
attttcgctaggttagctggttaatttttttaaaatggctcaaaattaaaatactttttaaagagaaaacttaacaatctccgggccgccctcattttgtcagtgaaccccacccctcctcctccccccgaatatgagttttgtgaaagcaaagggataaggttatgtgttttctatttgtcaatctgatgaatatttgttacttttttgtcataattagcccatgacatttggaattcaaatcaaatttcaatgcctaaaaatactatcatatctaataatttactttaattatttattttacagactgagaaaaagcgcattttggcgctttctgccttcattttgttgttcatcggtctgctgttcattgcggccatgatttggaagcagtgatgatcgaccacacaacccacacacgacaaatttccattggcacgacacaaaaaaaacaacaacaaagcgaataatttaattaacataacatcgttgccattgtgtttaatttgtaatcgttggctaattgctttaatgttctttaatccatcttttttattataatttggttggggaataaacgatgcataattcacatttaattggagttcatgcctcggaaagttaatttgaaaaaatg

SEQ ID NO: 117748 - DNA, 289 bp, Heterodera glycines
agtccaaacaatcgaagcacaactggacaatctacgcgacctctccaacaattggattgacctgctaaaccgcctcgaaggagcagaaaaagacaaaggcgagaaagaatacgtcaaattcgacacgtatgagaaaattgccgaacgccatgatgcagccacaaccaaactccgggatctgcgggatctcgaagcaacgctcagtgccgatgccaaactttaccgaggcagagcagaaagacaagcaagagcggatcagcaagcaaatccgccaccacaaacggcaatg

SEQ ID NO: 117749 - DNA, 880 bp, Heterodera glycines
actgggacaaaactatgagagaattgcaatgattggagaagccacggaggaatttgttgcggggttgaaattgggcattttagaggcagaatttcagcacaaaatagccgcttttgctgacccgtgcatttacggcgaagcatttgccaaactttcggagcaaattgccaatgtgcaaagaatggaaaaatgcaacaacaaaaatgaatatccgataacagttgttgaattttgtccgtttggcacgggaacagtctgtgccgctgcagaaaaaaattgaacaaaaattggatgaaattttggagaaaacaaaacatgacttagagcaattaaaagaccgatataaagcaaaccaataggaggaaaaagagaaattgagtcaggttagaaactttaaaatgaaatttggattgggttatgaaattatctatcaatgaaaatttataaattaggtcgaattttttgaaaaacaagagctcagcaaggcctaaatggattttgtaactcattccaacctttcagaaggggttaaaattttgcaaaaaaaaatactaatttggagtttacactatgtaagcatgcatgctgtaaggcattcgagtttatgaattacaaaatgcaccattttttaaaattaagtatttcgtaaaaaaaattcacaccctattaataagcaaatataagtttatttattaatactcattagcagtctagtgatgccaaataacgagaaatagctcatattaaatgctaaaactttatatggcgagaatttaaaatttattcatattattccaattaaatgtgaaaatcttttttgtcctattatgcctaattttcggtgtccaatgggccataaaaaaattgtgcagcaggaatg

SEQ ID NO: 117750 - DNA, 642 bp, Heterodera glycines
ataatttttgttttgataattttgtctcatgtttataacatttaatattttaaattaatcaaatttgtttcatttttttagaatgtcaaagaaaaatttccaagaaacttcaaaagaaatccgccgctcgaaaaatacaaaaaattatttcaaaaacagtcctaatttggaaaaatgtttcgaagaagtggagagtcacataaaggaaaataaaaaatttgggataaaagagcacgtgacaactttctattttaaatgccccgaaaatgaagatcccgaaaaaatgtttaaaaaaatcctgaaaaaattaatgggggatgcaatgagccgagaagctgagccgagctggaaaattgagaaaatttcagtggacctttattgcagtgccctgtcagacccagtgatcatccctgcccgccccttccaacaatcgaatccagacattgttttcaacgagttcatgcacaggcagcaatcatttggggaagtgaatttgttagaccagagaatttcaataattattgccacttattctttccctgttaaataaaatttttttcatttttccatttcattattttttgtttattacaataattatttattcgagtttttttctttattaatttttcagttaaaatg

SEQ ID NO: 117751 - DNA, 210 bp, Heterodera glycines
ataatatgaaaaataaattcgataatcactgatcatttttaccgtttttttacttttgataaatttaaattattcatatatttcggcaatttttttttcgatgtttcaatttcgataattcattgtcacaattttgataattttttatacaattttaaaataatattatatcataattttcaacagtttgttcgcgattacattaaaatg

SEQ ID NO: 117752 - DNA, 185 bp, Heterodera glycines
aaatttccagtctctatcaattagcaattaattgttggtaattaaaacaattaaagaggaaagggtatttttacgtaaaaaacccataatatgtcaaataaattgaatatatttaaacagcatgccaacttgtaaaattgatcacaaaatgcgcagctcccttccaaattttagaaaagcaaatg

SEQ ID NO: 117753 - DNA, 512 bp, Heterodera glycines
ggtcagccctctttagggcctacaggtgaattgccatttagcgctcaacccaataacgtgccaacgcctggactaagggagggaggagggccatgatgtgcaacgttagggcacttccggtttccattgcattatgcgatgtgtcaactccaattattggaggaaaccaagtgcatgtcggctgacgcaaagaccctaacagactaaaacgcgcctaggtagcgaagctcaagaagcgcgcagcgctttccaagcgccaccctcgcatgcacacacccgctagtttatatactataaaatcaaatcgtgtttcgttgctaaaacaaaaatctccggaaccgctaatcggggggagctgaaatttggcatgcaggggtaacttttgacggcgcattcaggaaaactataggcattccggtccggcggccaactgagcgccagcggcgctgaaatggctttttgcttttttcaagagcctgtaaaactatgggttttggtctgatcgaaaaatg

SEQ ID NO: 117754 - DNA, 91 bp, Heterodera glycines; identical to SEQ ID NO: 100405

SEQ ID NO: 117755 - DNA, 203 bp, Heterodera glycines
ttttctaagaaaaaataggagttttgggggctcggcggtgccgataggcgccgccggggaaaaaattggaaattttgatcatttataaacagtttttcactgaaaattagccaatttataggtaaaattttgaaaaattttatgggaatttaatccaattcttaggggtgtaaaagtcgcatttcgcgccaaaaagcgaaatg

SEQ ID NO: 117756 - DNA, 547 bp, Heterodera glycines
acggcttgaagaacgatgaagccaagtcggagtcgtaagtcgtatgcaatcagtcgaaaagtcaaagttgaaaaccgatgatttataaaagacaatccgaagaaaaatgaagaacgtttttatttattggagagaagacaaaaaaccaaaaaaaaagcgagagagaagagagatgaataaaaaaaaacaataaaacataatcaaatttgaacacactaattaaccgcgaaatgtaatcgttttaaaattagtcaaattaatgcaattcccggcgcccccacaaagtgtccaagccacgaaatgtccaaaagagtaaaaacccacgaaatgtccaaaatttttcaaaatttataaaaacaaaatgagtctaatttaggatttttagggttttcggggtcgctgaatacgaatataacctttatattacccgttgcctaaccttaggcccatccgaataataaaaaactcaaattcgagacttggacatttcgtggcctggacattttgtgggtcagcgcaattcccagcacgaatttgacttcaaatg

SEQ ID NO: 117757 - DNA, 262 bp, Heterodera glycines
ggtgtgtttgctcactcttttcaaagggaactctaagaattctgatatgccttcaaatctatcaaaagagttgcatactttctttttatcatttctctttattttctattttacacttgtatttttcatttgaatgtttattcagaaataaaattgaaaaatgtgtcattactaatattaaaaggtataaattaaccaaacaaaaaggtatttaaggagaaaaatagtcagggttttgtaactcaatttggaaattagaatg

SEQ ID NO: 117758 - DNA, 224 bp, Heterodera glycines
ccttgagaggagagacaaaaaaacattggcaaaatgtcactatttttttttggatgggacaaaatctaagtgccaaaatttaaaaaaaatttcaaatttcgaaattttcaagaaaaaagttgttagttttttataagaaaatttaacaaaaaattttttgaaaattttttcaataaaatttcagtttgaaaattaaaaaaaaaaattttagaggcgagattatg

SEQ ID NO: 117759 - DNA, 482 bp, Heterodera glycines
tctaaaccaatcaataaaatttctagctgtataattcaaatcaagccttattttcaaggaatttttaaaagtttatttaggatttaaaattttggataaactgtagtgaacgccccgtgaaaaaagggtcaaatgatataccaaacgggggccctaattagtacggtgtctctatttgttaaattaaaaaataattcgtaaataattgtgtttcggccgttaaccacaaacccaaaagccaatgcaatcaagcaaagcaaagcaataaatttgagacttttccaagcatcatggtaagattgattaaattaatcaaattattttttaatttaacaaatatagacatcgtactgattagggtccccgtctcttttgctggatatttgcggttttcgtgaaactacgcggcatcttttagtgcttattttcgggttttacggcctaaatcctacctattttggcattttcagcctaaaaatatg

SEQ ID NO: 117760 - DNA, 115 bp, Heterodera glycines
aattattggttcagtctcagctagagtgttgcgattcaaaaaactgttcccatacatgggaaaataaaggctttttgttaattctaaatttcagctacaaccatttttcaggatg

SEQ ID NO: 117761 - DNA, 359 bp, Heterodera glycines
tcgattaaagagatgaggaaaagaatgataatgatgactattcgacctttatctaactaaggacaaatcttatatatcgagagattgccttaccttctaaatatttccaattttgatattgatacacaatttaaatatatttgaaatagatctgtaaatttatctgtgtattatataaaaaagaataggtgcccctatgcttatttactacggaaggtcttcctgatccctctgatcatattaaaagaacgacccctcggtgcaacgaccaaaggtgaaaaacggcgcaataactaattaaattatgaatactaatattcgtatattaacatttgaaatttccattattggtacaaatg

SEQ ID NO: 117762 - DNA, 1003 bp, Heterodera glycines
tcacgagtgcatagcaattcgaaaaaccatttcaatacaattcgcatccacaatttatattaatactgttactcgaaatttttgagagttgagaccagagaatttaggattcgtgaccaaagtttggccaaaagagtacaagctagggatgtgcgagagtctcgattcccgactcgggaaatttctcgggttttcgcttttcggtctcgggtttttagtctcgaaaaccgagaattttttacaaaattcattaaaaatcacaaaaaaaaatcttgtctgcgcctctcggcgccgccggccttttgaaatagtgcgacgcaaaaaaagtcgttagttcgatgttgagactcctgcgcaaaaactcaaacaatttttgattttaaaaaatacattaaattaatttcattaagattctcggttctcgattgccgagtcgagaaatttctcgggttttttgggcctcgattctcgataaatcatttctcgcgcagccctagtccaacagcatttgcaaccttggtttaagatagaaaaagtaactattcgagtaactttatacacatatttggcatgacaagcagtattttcatgggttaagaaactgaatttttattgttgttgtaatcctttcaaagtttcatgaattatgttgtttgcaaatttacaggaaaactttcgcagcaagtaccgtatttactgaaatacagtctgttccaaaaccataaggtcactaaaatttttttaattaactgcatataacatttgttaacgtcagctaaattaaacattcttggtatcattcgatagcaataagttctctgttagctcacctaaattttagaaaaaatttcgtcaagttttaaataagttattgacaaaagtacttaaggaactaattgttccgacatttttggccaaaacttagccaaattttttgaaaaactattagggctagcgaattaaataagaattaaaaattttgtagctttggagcaaaattatg

SEQ ID NO: 117763 - DNA, 175 bp, Heterodera glycines
tgccgataggcgtcgccaggaaatttttaagaatttcaattgaatttattaacagaaattgtacaaaaattactaatttttgaaaaaaaaatttaaaaaaatttccgtcttttttatcaaaaatttcggaattcggtgccatccctgctttggcactacatattgccattaaatg

SEQ ID NO: 117764 - DNA, 351 bp, Heterodera glycines
  unsure (1)..(351): unsure at all n locations
aaaaaatttttccaaaatgctgattttgaccncaaatgatgaatgatttgttgtttgaaaaatgattattttgaaaattttcatctgacaaccttggtntaaagcttctatgatggagcttccatatccacatttttccatattccactatttatgttcatacttccatatttgtccatatttttgaatttttacaaaagtctctattagaacgacccccatcagctattggtctttttgaaccttaaacacggaaaaattttcaaaatcatttttttagtgtagtatacataaagttctaaaaataatccataaaaaggcgaggccacgctggacaccgcccgttccatg

SEQ ID NO: 117765 - DNA, 188 bp, Heterodera glycines
  unsure (1)..(188): unsure at all n locations
aaaaaatattattagcttataaatataaaaaggaagtaaacaaattttagtattacatgancgaaaggaaaaattacatcacaattaattcgtggattgattatcatataattacaaacattaaacaacaggacattttaagattaaaaattttcaaaaattgttgacaaaaaattcttataggcatg

SEQ ID NO: 117766 - DNA, 243 bp, Heterodera glycines
cgtccgatgtaaaaatgcttatatccgatttatgatgaacaaatattaactcgttgcctaaaaaccaatttagaagtttgggcgaaatacggcaagtttttcatgaatttcataaaaatcaatttatgactaatttcctctcccttctttaaagtctattatatgtaccctcaaattaaggcctaattgtgggagaaaaatttaataatttattttatttttgaagagcattgttcctgtatg

SEQ ID NO: 117767 - DNA, 268 bp, Heterodera glycines
attactaacatacttaaccaataaccaaaattaatagtaataattaatgaaaagctttgaataataaatatttgaataaatttgtttattaaattaacaaataaagtatcttaacaagtgatgtgttaaggccgtgccaacgattaacccgaaattacattgaggagacaatacgactggacaaaacactaacacggcgctgacattggtcacagaccccaattgaggcaaatggcaagtctcggcggacacggaccacagccaaatg

SEQ ID NO: 117768 - DNA, 75 bp, Heterodera glycines
ggggagggaggatggccattcatgggacgcataattccgactagaaccttctttattttaacttgcaaaataatg

SEQ ID NO: 117769 - DNA, 471 bp, Heterodera glycines
cgcagaatgttgaccagctcaattggctgaggctccgtttggagcgcgcattggcacttttgttgcccgaatttggccccttccgttgtctgccggccacgggccaagccgaggaccaaaccaatgttggacgacaattgcacagcgcaatccggtaggaatgtaatgccaaaaatttgggggggggtccaagatttgtaatttttgggtttttggcatttattgcgttttctccaacaaaattcggtgctacaaaatggccaacatgtacacaaactctagaggaaaaattggcatcgctttcaaataaaaaaattttggaacttttttggcattaaaattgaaaataatgatacaaatgacctttaggccctttaagcccattgaaatttttttttaattttcatgccaaaatctcaaaaaattactcaattgccgctttaaacccgctttttgtccagccatggcatg

SEQ ID NO: 117770 - DNA, 455 bp, Heterodera glycines
tcagcggcattccgagtggcgttttttatttgagaaaattaaattgtttagatttgacaggccggcccaaagccaggaaaaaaagttttcagagggggggggggatttgaattttttttggccaaaaattcgtaaaaaaattatcccaatgttatttttaaaattttcagtgcttgctatttttcgtcaaaaaatgatgactaatgtctaagaactttcaaatgctaacaagtttttttttttggatttggacataaatgaaaaaataaatgtttacggattagtaattcataaatagggcattttggaatcccataattaaggatatgtatttcgctaattatttaaaatccagttacgtctccagccctggttttaattggaaataaaatatattcattaaaattcaaatctcaggtctacaagttgtgctcaaatccattctgtgtgcgatg

SEQ ID NO: 117771 - DNA, 164 bp, Heterodera glycines
ataatgtgttgaacgaattccaagctcgacagaacccaattgacattctgatcagtgacggcggatgcgacgatgggtgaacaattttaaatgcttaatgattttatgagtccaatcgtcaacaattgcttagactttgtgctttcaattcgtatccaaaaatg

SEQ ID NO: 117772 - DNA, 401 bp, Heterodera glycines
  unsure (1)..(401): unsure at all n locations
cttttggcatttaaattttggtttccttttgtgtacatattttgtcaggaaattcgttcaatntaatcaaaactatatatcttgtcaacattcgatcaatttaattttctcttattatttaatttttttcttttgtcacactgcatgtctctcttacgttacctcttgtactcatttatgctaacatcagccccttagtttaaagcaggcgcttgtacattgccccgccttctcgcacccatcggtcaataaatctttctctccatagccattcattttctgtttttcaccttgctcattttacgaatattcttgtcttccttctctcttaagatttaacaaaaattaattccaacaattcttttaactccttcgcccgcgggcaagaaacagaaaatatg

SEQ ID NO: 117773 - DNA, 169 bp, Heterodera glycines
ttatggcgaaatgtctttaattcaaaatttcaagataaaactttggatttttgaaaaattatataatttaattcaacagagatttagaaaacctcgaaaatcctttatggcctcggaccaatgattcctagaatttataaaatttaatccataaaaatttttagaaatg

SEQ ID NO: 117774 - DNA, 201 bp, Heterodera glycines
  unsure (1)..(201): unsure at all n locations
ttagcaaattagagaattattaagttaaagaaacggttagaaacnaataaggaaataatcagaaaaaatagataaataaacttggatatttcaaaattaccttgagcgaacgatgccaacctgaggaggaatntaataataaaaataaattttaataatatttttttcgccatcattcacctgtttccagccgtacaaatg

SEQ ID NO: 117775 - DNA, 1003 bp, Heterodera glycines
taattaaaacaaacgtttattttatttcatattttaccgaaaaatcattgattaatgacaaaataataacaactcaaaaaatgatggaaattttatcattagaaaagtgaatgtcatatttgcaaaattttattacagtttcttatagatttttatttacatattcttttaataaacaaaatgtataatttcgcagctgaaatttgtgagaaaatctgaaaaaaagtatagagagaaaaaaaccatcttttttaccattcattactcattatcaaaaattaaaaaaagaaaaaataacgaaaaaaaaatggaaaaaaaaataactttacataatattttttgactgaaaataaatttgaaataaatctttttgtttttaattaagatttagatattataaacaaattttttgttttaataatttctacaaaaaatttttttaataagtaaataataaaaaatatgttataaaacctcaaaattattttaattaataagcaataaatctatgtaaattaataaattcttgcttatctcctccgtccttcattgatcgcttgaaatcagccccaactgtcagcatccgagtcaatatcctgaattttttataattttttttactgataagatttttttcattgcttaaaatatcccttggctaacttaattgcaaaaaaagtatgctggtgtaaactaaaggttaattaattgctttttgaacaccgattttaatcgattgtctaatattgccagaaaataattatttaatctatttcttaatttgaaaaaaagcttttgtaaaataaattttaattattttaatgatttcaccatcatttagaaatgattttttggcaattgttaggcctttttattgttttattctgcttcttttgctccttctttgttgtcagttcactttgcgcaaatatgtcagaattggccaccaaaatgaagagaatagcaaaaaaagggacgaaaaaatgaggaaaacattgagatg

SEQ ID NO: 117776 - DNA, 350 bp, Heterodera glycines
  unsure (1)..(350): unsure at all n locations
aaagatgctgtttgacgaaataaagggcatactttatttgaagaagtgtccaagacnatgcagcaataagcctgcaaaatctaataagtggaaaatacctgagtatagaatttattttcagaaagtgtcaacagacttttggaaaaatatatttgcaatttatcaacaattttgagaagtgagttagaaatgataaacttcacgattcaaaccaattttcgttgctctaattaaccgcgataaaaacattcgaatcaattaaatagcttctgagataataaggtttatcataaaatttcaagtaaaaataaaccctcaattattggtatgaacgatactttccaaacatg

SEQ ID NO: 117777 - DNA, 81 bp, Heterodera glycines
actgaacgaagaaaactgaactgatgtctacagaataataaattttgaaattttacagttccatccggtgtgttaacaatg

SEQ ID NO: 117778 - DNA, 60 bp, Heterodera glycines
  unsure (1)..(60): unsure at all n locations
atttcgtgaattgagaccctgaaaagctttaactnttggtttaaaataatgataataatg

SEQ ID NO: 117779 - DNA, 491 bp, Heterodera glycines
ttatgtttgcatatgtatttacgtctatcctgcctttttgattgtttttggtgcacttcataaataaagagaatcagagcctaccattcactttgacgggcaaaacagaatatcgaattttctaaagaaatcatccaaaactttgagtattgtcaaggggtagtgtttatcttccgggtatttaactcgacttattcattcagcacatgtacattggtttaccaatcgagtagtgtgtagtaaaattaacgaaggagtagagagaaatgaagtcacatagaaattttttcattccgtcttcaaatccactcatttatttgttgctcattaacattttagcgatctcgtagcctaatacacttacaactggatggacaacttgacttcgtataaattcataacgttttacattcctctcccgcactttagcatttatttttttcaattagacattaatatacatcttctaggtagcgctaattgcaggcatg

SEQ ID NO: 117780 - DNA, 1003 bp, Heterodera glycines
tcttacgcgccgcgcacatcaaaacgcctccttggcactgacgacaacggcacctcaccgaaaaaggtagaacaaggcttacagtcggaaattggatgtaaatttggtgccattggatcaaaattgaagggtaaatttttccaaaaattattcaaattcattaaattttaataaaatacatgtgaaacggttgtatacggtattaaaaattgtgtaggataaaaaagaaataaatataaaattaattatttctgtgaaaaccgaccaaaaacccaaattttctatttttaaacccttcgacccctcccccacactctaggccaaattggacggcgccgggctggcaaagaagagaccaatggccatatttgacacggagaaggaaccgttgcaaaaatcggatgggacggtggccacagagaaattggaggaggacgcggtggagactgaaccgttgcaaaagccggggaaggtaccacaatctgaaaaagcacacaagaaatgcatattataaaaaataaatttttttcaatagttaattaattgcgaattcaattgctttactgttgtagtgtttaagtggatattttgaattttaaatgcccacatttcccgcccattttactgcccataaatatggaattatttccccttcctttgctttttccaccattcatttgtcatttaatttatctgcatttattatttgtcctttgacctcccaattttctgttctttatttatttggaataaatcaatattccctttaactgttgctcggacacaacagtaaattggcgcagtcagcaaaaggaacaaagccagcataaaagcgacacaaacagcaatcaacatttacgaaaattgtttcgtgttaacaattttcgttgggaaattgaataagtctcgtgttgacttttcaatttcgcagattcgccgaaaaaccgaaacactcgtgttgtgtaaggttccgtgatatacggtttaaaacgtcgcagcgatg

SEQ ID NO: 117781 - DNA, 236 bp, Heterodera glycines
ctcttaaaaaaattattcgcattaaaatattatttttccccccgcttgtaataactaagccagcgaaaaaatatgtaaaatcataaaattcagggctctatttatcatgcaccgataattaggacatagtttccactttgtgaattcctattctcattttagccgaaacagttatcgagtttctataaaagtttgaaacattgtccgcctcaactgctgacattggcaccttcatg

SEQ ID NO: 117782 - DNA, 110 bp, Heterodera glycines; identical to SEQ ID NO: 98226

SEQ ID NO: 117783 - DNA, 489 bp, Heterodera glycines
aaatgaagctaatatggggggggggggtgtgtacaatgagtaaattgaaccctaaatcgtacacgccaaaacgtcgtcgccgccgtaacatcaccggaacgtggaattgtcgcttcaaaaaattagaaaaatttaaaaaaaaattaaaaaaactatctcttaaaattatttttcttaataggctaggtaacaaaattttgattttttttttcttatgttttttctaactatttttctaatattttgctgcgacgatgcgcccaggtgacgttttgtcccgctttgtcacaaaacataaccttgttgaaaaaactagcaattcccatcctgctgctggtcccatttacataatcaaaaataaattctaataataaatttatcatttaattttgttttcttttccctaactgaaaggatcaaattgtggacgaacacgacggaattgtaagcagcggagaacgacgaagccaatcggcgtccaccacaatg

SEQ ID NO: 117784 - DNA, 268 bp, Heterodera glycines
tatattatttatgttttttaaatacaataaatttatttaagcataaatggacaaaaatctcagataaaatactgcaaaattttctaaaccaaaaatagaaaatcaaaaaatttttagtgaaaaaggggaggggcttggaaaatatctttaacaatctcaaaataagctgttttaaaactaatattaaatttcattatatatgctcttattttatgaaataagctaaaatttttcaacccactgaaaaaggattttattttacaggatg

SEQ ID NO: 117785 - DNA, 59 bp, Heterodera glycines
ttttttgtttattttttgacccattgaatttgttttgctcacccaattggtccaaaatg

SEQ ID NO: 117786 - DNA, 217 bp, Heterodera glycines
acacattgtgcagcatgacgatggccaaggccggcacaggctggtgatcaacaacgccaagcccagagatgccggctcgtacacgtgcaaagcggtgaacgcagctggtcaagtggtcacgcaagccaaatttggcgtcattgaagcggtggaagtgccgaagttcagccaggagctgagaccgcttgacgtgaatgagggcgacaccggcacaatg

SEQ ID NO: 117787 - DNA, 423 bp, Heterodera glycines
ttcattcgcattggacatttttattattttattctcctccgtcgctgcactcctccgacctcatcaatttgtgcatttatttttatttgtgtttattaataaattgttgatacacaacaattttggcgcagtcagcagcagcagataaattctgcacatcatcaagccaaatcaaggctaattctgcaaaatcttcaagccaaatcaaggcatattctgcacaacctccaagccaaatcaaggcataattcagcaagcctaattttggcaattcaaaagcctgggcggctttcatcggacatcgacaaaaactgatcacctgggtggtgtaagttccgctgggtgcggtttctcatcaacaaaaactgatcacctggggggtgtaaagttccgctgggtgcggtttaatcaacaatcaaaatg

SEQ ID NO: 117788 - DNA, 1003 bp, Heterodera glycines
agaaaacctataaaagtgtttttgtgcgattttgagccgataccgtattcggcaattttaccaataactttgctgctgaatttgaatttgagacaagcaattatgtgccaggaaaacttaaacctatagaaagagacggaaattgtggatttcgtagtcagggatgcgatcgccaaaacccaaaaaccgggcgcgcgagttgaaaaacccggcaaaaattttcaaaaacccggcaaaaaacccggcaattttttaagccaattattcactgtaaaaaaggtcaataacatttaaacaatatatttatcaccacttttcacctgtttgaacaaatttggcattgaaagaatgtaaccatgagcgtttgggcacaaaatatttgaattaaatttgattgaaattaatgagtttaaccagggttgccagattaaaattttcaaaagcctcatttggtcggcaaaaaagcctcattttgggtcaaaaagcctcatttttacaaatttattcaaaacacattaaaaatgttcaaatattatatttttattttccatgatcaatttgagcaattttttgttagaaataagcattttgtgaaattcttagcacgaaaatcgaagttgattttttgcggcgcttttttctaaaaaaaacttggggaaaagggaggccggcggtgccgataggcgccgccgggaaaaattttgtgatttttaatacaatttgttaacagatttgaccacaaaaatgaccaaattttgcgattttgagcaaatttttaagaaaataaaggatccctggagctcaaataaatgaattgaaataggaaacccggcaaaaacccaaaaacccggcaaaaacccggcaacttcaaaaacccggcaaggacccccaaaacccggcaaatgccgggtttaccaggtaaaatcgcacccctgttcgtagtataagctgggcaattacgggatctgaagctaatcatgatgagattcgaaaggatgtaatg

SEQ ID NO: 117789 - DNA, 76 bp, Heterodera glycines
gcgttactttaccaaagtgtttgcacaacagaagaaggaaggtggagatggttccggatctgcggaggagtcgatg

SEQ ID NO: 117790 - DNA, 238 bp, Heterodera glycines
atttgatgccatcattttctctcagaaatgcttttgtaatacatttatttgcttgcttttaaatgaatgtttggttttatgacagacacagcaatatgtttcggattacaatgtaagagattatccgcaaagtttgtattaggcggccattcattttttctccagcttcttttccattttggggccaaagtttcaaattttttttttttgatcaacagcggacgagttgattacaatg

SEQ ID NO: 117791 - DNA, 1003 bp, Heterodera glycines
gtgtccaatcttagaaatgtaacaatgtttctgaatttgtcctatcgagtgttgtagtgacttaaaaattttaatatgagagtccttggactgaaatacacaaaaatttaattgtataaaaatcttgcaaatgaaaatatgaaataacatgtgggtctgagcgcatccattcgtcgaattatcggaatttaaatcttttagcgatcaattcctcgataaactcaattaagtacaatcccactgttacataagtttactattgattaaataacattaaaaaaaataaattaaactttactgtaaactagagaccggaaatttcaaatttgcggatcccgctgcgggatgggaatccaaaattttttgcgggacgggatcccacgggattaatcccgcaaatcccgcaatcccgcaaatcctgcatttaaaatttgcgagatcccgcgcgggattgcgggattttggataattcgaaaaatttcaattaaatttcaaaaaatttccaaaaatcaaaaaatacctgaagtttttaaaaataaatttttaggggctggcgggatgcattaaaaggggcgaccaagatttttcgaatggatcagacggtaaaaagagatcaggaatcaaatctgttaatggtccaaaaatttgactattttttgcttttcaaaacccttttttcggcgcaattttttcaaaactaggaacaaaggggtccggcggtgccgataggcgccgccggaatttttttttttattttttttgaaaattttgtcaatttcttaactgattttgtccaaaaaatgaccaaatgtcgcactttttgactcgtatctacaggattaataagtaaaagccgatccgacgggccgatagacgccgccgggaaatttttttgcaaatcctagatgaaatttgagatgaaaattgaatttattttgattgattttattataaatttattcaaaaattttggcattccgtcttttaaaattttcaaagaatg

SEQ ID NO: 117792 - DNA, 71 bp, Heterodera glycines
attgaagtttgttcacagaatttgtgcaaaataaattccgatatatttttatgttttgagacttgatcatg

SEQ ID NO: 117793 - DNA, 115 bp, Heterodera glycines
aattcaaataaaaaaataatgaattcattatcaatgccgacaagtcaaaaaatgtccaattcattacgaacttatggccataacagccttttgtacaattttcagacttacaatg

SEQ ID NO: 117794 - DNA, 332 bp, Heterodera glycines
tcataggagaactgaataaatcaaataaaattcataatcagcaattaaaatatccaaatttttctaaaattttttaaactgtttagttcatgccggaaaaaatggaaacataaaataaagaattttaaaaaatgacataatgcttacaattaaatatcatacccaaataaacaatttacattataaaattgtttaaagaatttttttttttttttgaaaaatgatattgtactacatatgctaaaatttgtaaaaagttctcataatgatattcattaacctttcccataactttgccacacaaatggcttcaattaacaccagttcaaatg

SEQ ID NO: 117795 - DNA, 70 bp, Heterodera glycines
cctcgaaattaaaaaaatatatattttaatcgtccaacgaattttgtcctttagaataaaggaggaaatg

SEQ ID NO: 117796 - DNA, 223 bp, Heterodera glycines
atgagccgaaggattggcatcagtctgttcaatgccgaaagatcggtcagtgtgtgaaatttcaacaattttcttatctaattgttgtgctaataatgcctctaaagtgccttaatagctaatgatgcattactgccttaggcaatatcattacctataattagctaattagttcatacgcacatttgcccaattttcccttttttctctgctaaaacatatg

SEQ ID NO: 117797 - DNA, 770 bp, Heterodera glycines
aaacaattattaataaattcgataaattgtttttcccttttttcttaaagtcaaataattcaacccttcacttttttattggatttttttgcctaatgttagccatttttgtgatgacatctgattgatgaatcactaaaccaaacattactgctcagaataattaattccaaatagttttggttactaaaagaaaaaaataaaattgaaattttgaactataaattaattaattaaaaaaataatttaaatgtttttgaatgacaatgtaaagttatgaataacacatttgtcaccccagtagttagccccgtattttttggcccctaaagttcgagtcctcttgactgcaaatcattttttgggaattaaatttttggtgcattttaatgggtctggggagtgtttttcttctatgtccgcttggctgcaacaattttttagtaatcaaaccaaaaggttttggtgtatttttaatgggtctggggagttttttttgctgtaactcatttttttgaattaaatcctaaggtctagggcatttttttaaaatgcaatccattggttttggtgtgtataaaaatgacaataaattttttcccatgtcaaaacctattgttttttgttcatccatgaccggcccattctacagtacgggtacaaatgtccaaaataatacatctcgaactcggtgatgtcataattttacagtggagcgttaattattttcacaaataaattatgaatgtattttaatttatttttagatg

SEQ ID NO: 117798 - DNA, 118 bp, Heterodera glycines
aaaaattcaaacgcatatattattaaccacaatttaagttttcaaagcaatttcaaaattcagccgtctcctcctttgggtccatccgtcaattgagcgacaattggtggccgaaatg

SEQ ID NO: 117799 - DNA, 651 bp, Heterodera glycines
tgtcccccgatttgtggttttagcctttaaaattacaattttttgaggaaaagatttattaaaaggaaaagcattatttgggggttttcgaatctaagtttaatgttagaatttgagtaaaataaatccgaaaacccatagaaagactcttttaccatttgtttcaattttttgcattatcataaatttttgattaattcttaaaaaattgactacaaacgaaaaatttacggttagattttgtcaattgtattggtaggtctggttattattttaaatttcttcaattaaaaatgtcaattaggtgttaattatttaacaattaatttgatatcttcaaattgacttcttttgttacaataaaaaaagaatgcatagaattaaattaaactatttatattattttgaggaaaaaataaattaacataaattccattatgcaatgattgctcttcacatttcacatagttttccacatatcacacgacaagcgagaaactatctgtgctaaccaaataaatattctgttttcagtaatgtcaattcattggaattctttttataaaataaaataatataataaacaaaataaaaataaaattaattttatttgttttacagttaaaacaaccaacaatcgtattcattatg

SEQ ID NO: 117800 - DNA, 491 bp, Heterodera glycines
ataggacggaaaagcaaaaagagccgcctttttgtagggctcaccgcgcgaaaaagcgcagaattgaaatgaaaaaagtgataatacaaaagaaggaacggaaaacaacagaagaagcggcaaggggtggtggaaacggacaacaaaaacaagaagaatgccaaagagtgaattaccaatgaaaaacaatgggggagggcacgggggaaggggaaaggggtgccaatctcagcgaaggaaaagcagtcctaaggctttgtaaaaatttaaaagtgtcccttttttgaatatcccagccgagtccaatgatcagcagagcgctttttttaatttatattaaaaataaatttgttatatttgaaagttaattttgatagattgaagaagcagcagaagcatacgaaagttgggcacaagcagtgccaaatccattaactgctgatgattccgaggcatcggtcagctccaattcactgggagaaaaacaaatg

SEQ ID NO: 117801 - DNA, 80 bp, Heterodera glycines
ccggggatctctagagtcttattatttcaaagtggtgaccgcttacaaggccattccattggaaacgtttgtgaaaaatg

SEQ ID NO: 117802 - DNA, 1003 bp, Heterodera glycines
aggcaaccaaatgctaaataaataatcaaaaaatttgcaaattaattgaaaatagagaaaatgatgacaaaacagatgaataaataatttttggcaaatgataattctattttagtattttttaaagaatcatctcattgaaaatttggaaatatcctaaaataaattgtaaaatgataatatcaataattgcttctattaatttgtgagaagtcgattgggaagtgtatcggtttctagttttgattaaatattgataattttcgtaattctgaaagaggcaaaaaatgaattgatttactgagaaaggcatataaattaattggtgtgaatcatttgttttttaactttgttaattgctgtgcattttaaactagcttggccttggtttggtttttcgtgctttgcaacaattaaaattaccttttcttttgagtggaggacttaagtgagttcaaaagtttcactaaagcgtttttttatatatttcatttttcttttttatgttatttttgtagtaattattaatctctccgacaaaatcatatctgactagcaataagaaatataatttttatttttaaattaattaagtttaaccagtttaaatttttcaatttgtcagtcattattgtttaattttttcgatttgttgacacaactgcgcttccatttattcgtttcggctttcatttaggccaataattaaattgtgttaatcatttttgtcagttttaatcctaaaattttccattttatttcgtaaccaaatgtaattaacttttattcaaaaaattaattttttattaattaatagatcaaaatgaattttaaatctttttcaatttattttcttctgccaactttattctttgcaagtgttggcgccgattggaccaatttttgggaaggattgaaaaataaattcacgggcggtggcggtgcaaattctgcgcgtatatttttaaaattttttaatttatttattttgctttaagcaatg

SEQ ID NO: 117803 - DNA, 128 bp, Heterodera glycines
aacaaagacaaaaaaccaaaaattgaagataaattaaatggatataaaaggaataagaaaaagcctattttttaccttaattatttttctccatccattttaacccaaataaaatattcacaataatg

SEQ ID NO: 117804 - DNA, 271 bp, Heterodera glycines
cctggaaaattgttacaaagaaatgtggatgattaattagtggctggtaatttattttccaaaataatgattggggatttttcaaggtatttttggccaatgatttttttttacgatttcattttttgatcagtcaaaaaattcgatttatctccgcctaataaaaaaaggtttcattgtcaatgaaaaacaagacaaatttgtgaaattcaaggacaatattcaaaaaagcatcgcaaatcaaaaaaaaaccaattttaatttttagatg

SEQ ID NO: 117805 - DNA, 128 bp, Heterodera glycines
gacaatgccagagatttcaatggcctgaccgacacgaatagggtacatgggcagcagtcgccgcaaccggggaaggctccagggctagagctgaaaccggtgtcaaccgagaggaaggcagtggtatg

SEQ ID NO: 117806 - DNA, 495 bp, Heterodera glycines
aaggataagtgacttttgaatttgaccaccataaaatatttatatttttaaaattataaaaattttcatcagaaattgtattaaattattcaactaaaaatgcattcgaattcactgcttttttaccttttttctctgtttaccattgccttgcaaatgccttcgccttttttgccgggtgtcggcccgggacagtcctacggtttattattaaataaaactaaatcaattaaacagaattttaataaccaaggcaactgtcctcccggtctctttgcggatgggggttcgtttaagcttcaaaattttaatatgtttttttaattttttggcattttgtagcatgcgcaacccttcacgtttgtatcgacccatatgagcgctgtataaatgggatttgttgtaagtgattattatgagtttattttttgcaaaattaatttaatgaatttataatttatattttcccataaattttttttaggccaagaaatg

SEQ ID NO: 117807 - DNA, 478 bp, Heterodera glycines
  unsure (1)..(478): unsure at all n locations
aaatattttttatggataataatagaaaaaaactgggcgttctgtcacatttacttnttatctttatttctctcacttttacgtactatctcttcattcttaataatgtaaagaacaacatttacttcatcctgtttaactgttttcctacttgttaaatccacaccaaattttacatatcgatagagaaaaaaattctgcatcgattaatgcaaaaagtatttttgtttatgcgctccgatccaaaatttacatactcaaaattagtaaattttatttttaatagattttatggctaaaagaaaattaataagtaagctgcaaaataaaaaagcggcacaaaagcggtggcaaaagcaagatctgagaaaagcgcaaacggccaaggcgagacaagcttatctggccaaaaaagtgagtttttcaactgattttaaggtcaaaaacacaatcaccacgccgcgacaacattttcatg

SEQ ID NO: 117808 - DNA, 137 bp, Heterodera glycines
ttgcttcatcaatttgtaagtttccacaattcatttgtcattcttgtctgctcacccgttcaatttaatttttgttttttctcctttaaaactttcaactatttaacaaaaaaatttcaggccaattgctgttgatg

SEQ ID NO: 117809 - DNA, 130 bp, Heterodera glycines
attttgctttggcaagtaaaagttcagaaagaggggttaaaaaaatatatataaataaataaaacagttttaatttaataagaaaataaggaaacaaataaaattattagtgtcgtatccattcagcatg

SEQ ID NO: 117810 - DNA, 208 bp, Heterodera glycines
aagccgggacggctcatcaaaattcgtcaaaagccggatcggctcagcaaaaattcgacaaaagccgggttggctcgtcaattccgtcaaaaagcagacaaaagactgcttattcttctaaagccgggtcggctcgccaaaattcaacaaaagccgggtcggctcgacaaattcttcaaaagccggattgtctaaacaatagacgatg

SEQ ID NO: 117811 - DNA, 1003 bp, Heterodera glycines
tttattgaaaaaaaattaacatgtgtgaaatataattaaggtatttttaccgaatcaaatattgcattttctcatttttattgataaataatttagtaattattcttgaatctccgcaattcggagcctgtttatacagtagcaatttcgtaaaaaatttaggtttttgttttttaaataatggttacttgggccgggaaataaattgtggaagattttgccggtagatcaagtctataggctaaagaacgctgaaccctaaattatgaatgatcccgcgtgagaagtaaatgattaatgaatcatacagtaattttttaacttttatttttgtgttaagccttggaaaagctaaattgtaattaaataaaaattatagaaattaaacgaacaatttgctaaaattacaagcgaaatttgccgaggtaattagtggcaatactaattatttaattaaattagtaatttaattgttcctttccaccacttttcgaactcgtaaatgaagatggttgctccgccgtcttcaagcagaacaatttgatgttgtacttgccgaactttacaaccagtgtccctcggcacttttccatcgaattggcgccaaaacaaaacttggcactgtagcggtgccgttgtatcaaacggttgtccgtccctttggcatcccaacgctgagcagttacgtgacaagtgagtgaaagtgccaaaggggggaaggcatttaattcattaatttaatcatttgattaattataatttagaaaatagagtgtcgaaaactaaatttcaattttaattcattggattttaaaaaatcataagagaaactcactgaattttttcgttaaaatttaatgttaattttttaaaacatttttttattacacatatatcattaactaattttgacatttgtttaaaacaattaaagctaaaagctgaattaaaaataatttacaaaaaaggtttattcacgccattgaatggaggtcacaaaatg

SEQ ID NO: 117812 - DNA, 105 bp, Heterodera glycines
agaagatggtggtgcccaagcgcgcggcaacaagtgcggagagtactcgggcagtgccgacaatgccgacgcctcagggggatggcctacccccttcccacaatg

SEQ ID NO: 117813 - DNA, 1003 bp, Heterodera glycines
tttttactcccgtttttgggtaaaaatttccgggagcaggagcgggatcggagtttcaaatttccgggacgggagtcccgaacgggattcccgtaaaaatcccgctcccgttaaaaatcccgttcaccgaaaaaagcgggagtcgggagcggaactcccgtaaaatcccgcgggagtcccgatcccgccggactctacaaaatagcagagaaatttgaagaatatgaaaggacagaatgccaaaaatatcgcaaatatttggacattttgtacgaatatttgtacagagaatacgtcggaattccaacagtgaagcccaaatttgggtttaaaaatgaaattgaaattgaaggaccaataatttatgcgataaattgcctgaaaagaatttcggatttttattgctggaataaaagtgtaggcaaattagatggtttgttcatttttaattttgaaccaaaattattgaatcatgggcgattaaattatgaattaaaattgaaaaatgaacaaaaaatgccaattaatgaaatgattttacaattacacagcgaataaatgccaaacaaatgaaaatttagacggaataattcgacaaaatttaacaacaatttggaagaaatgcttaaaaaatcggaagaaaggacaaaagatgcttatttttggagtttctataaaataatcagggccaacattttttaaatttgggttcgaaattcaatgattcagatcattgggtgatcttttattaaataaattattattttttttaaataaaatcaaatttaacttgagcacgctttattttcggaatttgtgaagagattatcgacaaattttgagaatttttttaagctaattgaaggaatcgataaatttgaaaacgtgaaaaagcatttggtgcaacaatatgtggaacttcttggcgttgtgtatttgtgcgaaagaattggcaatgttactatattttgaatcaattaaatgcatatgaattggaacaatg

SEQ ID NO: 117814 - DNA, 125 bp, Heterodera glycines; identical to SEQ ID NO: 115020

SEQ ID NO: 117815 - DNA, 325 bp, Heterodera glycines
tcacatcatcatcaatttgcggtggtttttgtcactcaaaatttatttgagcgaaaaatcaaagttgctcgtctgtccgcccaatacctcgtactgatgcgtgcccctaactccctgttgtctatacgcaatatcggagtacagcttttcccgcgtcagcttgactttttccttgacgcttatcgcaaagcgacagcgcgtccctatggctatttgctgattgacatgcacgcttcgtctgatcccgcgttgcggcttaggacaaatatatttaaggatgaacaagacgaggatgagggaacagtggtgttcattcccaaaaatg

SEQ ID NO: 117816 - DNA, 905 bp, Heterodera glycines
ttattattattattattattattattattattattattattattattattattattattattattattattattattattattattattattattattattattcaggatccatgtttcgcgcttgtgaactgtatattgtttatttctttctttgatagatttacgtagtaataaaagaaatcataaactattgagtattcggaaaaaaaacagttttcacgcctaaaatcaattaatttcattattaaaagagtaaaaatcttttaaaatttatttacaatattttttctttaaaaataatttttaagcggaatttgaaattctttaatattttcgtctttaaattcaattatttttccctatttagcatcaaaaaataagggaaatataaaaagaaaataataattctgtacatattgtcgttcctattttcgtttgatttgcctaaggaaaaaattctcaaaatttgataagcaaaatgataatttaagaaatgaatataattcttacaaaaataatttttcctataaatttttattgtaattcggctaattggttttggattttctttaatttcttcgtcttaaaattcaattatttttctcctttcacaaaataaaaatttaaattattaaaaagataaataaagagaaaattattgtatagaaaattaattctgtgttgtctttcctatttttgcttgatttagccaacgaaaattttttcaaataataatttaaggggttgaatatgtttttctgaataaattatagcaattaactgttgaaggaaagaatgatgaattcggaaggtataaaaattggtgccaaattaacattagccatacatttttttgattcatgaatttataaaataaatttcaaataaacagctttagaaatg

SEQ ID NO: 117817 - DNA, 391 bp, Heterodera glycines
tagtaaagacaaattgaaaggtatatcgattgaatacggagtgtgaatcgctaacaatcggtttaataaaaacgataataaatggacaaactgggggaggcactccccttttgccatagttaaagtggcttttgttaatgctaaaaaattaccaaaacttttgaattagcggagttttggcgtaatgcagcagtttcctgcaattgaatacctaacaggtttctgttggtcagacattaaaataacaggctttttccaccttaatcaattgtacgcaataaaagtctattggatgcataaactgaaaatactatcatagtgtccaaacttcccggttctaaaattacagtcgttgttttattaatataataattgttattttattcaaatg

SEQ ID NO: 117818 - DNA, 417 bp, Heterodera glycines
atttacctaattgattcataattaagctttcaattttatttttaattgcttctgtccccataggttatttggacagccaccaaatgattggactaatcgcgccaagaaaccggccaaagttcagaagcttcgtcattgccttaaaacactgggcaaaacgtgaatttaatttattcaaatttttgaaataaataattaataattttgtttaggatcgcatatttatggcaatgttttcggctttttcaccggtgcaattttgtccgttttggcagcaaaagtcattttatggtatccgaacgcatcgcttcctttcttattccaaaagttcatgctgctcttctccacttggtgctttatttatttatccaattccaattaattttttttcactatttgtaaaggaattggccaatg

SEQ ID NO: 117819 - DNA, 744 bp, Heterodera glycines
acaaagtctaaagtagctaaaatatataaaatctcaaccccaacatgattacgaaaaaagatctgattaatcaagtaattgcctattattttcggttgtaacttctttaaatgtttatcattattcagactgtgtgctttcgaatgataccaaaaacatagggtttgttcgaacatgaacaaagttattgtataacaacccagggattgtcaattggactcataaaactcaattggactcataaagtgcactagagccatattttgtttttgtttgttgtttatgaaaggttttagcaaaaggcactagaatacttaaccaactaacttaattttggtcatttgaatgattattaaaaatattttatattaaggaaaaaaatttttaaacctaacattttttatcaagtaccatctatgttttctgaaaatttttcaggtcatttcgggtgtattttcccgattttattgcatttttaaatgggatttttcggaaaaatgccaaaaaggcaccaaaatagcaaaatgccaaaaaggcattaaaggcacgaaaatcttgaaaaaggcataatacaactcagccggtcgcttaagatgtgaatttatgttcaaaattgtttaaaaaaacctcatataccaagctaatatatccacattatccgtttaaaatgaatttaattcctaattctcattttttgattctttagtaaaattcttgcatttttttcgtctctacctaatcatg

SEQ ID NO: 117820 - DNA, 75 bp, Heterodera glycines
tttcattgcacaacaaataatttggacaaattttccgccattttacagcaaaaacatttacttttataccaaatg

SEQ ID NO: 117821 - DNA, 461 bp, Heterodera glycines
aatttttttttcttattcaagacccacgccgttgccttttgtcgtattgtttctgctgcccacccgcgcaagttggttatggtcgcgtccggttgagaaaagcgtgcacttctcggtaaatgagcaaataaatacgaaaatttcattcaaaaacttgtttttgacttatcatgaaaaatgggtccaaaaaaaaatcaattatttaaatcttggacagaattttgagaataattaatgtcctgttttgccaagtagcaccggtgtataaaattagttttttttcaaaatttaattttattattttttttttgttccaatagctttgcatcggcccacccttcccgaacgtgacccttgacaaaaaacggagtatttttcggatgccagacggatcatcgattacgtgttggtctacgaggagaaggaaatgacgaacagcaactacaacaacaattgcgatg

SEQ ID NO: 117822 - DNA, 51 bp, Heterodera glycines
tcctgatcagttttaccatgatcattttggtatttgttacagattgaaatg

SEQ ID NO: 117823 - DNA, 1003 bp, Heterodera glycines
taacagacgatggcataattagtttcacttatcattgagctgtttcggttttacctcggatttgagatcaaatttaaatgcattcccaaagctcggattatttgggcagttaagaaatttcggagaatgccaaagtgttgttttgctgtgctgattggctgattcaccttcccatttgttgtgttatcgccctaactgatgaccttccatttcattcttccacgcttaaacgatgttttcgtcctttgatgggccttttgtcgccacaacgaatcattagagagtttagagagtgagtgaagtggtcatcagtcagtgtgtctccctctaacttctcctcccctcccctcgtctcccctttccctccccctcttttttgccctctttcccttcgtctcccgctttcgctcccctctgatgccccccccccctacgtttccccttttccactccccttcggctcctgcccctgtctcccctttcgttgctccctttactctcgaagccccccccctctcccttcgcccccctccaaaatcgaatttgatttcgtttacttggcgcattccccagaggttttccgctgttttggccgtcacctttcgcccaaggcgcggaaatgtgtcatcatcagtcggcggaaccattcccgagacggggaaatcgcaagagcaccccaaagacgggggaaagaagcgatttctgagaaaataatcatccgaagagattcttttgtaacgcaataaaaagtcggtcactcattcactgactcttgtctttttgtcttttgtgctgcgatgtctcaaaatgaaaatcaccaaaagcggctaatgcccttcccctttcattcgttcgttaattagcctttttctgtttgttaattagcactttttccgttaatttcccctattttccccccaaatttccatgtttatcatttcatttatatcacagttttttattattttcttccttcacattccatcccccaaaggaggcaatg

SEQ ID NO: 117824 - DNA, 177 bp, Heterodera glycines
tgtgtcgtcgtcgcaaaagtgaagaaaatatgaatgtgtgtagagggattgaaaacaaatggcaggagtcatcaaaatgtgagccttttatacgcaaattctgctgggcactgcagcacccaaaatgtcgccggatgaatctttttggttttgggatgtataaaaggagggaaaatg

SEQ ID NO: 117825 - DNA, 218 bp, Heterodera glycines
ttccgagaaaagatggccaacccaagcgattgcattgcgaagatcacaacgaacaaacgaacactgattggatcaacaatttcaaggaggtgtggccataatctcgaaaaatcactgatttttgttttcaaattgtttagcattttcttcgtgccaatgccatttcttccgtcagttacgaaattcatttttctgttcatgtgccgtcaatacaaatg

SEQ ID NO: 117826 - DNA, 287 bp, Heterodera glycines
ggttttattttatttattttttattatttccatttttatcgcattgacaattcaacataatctaaatttatttatccaagcagagaattttgtctgtccatcttacatgaaaaaaatttttttttttttttttttggttttttaaacacttcttattagtattttttacgctgaaaagtataaagttttggaattaaaaaaactcaaaaaaatttagataatttttttttattttactgatttttgtgtgcatgcttttgcagctgtacttgcgcttcaaagacatg

SEQ ID NO: 117827 - DNA, 765 bp, Heterodera glycines
  unsure (1)..(765): unsure at all n locations
tgttgtgttcgttaattatttgaattaacgccaaaagatgctcgtttatcgatcattattttgaccccttcgttcagtccatttaaacccgcccttttcccccatccgtgcatttcttcctcatttcatttgttgtatttccaatattattgtgaccccgctctctcccctcgctttttatattatatttatttgtgttgaaataaatcaatatttatttcattgactgttgacggacacaacaaaattttttcactattacacaaattatttattatcaaaatttaacaaactgtctggcaaataattttgctttaatatgactatagacatataaacccataacaaaaaacncncgccgtgcagattaaaatatttctttaaaaaagtaatattaagcctagcattaaatatttaacaattttgcaaaaatttatttaaaataaaaaatgctaatcaataatcttcaatttagccaaaaatatatttttatttccttgttaatattgactgatttatttttacattatatgcaaaaaataatatgaatatggaatatgctgaaaattctcttttttatataaaatcatttatatatatatatctctttttattttatactttttatatttttgggtttccgcctctgaaaatattagttcgacttaatttcagctttaatattcctaaaatataaaaaatctattttttttgaaagtgagtgaatttcatttattatttcattatagaagagtgaacaaaatg

SEQ ID NO: 117828 - DNA, 623 bp, Heterodera glycines
cttaataaaatttttacaggcttgaaaaacttttcgtttttgataaggctaatagagcatgttaagagctttcgaatgataccaagattgttggatttggatgccaaagaaaaaagcttaagtggaaaaacgagctggcgccgaaacgggagcgccgaaacgcgagcgccgaaacgcgagcgccgaaacgcgtgggtccccgattcttacgggtttatttttctattttattgcatttttgttaacaaattttgggcaaaacgccaaaataggtgaaaatagtttttaaaattttttttaggttttttaggtgctaataataaaaacctagaaaataggtgctaataactcgaaaagtagcttaacaacagccaaaaaaaaacatgtttttcgtgcatttcaggctacggggagctcaggaaaaatagtgaaaaacctaaaaatatcatccctactcgtgactccctggggatttttttgggagtcccggtcccaatctagtactttctatcccagtatgattttttttacgggaatgggattttatgggaatcccgttcccacttcctggaacgggtttttacggacccgtagcccgtaatccatattttttcgaccgaatg

SEQ ID NO: 117829 - DNA, 97 bp, Heterodera glycines
ggtacggtaatttatttggtaatattgtagcaccaaaaaaaaacataacgaatactgtaaaataaaataagattaaatttaattttttaagattatg

SEQ ID NO: 117830 - DNA, 391 bp, Heterodera glycines
ttcgaaattttgagacgaacaaggtcccactcctttaatgaatttaaattaagaacaaattagattgattgtgccgttttttcaattttgatttcttaatcacccaattgaagggaagagggaatcagattttgcattttttaaaaattgtactctttttattctcgttggtatccaggtgggtttccgctggattataaagttgggattcgaaaaaggtcttcgcccgagttggtgaccccccaacttgaaattttgggaacatttaaagccggccccattggcaagagtcgcctccacttggcttctttttaaccaatcctctaaatcttttagcaccgtcttctttccctttttatgtatattatataataccatcgtttccaggatg

SEQ ID NO: 117831 - DNA, 187 bp, Heterodera glycines
ttccttccattaacccttaatttaattgcttaattgtatttcattttagattcatttcattatgatcttaattgtagcaatttagtgcaattaattattcgttctttcgttcctttgccatatccccagaggcactttcttaactgtcggtaatttcctcgcctcaattggccttatccaatcaatg

SEQ ID NO: 117832 - DNA, 540 bp, Heterodera glycines
ggtgaatattcattcccccccccccccttcacccatttatttccattttataatttttaacccccgcggcacgcacaaattcagtcgaattttttgtttgaaataatcataaatttatgtgtcattttatcattttccaattatgttttatttgccattccgtcaataaaacagtttcttctctgctcgaggcaatgaattgtcaaatgacttgtccctctccgttcccctttcaattttctcaattttctctcaattaaatgcgttcccacgccccccgggggaggagtatcttttcttagtctttcctttccttttcccttcgtccgtccgcccctatttttttgctcattcatttattagccccgtttctccctccgttcctcatttggcagtccgccccccccctttttttccaaattgaatttgtctctcctttcattccattcatttcctcctcctcctcctcctcctcctttcccttccttcactcattctttctcccccttttttcttttcttttttcagtcccttaaaatg

SEQ ID NO: 117833 - DNA, 169 bp, Heterodera glycines
attccaacagtaaaaggggaaggaaataaatccccaacatctgtaaattatttagcatgtttttgttcgaaaatatgagtgatttgcatgagcctggaaaattgcggcaggttaactcttttttctgtttttatttttgaaattttccgtttattttcagtttgtgatg

SEQ ID NO: 117834 - DNA, 950 bp, Heterodera glycines
tttttcctttccgcaccataattaggcatcattgatgaattttggctaaaattgccagttaaaagccgtcactccgacaggacagacaccagcagacaaccaatgcataaattacacacaaaaaataagaaaaaaaactgatgccaaaagattattgaataatttgtcaattttctattagattgaacgcggaataaaaatgccttaaaacccggataatgttatgaatgcagcataacaaacaccaaaatatcgtaattttgtacaaattttgtataaaaaagggcagctaatttttgtaagcagtgcctacggtccaaaacaaagtaaacaattgtattatgaaaattcaaaggagtagatatatcgcccgtctccattattgaaaaataatctccccgtctctatttatcgtccagggggataaatcaatttttttttctaaaaaatatttattttaatattttaataaaaattaatgaatactaaatcgaattcaccgggatccgaaccagggctgggcgaagctcggcttagcactcgaagccgaagccgaaggcgaagcccaatttttattcgaagccgaagtccgaagctcgaagcccaaaaaacccgaagttttcgaagccgaagccgaagttttttcaaattttttttaattccaaaatttttttcatcacataatttcggttagatatcaaatttaatcaattgacgcagtttctagtagagaccggaaatttcaaatttgcggatcccgctgcgggactggaactcaaaattttttgcgggacgggatcccgcggaattaatcccgcaaatcccgcatttaaatttgtgggatcccgtgcgggattgcgggattttggaaaattcgaaaaaatttcaattaaattcaaaaaatttccaaaaatcaaaaaatgctgaaaataaatttataggggctgatg

SEQ ID NO: 117835 - DNA, 119 bp, Heterodera glycines
ttacgacccggttaaaaatgttggaaaactgttcagtgcccgcaactattgttttggagtatctataataataatatattttatactgtaattaaataaatatgttacagtgtgagatg

SEQ ID NO: 117836 - DNA, 317 bp, Heterodera glycines
aacctgttccgtcattcgtttagaacaacaacaaccattcttcccctatcattcttattttccattttcctcctcccgcgcatccatcgccacattaattgattgaattattatttaattgtgtccttcaaataaatcaaagaaaaaggcacttgaattaatttattaaaatgaataaaagaaacatgtgttttgagaatgccctcattagtttaattttttatgagagatttttcatttgtttattttagtaaaattgcaaaattaaagaaattattaattttttaaaattttctttattctcattaagacaaatg

SEQ ID NO: 117837 - DNA, 110 bp, Heterodera glycines; identical to SEQ ID NO: 98226

SEQ ID NO: 117838 - DNA, 148 bp, Heterodera glycines
ttaccgaaacttcatcgaacctggttctttctattctctttgcaatcgccccagattttttttacggcttaactaggccctattaagcttatttccagaaaatctcgcatgaattctcatttttaaattttttatagatctttaaatg

SEQ ID NO: 117839 - DNA, 146 bp, Heterodera glycines
tttgtggcctgcctttgtttgccaaagattttcactgtttgcgcaaattcgtgccgtcatttctctgcgattgtccaccactgtgtgttgtcaatatcttttatgactatctgtttcccgaattgccggccgatgacagtgccatg

SEQ ID NO: 117840 - DNA, 515 bp, Heterodera glycines
attgcaattgactgacactgaaaagcaacaatgaattcagctcaattggaaataattctgaaaaggttgcgccctaccaaaaataaattcattggtgttttcccatcggatcgaattccgaagcgggtatctaaatttccccattgcatggtcgtaaatacgggcaaagaagggacacgaggtgaacattgggtggcttgctatgctttaagccatagaagcgttgaatattttgacagtcttggtgagcccccaaaccccgatttagcagcctacctcaacacatttaaagaggtactggtcgctaaagatcaaattcaatttcccacatccgatacgtgtggccatttttgtatatattttttggcaagccgatgttctggcattcctttctgccgtgtgattgagactttgcgcaagactcgaggcatggcagattacctcgtgaaatggtttgtcagaaacttgatcaacggtctataaaagctcacgtttcctaagcagtaagaaagatg

SEQ ID NO: 117841 - DNA, 1003 bp, Heterodera glycines
aatttcttaaccactgttaaaataagtaaaccatggttaagaaattaaacccgcgatttctcgtcttcccttttttaaccatggttaacgcttaaccacggttttttaaccgcggttatggggcagcttaaccgcggttaacgcctctaaaccacgtattttcattttttggtattctcgttttcccttagttaaccgcggtttaatttttcccttgtaattttaaccacaagtcgtagcagggttaagcccttggttaagagaaaaattaaataatattctaataaaaatggtctaaaaaatttaaaaactgtcaaaactattaaaggaagttaaaaaacataattatctttttataaccagcatttagaaattttttaaattttttgcatcagcgtcgaattgaattctttttgacttcttttcaagtaaaaaacattttttacgaccgtaaacttacatacaaccgacctaaaaattttcaaaatatattcccactaaaatggaattttcaaaaaaatttccccgaatattaattctttctttaaaaaaactttattttattttttacttttattcttttcatgagaacttttttttgaaaacgaattttcgtctaaatagaaagaaaaaaatagtaaataaaaaaaattatttacgatttttgatacctattatttgctgagtaattagcctagatatatattttttaaattttaatcaatgaaaattaattctcacgaattttagaataaaaatttattttttgtatttatttatttaataaattcagtgcttaaccgtggtttacttaaccgtggttcttaaccacggttaaagacgagaatacatattttggttaaaaataaaccgcggttaattaaaccacgattaaggcgttaaccgcgataacctaaccgggaaggaataaggccccctgttcggccataaattattttatgcgccatgaacagatcaagcagatttcgtctatcttgaaatg

SEQ ID NO: 117842 - DNA, 586 bp, Heterodera glycines
tcaatttttgaattgtcttagtgaataagtaaaatttaaattcaaatttttgaattgtcttagtgaaaaagtaaaatttaaattcaaatttttgaattgtcttagtgaataagtaaaatttaaattcaaatttttgaattgtcttagtgaaaaagtaaaatttaaattcaaatttttgaattgtcttagtgaataagtaaaatttaaattcaaatttttgaattgtcttagtgaaaaagtaaaatttaaattcaaatttttgaattgtcttgagtcctcccaaaagtcttggctatcaatgacaatgaatatgtggtgcaaatcacagcaaaagtaaattcgaaaatcaaatttttataaaaatttggtctttcaattgtcacgacgagtcatcgttgtgttgtgaatttggtcttggcacatcggatttttatttatttattttttctaatttttggtactcctttttacgggactcaaataaaaaaactgtgcttcaaatataattattgtaaaaattatcaaagcatactgtaaaaatgatacggtttttagctgtgttaatgagacacagaaactgaccatg

SEQ ID NO: 117843 - DNA, 158 bp, Heterodera glycines
ctctgctttaacgagccaaacacaacaaattccaagccgcagtagaccaaaaacattctccagtgtctgctgcggctttccatgctaattactcattgctaattaatcctaaacaccaaattgtcctctgttgctgcgttctattttgcttactaatg

SEQ ID NO: 117844 - DNA, 424 bp, Heterodera glycines
gtttgagcaaaagcttttatttcatatgatgtttaatagcagaagcaatggaggcaaaacaaaacgaaaaaaggggagggaattttgagaaataaaatgggggaatgagtccgttttgagttgtcgccaagcaaagggtggcacactgaaaaataattcgaattgaattaaattccgtgccattgacagtttttgtcggggaggacacaaatttaattaaattcatttctcctttttgccttaggcaatgcatccgaaggataaccatggccacgtttttgacattcttagtcactttttgtcggcgcaaaaccgaccgtaaaatcgtcgaataaacaggcaaagaatggagggggggagagggatttgactggggaagggggagaacggcacaaatcaaaaatcagtttttggcattgaaatg

SEQ ID NO: 117845 - DNA, 186 bp, Heterodera glycines
ccccccgcgacgcattgccaaaataatctgtgcgtttctctcgtcaaaattctcgccaatcaccgcccccttctcccctttcatcgcatccctttgaactttcccccgcattttattcaaatgcatttgctcctcctccaattcatttttattgttctttagaacattttcgacgaggcactgatg

SEQ ID NO: 117846 - DNA, 591 bp, Heterodera glycines
ttggaacaaatcggtaaaaaaaaacaaacaaagatatggaataccactcggtggggagggtctcctttttcaaaaaaaaaaaaaattatttttttggtaattgcacgaaaatttacattctttcggcgtctaaccggaaattttgtgttcgcccatattcaatcatatggcactgatgcattccatttgattggctagatacccgacttactaggtaaattgggaatctaccaataaattgttgaatctgaaagtaggagacagcaatgtggggagtggttttgacgacgtggaaggacgatgtcgccaataatcaatcacaacacgtcgtgtcacggaggacggacaggaccaatgaacctactccacacggcataagccgagagaaaaaatcagctacttggacttcaccagcctctacccgtttaccaactttacgaccgactatccccctcggccaccctaaaatcatcagtgtcccacccaaatgagcagacggtcaactggcgctctccatccgacaacccctacaaaggtctgctcaaagtcttgcttctaccttcaaacaacaacatcaaagtcactgttatg

SEQ ID NO: 117847 - DNA, 717 bp, Heterodera glycines
ttttttaaaaaataatttaataactaaataaacagcaaattaaataaattgaggaccaaaatgttgagtaaatgaggaaagtgggttatggatccatctgcgcagagaactgctaccaaatcgccattgcgtgacttaagtctttcaccacttcccgccttcttcactcagttggagcaaagatttatgtttgaatatttaaaaataatttaatgggcaatattccttggatggatcaaattttggcatcaatccttccttcgttttcttgtcatcgtttcatttgtgatgcagttaattcttgcacactcttcgcacatctcgaacccaaccgccactcttccattatccagccggcgtaccttctctttgttgtgaaatagtttgtcccagtcatctaaaaacatcaataaattgaagctaaaaatagtaatttttaacctgaacagagtcttatcgccaacatgaattgacccctcgtaattttccaaagaaaacggtcatcaactcgtggtttattagcttctttcaacccatcctcgggagtttcgtgttgtacaaattgttctgaggtttgatgatgttttgcaagactgatttgattgctcgtgaaaaattcggcttaaatacctttgcaaagtgggcgtggcctaattgtccgggagtataaaagaccctgcaatttgtcagctatgtctcattcgttctgctacaatg

SEQ ID NO: 117848 - DNA, 330 bp, Heterodera glycines
gtttacctaaaaatgttattcaaaacttggattttttaaagaaattgacaaaaacaaaatcttttaaaaagagacaacaaatatttaaagaggctactagtgaacaaattgcattattaattgaaattagttataatatattaaaggggtacttcccgctcacgaagagacaaaaatatagacttttaccatacgcaaattttgtaagaaaattaggaagagttagaactgagaagggtgcaaagaaagtttttcaacaaaacggtggtggttttttcgttaatttggctccattactattaccagtattaattgccgccttaaaatatg

SEQ ID NO: 117849 - DNA, 117 bp, Heterodera glycines
atgtgatcgcccgtggcatgaacatccccaacctctcgcgagtggtcagttttttgcttcttaagtgtgtctttcctatctcatttcttttcaaatcatcagattttgtacgaaatg

SEQ ID NO: 117850 - DNA, 137 bp, Heterodera glycines
tggaggttatttgggaacacgaaataaatgagaagctgaaaaaggacacagcaatgagggagttttttgacaactggaaggaccattcgccaataaaaatcagagacgcgtttcacggaggacggacaggaccaatg

SEQ ID NO: 117851 - DNA, 496 bp, Heterodera glycines
ttttttacatttcaatgattctttcattaatttattcactttccactccagcagaattgcggaattcaaatgaccaaagtgaacgcacttttccccccgaggggtcaatttgcgtgtcaattggggcttttcgtgagtttttgcgtcctttttgaaaaaggaaaaattctgccgaaggtgggctcgtgttcacgattggcactctcttcggcctccaattgtgcgccgttgcactggtgctaatcgattgctttttgatggacggaaaattcatacaccaacggttgcgaaaagtgttggacagcaaaggctaatgatcgaagcggtgatcagggctttatcaatcattgatcagatgcgactttgatcagtttttttatttattcttcattttttatgtctatttgttttttatcagagagaaaaaaacatcgaactgaaaatgaaaaatgaatgataaggacaaaaggtttaattgcttctttcccgaaaaatg

SEQ ID NO: 117852 - DNA, 52 bp, Heterodera glycines
agtaatttttttcgttttttaggcctctaaaaacggatgtttaataaaaatg

SEQ ID NO: 117853 - DNA, 469 bp, Heterodera glycines
ttagtatgcggaataagttatgttcaacaaaaatgattagcaaaccgtcggaattttttgaattaattaatgattatactattgaaatggctaaacctatacgctttaatgacaacactttacgggtgatattttgcaaaaaagacgagtatattaaggagcataaatgctcaaacgttatgatttcgatatggtaggaaaataaatattttttaaaaacaactatttttaggaccaccgcccaggcgcggcttaaactttactcttatatggaaaaaataaataattcagaaaattgcaaattaatttatacggatacaggtggactaaaaaacaataaacttttattttcgatttttagacagtgtattttttatgcatccaaagggaacgtctcctattaaggaagggagttttttagggtatgaaaataaccaagatccttttaatttccaattttagtgaaatg

SEQ ID NO: 117854 - DNA, 119 bp, Heterodera glycines
ttttacagaaaaacacctaaaaaatataaataagccaaaaaagtaaaatattattcttttaatagcctcttaatttttcctgaatttgttcttttttcttatcggaacagaacaacatg

SEQ ID NO: 117855 - DNA, 1003 bp, Heterodera glycines
  unsure (1)..(1003): unsure at all n locations
acaaattaaaatntncaccanatctttcctaatnaaccattttaattacctaattaataaaaanctanaattcaataaaaatttatnaatnaanctaatncntccnttttcacatatatcanagaaataaatccttcctataatgaaatgccattgaaaaattatgaggaaaagtttcgaattttttttctcacatttatacaaccagtaacattatttttaatgaatcacttattttttgagggattaaattaataattatttatgtcatcaaatgtaactgatcaacaggtaacaataataataaaagctgtgccaaaattataatcttttcattcactattcatttattcaaaggatgaggctggttttgtgtcggtcgaagttgcaattagtgggataattacgctgatttgctttttcggaattgcgctaaatgcgtcacttgtctacgtgaccgtcaaatcaaagtacgttttttataaaggtttcaaatattattatttttaaaaatcttctttagatatttgcagaatttttcgacgattataattatattttttattagttttcaaaaaaatcattttttaaacgccgataggcgccgccggggaaaattttggcaattaaatttcaatttgttaacggaatttcacaaaaaagactatttttgcaattttgagccaatttgcggccgcttatttttagttttcacccgctttttgcggcggcaccgccgggaaaaattttttaaagcgttttcaatgaattttattaataaattagtcaaatttttcagaaatttcactcttttctcttcctgcaacccccctcccctgtatttcatgtataataactaatttttatttgacagatcgattcactcccaatgcaatattctgatcgctttgtacgctttctttgccatttttctccacatcggattttgtgtcaaaattgtcattttcatttttggcataaattttataactctcgggacatg

SEQ ID NO: 117856 - DNA, 334 bp, Heterodera glycines
ggtgtttgtaataattaaatttaattattattttaattttattttctaagtaattaatcataacttagcttaagcttagtcaaattaataaaattaagtatttagcgacagctcgaagcatcctctactacttatgaaattttcaaaaaattagtaaaaatttacaaaaagttgtgaccaaaaaagtacgaaaaattttgactcaacaattttgaccctagctttcttgaaattcaataaaattttttgaaatttagcagaacagtagagtaatctttaggctatctaattatataaacaaaattaaaattgattgttttagaaaaaagttatg

SEQ ID NO: 117857 - DNA, 880 bp, Heterodera glycines
atggaaatatgttttagctttatctgtccttgaaaagagaaatttaaaaccggtgctcttttgctatgtcgcacgcgcttttttcaaaaaactttttgggaacatgggagggggtcacacgactttggtcaaatttgacacggacccccattcttaccagtatacttttggacccagatctaccgggtcgggtattgggttttcaaacgggccttgaaaaacccgggtcgggtacccggacccgtctaaccctaaccaatgcaatagtatgttaattatggcgccgcaagtgtcacttttctctgaactttcctccttttggctctgagttcgaatccaaccgtttttatattctacagaatgtattattcaactgtttctttataaacctttttaagaatattttaaatgtaaaattcaacaattttctgatattttttttcatttacgcagaattagtcaagaaatgacgtcgcttgattaaaaatttttcataaatatttccatatgcatttcatatgaatgaacatgtgaagataagattgccaaatattataaatttgctatgtatttatcgatacttatattatttcataaaaaaatttttagaggaaaaataattaaataaaaaatgaaaataaaaataattttgattttacttttcgtatgtgaaaatgtaaagtcggtgataaagaacaagcccgttttcaataatctaaacgaactcggccaagaaaagccctacggcaatggcacaacgaacgaactgcaggagagagaccgcacagaaggcaattagcaccatcattaactcactaattaacactgattaaatgctttagtcgagccgcaaatctatccgccagtacagcagcaaatg

SEQ ID NO: 117858 - DNA, 286 bp, Heterodera glycines
attttttcaggtcatttttagggggtgtggtttcccgattttattgcatttttaatggaatttttcggaaacaacgcccaaaaaggcaccaaaaaggcaaaatgccaaaaaaggcatttaaggcacgaaaatcccgaaaaaggcaaaaaaaggcataataaaagtcaacgtagaagcctcaaacgaagtggaaaatgcgttttttatgcttaatatatcggaactagtgcgcagaaaaaaggcatatgcctcaaaagtcggtctctagtcataactttatttgatg

SEQ ID NO: 117859 - DNA, 577 bp, Heterodera glycines
ttgttttgttttggtcacagcgccaataaattaattcccttcgtgcttctttttttggtacatatggccttcgaaagcgagttcgtagccgcccatttgtgaaggaaaaacgtagccattatatttaatgaattttgtaaatttagttcggcttttatagcacttatttcaggctatccgggcaaatccattggcaaaatttaattctaattagttaagaatagtggtttttggtcataaagaattttctcattaataggaatagtgatttttgatcatatacacaccgagtcaaaaaacgagacatgtgtcaataaagagagagtgcagagaaactttttgtctctaacttttctctccttttggcatactatctaatatttttattattaagaaaaacaacattccttctctccatataactttttttctaaccatacaatctgcaccaaattttgcatatcgatagagaaaaaaatctgcatcgatttctatgtttattatcatcgcttaaatgttgttttaaaaagttataagataaaaaagttaaattattattctttttaaagatttaatg

SEQ ID NO: 117860 - DNA, 295 bp, Heterodera glycines
attgtatttttctgttttaaaaataaagtctattcgctataataataatctacggccttattaaggcgctaggacttttcgacagcggacctttcgacagaaggacttttcgacagcggacttttcgactgtaaaggacttttcgacagtgaaggacttttcgacagtacactaatttcttatcaataataaataatttatttgtttgacctccgtttctcgaccggcccaaaaaagagtgaccatgccattcataactattactgaaaatatttttgaattgctgtgaaaaatg

SEQ ID NO: 117861 - DNA, 539 bp, Heterodera glycines
  unsure (1)..(539): unsure at all n locations
tctagagtcaatantgggcatacctcantttcgttgtaataatgtaaccttaataattttttctttgtctttttaatagaatgttacaataaaataattattctttgtcttttttttaaatgattgccttaagccaaaccaatgggcgcaagtgagcacaatttttatggaaggatgtactgtctttttcccctttccaatctttgttcttcattttcccatcatggcctccagctatgctggaaaggggtcatacgaggcaaaatttattaattatatatttgaaaaaaacggggaatctatggtttgataatttggaagtcggggtaaatttttaataatagccttacacaaaatttatcattttatgttaaaaaaaattctttcattcattcggtttatatttttgctcaacacaaatttctggcaattttttcatttttcacttcgttagctcattcctctcgtctctcttttttaggtaatgaactcttgtgatttattaaatttaaaaaaaacaattaacacatccgctcatg

SEQ ID NO: 117862 - DNA, 136 bp, Heterodera glycines
aaatttacgggggtgaccaattttgagtgtctaaaaaatttaattcttaatttggcccaaattttgaaggggcgtcgtgtatgaggacaaccgtttcgagttgcgcttatgcgagtgcccaatgcttgtcgcaatg

SEQ ID NO: 117863 - DNA, 244 bp, Heterodera glycines
  unsure (1)..(244): unsure at all n locations
gtcagacgatcgattgncacgtcagaatcgcttcggacttccaccagagtttcctctggcttcatcctgctcaggaatagttcaccatctntcgggtctcagcgcatacgctctgtctccgccncatcgcatgcgatcgagacgggactatgttgcgccccaacaccgcagtgccagggatcacacatcagctccgtaagaagccttcactttcattgcgcctttgggttttgaacacccaatg

SEQ ID NO: 117864 - DNA, 118 bp, Heterodera glycines
tctttctgcaagcaacaattcgccaaatttaaaaagagtaacgggcattgttcccaaatttgtagggatgtgcgagaaatgattttttaccgagaatcgagaccgagacttagaaatg

SEQ ID NO: 117865 - DNA, 1003 bp, Heterodera glycines
attctctctctctctctctctctttctctatatctttttttctctctctctctctttctctatatctttttctctctctctttttctctcttttctatctctcttttctctctcccctccccttctctgtttcactcactctctctctctctctttttctctcttttctctctcccctcccattctttctctctctctatctttttctttctctctctctctttttctctcttttctatctctcttttctctctcccctccccttctctgtttcactcactctctctctctctctttttcttagaattttttaaacttttctccgtttgcttcatcctttctgggttttgatttccctggcttttattgtccagaaaatatatgtgaaggtccaaatggaacccaggcccacacaccaagtcgacttaataccccaaaatacactgaaatcgggagtttttcgaaaaaattcctagggggttgataacttttctgcagaaaatcattatacgaaaataatacaatttacagtagaactgatcaacaccaaaattgaaaattagtattgacacacataatttcttaaaatcaagaatttgtagagaaaataaacaaataaattttggagacgaatttttgggaacatttttcatttattataggtgtatttttagaaaatttgggttggttcttagggttgtatttttctgaaatatttggggctgattcttagtccgttttatttaaccattttcacaatgattattcgaattttcagtcatatttaaggatgagttaaatatgcccaaaaatcctgagattttcaaaaaaaaaaatattcagaagagggccacttgcaaatcgtgagtttgattttaaaattaaataaattttaaatttaattataaattcattacatctcctttattaaatttttttttttggaatttaagcgccgccacaactgccaccacaaaatgaagagggtctgccgttgccaatg

SEQ ID NO: 117866 - DNA, 201 bp, Heterodera glycines
taaaaaaaaaaatttcggggagcgggagttcggaaacttttccgggaacggaactgggaactcccgtaaaaaatgttataaatttttacccgtagacccggcgggagtaattcaaatttaatgaaacaaaaaaaaaattccattctcgagtgtttcaaattagtggaaatcaaattttctaaacttggtattttccggatg

SEQ ID NO: 117867 - DNA, 788 bp, Heterodera glycines
ttctaaatcaattaaaaattcggaaataaattattaaagacaagttaatagtggaatattaaagaaatgaaaaatgctctagacagaatataatatataattgtgaataaataaaagtgcaattgatcgaattgatcaactatgcatgtggatattatttctctctctagacagaatataatattgtaatttgattgggaaatattaaataataacgaaattataattatggccagcaatataattaatagattaaaatagttatattattaattaattaaaatcattattcggtacttaaatgacccgcctcttctgatcaccactcatttgcctttttgtcacttcgcccacatttgcctttttgtcacttcgcccacatttgcctttttgtcacttcgcccacatttgcctttttgtcacttcgcccacatttgcctttttgtcacttcgcccacatttgcctttttgtcacttcgactcaccacggaaagtaattacattttattcagatgtgtagtaactataaaataaaaattgctagaaacctgtttttgacaaaataaacctaaatttataaatttctcggcgccgggttttagcggttttttgcaaataaaaaatggaataaaaatttacaaagaaaaattctgaaaaataaatgcaattttgtaaaaatttttaaagttaacattctctatttaaaaaaataaataaattattattttgcagccgaaaggggcttagataagcgggtcaatggtttattttattttcaagtaaatatg

SEQ ID NO: 117868 - DNA, 435 bp, Heterodera glycines
ggattcggtctccccataaatctgggcgcatcgtttcggggggactgccccgaaaacaaaaaaatcgattttttcaactgtccgtttggggtactcaaacaattatggggagcaaaaatccaacgcagaattaaagtacagactatagggaagctattcccgaaggattcggtctccccataaatctgggcgcatcggttcggggggactgccccgaaaacaaaaaaatcgattttttcaagtgtccgtttggggtactcaaacaattatggggagcaaaaatccaacgcagaattaaagtacagactatagggaagctattccggaaggattcggtctccccataaatctgggcgcatcggttcggggggactgccccgaaaacaaaaaaatcgattttttcaagtgtacgtttggggtactcaaacaattatg

SEQ ID NO: 117869 - DNA, 600 bp, Heterodera glycines
ttataacaagttaaggtgacagtttcatgacaagggcaagcgaagctttctttacaaggtaataagcaaaggctcaaagctgacttaatgagcagaatttgaatcaaaatatggcattttgttgggtcggggtcacttcggcgcggaccatttcggcgccgcaaattttgaaatgctataacttttttatttgccagttagctttagccaatctggcatcatttgaaagctctatgtgtgctctatatttacatgtaaaaatagaaatgaatgattcaaaaataaaaaagttatgccacgcggcgccgaaaaagccaagaaaaagttaatttttgaggttttttggccataacttttttgtaaactgacgaaattttttgaaattttacaggctaatagagaatctgagctatcgaatgataacaaaaatttttaatttggttgatcaggaaaaaagttgttagcaacggcgccgaaaagtcgccgaagtgggcggttcccattttgttagccatcagaataatttttaaaatttttttcaatttttttttaatttaaatttaaatttttaaacatttttttgcaattttttcagtgatg

SEQ ID NO: 117870 - DNA, 799 bp, Heterodera glycines
aattaaaaattttgttaataaaaataaataaataaatttttgggggaagaatttttgggaaaattttccaattcttaggggtgtattttttgattttattgcatttttgttaaagaattttctgaaaatccttaaataggtataatgggtagaaaaactccaaaataggtaagaataggtattataaaagtcatcgtagacaccccaaactaagtggaaaatgcttattttgtgcttagcaaaattggtcagatataatgagcagaaatgagtccatttcatcacatatgtcgtttttttcaacttttatatatacgcaattacaccataaagaaatgtataacaaattttaaatttaattgtttgaaatgtgaaatttgctgattcattttgcttattaattttattagttattacgaattaacaaatattttaaatttttatgctccttccaattctcttcacccttccatttattcttcctgctcctcgccttgggtaatgtttgtcatgttaaaggaaggcagggaaatggcgtcggggattggcacggaaatgttaagccatttcacagcagcaccattttcatcgttcttggcaattaaattgaattatttttttagcacataaattctgaacccaaagttttataaacaaaaaaatgccaaccttggccttagggcaaatgttgatgcacacaacgacaaagcacacttgatagcaacctttttcattggtcttggcagatggggcaggcttaaaagaaaaaaaattacagttaaatgcattttcaaaaatg

SEQ ID NO: 117871 - DNA, 984 bp, Heterodera glycines
gaattagaacaaaaaatcaaaaactcaattttcaataaaattcatatttattgcacaaaatgcacagcaatggagaaagccggtaaattttggaattggaggcgggcgacggccaacgaacggctatttcgtggcattgaatcggttttgtgtaataaatttgatttttattgaaaattgagtttttgattttttgttcgaattcaggttggggatttgaaatgggtcgaaatggatgccatattcttgatcagcgaccccgaaaacataagaaaaaatgttctacccgactctaaaaattgtaatatttcaaaaaatttatgggggacaaggcataatagagccaaaatttctttgcgttattttaaaattacctacctattcaaatttaaataaaaaaccaagaggcaaatccgaatcattaacctgtacaataacaaaaaagatcgaaaatgcattatttctttttcggatttccttttatgatcatgtaaactgcaatagagcccattttgctatttgtcacaaatctgattaaaaaaacaattagaaaaaaatcagactgggcttttcgtattttccatattttaaaaatgttttttttgatattttttcacaatgaatgattcatggataaaaaaatatctgtcgtcgccgcttcaatcaacgagtttttcgtcaagtgtccaaacttcgtcgagttttacacaatttgataaggcatttttaaatgcataacggttttaatttatgttaatcattttaagataaatgttcagaatttgagttttacgcctttgagtgttccgttgccttccccgctccaaaatgttcaacatttgggccttactccattaagcagaaatgctagcattcacagagaaaagaatcgaaaacgccctttctcaccgctggaaaatgaccttgggtcggtgtgttcaatcgccaaaattaaaagtgagtttttccatcgatttactaatg

SEQ ID NO: 117872 - DNA, 1003 bp, Heterodera glycines
aaatatttttaatcacttacctaatttccaagtaacatagattatctcatttttcattattacgtttaattgcctaattagtagggatgcgatttttaggttttaactaaattttttgctcaattgatttgaagaaaggagctcaaaaaacgcatttctgcgttaaaattttttcatttggacgtcacttttcgtcactagaaatcactattttggcgacttcgtcactaaaatagttaaaaatcactattttggcgttttgtcactattttttcactatttcaacattttttggaaaattccttaacaaaaacgcaataaaaccaaaaaatacacccctaagaatcgacctaaaattttttttcaaaaaatacacccctaagaatcgacataaaaattttcaaaaatcactcctaagaaatgaaaaatttttcacaaaattcactttctttgcaaaaatttttaattctaaaaattattttttaggaacctattttgtattttttgccctcaaaaatcccagtcctactcatttgcaactgcaaatagtgaataaaaattatttttgctcaatttttggctgaaaatttgtcactattcgtcactatttcggactttttggcactattttctcactattttggcatttttactcactattttagttaactattttgggatttttcgtcactaaaagtcgcatccctaatcatgatgaattttttttaaataattcagtttgttgtacattcaaaaattataaataaaaaagttaaatttaaaattgataataaattataaaatatattgttgttacgaagattctatacttaaaaactatagaaaataaaaaccatggattaattatgtttttagacgtgacggcagtgggcattatatacagttgaaagcagcaatccaggcggagcatgctttgacgatgctttctgcgaaaaggtgaataaaagaatcacaaatatttgagagcgccaaaaaagccatg

SEQ ID NO: 117873 - DNA, 542 bp, Heterodera glycines
ttctttgatttacgttgtgattttgtccttatatggcacaacgtataattatggcacaggctttctttaaaaacttcttatgctcaaaatgcaaaacttgacaatctcaagctatgcaatgcttttttaattagttgaaatattttgaaagtaagatttcattttaatatcccaattttccttctgtactcaattttctgagccccaaatatcctatgcaatgacataatgttctttttcaaattaattacaatcccccttaattgatcataccattttcgaagaacgcttaattttttgcatttcctttttcaaatttctttccctttatctttgcattcatcaattctttccattttaaagtgttgtaatatgcacatgcattgttttgttcaccgccccacccattgaaagattggtcctcccatttttcatttgccctatgaatcgtaatttttaaattctcttttagctaaacaaattgtttttgactcttttccatttggtacaatttaaaaatttcttgacataattgcccaatg

SEQ ID NO: 117874 - DNA, 305 bp, Heterodera glycines
  unsure (1)..(305): unsure at all n locations
cagcgaccccaaaaaccctaaaaatcctaaattagactcattttgtttttataaattntgaaaaattttggacatttcgtggcttggacactttgtgggggtgccaaggaggaggaggagacaaattgccaagaaaattatatggcgaaacgttttaaaaaatttttgaatttgttaaatttttcttagaattacaaaaaaaacatttgatatgatgttatttgttcgttcttcattttacatacattttttatggaatcgtataaatttattttacttacagataattaaaatcatttaaaatg

SEQ ID NO: 117875 - DNA, 496 bp, Heterodera glycines
aagagacctacaaacagattacatttaataattagaattgcaaaaaataatcagtgttaaggccttcagaaatccgacataaaaataaaattatttttattttactttgcttttttaactttaattaattaattttttaagtattgtgtttctatgggaatggtgcatattttatttgaaatttagaagagtcgttccactctcccatctttcaaaaaattttcaagaattttcttttaatttttcctgaaattattcgcagctttttaatatttgctgaaaatattcaatttttgctatggaaaattcattttccacaattttcggcaatcagaattacacaaaataatgaactcaactaccaaatttggcattaatattttgtcaaattctgaagtcaaaacatcatttcaaatagatatgaacactaaaaatcaaaattagttaaaattaaatttaaaattattttattttatttttacataattttcagatg

SEQ ID NO: 117876 - DNA, 606 bp, Heterodera glycines
attgaaaatatgtcaaaaataagtcaaaaaaatgaacatttttcaatttttcatcaacggttttttgacaaataaattaacataagttgaacaccgtgctacaaaaaatggccatcaaattttttcccaacctttctatataattatattttcttattacatattttacgattattacgattttttttacatttaatcggatcattaataattttattagcattgcatttcccattttataagtgcattatttttaattaaaaatggtatttattatgtgatcagcagatttgtcactatgggaaaccatcaaaaaccatcatccatttagaaagtgatgaatgaattaatgaataattactttttcaccatttgtgaaggcccaaaagagaaaaatcacaaaaaatggaaattaatagcatttggaattcattttatttaattatcaagaaatttcttttagagcaaataattaaatattttgctttttttatcgttattcgttggatattctcctgctcatcaaaaaaaagtcaattcaaatgtaattgatttgaaaataattttttattatttaaaatagatttttttgctaagttaccaatg

SEQ ID NO: 117877 - DNA, 278 bp, Heterodera glycines
aaaattattattttaaaggaaaaaaaatttttttaattccctattttcccggggtacccggattcccggccccggtttaaaaactggtacccgaaccggtacctggcttttcaatacccagtaatacctgggcccggtttttgcccaaatacccgggcccagcctatcctagtttatacccaagcacacatgaattcagatcgtgctgggtcgtttcgtaaaaactgctaaatttacagaatttttaagaaaaatcagtcatgattcagaaagtaatg

SEQ ID NO: 117878 - DNA, 51 bp, Heterodera glycines
  unsure (1)..(51): unsure at all n locations
tcatcattctcggcatcgcatcgtttccgtccaccgctgcgcaccnggatg

SEQ ID NO: 117879 - DNA, 225 bp, Heterodera glycines
actggcggtggaaacgggaccacgacagctgaatctgtgccatttgaccgagccgaagtcttcacagagtgccaagttaggtgtcctgcggggtcaacgaaattccggctgaaaggggagctcgcgttcatcccccgtcaactccaatttggatttggccacagagagtcagttggtggccagcttgaacaagggggtggaatccgactacccgattggggcatg

SEQ ID NO: 117880 - DNA, 593 bp, Heterodera glycines
  unsure (1)..(593): unsure at all n locations
taaaatggtattagcatagcaaagagacgtcgaaccntgagacacaaaataaatttgactaacgcactaccgctacaccaatagatgctcgttgcgtagtgaagtaattatttcttttctttaattagaaaaaaccaaaaactttggcacgtcataactcggcactcgagttcattccgcaaaaaataaaatcacttttcttaagaacctgtgggtgctctatccacccaccaaatttcattcggaaatcccacggacacctggggaccttcctttgtgagcacagcttttttaatttggaggccaaattgaatgaatgtataagataaaatgccttattttcttattctaaggcatttttgcagcgctcacgcgaagctaacaaagaacaacttaaaaaactggttgaggaacatgaaagggtcaaaagagaatgtgctgagaaaagaaaaaggctcattcgactcaggcgatactattatctttgtgcatatggctttgcctttttcatttcttcctttagtgcctgtttttggtacttcggcgcaccatcccaaaaatgaatttctatcaaaaaataaaatttaaatatg

SEQ ID NO: 117881 - DNA, 77 bp, Heterodera glycines
ggtacggtagatcagagagtgggtttggttaaaattcgaggtgaaaataattcaggatcagcaaatgcagtaaaatg

SEQ ID NO: 117882 - DNA, 343 bp, Heterodera glycines
tagtttaaggcatgttaataacactatcgcttgcaaaagcggtctcttattttcacaccttaattatttaaaaagtttatcaaaatttagggatacatctgtcaatgcaaaggttagcaaattaatttgcactgcacaaatttcatcaggttaaaaaagggcatttggacaaaaaataccactttttaaagcacaatttcaaatggatatttattattaaaaagtaaatttttcacattcgggtctttattttaaaaaaattaaattaatatttcttagtcaaaaagatcaaagaatttttgtaatactaattcataaactttctgttataatttagcttatg

SEQ ID NO: 117883 - DNA, 266 bp, Heterodera glycines
agaaatttttcagggacaaaaaacttatttgaaaaaacccactggaaatctatgtttttttttgaaactatgggggtgaaggacgtagtgctcctcaaaaatccaatgccttccgaactagaaccagaaaaggtggacagggattccaaggctaatcccggttgtcgggaggaccccgtgcaactctattctaaggatttcctctcgtcattcatccacagagcgcaaaaatgttttttcttttcaccgcagaattgccggaaatg

SEQ ID NO: 117884 - DNA, 1003 bp, Heterodera glycines
cgccgccaagtgagcgcgggccatttgagcgccagacttttcagtactgaagccaaaacctattgcgcgactttttcttggaaacccaaacctattgcaggggtgcgcgacttttttgactgcgcgactttatgcaaattattttaattaaatttatttaattttaaattattttaaacgtcttaaaggtcaaagacgttgaatttaaattcatttaaaattctccaaaaattccccgcaccaagcggatccgaaccccaggggggcggccagactgacgcactaaccactcggccacattggcaatggataataaacattaatttgctctcataaagggaaaaattgacgtcaccagcggcgggaggggggcgagagcgggcggcgagaagggggagggggtcaaataaacaaatcaattattgaattcacaattttctcttttaaaagcaaaaagaaatgggggaccgtataataaaatataatttagaaattaaaataattaaaaggttaattaattaattattttcctaaaataatttttttattacttctaaaataatataaatatttttcagtgaattaacaaatacatttaagtttaattattgatttgtctgttaattttttatctcctcaaaaataattacagcaccctttcaggtgttgggcgtttgtttatttgaccaataatttttaatttcacatctttacgttgcccctccctcacacctgctcatttgtctggaatttgtcttgcgccaaaccgctgtgccattcatttatgtaatttgacaccagtctgataataatttcgccaaaatttatttattatttgtccatttattacgaattattttgcatctatcactccaaattttgttaaaaaaaaaaaaattttattgtcccaatttttaccattttgtgttttttaaacaaaataaatatttgttcaaatttaaagaattaatttttaaaattttagacacaaaaacaaatcatg

SEQ ID NO: 117885 - DNA, 180 bp, Heterodera glycines
ataaatttaaaatgaaatcatttaataaaacaatcaaatagaacactgctgctccaccgtccgggaccaaagagctttgccgaccttcgcaccattgatggcgttctatttggcactttcgtgggtacgtgccaacacttgggtcttcaagtgagcgacgaactcttccgccgagccatg

SEQ ID NO: 117886 - DNA, 846 bp, Heterodera glycines
ttttaatcagcggaggtagcgtttaagagagagacagggcatcggtcggtccaaaatggcacagcccaaaatggggcgtcaaaatggcataaaagaatggcacaacccattacctccccccctccttcctattttaacgttaccccacccttaaacactaatctaatttcccccccccccctaaatcgaagtgccttcgctctctctctccccttctcctcttccccccccccctatccatccctttccctaattagtgaagctgagccgtgccgtgccccgaagggagtgacaattaaaggcctattttgtaagcggacaacaaaagaaccatgcccaggggcaataggaggaaacggcacacggcacacacacgcgaccattaaaacactcatttggcaaacggagaacgatcgatcgatgcttcattcatttgaatggccaaattgagtaacgaaagaaaaagcaaatctgcgaaatcgccgcgcccattcattgccctccccccaattaattaagcaattaattagtacttttcgttgcttcacctgcgccctccccgggcgctgttcatacatatttataagttgggttggcactgctaagcgcccctttcgttgagtttttttctctctttcccacgtggatttgaaggcctttctttctttcttcgtcctgccgattttctccccgttaaaattcatttccatttcaaattttccccatttttccttccccaaaatgctatcaattgaggcgagcatcggtaaattaggacaattagcacaatttttgtgccattttcagaccgttttttgagtatggcgtcgccactggcgaacaatg

SEQ ID NO: 117887 - DNA, 180 bp, Heterodera glycines
ttcaccctcattttttttagaacaaactatcaattagggaaaattcgcaaatttttccccattacaattcaaaaaatcaaaatttgcgtattttttccccaaacattttgcaggggatacggtttttcaaaaattaaaaaaaatttcgtttaaatttgggaaaaacaggtgggcaacatg

SEQ ID NO: 117888 - DNA, 292 bp, Heterodera glycines
  unsure (1)..(292): unsure at all n locations
atttgagtcgttttagtgcctattttntgggggtttttcgatcctaaaaaacgttccctcttattcataactttgcgcaaaagtattaaaattttaattcttggtattaaattcatagctctaagcatttgctagaatattgttggccaccataacattttgaaacgacgaattttgtgaaattttatgctttaataaacaacacagagagaaatcaaattatgccaattaagaaatctgggttcatttgatttccaaaaaaatacctcaattacaaatttttttacgaatg

SEQ ID NO: 117889 - DNA, 89 bp, Heterodera glycines
ggtggccggggaacggatgatggggacacgaaaaaattcggaaattttttaggtctcgtgaactgttcccgattggctggtgtgagatg

SEQ ID NO: 117890 - DNA, 150 bp, Heterodera glycines
taacttttctaactttcttagagattatttccttaaacatactgaaaattttttttgaagaattctccaaataaatttaaaaatgtgaattttatttatcaaaattattaatcatttttcaagctaacttattaattacagcagcagatg

SEQ ID NO: 117891 - DNA, 863 bp, Heterodera glycines
tctaccgtaaaaccttaatctaccatagtcatgtagacaacgtaggcatcaagaataaatatgtgttgatggacgtacgcatttctggagcattgaatatcgtgagtatgtggatgcgtacgcacgcatctaccgtaaaaccttaatctaccatagtcatgtagacaacgtaggcatcaagaataaatatgtgttgatggacgtacgcatttctggagcattgaatatcgtgagtatgtggatgcgtacgcacgcatctaccgtataaaattaatctaccatagtcatgtagacaacgtacgcatcaagaatactacgtgttgatggacgtcgccatttctggagcgctgcgtacgcatacatctaccgtgcgtatcgtacgcatgtagattcttttaaacaccatacgtatatagaaatgtttgatagtcgtagcatctggagtgctgcgtgcacatgtatctaccgtataatacgtactatttttctaccgtacgcattcctggagtgtacgaattcttctaccgtacataacgtacttatctttctaccgtagactattattgtgcgtacacatgagtctactgtacgtaatcacgtttgcatttattgggatgttacgcatatagattaatcaattagtctctctctttctttgttgcgcaagaatgtttacaaggcattgtcgactgacagattgtttataagaaggtgggagttcacatttcttctcattcgttcattttttaatacaaaaatttcgtctccttgtcctcaatcaatattttaatttaaaaaattaagcattaaaaatcattaaatcaatgtcaactcaacccactagctttttcaacgtcgccatg

SEQ ID NO: 117892 - DNA, 123 bp, Heterodera glycines
  unsure (1)..(123): unsure at all n locations
acgcgtagtccgtgcccaaattccttatttatctacccgacacggggacacgtgttttgcgtataggagaccggtaaaaaactaataaaaaaataaanttataagggtttattaagacggatg

SEQ ID NO: 117893 - DNA, 718 bp, Heterodera glycines
aaaaattgttaaaaatcgtactttttttgatcccgaatacactaaaaaaattacgatttgcttatttcctacccaaaattgttaaaaatgatcatgggaggcgaaaaatatgaaatttgatactatattaattgaccaatgatcttttgtttttctaaaaatcattgttaacatgacaaaaatttagcaggggtgggacgggacgtacgctacgcaatttgcaccattttccacgaccgcggctttttacgatttttttgttaagaaattacaggttcaagaattttatttattgaaattgaagcgcaattttaaatgacgtcgtcaatgtcggacaatttggcggatcggatgaagcatttgttgagcacggctaaacttgcggatgcgtactttttggtgggggacggagacggaaaggaggcgagtttatgtttcaatttttgatttttttaaacctttttttgttttttaagcttttgtctgcccacaaaaacattttagtgtctgcttccgacgtttttgaggctccgttttgactccaaaaatggaaaagtggaaaatggtaaaaaaaaaatgcgtaaaaacaacaaatttcctagcaaaaaaacccatagtagtgacacttttacgttgaaaatgtttatttttcaaattagcctctgccgataatcccgtggaggtgcctgatgttgaagttgtggcgttcaaagtgatg

SEQ ID NO: 117894 - DNA, 362 bp, Heterodera glycines
agtgcgtacaggtacgatcagagacacagcagtggaagggcaaaaaaacaaccggaaaaatgagcataagtggtcagagatgcaaaaatagtgatcagcagcagcagaagggcaaaaaagtgattggagaaagggggcaaaaggcagagagatcgggaaaaaatgggcaaaagtaaagtgatcagagacgcaaaaaaaagagtgatcacaagcaactgatttagtgaaaagcagagcgataggagaaaaatgactaaaagtgataagagaaaaattgaaacaagaaaaattgcaaaaaatgatcaaaaaagtgatcagaacccagaacagaaaggcaaaaagcagagtgaccaaggaaaatg

SEQ ID NO: 117895 - DNA, 665 bp, Heterodera glycines
tgtctttacttatccgctttttctcctcttttttttgtatgtgagtcatcatttgtgctcctctaaacacttttgttacacttatttcaattcgatcgcactaacgggtatcgccggatcagtcaccagcctctccttctctttatccgtttttaaccaagaattttacagattgtcaaacccattcattcattcatttgcactcccaacgcacgcacaatttttgtttttttttattattattggatttgtcaattctgctggatttgctgctctcctttttaaaacaccaacaaaaaatgatacattttttgtgcagcttttgctaattaatgtacacttttttccattgtcactcatttcattcactgctcattgtcgtacaatttggaaaagtccacgcaacaactcagttcaaattgataaatttgatttcacctccaattgtctgctccactttatcgttacgatttccgtttacattttcacttttaagttagaaattatttatttcccattcattcattggaaacagggaatacatactgtatttattttattgtacggtatctttgaggcaataaaaaaacaattccacaggacaatgcctaacataaatcatttagatttttacaaaaatacacatttaattgaattggcaaatg

SEQ ID NO: 117896 - DNA, 68 bp, Heterodera glycines
tttttgcaaagttaaatatttaaatacaaatttaaatagtatttatttttaaatgtcagtttaaaatg

SEQ ID NO: 117897 - DNA, 984 bp, Heterodera glycines
tgttccgatcagtcccatcctgatcagtccctcgcgccgatctgtccgatcattcccccctttccctttccctttttctctgtttgttgttttcacttttgtctctgtcgtccccacccccactttcccaaatgaaacgaaaattggtgaacatttgttggatgtgattgggcaaaattgtagcggcgggtggcggtaatcggaaaattgtcgtcgtcggcgggtcccaaaaatgcgcgaaaattggaaataaattgatcgatccatttgggacgaccatagggggggggaggaaatgcaaaattcggccaacacaatgagacattttggtagtacgtcaaaatgagataattcaatcaaagaatggtcaaatcgaaatatatggtgtaaaatttgagtcatcaaaaaatgagtgatcagagataattctttgcttctaactttttttatggtggttctgctgatcagcacctttctgatcggcagacattccgaatcatcttcggttaaaggtgaaaaaaacatagtgacgcacggcttgctgatcaaacagtgtttgtgatcattgtgctgaaatttcattcacgtgatcacacacaggatgatcttgaaaactcgtctgacaatcaccagcagagctgatcagttttttgcgcaccagtacttctatatatcaataatacaatcagtatttgaccctatcgattcattgcttttcggcactaaagccacagtcaatcaatattttcccaatcgattccttgattttctgtgtcaattctacaatcaatcaatattggctttcggcaccaaatccataatcaaggcattttttcccgatcgattgattggttttctgtgccaattccacaatcaatcaataactgcctttcggcactaaagccacaaatcaatcaatattttcccgatcaattacgaacgctatttaaccccctttttggcacacaggacctcagcaaaatg

SEQ ID NO: 117898 - DNA, 133 bp, Heterodera glycines
tttcattaccaagaaattgaagaatcaaagaccacccacttctttgccaacgggaagccctgagcccaaagtgagcgtcagagaaagcattttggcgaccaaagtgcggaaggagaggtaattctgcagcatg

SEQ ID NO: 117899 - DNA, 360 bp, Heterodera glycines
aagggatgcctaaagggatggatcaatcccttaaacatttaccatacgtcttttttactatatggatccatccctttatgattgactaaagggatggcctaaagggattgatccatccctttaagattgagacagttagagtaatctctacactatttctctattactctagtatctctaactgtttctctctttaacacagtctctcgacactctaatagaatatgggttgaataataggtccgacagttagagtaatctctacactatttctctattactctagtatctctaactgtttctctctttaacacagtctctcgacactctaatagtactgcccccccctcacacaaaatg

SEQ ID NO: 117900 - DNA, 158 bp, Heterodera glycines
gctgaatttttccgtttatttttacaattattaatcgttctgaatcaatttttttgaaacatggtaaactgcttatacgtcttgttggaaaatctgttcatgttttctttttttcggttcaaaaaccaaattttatttcattatgtttgctaaaaatg

SEQ ID NO: 117901 - DNA, 122 bp, Heterodera glycines
ccggtgagattggataataatttttgatgcttaacttttaaaaacggctctcttgacagaatgacactgtcccacccggcagaaaggttgaggtgttcccgttggagctgttggaagtgatg

SEQ ID NO: 117902 - DNA, 192 bp, Heterodera glycines
ttgggacggagagagagagagggagggggaagagagcgaattggacgacacatccaacacctgagcagagattggccattatgggagtggtcgaatggcataatagcaaattaaatgcaaagtgaaatgattagtgcccctttccctcgcctgaagtgcccgcaggggacaaagcgcattcagcgggaaatg

SEQ ID NO: 117903 - DNA, 184 bp, Heterodera glycines
ggcacgttttttctttttttttgggggggctgattttctgaaaatttctttttgaattaaaaaaaggtgagagctttttaggaaaaaccttcccagcaaaaaaaaaaattaaatgaattttctttctttatttctcatgtggccaattagaaatcactgctttcagagattgcgttgagcaatg

SEQ ID NO: 117904 - DNA, 595 bp, Heterodera glycines
  unsure (1)..(595): unsure at all n locations
agtaattattatntattttaaatgtttttntaattatatgaatttttactgnnaagagattaaactgattctttttttctcgtcgtcttatntagtagataccttttcttcccaatgtaatgcttgctgataaataaaaacgttattttataaacttatatttcttcatgctcttctcaataataacaaagttaaaaattattaaaattatatatataaaaatattttaattttttgattgcttttttttacaaaattttttttgttatttttttatctatcaattggggagcgcccttaatcaggtcatcaatgactttctttggggtttaaaagaattattattttatttttaaacaatgatttatatatatttcaattgccatttgggtgtatgctatgcgcaattagagaatggcaaatcaacctttttattagtttttgcggggtatcaatttaaatgttgatatttaattaaatcaactaacattatgccatcaacgcaaatatcaacgtaatttttaaaatttgcgaaaattttttaaaatttatatgagcggtttataattttagtgcgagagataacgcaaaaatg

SEQ ID NO: 117905 - DNA, 1003 bp, Heterodera glycines
acataaatcccacttgaaatttgtcaaaatgattaaatgttaaagacattatgccagagatatttttcaaagaaaaatgaacaaaagaaggtttttggttgagaccgagtcggaccggatctggtcaaaaattcgccggaccggaccggattggcattttcaaaaatgaccggattccggatccggtctctcataatccggtcaatccggtaatccggtcaatccggatttttcccaaaatcgccggaccggattgccggatccagaaaaatccggtaccggatccggtccggctcggtctctattaattattcttctttttttacactgttctgaacattcgacaaagttaatcaaaaactgaggccaggccattaggctagcaaactaaatagataactactaaacctgtagagccatttaaatttgttggatttgattgaccaagaaaaatgaaaaccccaaagattaatgagcacaaagcattggaaaaaagtggagacagctaaagaagccgaattaaattaaagtgaacataaaaaataattaagtgatgaaaaatgagtaatggaattatttgagtaaaggatttaaaaaatattgtgatgcgtaaagtctgttcatttaatccgtctaatgggaaacgaacttttatttattttattattatttttttgctcattggtaaattcccaattaaaaaaatagagaacttaattcgatgattgaaatttaaagagttttttaaaatattgaagtttctgtctgtttcaagtgaattttcttatgacgtacaacgcatcagcagacttggtaatcggaattccataagaatttatttataaatttgattaagtggttccaatatttcacttccgatgggccccaatggctaattcttttcgctgtgtacggcgcccgctctctgtggacaactttaggactttcgttcaactttggcgttgtgtacattactgccaaatcaaagtgattaattagcatg

SEQ ID NO: 117906 - DNA, 1003 bp, Heterodera glycines
gagagtcccacgactcgggaaatatgtagtcggaggactgactatacatatgcaactttgcagattccaatccaatcgaaactaagacttttgccggattatttccttttcataaggcatttatactttaggcactcagagttttgcattgtgaaatttcaaatttcacaacatatgataattggcattatgtttttttgaaaaagtgttttttaaattctatcaaatttaaaattgtttcctttgccttttctaccactctttaattgcctgcgattgatttttgattgtcgtttatggaagagttcacatttttttccatccattcctttacaaaaattggagggaattctcttcctatttatgtcatgtcgcaaaagaatatgcatggaatggtactgctgttgtatgggcccatattttttgagattgatgggatggaattggagaataaaaatgagcacaagaaaaggaaggaaaggtgaaggccttccatcgtgtgatctttggtcttttccatcagctcacaaatattcgagtggaaaggaggggggggggaaggggtaacaacgattcatttttggtgtgcaatcgcattgaaaggagagaaagtggaaaaatgaaaatggcaccgccccgtcccctttcacatatttgatgggtgtgtatattcttaatttgttatttgcatggttttatttatggaatttcatttttctggttcttttttatttcatttcattttaaagaacttggtaaattaccttttgtttgttcgaatttcttgaatttgatgtttcgctttattctgactgacagtgtccgactagtcagctcaatttgcgctaaaaatcggatttttctgtgagaatttaagcctcatttgcactttcacatttttctctcccatacataaataattatgcccagtctaacctccacaatttttagtccgaccaaattttccactcattttgcgtccaaaacattccatccaaaaatg

SEQ ID NO: 117907 - DNA, 819 bp, Heterodera glycines
ccaactaattaaattttgggggtgcactgtgaaagcctctgtaaaaatttaatttacgatgaatagacaaacaattttttatggtaaattttatattttgggttttctttatttaattagaaaggcacttttagcctttagaaaaaaaaaaatcaaaatgccattttcattgcctactctcgacaaattgggtcacaaaattaaattattatttttagcgcaatttttaaaggttataaaatggacttttatatcccatatttatccattttttggcattttgtccatatttgggttccatttcttgatttcaatttttttttaatttgctcgagaaccttttttaattttaacttaattaaaaattggtaaattgggtgaacaaaacgaaaaattgaaattttcgctttttcaatggtttttaaacaaaagattaaattgtgtttttattggtcaagcgtttaaattttcccagaaaattaaaaaattttcttttttccaatgccattttaagatgaaaatagagctgagcgggaccgggactggtactgaaaaagcgtacaaatgagtaccaattcccggtttttttcccggctttcccagccaaaaagtcccggtttttctcaaaatttccggtccagctcagctctagatgaaaatgacagctgacatatataaatcaaaaataagacagtgaattgcgaagaccaaagctaaaaattttagaaataaattaagtaattaatgccaatttccatttatttgcctctcaaaaaataaaaataatttaaaatattttagaaagaaatttaaaggatg

SEQ ID NO: 117908 - DNA, 436 bp, Heterodera glycines
agttcgtgtgtttaagtaagacaaagcaagcatatcgacaaacgattgtcatcaaacttttttcaagtctaccgaattttaaatgattgaactcattagatagttcattactttttaaagaaagtgatcctttttgagtttgggacatagctgataatgaatgaatgatatttattttattctgcactgtctttgtatgaataatatcactgaaagtttttttattgggttcccggtgatttagtagtcagctaagtgttttcgtcattattagatataaatacatttgtctgatgggttctggcgaaagcatttactaaaaaatcaacaattgattggaatcaaaatgataaataaattcgtaatacccctaaaaatatcttgttttaaacataaatctaaaacaatgtttaaatttttcaggtgttcggatatg

SEQ ID NO: 117909 - DNA, 548 bp, Heterodera glycines
tttttcattttttatggcaaaatttaattttagccaaaaaattccgaaaataagcattttgctagcgaaacgggtaaaaaatgagacttttatgcaaaattcacgtatttataaagcagttttttccgttgtttgcacatattttgggtttttttttgtcacatatatatgtacatatttggcgttttttagcacatataaatctgttccatcgtgataaaattgtgaaggaatttaaagaaaataaacatacaaaatgccaaaaatatcgcaaatatttggacattttatatgagtatttgtacagagaatatgcccaaattccaacagtgaagccaaaatttgtgtttaaagatgaaattgaaattgaagggccaataatttatgcggtcaattgtctggtgcaaatttcgcaattttattttcattttaattggaatatttttgaataccgtttaaatcaaaaatattacaatttttttgcaccaattctattaaataatgagcaattgaattatgaaataaaatttggaaatgaacaaaagatg

SEQ ID NO: 117910 - DNA, 678 bp, Heterodera glycines
agagaaatttggcaaaatataacaaatttttggccatggggaaacattgacggcacggacacatttttagaatatgtatcaatctaaaacaattgccatagcaccgtcccatgggaaacttttcataaattgggcttctcggaattaagtgaaagcccccgaaagaattgggaataaaacaaaatgccaatctcagctgaaaaatggcaatcccagccagttgaaagtgccaatctcggctgaaaagccaatttcttccggctgaaagtgccaattccggctgaaaatggcaatcccaaaccctgagaaaaatttagaatcccactaaaaaattcgttaaaaatttaaatatcttaaaatagaaaaaaatgcttagaaattttccgggcatttgtctccattccgaacccctgggagtcgaaaaatatggcctaaggcatgacgatgaaaattcccggcactttgaagcgatcagcgcgggacacaagtgccgatgaagatgatggtggcggtgattttgacggcagcagcaacgagactgagtcggacagcgctcagtttggaagccaattgaaaagggacggcgccgccggagggataagcattggcacttttcttggcaacatttcggcatcggcacgcgctcaactgcacaacattgtaaacaatgcgagcatg

SEQ ID NO: 117911 - DNA, 588 bp, Heterodera glycines
attaaaagcaataaataatattttgattatttattttatttctgtatttacttaaacaaaaaaaaaatttactaattattcgaataaaaattcgtttgtattaagaacaaacatttaaaataaaagaaaataagttcactttattataccaacaattaataattgaaacttttagtaaaatatctttttttgtttgtttatcaatatgagatccatttaaattttttcacaaatcaaaattttctaaattattaattttaaatgacttccgctgaaaacccaaaaagttctggacacagacaagagttaataaataattaaaaaacataaatttttgtcaagagaaaataataaatgatttaaagtagagaccggaattttgaaattgccgggaccgggacttggaaaatgaaccgggacgggacccgggacttggactcccgttttaaacgggattcccggtaccagtaacagtttttggccgggatcccgccgggaccgggattttttcaaatttttgaaattttgattaaaaattcgaaaaaattttataatttatattttagcttgggaataggccaagcaatg

SEQ ID NO: 117912 - DNA, 246 bp, Heterodera glycines
ctctttgcccccctcgctccctctccttcgctccttctcatcactctctttctcgatatccccgtacatcctcacaaaatctcatatccgtttcccaatcttctcctgtcgccgatcccttccttctcgatcctccctcatccgtcctccccccccctccccgaattttcacgctttgtccatcgtccgcccttcttcccctcattgtcgatttttatctttctatccgttatttttcagtccatg

SEQ ID NO: 117913 - DNA, 56 bp, Heterodera glycines
aaattgtacaattcagatcacaaaaaacaattatttcttgctaattattcgtcatg

SEQ ID NO: 117914 - DNA, 176 bp, Heterodera glycines
tttatgtacatacatacatatgtacatacattgctcttgcagtttaggccccacgtaattttatgacaataaaaaaaagtcaatcatttgaaattagtttagatcagtttttaaaatttcatccatttgacatctatttttgaaaatcagcagtttcttctttctgtttaataatg

SEQ ID NO: 117915 - DNA, 134 bp, Heterodera glycines
taatgataaattttagctctcgacatcgccgatttcgaaattcttatttagtgtcaagaaatttcttcattttttagtgcctcggttcgtgagtctctgagaattttcactaaagaagaatagaatttaaaatg

SEQ ID NO: 117916 - DNA, 421 bp, Heterodera glycines
tattttgaagtgttttcattgccaaaagaaattcttttttctgtcaaagtcagggctcggaccaaaactttttcaaaatcagaacatcaggcccaaaaaatcagattttgaggtcgaaaatcagaatattttgcaaaattgctttaaatcgacttggggaacaatttaatcaatttatatagcatcaaatttgtatttttcacctgaccaagtaagaaaaagttaaggcctcaaaaagtgagaatgttcactgattggacgcgtaaactggaatattgaccaaacttcttcttcctctgacttgacagctccctttctaacggctaatttaaatattcatttattaattatgtaaatttagataatacttttagcttttgcctatttttatttgttttttgattaccaattcaaaaaaatg

SEQ ID NO: 117917 - DNA, 266 bp, Heterodera glycines
aattgaaatgccatcggtaggcagccgactttcgtatggccaaaatggaatcaccgagaggagaagacagtcggagacatgacgacactgatggcacaaaccgggtgctgtcaggtgaacaaaaaactgatcaatttattgataaaccagaatataagattaaacaatgaactaattagttagcaacgaagctgagattttgggcccttttttgttgtccaaccttctaaatcagtcttaaggttttgccaaggttatctaatatg

SEQ ID NO: 117918 - DNA, 453 bp, Heterodera glycines
tgtcaaatatggacataaatttttcaaaattgaatgtaaaatttcttcaaatttattggttgaaattgcatatgagatacatttccaaattttttgactcggtaaggcgctttgacaaagacggctttcgttttggcaattagtcggtcaacattcggaaattggtctcgaattttttcggcaattatgtgcaatcattttaaaagaaaaaaaacataaaagctaaaatttattaatttttttagcgcaaaatcaacaacaaaagcgaaatgttcgcttttttgcttatttttgacataaatttattaatttttaagaaaatttaaatttattcaatattctcgagaaattttggcgaaaaaatgattttttgaaaaatttttcgggttttgggctcaaaaaggctaatttagctgctgggggccgttctaatagaggtttttttgaaaaatg

SEQ ID NO: 117919 - DNA, 657 bp, Heterodera glycines
ttatttttattctcaatcaagagccaattttttttaattctcactgtttcattcaaatttagaattttgcctgccattgtttattttacattgacgaaaatgccgacactttgatcaaatcggatggatttttgcaaattgaccaaaaaatgttgtgcgaaattttggaacgcgacgaattgcaaatccctgaagaaattcaatgtggaatgcagtaaattttttttaatttaaaaatgttacaaatttatttttaaataagtccgaatctttttttaatcactaaattgttttgaataaaaaaataaaattttctcttcaatttccttactattttctcttctctgactcgtcgctgctaccatttttagcggcgggcagagaagagaaaaatagtaaggaaatttgagagaaaaacttctctcaatttaacttgatatttctaaattgtgtttaaaagcggaaattatcgcatcgatttttttccataatgttccttttttcacttatttttattctcaatcaagagccaattttttttaatactttattttcattcaaatttagaattttgcctgccattgtttattttacattgacgaaaatgccgacactttgatcaaatcggatggatttttgcaaattgaccaaaaaatg

SEQ ID NO: 117920 - DNA, 180 bp, Heterodera glycines
ctattctggtcatttttgcgcactttgaacctgatcaaaaactgggttaaagagcctgtattttcagtcctttgtttttgtacaggaaatacagttacaggtcattcgggaatacagatacaggtacaggtctgaaggaccttatgaatatttagtttttttccagaaatcgaaaaaatg

SEQ ID NO: 117921 - DNA, 1003 bp, Heterodera glycines
tcaaaagcattctgaagatttcttttggttttgaatcattttattgccctcttagatgccctagcgaaaacacagctgaggctttgttccaacatgtcctattaaaagaagaattatattcgcttttctatcctttggatgatgtcataacactagaagtaactataatcccagatgtcgacaatagaccaagaaattaattttataaaaaacaaaattacgagaaattggaaaatttctggaaaaatacttaaacgatcaattaatctcgaaatttttgcaaataaactttttaaacgggtgaaaaatttctacatagcggcatttagtgcccctgaaatcgaaaatttatatttttcattcttagaaatgcttgaaaaaattcaaaaattaccagggcttattatgtatgaatatagaaaacagtccttagctatgcaaaaattagaaattggtatcaaagaacgaaatatatttaaatgtcaagaagcagagaatatgtcagataccaatttatcgaagataaataaattccaaaaacaagtgccaaattatcgatttgacatgaaaatgttatacaataaaatacgattaactgctattaagcatttatttaaacccgaaaaataaatttttttttagcccatatcgtacggaaagaaaaagagaaattttttattcattatttcggcatatctaataaaatcgcaactttttcttgcaaaaaaaaacgaaacattttcgttactaatagaatcgcatgatttctagtgtaatatttgagccttactgcacaaaagaccaaaaagttttgcaagtttgaaggtcatttactaatttaatttgctgaatttggactaaattaggattgcgtcagaattacaatgtaaaaaagtgactatttaagaaactcaaaattttcattaccgatataaaatttttacttctacccaatagcttttttaattttattttttagtaaaattctttcaattttattatg

SEQ ID NO: 117922 - DNA, 348 bp, Heterodera glycines
aaatttaattggccgaaaatgatggaattttgaatgaaaatccgaaaataaccttaaaaacagtaattgaggcacaaacaaaggtaaaggaattggccaaaattttctatattaaaaaccggaaagtgtccaaatgatgttctgaaatggaaaagagttgtttctgattattgcctaataaatggggccatttactttataaaaggcaaagaaaatatcgaaagacctaaattaataatccctcattcattacgacaaaagcttttcattattttccattcagaaggcaattttggagtcgtaaagacttggcacgaaattaaagagcgattttattgggtcgaaatg

SEQ ID NO: 117923 - DNA, 120 bp, Heterodera glycines
aaaagtgaatttaattaagtgttctattggttttgctgtttttatacttttcttattttttcaatgaaaagccataatttttaatgcgagaacagaaaacacaaccaatagaggccgatg

SEQ ID NO: 117924 - DNA, 804 bp, Heterodera glycines
  unsure (1)..(804): unsure at all n locations
catacacatttttgcncatttttcattcccccataaaaaaatctagctatattttaaaaatttctggcggcggcctcaatgataaaatgatatcaatttgtaaaaaaagaatctgaagtaattaacttttatactaaaaaatagcaaaacaccattctatttttgatgacctgaatataaaattaaattaataaattttatttaaatggcttttaaatatctttaaaaaagtaatattttgttatcagcagtaaaataataaaatcatggctcactaaccaaatcaataaaaaaataaataaaacttacaaaaaaaattttactgctcgcaacaaaaaagaaatattatttaaaaatgaaatcaaccaaagcgataataatgaagaaaataaagctatttatattttaattaaaatatatcgccagaaaggaggtcgaagaaaatcctctgtaaaacaagataaattaatacgaattatctttaaaagaaacagcattaataaagcatatagataataaaacttaattaatttaagctaatcacaaaacattagaactattttacaaataaaatattattttataaaatatacttcttaacctaaaggaacaatttatggaatattttattataaaaaatttaaaaaagaaatttccacaataaataaagatttaatgtaagataaaattaattaatcattaaggttttcgaactaaaaatattgtatcaaattaaattaataaataaaatgaagtgaaattcgttatgattaaatgtgctttcatgaataagaacaaaaaatg

SEQ ID NO: 117925 - DNA, 337 bp, Heterodera glycines
atgaaaggtaaattaaaaataccttctgattttgctatgaaaatcagaatttttccggttattaagtttgaaccttaataatcagaattattctgacatgaaaggtaaatcaaaaatacattctgattttgcagtgaaacccagaacttttccggttcttaagttgaaccttaataatcagaattattctgacatgaaaggtaaacccaaattattttgtaatgaaaaccagaattattccggttgttattttgcacctcaatgtcagaatattctgagtcatcagaatactactgaacatgaattgtaaatcaaaaatacattctgttttgctatg

SEQ ID NO: 117926 - DNA, 263 bp, Heterodera glycines
  unsure (1)..(263): unsure at all n locations
agttcggatactgaaaattntatacataagaccgaaaagtcaagtcggaaaaaatcgaatcaggtggattggggaattcaaaatttttgccggacggatttgtggattaatcgcgcaattaccaaaaaaatgcggaaaaaaatccacctctaattttccaaaaaatttaaatttataaggaaattttcaaattaaacaaatttttagagaaacgcgtgattttgcgggatcccagttcgtaatcccgcattttttgtaaaatg

SEQ ID NO: 117927 - DNA, 101 bp, Heterodera glycines
tttattaataataatatttgttttccagatcaaaatgcctatgtcaacatactatatgaatgtcgtgaacgacatcatagcgtcctgggttgcactccatg

SEQ ID NO: 117928 - DNA, 210 bp, Heterodera glycines
  unsure (1)..(210): unsure at all n locations
taaatgggaagcaagaattncggtctaatcaaacgatgtaaaatttctaaacttttttaaaacttaatgagtttttaagcaaatttttcgaatgcggagaaattggaatttgtgaaaaagtttgaaaaaaagaaaaaagaaaaaactcatggctttaaatatgacagaattaaacgaaaaaaattagaagtgaaaattgcgaatgaaatg

SEQ ID NO: 117929 - DNA, 976 bp, Heterodera glycines
tgatacaaatattttaaaagaaagttctatagcattagtattgtaatttagaagttaaattttataagaacacgtactgaattccaaacccgggtccgaattcgaacaagtcgaaagtagaaatttgcgaaattagggtttttgtttgaaaccggtttaaatacacggagacgaactgaaagccatcaatccttcaataagagatcattcacgccggttttgaaccaaaagcagggcttctatctgttctgatttatcagaaatgctctgatacgcaaattttgctcatttttggacaagaatccgtaaaaaaacttgaaaaaatttcaaaaaaactttcggcggcagcctattggcaccatcggactctaaaaatccattattttcttaaaaatagctcaaaaatcacaaaattggactatttttcgacaaaatcagttaacaaattgcactcaatttttttcccggcgcctatcggcaccgccggacccaccgtgtaattatattttcgtcagtaagcattttcgtcagtgaacgatttcgtcagtgattttcgtcagcgaataatttcgtcagtgaacattttcgtcagtgtactatttttatttattttgctgttttccatttttttcgtcagtgttccaattcgtcagtgaacattttcgtcagtggatgcataaaattaaaaatttttcatttttatcaacttctttaatacagtatttatcgctttttgcgtatggtaactctagataaaataagtgattatttgtactttaataaatgatttacataaaagaaattgtactttaaaactgttgaatattattagtaactcaaacttcttatctcgccatcgttcccatgcgttctcgagtgcctgcctatttgcatatttgtttagtccttatctagtttttgcaatgcataaaaatgaacgatatgaaaattcattcgtttactgcaaccaaaaatg

SEQ ID NO: 117930 - DNA, 155 bp, Heterodera glycines
gcttataaaatgggggtaatatggacaatttaaagggaatcaaaacatgaaaaatataaatatataaatttagacatatggaaaaagcccaagaaaaatatacaataaaaaatatacacaaatatatacaaaactaataaaaacagatacacatg

SEQ ID NO: 117931 - DNA, 76 bp, Heterodera glycines
ttcaacaaatttttctcgatccgcaacactagcacaaattcgcgcgcccacttcgtcaggggaacagcccaaaatg

SEQ ID NO: 117932 - DNA, 155 bp, Heterodera glycines
ggtaatttaaactgtttaaagggtttaatcactaacttttcctataatttcatggtgcaactgtgctgtttggtggtcggcaagtgtttccatccggcgttgaaaaaggcttctatttcgagcccgctgtgctcaccgatttggacgatgagatg

SEQ ID NO: 117933 - DNA, 107 bp, Heterodera glycines
atcttgattttcagtttggaaagaaagagcatttagtggtatcgaatatatcaagattttcaaattggttggttatgaaaaaatagacactgttaaaagtcaaaatg

SEQ ID NO: 117934 - DNA, 1003 bp, Heterodera glycines
gaataaagcgaaacatcaaattcaagaaattcgaacaaacaaaaggtaatttaccaagttctttaaaatgaaatgaaataaaaaagaaccagaaaaatgaaattccataaataaaaccatgcaaataacaaattaagaatatacacacccatcaaatatgtgaaaggggacggggcggtgccattttcatttttccactttctctcctttcaatgcgattgcacaccaaaaatgaatcgttgttaccccttcccccccccctcctttccactcgaatatttgtgagctgatggaaaagaccaaagatcacacgatggaaggccttcacctttccttccttttcttgtgctcatttttattctccaattccatcccatcaatctcaaaaaatatgggcccatacaacagcagtaccattccatgcatattcttttgcgacatgacataaataggaagagaattccctccaatttttgtaaaggaatggatggaaaaaaatgtgaactcttccataaacgacaatcaaaaatcaatcgcaggcaattaaagagtggtagaaaaggcaaaggaaacaattttaaatttgatagaatttaaaaaacactttttcaaaaaaacataatgccaattatcatatgttgtgaaatttgaaatttcacaatgcaaaactctgagtgcctaaagtataaatgccttatgaaaaggaaataatccggcaaaagtcttagtttcgattggattggaatctgcaaagttgcatatgtatagtcagtcctccgactacatatttcccgagtcgtgggactctctaggcctagcacaggattctcgagcagtacccggcgacagacgccgattcaaattatcaccttttgttgttttgctgataagaaaaagaaaatgaaaggatatgtatgtgtaggaagggaataggttctgctgtgtgtgactgtgtgctgctgctgctacctttttcattctttaattaaagtttcccaaaatg

SEQ ID NO: 117935 - DNA, 178 bp, Heterodera glycines
ccccccccccccccccccccaaaaaacttatttttgcaaatttcaaaaattttcttgaacaaatattcccacttttaaatggttagccgacaatttgcggactgataggggcccgaactgtcaaaaaataaaaaaaagttatgatgcatttccagattactcaattcctcccaaaatg

SEQ ID NO: 117936 - DNA, 149 bp, Heterodera glycines
tttcttctcagcgccatacaattcgatgtcgaatggacaagcggagcgctttgtcaacacctttaaaagggcatgtcgcaaactgaagaaggagggcgcgcaaaatgttgtgaacacatttttgacgtcgtacaggacaacgccaaatg

SEQ ID NO: 117937 - DNA, 162 bp, Heterodera glycines
gaccatccgttgccgaacaaaattcgttttcgtatcatttctattgggtaatttgaactttatgtattttaagttttatttattttaataattttcttcaggtacattgaccattccgtcattacatttctccgttcgaacaagcacatttgggacagaatg

SEQ ID NO: 117938 - DNA, 344 bp, Heterodera glycines
tattgagacctagaggtccctgcgtgcttgcatttttcactggcttcacttttcagcgtgttctttcctacgcagagaaacacgtaaagagtataaaaggactctgatttagtgcgtttgtcagttcactttgaccaaacaaatatatgttcgctccaattttttcattgttacagtttacgacctttttattttttttagtttttatataaaagaagctagcaccgttccctccccttcattcgctccatttgctgagaaacaatacaccctccccttctgtttcgtaacatatactttttttgctttagattatttagcaattatttcaaaaatactaaatg

SEQ ID NO: 117939 - DNA, 224 bp, Heterodera glycines
aatcgtgaaattctgtataataaataagaatcagagcttggagattgggacccccgcggggatttttacgagagttccggtcccgcacccgtttttttttggtgaacgggattgtaacggcagtgggatttttatgggattcccgatcgggactcccgtcccagaaaagttttaactcttgctcccgcctccggaaaattttttaccgggctctaataaaaatg

SEQ ID NO: 117940 - DNA, 381 bp, Heterodera glycines
cttcgacttggtagggtgagcaagaagaaattggggattttgtttattgcacagaaaaataatttacaattaatgtggtgaagggagctttttgtattgggtgaaaaactgttgctgaacgggggaaattcgacgagaaatgagaagaatgaattattgctcgaggaaggtatgatttgtgggtgggatttgtcgggagttccttaactgctaattagtgtaagggtgggcgcctttttcgtttggttaatggaaaggcggtaagcggaaacttcccataactttcgtctaagtaaccaaattaaacattctagatatcattcgatacccctaagggttctctctattacttcagggtaattttcagaaaatttgatcatg

SEQ ID NO: 117941 - DNA, 842 bp, Heterodera glycines
gccggcgttcgcgttcatcattttgtaatgacataataaaatgttggggatattatgtgaacattaatctctatcgcttagcaaacccgtgagagcatttccgatatcccctcactttcctttgatttaataatggctttgttgtacattttacaacaagggctcagtgatcaatcgatcggaatgttcgcgtgttgtgtatttagcagggatggcattccgaggcctaaaaaattttccgggaatcggattccaaatcccctaaattttcggaaatcggaattccgtgccatccctggtatttagcatgaagcttttgcataaatttttttaatggaaaacggagaccagaagagcttttgaaaggagaagtacatagcaattcataacaaaatttaatgcgtgatacaattttttggctctatcgcacttttttaggcttccaatcgaattttaggcatccaatcaatgaccaacctcagtttcttaggccataacttttttctttcttggtcaatgcctacattcttggtttcaaaccaaagcttaaagtcccgaaaacataaatttaaaaaaagaaagcaaaaaatatatttattaggtttcaaaatttttggcaatttttttatgagtaacaaggttaaaggagagggagggggctggggcgtgtttgagtatcgatcaattctttttcgcaatgcgaaaacccaatttttagcccttcttcgtttctctccattttccatctttcaaaagacaaacaattcattaaaagctcttcttcagcagtcgctttggccaaaaaaaagagataaaacaattccatcaatataattaaaatg

SEQ ID NO: 117942 - DNA, 309 bp, Heterodera glycines
tcgatgccacgcgttgttgcgcaatgcaagggcggcggatgcgaatgttgcggcggatgtggttgcgcggaatgcggcggatgccaacaattacagttaggcggtacgtacgtacaaattggcaccaattaattagtggttctctcgactcaggatttatttcctatctgatttaagccttttgaaattctttttcccaaagacattgttttctctacggcacaaaatgcttcttcaaacggcactcaaagcgatacacaaaacagcacaaatggtgccgttaaattgaatgagctagtgccaaaaatg

SEQ ID NO: 117943 - DNA, 328 bp, Heterodera glycines
tttaaatcttttaaactcaaatgtgttttccttctattattgaagagtaagtccacaatcagcaggaagaacttttactaataatttaatgaaatttctcaaattaaaaaaaaaattctcaaattaattcgactatagaagaaatgcacattcatataaacattcaataataaatcaatatatctatctatttcatttctctctccatttctaatatttccattctaatattgctttccaagtgatttcgcatctaaaaagcaacagatatattcagcaattattcccctttttacacttatattattttaaaatctaactcaaaatg

SEQ ID NO: 117944 - DNA, 1003 bp, Heterodera glycines
ttgtgcgggcgaaaatgataaagaatgagttttttggaatttttatgcaaaaataccattggtttttccaatttttagcacatattttcgcacatattttggcattttttagcacatattttattacatatttcaggatttttagcacataaaaatcccagccctagtaattacaatatacaatatataacgtatttgaaaatgcgccatcctttttcttaattctttcggatatgtataacaataccatatgtaaattttttcaaacctttcccaatgaaaaatatttttgttatataaattccggactttacatgtacaaatttattgcacacatcctgctgaaactgctcgcaaatgcggcggtggtgtgaaagggtcaaaagcgcatacaaaatttgcacaacccataaaaccgaaatgtgtttgaaatggggctgccgtcgccgccgccgcgacgtccaaatggaaatttaagtgcgttttgtgagtgcgcggcgcatcccccgctacttttggcgctccgccgcggtgtccggacacgcccaaggggcggtggcgggccgaaaaagtgggacgacggacggacgaacggacggaaagcgcagcaaattaggcggcaaagtttatagccgacttgcataaaaagcgacaatccatcaagccgatgaggggtttaattttttatcgaaatgaacaacgataatcacccaataaaagtgggacggatgccgaaaacgaatgggatggaagcgaatttaagggctgtctgatctgagcgcatcagtctatgtgggcactgtcctgtctgtcatcaaaatacaaaattcaaaactgcatcgaatttctaattcaaaaatgccgttaatttcggcatggattttttaccaacaatttatgtacaaattttatttttgaattttgactaaatttcttctttttgttattttcaaataatttgttaatccgatatcccatcattaaaagcacacttttgaaaatg

SEQ ID NO: 117945 - DNA, 655 bp, Heterodera glycines
tttatagacaataaaaaatatttttattttttaaatcctttatttggtgcgctaacttcctaaagattaagtcgcgaattttagggaggaaaacccaaaaataggtgcagaaatttttaaaaatttcgattaagggtcgaactgaaattatactgttgtttataaaagataaataaaaggtttttcaagagcttaaaaatgccgattaataaaatttcttttatgttcaaataacaaagttaattagattttaatttcgcccctatttcggcattttggtgcatttcttccctattttcgcccacattcgcctctgttttggtattttcgactctgtttaggcctctaaattggaatttttcgcccttaaaaatccgtgtcttaatattgtttattgtttattcataaaaataaaattcatcacaagggcgaaaaccacttactctgacgactattcagataaatgtgtcgtagagtaagtgacaaaaatatatggatgatcacaggaaattaaaaagacaaaatagtgaaataaataaaataaattgaggtcaaaagtcaaatgaggtcgaagcataaaaattacaccaaaaagtcccaccataacaatttttccgtgattttcctcacgcaaaacctgttcgataaatcaatg

SEQ ID NO: 117946 - DNA, 163 bp, Heterodera glycines
  unsure (1)..(163): unsure at all n locations
tggtcttttttgggatttgacgctgtattttgacttttcagaaatgtaaaaaatctcaacngagaaaatggcagcgcggcacttcaaaaaagaaaacaccgaaaagagggattgcctaagggggcggcggaaggcgacggggaggggacgacggaacgtnatg

SEQ ID NO: 117947 - DNA, 623 bp, Heterodera glycines
gagtttgaccatagacaaaattaaattcactatagaaagatgcagaattcttttctctatcgatatgcaaaatttggtgaggatttaacttgcaggaaaaaagttaaacgtcacgaagtgaattcggtttttctctattaacagagataaagaaatagtacgccaaaataagagatgtttttttctctgcactctctctttattgacacatgtctcgttttttgactcggtgtgtttacccatggcaaaatgactgggctttgacggaattgaccgggaccgggcttccttcgggatgactaggtctcggtggttttccaaaaaaaaagggaccgagctgccccgtaaaagcccccaggctcgtccgctcaatattaaaaactgcgtttgctcttgcctctggtgctaggtttatgtagcggcatattgaacaaaataacttttttttaaagaatgaaataaattccaagacggaagagattgtttttcattcattaataattgggagcaacacacacccaaaaaaaaaaagtttttactttattttcctaattttaatttctttttttttgttagatacacaaatcaaaaattagcatttgccatttataccgagcgaaatg

SEQ ID NO: 117948 - DNA, 702 bp, Heterodera glycines
aataaatcaattccaaaaattcaatattattgataaaaaattttgttttgttattttttctttaataaacgtattgccgctcaaaatttgtgcattaaaaatatttttgtgagttttaatttaattttcgaattactcccgctcccgcccgggactcccgttaaaaatggacgggatttgaacgtgagcgggatttttacgggattcccgttcgggactccagtcccgtaaaattttgaactcctgatcccgctcccggaaattttttttaccggactctaaacaaaataaataaaatatttgctaaataaaatttaaaatttactaccaaagtttaagggtgactaaaatgaaaaaataaaaacaacttcataattttcgcttcattttaataatttgtttttgtattggatgttgggcccattaattttttgtaaataaaaaattttacattaatcaattaaaatgataaactatgaattaattaatatattgaaaaacaagaggaatacagaacttttattaaaaattataaaaataaattttgtaaaataaaacaaattattttaacaataaatttataacatttcgaaagaaaaaatcatacgcattctttctaataatatttatcaaataaaacaaagtaacattgaaaacattcattttatatctttaaaagaaaaagttataattgcgataatg

SEQ ID NO: 117949 - DNA, 80 bp, Heterodera glycines
taatttacactaattagctaattagagaatgagtctagcaaatcaaaaattgtgaattttacccaggggaaagcagaatg
